United States Patent Application Publication US 2003/0194704 A1 - sequence listing, part 6

SEQ ID NO: 17369 - DNA, 141 bp, Homo sapiens
  MAP TO AL136230.3; EXPRESSED IN BONE MARROW, SIGNAL = 2.9; EXPRESSED IN PLACENTA, SIGNAL = 2.8; EXPRESSED IN HELA, SIGNAL = 1.7; EXPRESSED IN ADULT LIVER, SIGNAL = 3.1; EXPRESSED IN HEART, SIGNAL = 2.3; EXPRESSED IN LUNG, SIGNAL = 3.4; EXPRESSED IN FETAL LIVER, SIGNAL = 2.6; EST_HUMAN HIT: AV731886.1, EVALUE 5.00e-08; SWISSPROT HIT: P38796, EVALUE 5.20e-01; NT HIT: gi14861872, EVALUE 3.00e-05
tcatatgggtggaatcatgctgtatttgtctctttgcgactggctaattttacttagcacaaaatcctcaaggttgttgagcatgtcctcaacatgcttatccatgttgtagcatgtgtccaaatcatcttccttataaga

SEQ ID NO: 17370 - DNA, 308 bp, Homo sapiens
  MAP TO AL132765.16; EXPRESSED IN BONE MARROW, SIGNAL = 3.3; EXPRESSED IN ADULT LIVER, SIGNAL = 3.6; EXPRESSED IN HELA, SIGNAL = 9.9; NT HIT: gi14786597, EVALUE 0.00e+00; EST_HUMAN HIT: AL553650.1, EVALUE 0.00e+00; SWISSPROT HIT: P18282, EVALUE 6.00e-55
gcctcaggagtgcaagtagctgatgaagtatgtcgcattttttatgacatgaaagttcgtaaatgctccacaccagaagaaatcaagaaaagaaagaaggctgtcattttttgtctcagtgcagacaaaaagtgcatcattgtagaagaaggcaaagagatcttggttggagatgttggtgtaaccataactgatcctttcaagcattttgtgggaatgcttcctgaaaaagattgtcgctatgctttgtatgatgcaagctttgaaacaaaagaatccagaaaagaagagttgatgttttttttgtg

SEQ ID NO: 17371 - DNA, 210 bp, Homo sapiens
  MAP TO AL138499.1; EXPRESSED IN HELA, SIGNAL = 0.71; EXPRESSED IN PLACENTA, SIGNAL = 0.72; EXPRESSED IN BONE MARROW, SIGNAL = 0.62; EXPRESSED IN ADULT LIVER, SIGNAL = 1.5; NT HIT: gi4826813, EVALUE 5.00e-45; SWISSPROT HIT: Q45774, EVALUE 1.40e+00; EST_HUMAN HIT: BF968830.1, EVALUE 8.00e-45
gaaggaattttacagaagctacagagaagtgttgagcaagaagaaaataaatggaaagttaaggtcgatgaatcacacaagactattaaacaggtatttacaaaagaaaagcttagagcagtggttctcgatgtgtggggcttgaaccagcagcatcagcatcaccatgcacattcttgggccccaacccagctaccaaatccaaaacat

SEQ ID NO: 17372 - DNA, 231 bp, Homo sapiens
  MAP TO AL133263.2; EXPRESSED IN PLACENTA, SIGNAL =   1; EXPRESSED IN BONE MARROW, SIGNAL = 0.83; EXPRESSED IN LUNG, SIGNAL = 0.9; EXPRESSED IN ADULT LIVER, SIGNAL = 0.99; EXPRESSED IN HELA, SIGNAL = 0.59; NT HIT: gi14783020, EVALUE 1.00e-127; SWISSPROT HIT: Q9Y603, EVALUE 6.00e-43; EST_HUMAN HIT: BG009509.1, EVALUE 1.20e+00
aggtgactggcccctctcagatggacacccgaaggggccacctgctgcagccaccagacccagggcttaccagcaacttcggccacctggatgaccctggcctggcaaggtggacccctggcaaggaggagtccctcaacttatgtcactgtgcagagctcggctgcaggacccagggggtctgttccttccccgcgatgccgcaggcccccattgacggcaggatcgctg

SEQ ID NO: 17373 - DNA, 247 bp, Homo sapiens
  MAP TO CHR22_172.0; EXPRESSED IN LUNG, SIGNAL = 0.52; EXPRESSED IN ADULT LIVER, SIGNAL = 0.59; EXPRESSED IN BONE MARROW, SIGNAL = 1.5; EXPRESSED IN HELA, SIGNAL = 1.8; EXPRESSED IN FETAL LIVER, SIGNAL = 1.4; NT HIT: gi14778264, EVALUE 0.00e+00; SWISSPROT HIT: P16258, EVALUE 8.00e-33; EST_HUMAN HIT: BI907573.1, EVALUE 1.00e-96
gtgaacttcaatgagcccctgtccatgctccagcggctgacagaggacctggagtaccaccacctgctggacaaggcagtgcactgcaccagctcagtggagcagatgtgcctggtggccgccttctctgtgtcctcctactccaccacagtgcaccgcatcgccaagcccttcaaccccatgctgggggagaccttcgagctggaccgcctcgacgacatgggcctgcgctccctctgtgagcagg

SEQ ID NO: 17374 - DNA, 245 bp, Homo sapiens
  MAP TO AC018432.4; EXPRESSED IN HELA, SIGNAL = 0.51; EXPRESSED IN ADULT LIVER, SIGNAL =   1; EXPRESSED IN FETAL LIVER, SIGNAL = 0.73; EXPRESSED IN BONE MARROW, SIGNAL = 0.69; NT HIT: gi14754137, EVALUE 0.00e+00; SWISSPROT HIT: P29144, EVALUE 6.00e-42; EST_HUMAN HIT: AU120790.1, EVALUE 0.00e+00
ttatcatcaggtaaggaagtaacaaagaatggctggttatatttgggtggtaatgtcaaattgcttgatttcttcttccctagaagtgcaaaactatgattttcatgaatatctaagctcaaggtattagacaatctatgagaaacaataaatggaaggtctttaaggcgttccaaatcactgatttgctcatggcgaatctgtagtcgaattgtataatctcctttctccagtttcaaagaata

SEQ ID NO: 17375 - DNA, 122 bp, Homo sapiens
  MAP TO AC013816.3; EXPRESSED IN FETAL LIVER, SIGNAL = 1.1; EXPRESSED IN BONE MARROW, SIGNAL = 1.2; EXPRESSED IN PLACENTA, SIGNAL = 1.3; EXPRESSED IN HELA, SIGNAL = 0.79; EXPRESSED IN ADULT LIVER, SIGNAL = 1.4; NT HIT: AY054473.1, EVALUE 4.00e-01
aaaatggctggagcatagtcataggcactacagaagcaaggataggagatctgagcagagaggcagcatatagtattcaagaaaatagcaagacaggaccgattccaagaaccaggagaaag

SEQ ID NO: 17376 - DNA, 203 bp, Homo sapiens
  MAP TO AC015937.3; EXPRESSED IN HELA, SIGNAL = 2.4; EXPRESSED IN HEART, SIGNAL = 1.2; EXPRESSED IN PLACENTA, SIGNAL = 1.3; EXPRESSED IN BONE MARROW, SIGNAL = 1.1; SWISSPROT HIT: Q14168, EVALUE 4.00e-34; NT HIT: gi4885492, EVALUE 1.00e-110; EST_HUMAN HIT: BF306083.1, EVALUE 1.00e-110
ctgggggttgacatccagcacgcacaccttcccagcagcgaccacgccccggatggagtcaatacgtgtgccatacaggttgccctcgtattcgccatgctccaggtagcgcccagcacggacgtcagcctccatctccccacgggacacaaagctgtaaccctgaccttcccgctctgagtctttcggccgccgggaggtgt

SEQ ID NO: 17377 - DNA, 336 bp, Homo sapiens
  MAP TO CHR22_234.0; EXPRESSED IN HELA, SIGNAL =  34; EXPRESSED IN FETAL LIVER, SIGNAL =   7; NT HIT: AF058913.1, EVALUE 1.20e+00; EST_HUMAN HIT: BF797797.1, EVALUE 0.00e+00; SWISSPROT HIT: P55281, EVALUE 1.50e+00
cgtttccaagttatcgatcttttttaccatagacgggtattgcggccgtttcccttttccgtcgtgaggaagagcagagccgtgacatccctgtgagcatctttcagggagtgtgcaggcctttctgtgggctgtgctccccatgattgggcggaatcgtagagcacgtatgtcaacgtcgctgggtaacttccacaggttttccaccgtgctagtaccgtctccttctcccaccagcaccgcgtctgcgctccttcctcccacgtcctgtccggcgctggacgttgtctctgtaaggcttgtctctccttccgtgctgtctccgacccgtggcac

SEQ ID NO: 17378 - DNA, 88 bp, Homo sapiens
  MAP TO CHR21_12.0; EXPRESSED IN ADULT LIVER, SIGNAL = 5.3; EXPRESSED IN HELA, SIGNAL =   5; EXPRESSED IN FETAL LIVER, SIGNAL = 3.6; NT HIT: gi15920163, EVALUE 2.70e-01; EST_HUMAN HIT: BG778218.1, EVALUE 4.00e-01
cttgaagtgatttatgttcacacaaagaccacggggatcccacttactgattccatcatacgacaagctctcataactctctatttct

SEQ ID NO: 17379 - DNA, 65 bp, Homo sapiens
  MAP TO CHR22_32.0; EXPRESSED IN FETAL LIVER, SIGNAL = 2.9; EXPRESSED IN BONE MARROW, SIGNAL = 2.9; EXPRESSED IN LUNG, SIGNAL = 3.5; EXPRESSED IN HELA, SIGNAL = 2.8; EXPRESSED IN HEART, SIGNAL = 2.9; EXPRESSED IN PLACENTA, SIGNAL = 3.4; EST_HUMAN HIT: AL157635.1, EVALUE 1.10e+00; NT HIT: U43887.1, EVALUE 7.30e-01
gtcctcagtgtttagggttacgccattgtttacgccactactatcattctcatcatcattattgt

SEQ ID NO: 17380 - DNA, 142 bp, Homo sapiens
  MAP TO CHR21_17.0; EXPRESSED IN HELA, SIGNAL = 3.8; EXPRESSED IN FETAL LIVER, SIGNAL = 1.9; EXPRESSED IN BONE MARROW, SIGNAL = 1.8; EXPRESSED IN PLACENTA, SIGNAL =   1; EXPRESSED IN ADULT LIVER, SIGNAL =   2; SWISSPROT HIT: P32323, EVALUE 5.90e+00; EST_HUMAN HIT: BF972505.1, EVALUE 2.80e+00
tgatgctgatctgagaagaccgcctgaacacactggcctgaggattgtgctaaagaggaatttcttgtttcctctaccaatcctacttcttataaacttgttcttagagaattatgacaaagaagacagacaagcacaaaaa

SEQ ID NO: 17381 - DNA, 193 bp, Homo sapiens
  MAP TO AL138842.2; EXPRESSED IN HELA, SIGNAL =  13; EXPRESSED IN FETAL LIVER, SIGNAL = 3.7; EXPRESSED IN LUNG, SIGNAL = 6.3; EXPRESSED IN BONE MARROW, SIGNAL = 4.3; NT HIT: gi16162208, EVALUE 2.00e-93; SWISSPROT HIT: O35177, EVALUE 1.10e+00; EST_HUMAN HIT: BF926160.1, EVALUE 1.00e-102
gctcagcagggagctgctggatgagaaagagcctgaagtcttgcaggactcactggatagatgttattcgactccttcaggttatcttgaactgcctgacttaggccagccctacagcagtgctgtttactcattggaggaacagtaccttggcttggctcttgacgtggacagtgagtaccttactatgaag

SEQ ID NO: 17382 - DNA, 391 bp, Homo sapiens
  MAP TO CHR22_192.0; EXPRESSED IN HELA, SIGNAL = 4.7; EXPRESSED IN LUNG, SIGNAL = 4.5; EXPRESSED IN FETAL LIVER, SIGNAL = 2.8; EXPRESSED IN PLACENTA, SIGNAL = 1.5; EXPRESSED IN ADULT LIVER, SIGNAL = 3.4; NT HIT: gi14743624, EVALUE 3.00e-45; SWISSPROT HIT: P29341, EVALUE 1.00e-35; EST_HUMAN HIT: AW771080.1, EVALUE 4.00e-45
gctatacctttgtcaaccttagtatagagaggctctggagattcaagcatatgaaggagttctaaattaccaatctgcaacaacttgccaatgattttaccagcacgactagggcatggcttgaagaagaggaaacagccattcactcatttccttttgcttttgaggaggagcagatgccatcatggaagtcaaaggttcttgaccttctacatgaacagtaggctgctgcatggtaatctggggctgtgcatgaaaatgccattgaggattgtgagcttccatagcatatttatactgtgaaatggtacaaacagcaggagtatctgtagtagccatagcggcaactgcaggatgtgctcctattttctgtgtcgatgtgttacaacag

SEQ ID NO: 17383 - DNA, 179 bp, Homo sapiens
  MAP TO CHR22_171.0; EXPRESSED IN BONE MARROW, SIGNAL = 2.5; EXPRESSED IN HELA, SIGNAL = 1.6; EXPRESSED IN PLACENTA, SIGNAL = 2.7; EXPRESSED IN LUNG, SIGNAL = 3.1; EXPRESSED IN FETAL LIVER, SIGNAL = 2.4; NT HIT: gi14779756, EVALUE 2.00e-96; SWISSPROT HIT: Q92523, EVALUE 1.00e-31; EST_HUMAN HIT: BG717093.1, EVALUE 3.00e-96
agcccagatcctggtcaagttgctggtcttgccatgcatctcaaacatccacccatggtagcagagaagcagcttcagggtttggcggaagaagaagatgcccgtcacccagacgcccgtggagaagatggccatgctgagaagtgcccgggtctgcggggtctggtaggggccacacc

SEQ ID NO: 17384 - DNA, 170 bp, Homo sapiens
  MAP TO CHR21_52.0; EXPRESSED IN HELA, SIGNAL = 0.62; SWISSPROT HIT: P11845, EVALUE 4.80e-02; EST_HUMAN HIT: BI459936.1, EVALUE 6.00e-82; NT HIT: AJ229041.1, EVALUE 4.00e-82
caccctgagccaagagccggaagtcccggcattggcggcctggacagcctcgcaccggccaatcaaggagaacctcaagaacaacttcctctatgacttcctctacggcggtgtcggcctaacagctccacgggagtgtggacgaggagctgagcaaaaaaattccagaa

SEQ ID NO: 17385 - DNA, 354 bp, Homo sapiens
  MAP TO AL137013.2; EXPRESSED IN ADULT LIVER, SIGNAL =   9; EXPRESSED IN HELA, SIGNAL =  21; NT HIT: gi14756258, EVALUE 0.00e+00; SWISSPROT HIT: P46778, EVALUE 3.00e-62; EST_HUMAN HIT: AV758069.1, EVALUE 0.00e+00
atgacgaacacaaagggaaagaggagaggcacccaatatatgttctctaggccttttagaaaacatggagttgttcctttggccacgtatatgcaaatctataagaaaggtgatattgtagacatcaagggaatgggtactgttcaaaaaggaatgccccacaagtgttaccatggcaaaactggaagagtctacaatgttacccagcatactgttggcattgttgtaaacaaacaagttaagggcaagattcttgccaagagaattaatgtgcgtattgagcacattaagcactctaagagccgagatagcttcctgaaacgcatgaatgaaaatgatcagagaaagaaataa

SEQ ID NO: 17386 - DNA, 117 bp, Homo sapiens
  MAP TO CHR22_76.0; EXPRESSED IN PLACENTA, SIGNAL = 0.65; EXPRESSED IN LUNG, SIGNAL = 0.71; EXPRESSED IN HELA, SIGNAL = 4.9; EXPRESSED IN FETAL LIVER, SIGNAL = 0.66; NT HIT: gi14777812, EVALUE 1.00e-59; SWISSPROT HIT: P53814, EVALUE 1.00e-07; EST_HUMAN HIT: BE737493.1, EVALUE 2.00e-59
cttatcctggctgttcagttcttgatatggaatgtgggcagggagatatgtatgcaggagggcacagaaggccagcccatcattccagctgctgctgaagtttgtaatgtcaatatt

SEQ ID NO: 17387 - DNA, 137 bp, Homo sapiens
  MAP TO AL135786.2; EXPRESSED IN FETAL LIVER, SIGNAL = 0.67; EXPRESSED IN PLACENTA, SIGNAL = 0.57; EXPRESSED IN HELA, SIGNAL = 0.5; EXPRESSED IN LUNG, SIGNAL = 0.58; EXPRESSED IN ADULT LIVER, SIGNAL = 0.68; SWISSPROT HIT: P25539, EVALUE 2.00e+00; NT HIT: AF106656.1, EVALUE 1.20e-01; EST_HUMAN HIT: T48935.1, EVALUE 1.70e-01
ctggctcctccataccctgctcttcctcgtccgtcactgccctgtgctctgagtctgaccctccacactgcatttcccagattcccttgccctctggcttctgatggggatcagccagtgtggttcccagcaggagt

SEQ ID NO: 17388 - DNA, 126 bp, Homo sapiens
  MAP TO CHR22_149.0; EXPRESSED IN ADULT LIVER, SIGNAL = 0.29; EXPRESSED IN PLACENTA, SIGNAL = 0.33; EXPRESSED IN HELA, SIGNAL = 0.52; EST_HUMAN HIT: AA077787.1, EVALUE 6.20e-01; SWISSPROT HIT: P30373, EVALUE 4.60e+00; NT HIT: AJ277738.1, EVALUE 4.20e-01
cgtgggctcctggaattttgttgttggctgggtcatggtcagtgtgagaagcagggcaggttccctgttggctgtcaaaagagtcagaccgtagatgtgtttccctttggggactttgtccaggag

SEQ ID NO: 17389 - DNA, 252 bp, Homo sapiens
  MAP TO CHR22_86.0; EXPRESSED IN HELA, SIGNAL = 0.65; EST_HUMAN HIT: AA703902.1, EVALUE 7.00e-21; SWISSPROT HIT: O43570, EVALUE 4.00e-06; NT HIT: gi13385333, EVALUE 2.30e-01
tcaaaacggggtgggagaggggcagcgcctgcgggaggagccaggcaaggcccggggaggggtgtggggggcgagggggaacggtggctccacctgcacccaccggatgggtatggggtcctcgaagacggtccagagcaccgtgggctcgcagtcaggcggggtcagtgacccagcgaagcgacagtagctcgaggtgttgggccgcatcgacgccagcaggaaggtggacctcagattcactgagagccc

SEQ ID NO: 17390 - DNA, 88 bp, Homo sapiens
  MAP TO AL137251.2; EXPRESSED IN HELA, SIGNAL = 0.76; EXPRESSED IN FETAL LIVER, SIGNAL = 0.75; EXPRESSED IN BONE MARROW, SIGNAL = 0.9; EXPRESSED IN PLACENTA, SIGNAL = 0.89; EXPRESSED IN LUNG, SIGNAL =   1; EXPRESSED IN ADULT LIVER, SIGNAL =   1; NT HIT: AF223391.1, EVALUE 3.00e-10; EST_HUMAN HIT: AA969611.1, EVALUE 3.00e-08; SWISSPROT HIT: P56746, EVALUE 3.60e+00
atgaatgtaccaggaaagctgagagaatccacagacacattgatggaagtggattgctcctgcaggccccaggagacgctgaaaaact

SEQ ID NO: 17391 - DNA, 240 bp, Homo sapiens
  MAP TO CHR22_180.0; EXPRESSED IN BONE MARROW, SIGNAL = 0.88; EXPRESSED IN HELA, SIGNAL = 2.1; EXPRESSED IN LUNG, SIGNAL = 1.2; EXPRESSED IN ADULT LIVER, SIGNAL = 1.4; EXPRESSED IN FETAL LIVER, SIGNAL = 0.99; NT HIT: gi7656903, EVALUE 0.00e+00; EST_HUMAN HIT: BF000525.1, EVALUE 0.00e+00; SWISSPROT HIT: Q07960, EVALUE 5.00e-08
tgtcccgggagagcatcttcaacaaaatgaacagctctaacctggcctgtgtcttcgggctgaatttgatctggccatcccagggggtctcctccctgagtgcccttgtgcccctgaacatgttcactgaactgctgatcgagtactatgaaaagatcttcagcaccccggaggcacctggggagcacggcctggcaccatgggaacaggggagcagggcagcccctttgcaggaggctg

SEQ ID NO: 17392 - DNA, 136 bp, Homo sapiens
  MAP TO CHR22_154.0; EXPRESSED IN HELA, SIGNAL = 1.2; NT HIT: S57565.1, EVALUE 4.60e-01; EST_HUMAN HIT: BF171318.1, EVALUE 2.00e-13
tgggaggcattcctgctatccaggtgggaaaggaaggtggccaagaccaagaggtagagaggggagagatgagtgcacttgaagtcatttttggaatagagctgccaggacttgttgatgaattggacattggatg

SEQ ID NO: 17393 - DNA, 243 bp, Homo sapiens
  MAP TO CHR22_163.0; EXPRESSED IN HELA, SIGNAL = 0.81; EXPRESSED IN ADULT LIVER, SIGNAL = 0.97; EXPRESSED IN BONE MARROW, SIGNAL = 0.93; EXPRESSED IN LUNG, SIGNAL = 0.93; SWISSPROT HIT: P42729, EVALUE 4.00e+00; EST_HUMAN HIT: BF212287.1, EVALUE 8.20e-02
caggagccgaactctgcaaggatggaagcccccacactttcgtggtacgcaggggatcgaagcccagggagaaaggccctgagaatacaaaagtgagcatatggagagccctagaggaggggtcagctgaggctgtggctgcttttgccctcagggaacgtgcccttcggggcacagctggatgccaagagaatctggccgtgtcctcggtggaaggacattgctggaggatggaggaataag

SEQ ID NO: 17394 - DNA, 232 bp, Homo sapiens
  MAP TO CHR22_145.0; EXPRESSED IN HELA, SIGNAL = 1.1; EXPRESSED IN ADULT LIVER, SIGNAL = 0.61; NT HIT: gi14778388, EVALUE 1.00e-128; SWISSPROT HIT: Q10690, EVALUE 6.00e-03; EST_HUMAN HIT: Z78408.1, EVALUE 6.00e-92
gcctcagaagccacaggaacatggcctaggcatggctcagccagcagccccctccctgacgcggcccttcctggcagaggccccgacagcactggtcccacacagccccctgcctggggccctgtcaagcgcccctggcccgaagcagcccccgacggcaagcacaggcccggagctgctgctgctgcctctttcctccttcatgccctgcggggcggctgcaccagccagg

SEQ ID NO: 17395 - DNA, 149 bp, Homo sapiens
  MAP TO CHR22_148.0; EXPRESSED IN HELA, SIGNAL = 3.8; SWISSPROT HIT: Q9Y493, EVALUE 5.10e-01; EST_HUMAN HIT: BF692981.1, EVALUE 7.50e-01
cgtctctggagaccttcctgcctctctgatggagcacgttggtggaacagtggaccctgttgtctctgatgcagacacagtctcccacttattgaatccaccatccacctcttgccattcacaggagggctctgggtcactggagagtg

SEQ ID NO: 17396 - DNA, 450 bp, Homo sapiens
  MAP TO CHR22_153.0; EXPRESSED IN BONE MARROW, SIGNAL = 0.84; EXPRESSED IN HELA, SIGNAL = 0.53; EXPRESSED IN FETAL LIVER, SIGNAL =   1; EXPRESSED IN ADULT LIVER, SIGNAL = 0.72; SWISSPROT HIT: P29951, EVALUE 1.30e+00; EST_HUMAN HIT: BI085843.1, EVALUE 9.80e+00; NT HIT: U62749.1, EVALUE 2.70e-02
ggaagccctggagaatgtggtgcgctcattcctgccattccatccagggaacctgcgcggctgcgctcagcatagttgggcacagagaatgcaagggagtgcctgaggcatctctggccccacggcccaggaagtcctattggttcaggaccttgaagctgcaggaccagccccgggggtgcagtggccactctgccttctcaaacatccacaaatcttcgtctagtctctggatgggggaacttccgtctctttatagcctgcaggttcagcgtttaaattgtgagctggggatgaagaaaaggagtatcctcttacttcctcactctagtgtggcagaggggagcagggtgcctctgctgacaggcaggctctctgtgaaatggacgaactgggaggaggcggccaggagcagggccagctgctgccatctgatcttgctcaaagact

SEQ ID NO: 17397 - DNA, 304 bp, Homo sapiens
  MAP TO CHR22_194.0; EXPRESSED IN LUNG, SIGNAL = 0.88; EXPRESSED IN PLACENTA, SIGNAL = 0.91; EXPRESSED IN ADULT LIVER, SIGNAL = 0.92; EXPRESSED IN HELA, SIGNAL = 0.77; EXPRESSED IN FETAL LIVER, SIGNAL = 0.86; NT HIT: AF288742.1, EVALUE 0.00e+00; SWISSPROT HIT: P04258, EVALUE 7.10e-01
ggttatgcctgtgggcagctggacagtggagttgtgttcaaaggcctgggcaaataccttgtgaccagatgcctgcaggcctgtggcagcagaactaagggagcccagctccccggggccctgcctgttgccttcttcctgcatggtggccaggtgtctgcaggtggccagacacaggtgcaccagccacggcagcggggtcagaagatgagagggtctcagaggtgaccccgatttcctggaatcaccgtcaggcccctggccatccccatttcccgcgtgccccttagctctcaagggcatc

SEQ ID NO: 17398 - DNA, 192 bp, Homo sapiens
  MAP TO CHR22_181.0; EXPRESSED IN HELA, SIGNAL = 0.69; EXPRESSED IN PLACENTA, SIGNAL = 0.93; EXPRESSED IN LUNG, SIGNAL = 0.76; SWISSPROT HIT: O14994, EVALUE 6.00e-27; EST_HUMAN HIT: BF948386.1, EVALUE 1.00e-74; NT HIT: gi4507332, EVALUE 3.00e-86
taccacccagggcttgctgcagaagttgtagacggagtagagagagttgacagcaggcagccctccatactgcaggccgatgaccaggctgcggtagtcttcccccagggccatgctgtaggcatgctggcggaccaggatgaagtctggcttgaaggatctgctgagaaagccaacagcagtgttaccaca

SEQ ID NO: 17399 - DNA, 354 bp, Homo sapiens
  MAP TO CHR22_114.0; EXPRESSED IN HELA, SIGNAL = 1.1; EXPRESSED IN FETAL LIVER, SIGNAL = 1.4; EXPRESSED IN BONE MARROW, SIGNAL = 0.65; EXPRESSED IN PLACENTA, SIGNAL = 0.6; EXPRESSED IN ADULT LIVER, SIGNAL = 1.4; EXPRESSED IN LUNG, SIGNAL = 1.3; NT HIT: X16163.1, EVALUE 0.00e+00; SWISSPROT HIT: P14648, EVALUE 3.00e-27; EST_HUMAN HIT: AI816185.1, EVALUE 0.00e+00
ctgctgggatggtcccccaactcctgggacggggcctgctaatccaccaggagcctggggaattggtacaccagctgatactcctctaccagctgccctaacaactccagggcctcctgcagctccagcaagtggtacccgagcaatgccagtatattttgggggtagcccctccacagtcatggataccaagttctccccatgcagcaacaccagaccccaaaagtgcttttcttcgagctctggttgcttcacgttctttggcttgatctttctgaactcatcacaatcgcagaggatcaaattcacatgcttgtcaaacgccttaaagatgccaaagaagattgtgccttc

SEQ ID NO: 17400 - DNA, 218 bp, Homo sapiens
  MAP TO AL160236.1; EXPRESSED IN FETAL LIVER, SIGNAL = 8.1; EXPRESSED IN HELA, SIGNAL = 8.7; EXPRESSED IN ADULT LIVER, SIGNAL = 8.7; EST_HUMAN HIT: BG740985.1, EVALUE 1.00e-119; SWISSPROT HIT: P80272, EVALUE 1.80e+00; NT HIT: AB037814.1, EVALUE 1.00e-119
atgcccaagagaaagactgaaggggatgctaaaggagataaagccaaggtgaaggatgaatcacagagaagatctgcgaggttgtctgctaaacctgctcctccaaagccagagcccaagcctaaaaaggcccctgcaaagaagggagagaaggtacccaaagggaaaaagagaaaagctgatgctggcaaggagcgggaaggtgctggagatcccaa

SEQ ID NO: 17401 - DNA, 199 bp, Homo sapiens
  MAP TO CHR22_81.0; EXPRESSED IN PLACENTA, SIGNAL = 0.41; EXPRESSED IN ADULT LIVER, SIGNAL = 0.29; EXPRESSED IN HELA, SIGNAL = 0.82; EST_HUMAN HIT: BF346212.1, EVALUE 1.00e-108; SWISSPROT HIT: Q9RR89, EVALUE 9.70e-02
cttatctgctccacactgtcttcctttgatgggggttctcctggcactgggcctggaggctggtgtccgcttggcctttctggcagcccagcccgggcagtcttcaaagacagcagctgcagccttcaccctctggccacgggcattgggaggggtggcgcaggtggcccccacccgcaggttcagcccagtaagccac

SEQ ID NO: 17402 - DNA, 263 bp, Homo sapiens
  MAP TO CHR21_31.0; EXPRESSED IN BONE MARROW, SIGNAL = 3.7; EXPRESSED IN LUNG, SIGNAL = 3.8; EXPRESSED IN HELA, SIGNAL = 4.9; EXPRESSED IN ADULT LIVER, SIGNAL = 3.1; EXPRESSED IN FETAL LIVER, SIGNAL = 3.2; SWISSPROT HIT: P23540, EVALUE 1.20e+00; NT HIT: AL163227.2, EVALUE 1.00e-30; EST_HUMAN HIT: BF896226.1, EVALUE 2.00e-36
tccagggcatgctgatgcaagaagttgactcccatggccttctgcagctccactgctatggctttgaaggtatagctcccctcctggctgctttcacaggctggtactgagtgtgcagcttttccaagagcacagtgcaagctgtcagtggatctacaattctgcagtctggaggacaatggccctcttctcacagttccactaggcagtgccccagtggggaccctgtgtgggggttccaaccccacacttcccttccacat

SEQ ID NO: 17403 - DNA, 177 bp, Homo sapiens
  MAP TO CHR22_89.0; EXPRESSED IN HELA, SIGNAL = 0.84; EXPRESSED IN LUNG, SIGNAL = 1.1; EXPRESSED IN FETAL LIVER, SIGNAL = 0.43; NT HIT: gi14776781, EVALUE 3.00e-95; SWISSPROT HIT: P04275, EVALUE 2.00e-32; EST_HUMAN HIT: AW855468.1, EVALUE 7.00e-88
ccggggacgtctggaccttgccagaccagtgccacaccgtgacttgccagccagatggccagaccttgctgaagagtcatcgggtcaactgtgaccgggggccgaggccttcatgccctaacagccagtcccctgttaaagtggaagacacctgtggctgccgctggacctgcccct

SEQ ID NO: 17404 - DNA, 112 bp, Homo sapiens
  MAP TO AC022528.3; EXPRESSED IN HELA, SIGNAL = 0.53; EXPRESSED IN BONE MARROW, SIGNAL = 0.96; EXPRESSED IN PLACENTA, SIGNAL = 1.1; EXPRESSED IN LUNG, SIGNAL = 1.1; NT HIT: gi14745789, EVALUE 2.00e-52; SWISSPROT HIT: P06687, EVALUE 6.10e+00; EST_HUMAN HIT: BI522539.1, EVALUE 3.00e-52
caacttattccatatgtggaagaagatggctcaaagaatgatgatcgggctggcccacctcgttttgctagtgaagagaggcgagaaattgctgaagtaaataaagtgagtt

SEQ ID NO: 17405 - DNA, 202 bp, Homo sapiens
  MAP TO CHR22_212.0; EXPRESSED IN HELA, SIGNAL = 2.1; EXPRESSED IN FETAL LIVER, SIGNAL = 1.1; EXPRESSED IN LUNG, SIGNAL = 0.67; EXPRESSED IN ADULT LIVER, SIGNAL = 0.78; EXPRESSED IN BONE MARROW, SIGNAL = 1.2; SWISSPROT HIT: Q61838, EVALUE 7.30e+00; NT HIT: AF182600.1, EVALUE 1.80e-01
gtgagaatttgcctgctgggggaaattctgcctctgccacaatcaggaacctggaaaatccagaggccacaaccaggaccactgactttaacaatatgccattgtcattgtgacccaagaatcgagaagccactcttgctgccacttcagcagcaacagcttttccacatcctggaaggcggtgataggagcctggaacccc

SEQ ID NO: 17406 - DNA, 346 bp, Homo sapiens
  MAP TO AL138499.1; EXPRESSED IN LUNG, SIGNAL = 1.6; EXPRESSED IN ADULT LIVER, SIGNAL = 1.4; EXPRESSED IN BONE MARROW, SIGNAL = 1.2; EXPRESSED IN HELA, SIGNAL = 0.55; EST_HUMAN HIT: BF977440.1, EVALUE 1.00e-81; SWISSPROT HIT: P10569, EVALUE 7.00e-05; NT HIT: gi4885610, EVALUE 4.00e-84
tttaactcctccaccaccgacaccaccagataatgttctcatgtttgatgactttccacctccaccatcacccactccagtggattatgaagacgaggaggctgcaatagttcagtataatgtttcatatgcagataaggatactgcaaggtccccaaagaattatattgagaacatcattgcagtgtatgattatacaaaagacaaggatgatgagctgtcatttatggagggtgcagtcatttatgttataaagaatgttaatggcttatatgaaggagtcttcaatcaggtgactggtctgttccctgggagctgtgttgaatcaatcattcactatgccgat

SEQ ID NO: 17407 - DNA, 270 bp, Homo sapiens
  MAP TO CHR21_44.0; EXPRESSED IN BONE MARROW, SIGNAL = 0.99; EXPRESSED IN HELA, SIGNAL = 0.98; EXPRESSED IN FETAL LIVER, SIGNAL = 0.79; EXPRESSED IN LUNG, SIGNAL = 1.3; EXPRESSED IN ADULT LIVER, SIGNAL = 1.1; EST_HUMAN HIT: BE222256.1, EVALUE 8.00e-64; SWISSPROT HIT: P70213, EVALUE 3.00e-01; NT HIT: AL163209.2, EVALUE 5.00e-55
aggaacagcttccccatccccagtagtggcaatatccactcccctccccgacccatgctaccatcatcctttccacctttgtctgaggaggtaaaccctgtgttgcctgaggcaacagtaatggcctcccctgaggcagttgccaggcaagataatgttgattatcctcaggagccacccccaacacccttgtttgcttctagacctataactagactaaagtcctggcaggcccctagaggtgaggttgagagtgtgaccaatgaggag

SEQ ID NO: 17408 - DNA, 269 bp, Homo sapiens
  MAP TO AC021260.4; EXPRESSED IN HELA, SIGNAL = 5.8; EXPRESSED IN FETAL LIVER, SIGNAL = 6.6; EST_HUMAN HIT: BI258883.1, EVALUE 1.00e-114; SWISSPROT HIT: P80272, EVALUE 3.00e-05; NT HIT: gi13651005, EVALUE 1.00e-116
ttggcgtctccagcaccttcagttttatgtgcctggtctgttttggcatctccattttctacagggctattcccctccttgccagcatcagcttttccctttttccctttgggtactttctctcccttctttgcaggggcctttttacgcttgggttctggctttggaggagcaggtttagctgacaacctcatggatcttctgtgtgattcgtccttcaccttggctttatctcctttagcatccccttcagcctttctcttgggcat

SEQ ID NO: 17409 - DNA, 94 bp, Homo sapiens
  MAP TO AL133520.2; EXPRESSED IN FETAL LIVER, SIGNAL = 1.2; EXPRESSED IN BONE MARROW, SIGNAL = 1.4; EXPRESSED IN HEART, SIGNAL = 1.3; EXPRESSED IN HELA, SIGNAL = 0.73; SWISSPROT HIT: P17164, EVALUE 4.70e+00; EST_HUMAN HIT: AW138748.1, EVALUE 8.00e-46; NT HIT: gi14786180, EVALUE 5.00e-46
ctgtgttctcttcactctcctggctggggtcctttcgaacctccttctggccaaagagacttttcaggatggcattggcaatgggaagcatcat

SEQ ID NO: 17410 - DNA, 172 bp, Homo sapiens
  MAP TO CHR22_180.0; EXPRESSED IN HELA, SIGNAL = 0.78; EXPRESSED IN ADULT LIVER, SIGNAL = 2.2
caccataatcaccattatcatcaccaccatcaccatcactgtggtctgcaccatcaccatcatcaccatcatcattacaaccatcaccatcaccaccatgatcaccatcaccaccaccatcactgtgatcagcaccaccatcattaccaccatcaccatcaccaccaccatt

SEQ ID NO: 17411 - DNA, 114 bp, Homo sapiens
  MAP TO AL136304.2; EXPRESSED IN BONE MARROW, SIGNAL = 0.52; EXPRESSED IN PLACENTA, SIGNAL = 0.64; EXPRESSED IN ADULT LIVER, SIGNAL = 0.79; EXPRESSED IN HELA, SIGNAL = 0.85; EST_HUMAN HIT: AL047473.1, EVALUE 9.00e-37; SWISSPROT HIT: Q14738, EVALUE 1.00e-09; NT HIT: D78360.1, EVALUE 6.00e-37
ctgcaccacatctaaggctacgcctacattcattacctcctcagtgttctcgcctccaccatccttgcccgagctgctaggcttggctgtgcatttggcaaccttggggggctc

SEQ ID NO: 17412 - DNA, 271 bp, Homo sapiens
  MAP TO CHR21_57.0; EXPRESSED IN HELA, SIGNAL = 0.58; NT HIT: gi15320143, EVALUE 0.00e+00; EST_HUMAN HIT: AW951030.1, EVALUE 0.00e+00; SWISSPROT HIT: P50747, EVALUE 2.00e-46
catccaggagacgcatcgttgtgggggtcacttcggcaaacaaaattactttccccaactgcttggtctgcagattttggcgatagatctctaagttgaaatgttctgatgagaaggcctccatgttggtcaccacaggtatacaagatggggttatttctacttcagacacgtaggatgaaacaaatctaagagagagctggccggattttatttctccctcggagtccacatgtttcccaagccactgcataagaggatccctgatttc

SEQ ID NO: 17413 - DNA, 160 bp, Homo sapiens
  MAP TO AL160313.1; EXPRESSED IN FETAL LIVER, SIGNAL = 4.8; EXPRESSED IN BONE MARROW, SIGNAL = 7.2; EXPRESSED IN LUNG, SIGNAL = 4.6; EXPRESSED IN ADULT LIVER, SIGNAL = 4.3; EXPRESSED IN HELA, SIGNAL = 5.4; NT HIT: AL163246.2, EVALUE 9.00e-40; EST_HUMAN HIT: AW090434.1, EVALUE 3.00e-59; SWISSPROT HIT: P40103, EVALUE 8.70e-01
ctacacagggtcaggatcatcaatatcactgccttccacctccgcatctttcctcactggaaagtcttcaggggcaataacaggcatggagctgtcatctcctatgataataatgccttcttctggatgcctcctgaaggacctgcctgaggctgttgta

SEQ ID NO: 17414 - DNA, 176 bp, Homo sapiens
  MAP TO CHR21_53.0; EXPRESSED IN HELA, SIGNAL = 0.68; EXPRESSED IN BONE MARROW, SIGNAL = 0.43; SWISSPROT HIT: Q9URV0, EVALUE 1.90e+00; NT HIT: M32673.1, EVALUE 2.40e+00; EST_HUMAN HIT: BE000603.1, EVALUE 9.00e-35
aggagaaaccgcctaggtcacacaataggtagtaagttggagaaccaggacttggacctgggacactctgactgtagtctgagctttcactgcctggactgtgcttcctcgctttggagcggtgatctcagaatcctcatcctgagagctacagagcggggtaggccagtttcctg

SEQ ID NO: 17415 - DNA, 189 bp, Homo sapiens
  MAP TO CHR22_164.0; EXPRESSED IN FETAL LIVER, SIGNAL = 0.8; EXPRESSED IN HELA, SIGNAL = 2.6; EXPRESSED IN PLACENTA, SIGNAL = 0.87; SWISSPROT HIT: P09980, EVALUE 7.40e+00; NT HIT: AF266285.1, EVALUE 2.00e-22; EST_HUMAN HIT: BG945324.1, EVALUE 2.00e-20
agcaggctggatgcccctctgccagctgagacagcccacacaacccccagccctaatgattgctctacctgtcctcacagtcctcttccacctccttctctctgcatgcacctcaggatgagaggctgtgggagcaggagaagacgcaggaagaggagaggctgcaggagctgggcataaggccgagct

SEQ ID NO: 17416 - DNA, 118 bp, Homo sapiens
  MAP TO AL137800.2; EXPRESSED IN BONE MARROW, SIGNAL = 4.5; EXPRESSED IN LUNG, SIGNAL = 5.9; EXPRESSED IN HELA, SIGNAL = 3.5; EXPRESSED IN FETAL LIVER, SIGNAL = 6.2; NT HIT: gi4506546, EVALUE 3.90e-01; SWISSPROT HIT: P11088, EVALUE 7.90e+00; EST_HUMAN HIT: AW302412.1, EVALUE 5.00e-60
agatcctgttctactttcttgtctaaagcgtattccaaatcggtaactagcattttctggtacaggtcctgcagagcctgcctggatgtccagacttcagctggacccagcttagaat

SEQ ID NO: 17417 - DNA, 75 bp, Homo sapiens
  MAP TO AL138784.1; EXPRESSED IN FETAL LIVER, SIGNAL = 1.1; EXPRESSED IN ADULT LIVER, SIGNAL = 0.52; EXPRESSED IN HELA, SIGNAL = 2.1; NT HIT: AF221943.1, EVALUE 1.00e-03; EST_HUMAN HIT: AA417230.1, EVALUE 1.00e-03
atgaagcccatcattttaaagatgaggaaatcaaggctcagggagattaagtgggtgaccagggtcacacagctg

SEQ ID NO: 17418 - DNA, 183 bp, Homo sapiens
  MAP TO AL138842.2; EXPRESSED IN HELA, SIGNAL = 1.1; EXPRESSED IN PLACENTA, SIGNAL =   1; EXPRESSED IN BONE MARROW, SIGNAL = 1.1; NT HIT: gi14744499, EVALUE 2.00e-10; EST_HUMAN HIT: BF698828.1, EVALUE 2.00e-42
ctcttcatgttcttcttcatcatactcttcttcttcctcctcttccttctcttcttcttcttctttctcctcatcctcctctgaagttacttcttcttccttcttctccagggtctcatgtggggatgaataggaatagaaactcaggttcagttcacagaagggaaaaattgaggcacacat

SEQ ID NO: 17419 - DNA, 182 bp, Homo sapiens
  MAP TO CHR21_52.0; EXPRESSED IN HELA, SIGNAL = 0.54; NT HIT: AJ229041.1, EVALUE 1.00e-85; SWISSPROT HIT: Q9UKN7, EVALUE 1.50e+00
ttcagtgggagtctccctttgactggaccagttggaaggctgacggcaagggaagtccactgatgcagagatcagcttcctggggcccagaagaaggcaaattgggacagagcttggacctggaagacaaactgaaaaaaaccagaacatcctcccagcagatcatcatgcccaacccccag

SEQ ID NO: 17420 - DNA, 236 bp, Homo sapiens
  MAP TO AC012186.3; EXPRESSED IN HELA, SIGNAL = 0.65; EXPRESSED IN BONE MARROW, SIGNAL = 0.76; EST_HUMAN HIT: AA468562.1, EVALUE 1.00e-105; NT HIT: D14547.1, EVALUE 3.00e-03
aataacacagctagagaaaagaaaatattgttaataaaatcataaggaagatagaatatgttgacttcattaagtgtaagtggatcatcatcctcattctcatcatcttcaagtagagtaggaagaggagttggttttgctatctcaggagtgggagagatggaggaggtggaggcggtggaagaggaggcagaagaggcaaggacacttggtttaactttacggaaatacatcat

SEQ ID NO: 17421 - DNA, 222 bp, Homo sapiens
  MAP TO CHR22_144.0; EXPRESSED IN HELA, SIGNAL = 1.4; EXPRESSED IN PLACENTA, SIGNAL = 0.32; SWISSPROT HIT: O32848, EVALUE 3.60e-01; NT HIT: gi6678126, EVALUE 5.10e-02; EST_HUMAN HIT: N24289.1, EVALUE 1.20e+00
atggaaagcccaggcctgcggcctctctggcttcttctctcccttgccccactgcccctggctgtctggcagttcctggaagtctccaagctcttccctgcctcgagcccctgcccacgttctctctgccccaggcctcagcctgcggtcactttctcagggcagctttcccagcaccccgtgcatctaaagtggatgctgccctgcccatcactggatcag

SEQ ID NO: 17422 - DNA, 73 bp, Homo sapiens
  MAP TO CHR22_150.0; EXPRESSED IN HELA, SIGNAL = 0.84; EST_HUMAN HIT: BF846148.1, EVALUE 3.10e-01; NT HIT: gi16164387, EVALUE 2.10e-01
ggactctcactgctgtggcctgtggccctactcaaggagctcaaggaggccactagccatttggagaaggagg

SEQ ID NO: 17423 - DNA, 150 bp, Homo sapiens
  MAP TO CHR22_78.0; EXPRESSED IN HELA, SIGNAL =   5; SWISSPROT HIT: Q9UMN6, EVALUE 4.50e+00
agaaggagaaggaggaggaagagaaggatgaggaggaaaggaggaggaagaggagcagaaggaggaaggggaggggcagaacaaccatcaccatggccatcccccgccagagcacccaccccacttgctttcttctcctcttggtgtctg

SEQ ID NO: 17424 - DNA, 210 bp, Homo sapiens
  MAP TO AL139227.1; EXPRESSED IN HELA, SIGNAL = 3.2; EXPRESSED IN BONE MARROW, SIGNAL = 1.1; EST_HUMAN HIT: BF816634.1, EVALUE 1.00e-114; NT HIT: gi14589890, EVALUE 1.00e-115; SWISSPROT HIT: P22223, EVALUE 5.00e-20
ctagtcgtcctccccgccaccgtacatgtctgccagcttcttgaagcggctgccccactcgttcagataatcgtaatcttggtcttggtcggaggcggaggaggtgagggagctcagggacgcggcgtcggagccgctgccctcatagtcgaacaccaagagggtgtcgtagggcggggctgtggggtctgtgttagccgccttcaggtt

SEQ ID NO: 17425 - DNA, 203 bp, Homo sapiens
  MAP TO CHR22_143.0; EXPRESSED IN HELA, SIGNAL = 1.1; EST_HUMAN HIT: BE770612.1, EVALUE 1.00e-110; SWISSPROT HIT: P56848, EVALUE 2.50e+00; NT HIT: gi14779562, EVALUE 1.00e-110
gcaacatattgctgaacgttctgattccacccaatatgccatgtacgcgaacagggaagaataacgttcttatcgtctgtgttccaaatccaccaattgacgagaagaatgccaccatgccagtcaccatgttgattcgggtaaaaaccagcgaggatgcagacgagttgcacaaaattttactggagaaaaaggatgcctga

SEQ ID NO: 17426 - DNA, 82 bp, Homo sapiens
  MAP TO CHR22_79.0; EXPRESSED IN HELA, SIGNAL = 0.75
caccgctgatgtgctggaagtcacttctgctggctttgatgaagggaaggaagcagatgagaaagagggtgtatatgagtga

SEQ ID NO: 17427 - DNA, 385 bp, Homo sapiens
  MAP TO CHR22_96.0; EXPRESSED IN HELA, SIGNAL = 2.1; EST_HUMAN HIT: BF222856.1, EVALUE 2.10e+00; SWISSPROT HIT: Q12816, EVALUE 3.00e-04
ttcgacaactgcgtttggtaccaagccctgcaagggctccacggagcagctttgggggagacctgcctgcaggaacatgtaccccacggagcagctttgggggagacctgcctgcaggaacatgtaccccacggagcagctttgggggagacctgcctgcaggaacatgtaccccacggagcagctttgggggagacctgcctgcaggaacatgtaccccacggagcagctttgggggagacctgcctgcaggaacatgtacctcacggagcagctttgggggagacctgcctgcaggaacatgtaccccacggagcagctttgggggagacctgcctgcaggaacatgtaccccacccgacacgtcctgggagcctcgtctgag

SEQ ID NO: 17428 - DNA, 195 bp, Homo sapiens
  MAP TO AL138895.4; EXPRESSED IN HELA, SIGNAL = 0.63; EST_HUMAN HIT: BE890168.1, EVALUE 1.00e-105; NT HIT: gi14735271, EVALUE 1.00e-106; SWISSPROT HIT: P35428, EVALUE 3.70e-01
gctctgaagggctccaagaagctggtgctgtctgtgtactcagcagggcgcatccctgggggctacgtcaccaaccacatctacacctgggtggacccgcagggccgcagcatctccccaccctcgggcctgccccagccccacggtggtgccctgaggcagcaggagggtgaccggaggagcaccctgcacctc

SEQ ID NO: 17429 - DNA, 308 bp, Homo sapiens
  MAP TO AL137861.1; EXPRESSED IN LUNG, SIGNAL = 1.3; EXPRESSED IN BONE MARROW, SIGNAL = 0.96; EXPRESSED IN HELA, SIGNAL = 0.93; SWISSPROT HIT: P18175, EVALUE 5.00e-04; NT HIT: AL163202.2, EVALUE 2.00e-54; EST_HUMAN HIT: BI064298.1, EVALUE 4.00e-78
atgaatcttctggaatcctatgtgagggacaaacattcagactctcatagcagtgttctggaatactgtgtgggggacaaacattcagaccacagcaggagtgttctggaatcctacgtgagggacaaacattcagaccctcgtggcagtgttctggaatcctatgtgagagacaaacattcagaccctcataacagttttccggaatcctatgtgagggaaaaacattcccaccacagtaggagtgttctggaatcctatgtgagggcaaacattcagatcacagcaggagtgttctggaatgctat

SEQ ID NO: 17430 - DNA, 222 bp, Homo sapiens
  MAP TO CHR22_75.0; EXPRESSED IN HELA, SIGNAL = 0.59; SWISSPROT HIT: P38486, EVALUE 3.60e-01; EST_HUMAN HIT: AI623320.1, EVALUE 1.00e-122; NT HIT: gi14779513, EVALUE 1.00e-122
gcatctgcaacaggccccagccaggcctgaagtcatcctcagaagggatggatcctgaggtcgccatgcccagctgggcaaacatgagtctggattcttccccggagtcggctgccttggctgtgaggctggagggagatgagctgctagaccacctgcgtctcagcatcctgccctgggatgagagcatcctggacaccctctcgcccaggctcgctacag

SEQ ID NO: 17431 - DNA, 307 bp, Homo sapiens
  MAP TO AL136109.1; EXPRESSED IN HELA, SIGNAL =  22; EST_HUMAN HIT: BG700297.1, EVALUE 1.00e-126; SWISSPROT HIT: P09895, EVALUE 6.00e-34; NT HIT: gi14591908, EVALUE 1.00e-126
aatacaacatacccaaatacaggatgatagttcgtggaacaaacagagtatcatttgtcagattgcttatgcccgtacagagggggatatgatagtctgcacagcatatgtacacgaactgccaaaatatggtgtgaaggttgacctgacaaattatgctgcagcgtattgtactggcctgctgctggaccgcaggcttctcaataggtttgacatggacaagatctatgaaggccaagtggaggcaactggcgatgactacaatgtggtaagcattgatggtcagccaggtgcctttacctgcaat

SEQ ID NO: 17432 - DNA, 156 bp, Homo sapiens
  MAP TO CHR21_36.0; EXPRESSED IN HELA, SIGNAL = 0.67; NT HIT: gi8924119, EVALUE 2.10e+00; SWISSPROT HIT: P06474, EVALUE 4.40e+00; EST_HUMAN HIT: BF958316.1, EVALUE 5.00e-05
tggctgcctctgttgcatcacacaggacgctagggaagtggggaaaagctgacagccacatgtctcacccggctgccgtgctgcccacagccagaaaggctggtcttactcctattgtgcccccacaacagaaccaagtttatttccaagcagctg

SEQ ID NO: 17433 - DNA, 158 bp, Homo sapiens
  MAP TO CHR21_41.0; EXPRESSED IN HELA, SIGNAL = 0.68; SWISSPROT HIT: P77941, EVALUE 2.60e+00; EST_HUMAN HIT: BF852453.1, EVALUE 2.00e-01; NT HIT: AF417209.1, EVALUE 2.10e+00
tggatcttcggaggtgtgccaaatacagcgaaggtgtccacgccctcatggccttacatccacctttctctggatgccagcaggccctgggaagggagatgacttccatcaaggatcaagatggctctcctcagtggagggttatcacagggagggag

SEQ ID NO: 17434 - DNA, 132 bp, Homo sapiens
  MAP TO CHR21_51.0; EXPRESSED IN HELA, SIGNAL = 0.62; SWISSPROT HIT: Q92729, EVALUE 4.50e+00; NT HIT: AF027153.1, EVALUE 9.00e-55
ctttaccaggtgctggtctctgcatgtgttttgtttaagttggaaaaatctagacacgacccacagagtggtatggtatccagtgagaagggaactgtccgcagtggctttgaaggatatgaggaagcctag

SEQ ID NO: 17435 - DNA, 133 bp, Homo sapiens
  MAP TO CHR22_79.0; EXPRESSED IN HELA, SIGNAL = 1.1; SWISSPROT HIT: P97051, EVALUE 5.90e+00; EST_HUMAN HIT: AI802028.1, EVALUE 4.20e-02; NT HIT: U93871.1, EVALUE 1.10e-01
agtttttggtgggggagacagacacatccacctgccatggtaacccagagtgggtaagtctcccaggggggctcatcacagctgcagaaagtacagagaaagaagcacaaattgtgctcgagagggttgaaag

SEQ ID NO: 17436 - DNA, 209 bp, Homo sapiens
  MAP TO AL049647.7; EXPRESSED IN HELA, SIGNAL = 0.63; SWISSPROT HIT: P06440, EVALUE 1.10e+00; NT HIT: gi5834884, EVALUE 1.90e-01
ttctaacaacaggatcagaacattgccacagacacatgtgagccctggttacctccatgcccttaccagaatgctgtcgaagctggctcctcggtctggactggacagatattttatgaaaaaagttgagagccaaagcacccataaggtcctgatttagaagcatcattttaataatattcatcttctctgcctctaacttgttgttg

SEQ ID NO: 17437 - DNA, 168 bp, Homo sapiens
  MAP TO CHR22_86.0; EXPRESSED IN HELA, SIGNAL = 0.76; EST_HUMAN HIT: BI011261.1, EVALUE 9.00e-38; SWISSPROT HIT: O54751, EVALUE 1.30e-01; NT HIT: gi14777789, EVALUE 3.00e-46
cagccagccaagtgcccgcacgagggaaggagtggccatcgtccagtgagatggtgaaggggacgtggccgctctcatagagcaggggcgacacgaagtgcacttgcccggaggagtccacatggccgagggtctggatgctctcctgtggcatgcaaacctgtgggc

SEQ ID NO: 17438 - DNA, 138 bp, Homo sapiens
  MAP TO CHR21_50.0; EXPRESSED IN HELA, SIGNAL = 0.79; NT HIT: X67204.1, EVALUE 7.30e+00
tattgagaatgttaaagatgaggaggaggaagaagacaaaggagaaggggataaagaaaagaagataaaggagaggaaagggatggaaagggaggaagaaggtttaagggacaggaagaatgacgaggaggaggaggg

SEQ ID NO: 17439 - DNA, 282 bp, Homo sapiens
  MAP TO CHR22.1; EXPRESSED IN BONE MARROW, SIGNAL = 2.6; EXPRESSED IN ADULT LIVER, SIGNAL = 3.8; EXPRESSED IN FETAL LIVER, SIGNAL = 2.2; EXPRESSED IN LUNG, SIGNAL = 5.4; EXPRESSED IN HELA, SIGNAL = 2.2; EXPRESSED IN HEART, SIGNAL = 4.7; SWISSPROT HIT: P08775, EVALUE 3.60e-01; NT HIT: gi14777006, EVALUE 0.00e+00; EST_HUMAN HIT: AA631764.1, EVALUE 0.00e+00
acttgtgtgtacaccttggtgatgtcattgtacctgccttcagggggttggtagttagggatcggtggtgtgtaatgtggcccttccttctcaaaggggaacaggttaggatcccgcttgatggcctcagcatggagcttcggggattccagttgcagttcctccagagcttcctgctgggcttctagcatagccctgatggtgtccctctccatcttacgctcttgctgcttgtacaaggaccacttcttcagaagcagagctctcctctcagtctcctca

SEQ ID NO: 17440 - DNA, 169 bp, Homo sapiens
  MAP TO CHR5.1; EXPRESSED IN LUNG, SIGNAL = 0.8; EXPRESSED IN HEART, SIGNAL =   1; EXPRESSED IN ADULT LIVER, SIGNAL = 1.6; EXPRESSED IN PLACENTA, SIGNAL = 1.3; EXPRESSED IN HELA, SIGNAL = 1.9; EST_HUMAN HIT: BG336738.1, EVALUE 2.00e-84; SWISSPROT HIT: P93338, EVALUE 5.70e+00; NT HIT: gi14727636, EVALUE 2.00e-84
aacacatacgtgtccacttgtcctgcattgtggctgttttctgctttcatccgtgtcagtgcagcagcagcttcatccagtgcacaactaactgaggatgtcagtctccggagtacctcaggatctgcaaaagctttaccatcagcagttgacaatttgccaattcctt

SEQ ID NO: 17441 - DNA, 159 bp, Homo sapiens
  MAP TO CHR15.1; EXPRESSED IN LUNG, SIGNAL = 0.68; EXPRESSED IN HELA, SIGNAL = 0.82; EST_HUMAN HIT: BI772688.1, EVALUE 9.00e-84; SWISSPROT HIT: P27048, EVALUE 3.00e-25; NT HIT: gi16191418, EVALUE 2.00e-81
agactgttggcaagagtagcaagatgctgcagcacattgactatagaatgagatgtatcctgcaagatggccgaatcttcattggcacctttaaggcttttgacaagcatatgaatttgatcctctgtgattgtgatgagttcagaaagatcaagtaag

SEQ ID NO: 17442 - DNA, 315 bp, Homo sapiens
  MAP TO CHR3.1; EXPRESSED IN ADULT LIVER, SIGNAL =   3; EXPRESSED IN BONE MARROW, SIGNAL = 4.5; EXPRESSED IN PLACENTA, SIGNAL = 3.4; EXPRESSED IN FETAL LIVER, SIGNAL = 3.6; EXPRESSED IN LUNG, SIGNAL = 1.9; EXPRESSED IN HELA, SIGNAL =   3; EXPRESSED IN HEART, SIGNAL = 1.6; SWISSPROT HIT: P54922, EVALUE 1.00e-50; NT HIT: gi15297849, EVALUE 0.00e+00; EST_HUMAN HIT: BG024441.1, EVALUE 0.00e+00
ggtgtgaaggagagggatcagttctacacctccctgagctactctggctggggtggcagcagtgggcacgatgcccccatgattgcctacgatgctgttcttgctgcaggagactcctggaaggagcttgcccaccgagcctttttccatggtggagacagtgattctacagctgccattgctggctgctggtggggagttatgtatggttttaaaggagtgagtccctccaactatgagaaactagaatacagaaaccggctggaagagacagctagggctttatattctctcgggtcaaaagaagacactgta

SEQ ID NO: 17443 - DNA, 142 bp, Homo sapiens
  MAP TO CHR22.1; EXPRESSED IN BONE MARROW, SIGNAL = 1.5; EXPRESSED IN PLACENTA, SIGNAL = 3.2; EXPRESSED IN FETAL LIVER, SIGNAL = 2.4; EXPRESSED IN HELA, SIGNAL =   3; EXPRESSED IN LUNG, SIGNAL = 1.7; EXPRESSED IN HEART, SIGNAL = 0.92; EST_HUMAN HIT: BI193309.1, EVALUE 3.00e-74; SWISSPROT HIT: P21964, EVALUE 5.00e-22; NT HIT: Z26491.1, EVALUE 2.00e-74
cccacgttcatggcccactccttctgctcgcagtaggtgtcaatggcctccagcacgctctgtgcgttcccgggctccgcatgctgcagcacgtggttcaggatgcgctgctccttggtgtcacccatgagcaggttgtgga

SEQ ID NO: 17444 - DNA, 230 bp, Homo sapiens
  MAP TO CHR11.1; EXPRESSED IN HEART, SIGNAL = 1.5; EXPRESSED IN ADULT LIVER, SIGNAL = 2.4; EXPRESSED IN FETAL LIVER, SIGNAL = 1.7; EXPRESSED IN HELA, SIGNAL = 1.4; EXPRESSED IN LUNG, SIGNAL = 1.2; EST_HUMAN HIT: AL039888.1, EVALUE 1.00e-103; SWISSPROT HIT: Q14139, EVALUE 6.00e-32; NT HIT: gi16183763, EVALUE 1.00e-103
gactgctttacctgtaaattcgatgtccacaaaaaccttgattagagcctctgcaagttggggtgcatactgaaagttgcagaacacacgtttccggtggaacacactggataccaagggatttggggtctgatccaggtggggcatcactgcttccaacacctctgctagtttggccctcaggtggggattcttcattctgcaaaatgggcaaaaagcaagatgagcag

SEQ ID NO: 17445 - DNA, 307 bp, Homo sapiens
  MAP TO CHR19.1; EXPRESSED IN PLACENTA, SIGNAL = 3.4; EXPRESSED IN HELA, SIGNAL = 1.9; EXPRESSED IN LUNG, SIGNAL = 1.7; EXPRESSED IN HEART, SIGNAL = 1.9; EXPRESSED IN BONE MARROW, SIGNAL = 0.76; NT HIT: gi14764241, EVALUE 0.00e+00; EST_HUMAN HIT: BE740100.1, EVALUE 0.00e+00; SWISSPROT HIT: O02491, EVALUE 2.80e+00
cagatgaggagcaggagaagggcagcagcagtgagaaggagggcagtgaagatgagcactcgggcagcgagagtgaacgggaggaaggtgacagggacgaggccagtgacaagagtggcagtggtgaggacgagagcagcgaggatgaggcccgggctgcccgtgacaaagaggagatctttggcagtgatgctgattctgaggacgatgccgactctgatgatgaggacagaggacaggcccaaggtggcagtgacaatgattcagacagcggcagcaatgggggtggccagcggagccggagcca

SEQ ID NO: 17446 - DNA, 105 bp, Homo sapiens
  MAP TO AL355310.9; EXPRESSED IN HEART, SIGNAL = 1.8; EXPRESSED IN BONE MARROW, SIGNAL = 4.4; EXPRESSED IN ADULT LIVER, SIGNAL = 3.1; EXPRESSED IN PLACENTA, SIGNAL =  36; EXPRESSED IN FETAL LIVER, SIGNAL = 1.9; EXPRESSED IN LUNG, SIGNAL = 2.6; EXPRESSED IN HELA, SIGNAL = 2.1; EST_HUMAN HIT: AA815279.1, EVALUE 6.00e-47; SWISSPROT HIT: Q00285, EVALUE 6.20e-02; NT HIT: X68676.1, EVALUE 1.00e-47
aggagaaactgaagccaaaatacttggaggaactccctgaaaagctaaagctctactcagagtttctggggaagcggccatggtttgcaggagacaaggtaaagg

SEQ ID NO: 17447 - DNA, 179 bp, Homo sapiens
  MAP TO CHR22.1; EXPRESSED IN PLACENTA, SIGNAL = 9.1; EXPRESSED IN HELA, SIGNAL = 8.3; EXPRESSED IN FETAL LIVER, SIGNAL = 5.5; EXPRESSED IN LUNG, SIGNAL = 7.4; EXPRESSED IN HEART, SIGNAL = 5.1; EXPRESSED IN BONE MARROW, SIGNAL = 8.5; EXPRESSED IN ADULT LIVER, SIGNAL = 6.7; SWISSPROT HIT: P54198, EVALUE 4.00e-26; NT HIT: X77633.1, EVALUE 5.00e-88; EST_HUMAN HIT: BG675767.1, EVALUE 7.00e-88
ctggtctctgcagctcgggaaggcaggctgcccggctcttctccgtgcctcatgtggtgcagcaagagaccaccctggcctacctagagaaccaggtggcagcagcactcaccctgcagtccagccacgagtaccgccattggctcctcgtctacgcacggtacctcgtaaacgaaggt

SEQ ID NO: 17448 - DNA, 250 bp, Homo sapiens
  MAP TO CHR5.1; EXPRESSED IN ADULT LIVER, SIGNAL = 2.3; EXPRESSED IN PLACENTA, SIGNAL = 2.8; EXPRESSED IN FETAL LIVER, SIGNAL = 2.8; EXPRESSED IN LUNG, SIGNAL = 2.8; EXPRESSED IN HELA, SIGNAL = 3.5; EXPRESSED IN BONE MARROW, SIGNAL = 2.3; EXPRESSED IN HEART, SIGNAL = 2.6; NT HIT: gi4507126, EVALUE 1.00e-114; EST_HUMAN HIT: BI222770.1, EVALUE 1.00e-114; SWISSPROT HIT: Q62241, EVALUE 4.00e-32
agggggaggtggtatcattgctcctacaggaggaggagcagagaatggagcaggaggtatctttccttgttgaaatgcagccgttgttttgtcaatcaggctctgagcctgctctttcatccatttctgatagtagtctttcacattctctttgtgtttcctaccactgcagtgtgtctttctcacaggaggagagtcatgggtgaggtatgtattgcagtagtcacaataaaacttgggcatgttgctc

SEQ ID NO: 17449 - DNA, 174 bp, Homo sapiens
  MAP TO CHR11.1; EXPRESSED IN LUNG, SIGNAL = 0.97; EXPRESSED IN HELA, SIGNAL = 0.53; EXPRESSED IN BONE MARROW, SIGNAL = 0.64; EXPRESSED IN ADULT LIVER, SIGNAL = 0.59; EXPRESSED IN FETAL LIVER, SIGNAL = 0.67; SWISSPROT HIT: Q14896, EVALUE 5.00e-26; NT HIT: U91629.1, EVALUE 2.00e-93
ctcaccctgcacaatgagctcagccagcgcctggcccccgctagtgcacagtgcatagtgccccgcgtcctccagcatggcctcgttgatgatcaggtggtgtctctgcccgtccttcttgaaccggtatttgaaggtctcctcccgggtcagctccaccccgtccttcagcct

SEQ ID NO: 17450 - DNA, 269 bp, Homo sapiens
  MAP TO CHR3.1; EXPRESSED IN FETAL LIVER, SIGNAL =   2; EXPRESSED IN LUNG, SIGNAL = 3.3; EXPRESSED IN HELA, SIGNAL = 2.4; EXPRESSED IN BONE MARROW, SIGNAL = 2.1; EXPRESSED IN HEART, SIGNAL = 1.9; EXPRESSED IN ADULT LIVER, SIGNAL = 2.7; SWISSPROT HIT: O43593, EVALUE 1.50e+00; NT HIT: X07855.1, EVALUE 0.00e+00; EST_HUMAN HIT: AI114629.1, EVALUE 0.00e+00
cagaacaagacaatggttaaaaaccagaacagatgcccagaagggggtaccatggccattaccagcatctcagacaagggcaggcttcaaacagggaggcctgtggcaacccctcccctacgtctggagctgaggggacagggggagctgagaacaaagagaggaaagaggagaaaagcggcgggggaacaggcggggagcgtgatcttcttgcccccatcttcctcaggggttggggggtacaaagtcggcggtggccctggaggtgg

SEQ ID NO: 17451 - DNA, 194 bp, Homo sapiens
  MAP TO CHR5.1; EXPRESSED IN ADULT LIVER, SIGNAL = 0.87; EXPRESSED IN LUNG, SIGNAL = 1.1; EXPRESSED IN HELA, SIGNAL = 0.84; EXPRESSED IN HEART, SIGNAL =   1; EXPRESSED IN BONE MARROW, SIGNAL = 0.74; SWISSPROT HIT: Q9Y496, EVALUE 1.00e-21; NT HIT: gi6857803, EVALUE 9.00e-96; EST_HUMAN HIT: AA923262.1, EVALUE 1.00e-92
atttctaattcaatagtgtgcaaatattgggccagcagattacaattatgatgaaactatcagtacattacggtatgccaatcgtgctaagaatattaaaaataaagctagaattaatgaagatccaaaggatgctttgctgcgtcagttccagaaagaaatagaagaactgaaaaagaagcttgaagaaggta

SEQ ID NO: 17452 - DNA, 162 bp, Homo sapiens
  MAP TO CHR9.1; EXPRESSED IN HELA, SIGNAL = 0.82; EXPRESSED IN ADULT LIVER, SIGNAL = 1.3; EXPRESSED IN LUNG, SIGNAL = 3.4; EXPRESSED IN FETAL LIVER, SIGNAL = 0.81; SWISSPROT HIT: P21580, EVALUE 1.00e-01; NT HIT: gi16162140, EVALUE 3.00e-86; EST_HUMAN HIT: AA809971.1, EVALUE 4.00e-86
gcagaaaaatatggctcaggagactaaccagaccccggggcccatgctgtgtagcacaggatgtggcttttatggaaatcctaggacaaatggaatgtgttcagtttgctacaaagaacatcttcagaggcagcaaaatagtggcagaatgagcccaatggg

SEQ ID NO: 17453 - DNA, 173 bp, Homo sapiens
  MAP TO CHR19.1; EXPRESSED IN PLACENTA, SIGNAL = 2.9; EXPRESSED IN LUNG, SIGNAL = 2.1; EXPRESSED IN FETAL LIVER, SIGNAL = 1.8; EXPRESSED IN HELA, SIGNAL = 2.5; EXPRESSED IN HEART, SIGNAL = 1.5; EXPRESSED IN ADULT LIVER, SIGNAL = 2.3; EXPRESSED IN BONE MARROW, SIGNAL = 2.2; SWISSPROT HIT: P21409, EVALUE 3.80e-01; NT HIT: gi14785858, EVALUE 3.00e-92; EST_HUMAN HIT: AL575262.1, EVALUE 1.00e-92
caggatatgtttgccttcatgggcagcctggataccaagggtaccagctacaagtatgaggtggcactggctgggccagccctggagttgcacaactgcatggcgaaactgttggcccaccccctgcagcggccttgccagagccatgcttcctacagcctgctggaggagga

SEQ ID NO: 17454 - DNA, 175 bp, Homo sapiens
  MAP TO CHR5.1; EXPRESSED IN BONE MARROW, SIGNAL = 0.68; EXPRESSED IN ADULT LIVER, SIGNAL = 0.98; EXPRESSED IN HELA, SIGNAL = 0.93; EXPRESSED IN FETAL LIVER, SIGNAL = 0.66; EXPRESSED IN LUNG, SIGNAL =   1; EXPRESSED IN HEART, SIGNAL = 0.87; EST_HUMAN HIT: BF931752.1, EVALUE 9.00e-41; SWISSPROT HIT: Q9Y5H8, EVALUE 2.00e-27; NT HIT: gi14728129, EVALUE 5.00e-94
gtgctgatctctcccgtgtacagccccacgcgaaacgggatgcgcgcaccgccggtcccaggctgcagctcatacgaaagccacgcgttgtagcctgagtctgcatccactgcgcgcaccttcgctaccacgtggcccgcacccactgaccgcggcaccagctcgctcactgcgc

SEQ ID NO: 17455 - DNA, 138 bp, Homo sapiens
  MAP TO CHR5.1; EXPRESSED IN ADULT LIVER, SIGNAL = 2.2; EXPRESSED IN PLACENTA, SIGNAL =   2; EXPRESSED IN LUNG, SIGNAL = 2.1; EXPRESSED IN FETAL LIVER, SIGNAL = 1.3; EXPRESSED IN HELA, SIGNAL = 1.5; EXPRESSED IN HEART, SIGNAL = 1.4; SWISSPROT HIT: P08133, EVALUE 6.00e-17; NT HIT: D00510.1, EVALUE 7.00e-65; EST_HUMAN HIT: AW935088.1, EVALUE 1.00e-64
tacctcaatggcttggtggagagacttgtcatatttctcaatgaattccctccggatgttgagcaggtcaatctcactgcgggataccatgatcctggtcagagtcttctcatctgtgccagcaccctggtggagcca

SEQ ID NO: 17456 - DNA, 218 bp, Homo sapiens
  MAP TO CHR18.1; EXPRESSED IN HELA, SIGNAL = 0.56; EXPRESSED IN LUNG, SIGNAL = 0.73; EXPRESSED IN HEART, SIGNAL = 0.84; EXPRESSED IN ADULT LIVER, SIGNAL =   1; SWISSPROT HIT: P08910, EVALUE 7.90e-01; NT HIT: gi16163805, EVALUE 1.00e-88; EST_HUMAN HIT: BE799890.1, EVALUE 2.00e-88
attcacttacttcctgtactgcaccgggggcttcgaagtgatgaaaggtctaagcagggtctgtcctcgaccctcccagcaccagaccgtcgggtagtacgtttctgtaaccacgggacagtggtcttgaaggaagcggctgaaactctcacccccggtcactaactggggtttctgaagggaaaagcagtatcagagaagggcccagagcaaagttt

SEQ ID NO: 17457 - DNA, 439 bp, Homo sapiens
  MAP TO CHR12.1; EXPRESSED IN HELA, SIGNAL =  18; EXPRESSED IN LUNG, SIGNAL =  22; EXPRESSED IN HEART, SIGNAL =  11; EXPRESSED IN BONE MARROW, SIGNAL = 4.3; EXPRESSED IN ADULT LIVER, SIGNAL =  25; EXPRESSED IN PLACENTA, SIGNAL =  25; NT HIT: gi16163693, EVALUE 0.00e+00; SWISSPROT HIT: P50914, EVALUE 9.00e-67; EST_HUMAN HIT: BG480762.1, EVALUE 0.00e+00
cgccaccaacatggtgttcaggcgcttcgtggaggttggccgggtggcctatgtctcctttggacctcatgccagaaaattggtcgcgattgtagatgttattgatcagaacagggctttggtcgatggaccttgcactcaagtgaggagacaggccatgcctttcaagtgcatgcagctcactgatttcatcctcaagtttccgcacagtgcccgccaaaagtatgtccaacaagcctggcagaaggcagacatcaatacaaaatgggcagccacacgatgggccaagaagattgaagccagagaaaggaaagacaagatgacagattttgatcgttttaaagttatgaaggcaaagaaaacgaggaacagaataatcaagaatgaagttaagaagcttcaaaaggcagctctcctgaaagcttctcccaaaaaagca

SEQ ID NO: 17458 - DNA, 415 bp, Homo sapiens
  MAP TO CHR5.1; EXPRESSED IN BONE MARROW, SIGNAL = 0.83; EXPRESSED IN HEART, SIGNAL = 0.84; EXPRESSED IN ADULT LIVER, SIGNAL = 1.8; EXPRESSED IN FETAL LIVER, SIGNAL = 1.2; EXPRESSED IN LUNG, SIGNAL = 0.6; EXPRESSED IN HELA, SIGNAL = 1.6; SWISSPROT HIT: Q9UN75, EVALUE 4.00e-75; EST_HUMAN HIT: BG719192.1, EVALUE 1.00e-63; NT HIT: gi14165388, EVALUE 0.00e+00
ttgtcgttctcgtccagcacgaacacctgcagcgtcacgttgctgcccagaggcggcacgccggcgtcgcgcgcgctcacctggaactgcagcagctccagctcctcgtggtctagcggctgcagcgcgtacaccttgccgctctccgcgtgcaccgacacgtagctcgacagtgcgtgctcgcccacccgccgctccaccagcgagtaggacaccagcgcgttcttctgcgcgtccgcgtcccatgccgacaccgtgaagatgtggcagcccggcgggttgttctccttcacgaacactgtgtactcgggctgcgcgaacgcaggcgcattgtcgttcacgtcggccacctccacggacactctagccgtggcccacagcgaaggcgagcccccatcccgcgcagtcaccacca

SEQ ID NO: 17459 - DNA, 171 bp, Homo sapiens
  MAP TO CHR17.1; EXPRESSED IN BONE MARROW, SIGNAL = 0.57; EXPRESSED IN ADULT LIVER, SIGNAL = 0.61; EXPRESSED IN LUNG, SIGNAL = 0.91; EXPRESSED IN HELA, SIGNAL = 0.41; EXPRESSED IN HEART, SIGNAL = 0.84; SWISSPROT HIT: Q04844, EVALUE 5.00e-27; EST_HUMAN HIT: AW294468.1, EVALUE 2.00e-91; NT HIT: AF105999.1, EVALUE 1.00e-91
tcttcccaccggaaaataagcgaacagttctgccaatcgaaggggaagtaggtgacctccactgcgcagacgctgcggtagatggccggaggcagccacgtcacggagccgccctcgtagacgagcacgttggcgtcgtaggccactccgaactggccatcaatactgtgg

SEQ ID NO: 17460 - DNA, 301 bp, Homo sapiens
  MAP TO AC009789.19; EXPRESSED IN ADULT LIVER, SIGNAL = 1.4; EXPRESSED IN FETAL LIVER, SIGNAL = 1.2; EXPRESSED IN LUNG, SIGNAL = 1.5; EXPRESSED IN HELA, SIGNAL = 1.3; EXPRESSED IN HEART, SIGNAL = 1.4; NT HIT: AY014296.1, EVALUE 0.00e+00; SWISSPROT HIT: P17482, EVALUE 2.00e-33; EST_HUMAN HIT: BG830524.1, EVALUE 1.00e-130
tcttgatctggggcccttcacccccttcctttctttgattctatcgctgcttctctttcagccaacccctccgccaactggctgcacgctcgctcttcccggaaaaagcgctgtccctacaccaaataccagacgctggagctagagaaggagtttctgttcaatatgtacctcaccagggaccgtaggcacgaagtggccagactcctcaatctgagtgagagacaagtcaaaatctggtttcagaaccggcggatgaaaatgaagaaaatgaataaggagcagggcaaagagtaaagat

SEQ ID NO: 17461 - DNA, 296 bp, Homo sapiens
  MAP TO CHRX.1; EXPRESSED IN LUNG, SIGNAL = 1.1; EXPRESSED IN HELA, SIGNAL = 0.49; EXPRESSED IN HEART, SIGNAL = 0.85; EXPRESSED IN ADULT LIVER, SIGNAL = 0.57; EXPRESSED IN BONE MARROW, SIGNAL = 0.74; SWISSPROT HIT: P23074, EVALUE 2.00e-06; EST_HUMAN HIT: BG008447.1, EVALUE 1.00e-65; NT HIT: AL163209.2, EVALUE 4.00e-68
attagatgtggtttcattgcttgagcaaatttacacatctcctggtacctggtatgtagccaatgacttgacaaatgcctttttctccattactgttcataaggcccaccagaagcaatctgccttcagctggcaaggccagcaatatacctttaccgtcctacctcaggggtatatcaagtctccagctttgtgtcaatcttattcagaaagagcttgatcgcttttcacttccacaaggtatcacactggttcattccattgatgacattatgctgattggatccagtgagcaa

SEQ ID NO: 17462 - DNA, 190 bp, Homo sapiens
  MAP TO CHR9.1; EXPRESSED IN BONE MARROW, SIGNAL = 0.91; EXPRESSED IN FETAL LIVER, SIGNAL = 0.99; EXPRESSED IN HELA, SIGNAL = 0.86; EXPRESSED IN HEART, SIGNAL = 0.7; SWISSPROT HIT: P35384, EVALUE 9.00e-07; EST_HUMAN HIT: AA969989.1, EVALUE 3.00e-13; NT HIT: AF011413.1, EVALUE 1.00e-14
tggcactggggagcttcatcttggctttcctggccagcagcctgcctgacaccttcaatgaagccaagttcttgatgttcagcatgctgatgttatgtactgtttgaattaccttccaaactgtgtaacatagcaccaaagggaaggtcatggttgccttggaaatattctccaccttgacttccagtgc

SEQ ID NO: 17463 - DNA, 130 bp, Homo sapiens
  MAP TO CHR1.1; EXPRESSED IN HEART, SIGNAL =   2; EXPRESSED IN BONE MARROW, SIGNAL = 0.84; EXPRESSED IN FETAL LIVER, SIGNAL = 0.98; EXPRESSED IN HELA, SIGNAL = 0.52; EXPRESSED IN LUNG, SIGNAL = 2.5; SWISSPROT HIT: P33331, EVALUE 7.80e+00; EST_HUMAN HIT: AA993103.1, EVALUE 6.40e-01; NT HIT: gi16165898, EVALUE 4.30e-01
gaaaagccctggagactgtatacattgaggagcagacattgtctgtataatgaatgaagtaacgagctactgttgtttattcttctgtaatataattggttgaattcagacaataatgtagcatctgtta

SEQ ID NO: 17464 - DNA, 179 bp, Homo sapiens
  MAP TO CHR20.1; EXPRESSED IN PLACENTA, SIGNAL = 3.7; EXPRESSED IN HELA, SIGNAL = 1.2; EXPRESSED IN LUNG, SIGNAL = 4.1; EXPRESSED IN BONE MARROW, SIGNAL = 2.7; EXPRESSED IN HEART, SIGNAL = 1.4; EXPRESSED IN ADULT LIVER, SIGNAL =   3; EST_HUMAN HIT: H09884.1, EVALUE 2.00e-85; NT HIT: gi4502380, EVALUE 3.00e-86; SWISSPROT HIT: Q07817, EVALUE 4.00e-20
ttccttctctctccctgcaggatacttttgtggaactctatgggaacaatgcagcagccgagagccgaaagggccaggaacgcttcaaccgctggttcctgacgggcatgactgtggccggcgtggttctgctgggctcactcttcagtcggaaatgaccagacactgaccatccactc

SEQ ID NO: 17465 - DNA, 239 bp, Homo sapiens
  MAP TO CHR10.1; EXPRESSED IN FETAL LIVER, SIGNAL = 0.3; EXPRESSED IN LUNG, SIGNAL =   1; EXPRESSED IN HELA, SIGNAL = 0.46; EXPRESSED IN BONE MARROW, SIGNAL = 0.32; EXPRESSED IN HEART, SIGNAL = 0.78; EXPRESSED IN ADULT LIVER, SIGNAL =   1; SWISSPROT HIT: P09913, EVALUE 3.00e-45; EST_HUMAN HIT: BG498386.1, EVALUE 0.00e+00; NT HIT: M14660.1, EVALUE 0.00e+00
tctgggttctttggcttcttttccagagccttctcaaagcacaccttcgctctttcattttggtttcctccacactttaaccgtgtccacccttcctcacagtcaagctctggactctcaattctatagggactggaaaacttctcacagacatgtttcaccttgtctacataaatctgaacgtctgagagtcggcccatgtgatagtagacccaggcatagtttccccaggtgaccag

SEQ ID NO: 17466 - DNA, 222 bp, Homo sapiens
  MAP TO CHR13.1; EXPRESSED IN PLACENTA, SIGNAL = 3.9; EXPRESSED IN FETAL LIVER, SIGNAL = 3.7; EXPRESSED IN HELA, SIGNAL =   6; EXPRESSED IN LUNG, SIGNAL = 2.2; EXPRESSED IN HEART, SIGNAL =   2; EXPRESSED IN ADULT LIVER, SIGNAL = 3.5; EXPRESSED IN BONE MARROW, SIGNAL = 3.2; SWISSPROT HIT: P39052, EVALUE 4.00e-33; EST_HUMAN HIT: BF312868.1, EVALUE 1.00e-112; NT HIT: gi14759734, EVALUE 1.00e-112
ggttaccttggggatcgacttccttggccagcttgagggcgtcggagttggccaggtccatgttggcgggcgtgacagccagaatgaggctgctctcccggctgatgaactgcaggatcatgtccttgatctggtactcgatgtctggaggctggtcgcccacaggcaccttggtgatacccgggaggtcgatgagggtcaagttcaacactgggagggaaa

SEQ ID NO: 17467 - DNA, 227 bp, Homo sapiens
  MAP TO CHR12.1; EXPRESSED IN HEART, SIGNAL = 0.8; EXPRESSED IN ADULT LIVER, SIGNAL = 1.1; EXPRESSED IN BONE MARROW, SIGNAL = 0.86; EXPRESSED IN HELA, SIGNAL = 0.81; EXPRESSED IN FETAL LIVER, SIGNAL = 1.1; EXPRESSED IN LUNG, SIGNAL = 0.64; SWISSPROT HIT: P49425, EVALUE 2.00e+00; EST_HUMAN HIT: AL536522.1, EVALUE 1.00e-122; NT HIT: gi14784204, EVALUE 1.00e-104
caggtggtgagcttcttctccctcaagtcggactcggcgcccccctggatggtgctggctgtgctgtggtgctccatggcacagacgctgctgctgccctccttcatctggtcctgcgagcgctaccgcgccgacgtgcgcacagtgtgggagcaatgcgtggccatcatgtctgaggaggatggagatgacggtcagaggaggggctgggctttggctttcctgga

SEQ ID NO: 17468 - DNA, 184 bp, Homo sapiens
  MAP TO CHR6.1; EXPRESSED IN ADULT LIVER, SIGNAL = 0.86; EXPRESSED IN LUNG, SIGNAL = 0.58; EXPRESSED IN FETAL LIVER, SIGNAL = 0.91; EXPRESSED IN HELA, SIGNAL = 0.73; EXPRESSED IN BONE MARROW, SIGNAL = 0.78; NT HIT: AE000834.1, EVALUE 1.60e-01; SWISSPROT HIT: P33485, EVALUE 2.20e-01
atggaagaacaggtgttcaagggggacccggacacccctcactccatctccttctcgggcagtggattcctctccttctaccaggcgggggctgtggacgccctgcgggacctggccccccggatgctggaaacagcccaccgctttgcggggacatcggcaggtgctgtgatcgccgccctgg

SEQ ID NO: 17469 - DNA, 142 bp, Homo sapiens
  MAP TO CHR17.1; EXPRESSED IN FETAL LIVER, SIGNAL = 1.3; EXPRESSED IN HELA, SIGNAL = 0.8; EXPRESSED IN BONE MARROW, SIGNAL = 1.2; EXPRESSED IN HEART, SIGNAL = 1.9; EXPRESSED IN ADULT LIVER, SIGNAL = 1.3; SWISSPROT HIT: P34402, EVALUE 7.70e+00; EST_HUMAN HIT: AI680150.1, EVALUE 4.50e-02
ttcccagttctgtttgcagctcccctaggataccaccgatgttcccaagaggggctgtgaaattctcagataattctcaaaataaaattaattttgatacattttcatttaaaaataataagtgctagacagaactgtgtgg

SEQ ID NO: 17470 - DNA, 232 bp, Homo sapiens
  MAP TO CHR19.1; EXPRESSED IN FETAL LIVER, SIGNAL = 0.82; EXPRESSED IN LUNG, SIGNAL =   1; EXPRESSED IN HELA, SIGNAL = 0.73; EXPRESSED IN HEART, SIGNAL = 0.82; EXPRESSED IN ADULT LIVER, SIGNAL = 0.87; EXPRESSED IN BONE MARROW, SIGNAL = 1.1; SWISSPROT HIT: P17027, EVALUE 4.00e-29; NT HIT: gi4507974, EVALUE 4.00e-18; EST_HUMAN HIT: AV695071.1, EVALUE 1.00e-77
gacatcagaaatttcatactggtgagaaaccttttgaatgtaacgaatgtggaaaggcctttagtcttcttaccctgcttaatcgccataagaacattcacacaggtgagaaactgtttgaatgtaaggaatgtgggaagtcctttaatcgtagctcaaaccttgttcaacatcagagtattcattctggtgtaaaaccatatgaatgtaaggagtgtgggaaaggctttaa

SEQ ID NO: 17471 - DNA, 206 bp, Homo sapiens
  MAP TO CHR19.1; EXPRESSED IN BONE MARROW, SIGNAL = 1.4; EXPRESSED IN ADULT LIVER, SIGNAL = 1.8; EXPRESSED IN FETAL LIVER, SIGNAL = 1.5; EXPRESSED IN PLACENTA, SIGNAL = 2.1; EXPRESSED IN LUNG, SIGNAL = 1.2; EXPRESSED IN HELA, SIGNAL = 1.6; EXPRESSED IN HEART, SIGNAL = 1.3; EST_HUMAN HIT: BG752149.1, EVALUE 2.00e-94; SWISSPROT HIT: P16258, EVALUE 5.00e-01
ccttaccccagggggcgtcggcagaggcccactgtctttctggaggcctctgaggccagagcctcggagccccacaggggcggggggaggagtgagctgggccgctgggggacccaagcccagggcctcccggtcacccccagcagggccaagcacggatggcagcaggggtggtggcttccctcgccggggcggcagctccgggg

SEQ ID NO: 17472 - DNA, 324 bp, Homo sapiens
  MAP TO CHR12.1; EXPRESSED IN HELA, SIGNAL =  79; EXPRESSED IN BONE MARROW, SIGNAL =  12; EXPRESSED IN HEART, SIGNAL =  10; EXPRESSED IN FETAL LIVER, SIGNAL =  18; EXPRESSED IN LUNG, SIGNAL =   7; SWISSPROT HIT: P04406, EVALUE 1.00e-41; NT HIT: AF261085.1, EVALUE 2.00e-64; EST_HUMAN HIT: BI258728.1, EVALUE 1.00e-66
tggcaaagtggatactgttaccaccaatggccctttcattgacctcaactacatggtctacatgttccattatgatcccacccatggcaagttccatggtaccatcaaggctgagaatgggaagctagtcatcaatggaaatcccgtcactatcttccaggagtgagagctcaccaaaaccaaatgagataatgctggtgctaattatgtcatggagtccaatggcatcttcactaccttggcaaaggctggggctcacctggagaggggaaccaaaaggttcatcatctccatcccctctgcagatgtccccatgtttgtgat

SEQ ID NO: 17473 - DNA, 200 bp, Homo sapiens
  MAP TO CHR4.1; EXPRESSED IN HELA, SIGNAL = 0.47; EXPRESSED IN HEART, SIGNAL = 0.65; EXPRESSED IN BONE MARROW, SIGNAL = 0.72; EXPRESSED IN FETAL LIVER, SIGNAL = 0.57; EXPRESSED IN LUNG, SIGNAL = 0.6; EST_HUMAN HIT: BF802868.1, EVALUE 2.60e-01
ttgaacaaatgtggacaaatgcttctttacaatggagttgtgcaagtgtgaaattgaccaccttgtaaacataaatttcacagttatatagcctgttaattattaagcctacatggttgaagggatacatgacttggggatttttgttcagtgggtagcataaatgcatttgagaaaaaccacttagatattttgtattt

SEQ ID NO: 17474 - DNA, 208 bp, Homo sapiens
  MAP TO CHR14.1; EXPRESSED IN FETAL LIVER, SIGNAL = 0.94; EXPRESSED IN LUNG, SIGNAL = 0.98; EXPRESSED IN HELA, SIGNAL = 1.1; EXPRESSED IN HEART, SIGNAL = 0.93; EXPRESSED IN ADULT LIVER, SIGNAL =   1; EXPRESSED IN BONE MARROW, SIGNAL =   1; NT HIT: gi8922304, EVALUE 1.00e-107; SWISSPROT HIT: P51484, EVALUE 1.40e+00; EST_HUMAN HIT: AA987455.1, EVALUE 1.00e-102
gttaaggtgaagtttcagcatgaagtctacccgccatgcaaacctgattgtgattccagcctctcagaacacccagtctcccggcaggtgttcattgttcaggatcttgagattcgagatcgtttggcaacatcacaaatgaataaatttttatacctgtattgcagtaaagaaatgcctcgaaaagctcactccaacatggtaagag

SEQ ID NO: 17475 - DNA, 136 bp, Homo sapiens
  MAP TO CHR17.1; EXPRESSED IN HELA, SIGNAL = 0.88; EXPRESSED IN HEART, SIGNAL = 1.3; EXPRESSED IN PLACENTA, SIGNAL = 1.7; EST_HUMAN HIT: BG327251.1, EVALUE 6.00e-69; NT HIT: U80184.1, EVALUE 7.00e-71; SWISSPROT HIT: Q24020, EVALUE 5.00e-05
cccaggttccctttgagagtgaggacaaccagggcatcgtgtatgcctgggtgggccgggcatcagaccctgacgaagccaagttggcagaagacatcctgaacaccatgtttgacacctcctacagcaagcaggt

SEQ ID NO: 17476 - DNA, 238 bp, Homo sapiens
  MAP TO CHR6.1; EXPRESSED IN FETAL LIVER, SIGNAL = 1.6; EXPRESSED IN LUNG, SIGNAL = 1.6; EXPRESSED IN HELA, SIGNAL = 2.2; EXPRESSED IN HEART, SIGNAL = 1.8; EXPRESSED IN BONE MARROW, SIGNAL = 2.1; EXPRESSED IN PLACENTA, SIGNAL = 2.3; SWISSPROT HIT: P48728, EVALUE 3.30e-01; EST_HUMAN HIT: BG110601.1, EVALUE 0.00e+00; NT HIT: gi15303148, EVALUE 0.00e+00
cccaactttagccattttgccttggaatcatgattacaattttttcctttgcagatgccttcctgggggatactcctccccaccctaaagggtcgcctgcaacttaggcggattgggtctctctgctgtggcgttctctcttgagagaccctctgaattttagcacaaagtgccttctgtttcacagctgccaccacctttagaggaatttcgtcagaaaaatgtggaggctccatat

SEQ ID NO: 17477 - DNA, 144 bp, Homo sapiens
  MAP TO CHR11.1; EXPRESSED IN PLACENTA, SIGNAL = 2.7; EXPRESSED IN FETAL LIVER, SIGNAL =   2; EXPRESSED IN LUNG, SIGNAL = 2.4; EXPRESSED IN HELA, SIGNAL = 2.6; EXPRESSED IN BONE MARROW, SIGNAL = 2.2; EXPRESSED IN HEART, SIGNAL = 2.2; NT HIT: gi14765984, EVALUE 1.00e-75; SWISSPROT HIT: P34644, EVALUE 7.00e-05; EST_HUMAN HIT: AL119334.1, EVALUE 3.00e-37
gactgcacgtgcttcggcctgccccgccgctacattatcgccatcatgagcggcctgggcttctgcatctccttcggtatccgctgcaacctgggcgtggccattgtggacatggtcaacaacagcaccatccaccgcgggggc

SEQ ID NO: 17478 - DNA, 185 bp, Homo sapiens
  MAP TO CHR5.1; EXPRESSED IN LUNG, SIGNAL = 0.77; EXPRESSED IN HELA, SIGNAL = 1.4; EXPRESSED IN HEART, SIGNAL = 0.62; EXPRESSED IN ADULT LIVER, SIGNAL = 1.9; EXPRESSED IN BONE MARROW, SIGNAL = 0.93; NT HIT: gi14724241, EVALUE 1.00e-97; SWISSPROT HIT: O60610, EVALUE 7.00e-09; EST_HUMAN HIT: AA732869.1, EVALUE 8.00e-97
cctccacctcctccatttcccggaggccctggcattcctccacctccacccggaatgggtatgcctccacctcccccatttggatttggagttcctgcagccccagttctgccatttggattaacccccaaaaagctttataagccagaggtgcagctccggaggccaaactggtccaaggtaag

SEQ ID NO: 17479 - DNA, 408 bp, Homo sapiens
  MAP TO CHRX.1; EXPRESSED IN FETAL LIVER, SIGNAL = 1.5; EXPRESSED IN LUNG, SIGNAL = 1.9; EXPRESSED IN HELA, SIGNAL = 1.7; EXPRESSED IN HEART, SIGNAL = 1.7; EXPRESSED IN ADULT LIVER, SIGNAL = 0.99; EXPRESSED IN BONE MARROW, SIGNAL = 1.9; NT HIT: gi14764587, EVALUE 0.00e+00; SWISSPROT HIT: P51793, EVALUE 8.00e-72; EST_HUMAN HIT: AW949577.1, EVALUE 6.00e-78
tactcacttattgcgagaatcagttccctcctctgggcaaatccaatgaggcgctcggagtctctggagaccaccacggggaagccgttgtagtcggtctccttgatgagcgtctccacgtcctcgacagtcatgctgtcctgggtgagcaccgacagtggcggctctccccgccggggccgcatgacgtcggtggccagtgtgcggtgagtaaactcgtccttcacgtcaaggaaagggtacccatttaagtggatgtgggcctcgtagatgccttctttcccaaatgcatcagctacccacttgctggtcacagccgccgccatcaggggcacgatgtactccagacccccggttaattcaaacatgatgaccaccaatgacaccgtcatcctggtaactccacct

SEQ ID NO: 17480 - DNA, 270 bp, Homo sapiens
  MAP TO CHR4.1; EXPRESSED IN LUNG, SIGNAL = 0.72; EXPRESSED IN FETAL LIVER, SIGNAL = 0.65; EXPRESSED IN HELA, SIGNAL = 0.73; EXPRESSED IN HEART, SIGNAL = 0.86; EXPRESSED IN BONE MARROW, SIGNAL = 0.81; NT HIT: U63834.1, EVALUE 0.00e+00; SWISSPROT HIT: O35787, EVALUE 4.30e-01; EST_HUMAN HIT: BE173123.1, EVALUE 5.70e+00
taccaggatctgtatcttggaactcaaagcaaacctgcaaaaacagattttcttgagtgagcaaatctgcctggcttttacacctagaaatcggcctagcactgggtccccctgacaagctttggcagccagtcgggcacagatttctcgaatccccaagctttagaagtgggaaatgttgcagaattctccagtcacagctacgggactccagaatagtgacaccgggtggcaaatacaacttctgcagcacatcagacctcaatctgg

SEQ ID NO: 17481 - DNA, 182 bp, Homo sapiens
  MAP TO CHR2.1; EXPRESSED IN HEART, SIGNAL = 0.68; EXPRESSED IN HELA, SIGNAL = 0.41; NT HIT: gi13375937, EVALUE 4.00e-67; SWISSPROT HIT: P27484, EVALUE 8.00e-04; EST_HUMAN HIT: BG481292.1, EVALUE 2.00e-66
cttttgatctgcgcttcttgcatgttcttcccctttggctacctctcactcccaatacggaacgccccaccaggtccggtgacacggatggattccagacccttggctgacttcttaaaggtgaactccactgcctcaccctccttcaagctccggaagccttccatgggcagcttactctg

SEQ ID NO: 17482 - DNA, 270 bp, Homo sapiens
  MAP TO CHR17.1; EXPRESSED IN HELA, SIGNAL = 1.2; EXPRESSED IN HEART, SIGNAL =   1; EXPRESSED IN FETAL LIVER, SIGNAL = 1.1; EST_HUMAN HIT: AI129614.1, EVALUE 6.00e-03; NT HIT: gi6912445, EVALUE 1.00e-114; SWISSPROT HIT: Q12809, EVALUE 2.00e-07
gtgtgcctgctgacagcctcccccgccaccttcctgcagacctcgctggtgcacctactgaagacagtgcggctgttgcggctgctgcggctgctgcagaagctggagcggtactctcagtgcagtgctgtggtgctcacgctgctcatgtcggtctttgcgctccttgcccactggatggcctgcatctggtatgtcatcgggcgccgggagatggaggccaatgacccgctgctctgggacattggtgagccaccgaccccaaacttt

SEQ ID NO: 17483 - DNA, 253 bp, Homo sapiens
  MAP TO CHR7.1; EXPRESSED IN BONE MARROW, SIGNAL = 0.84; EXPRESSED IN ADULT LIVER, SIGNAL = 1.3; EXPRESSED IN FETAL LIVER, SIGNAL =   1; EXPRESSED IN LUNG, SIGNAL = 1.1; EXPRESSED IN HELA, SIGNAL = 1.6; EXPRESSED IN HEART, SIGNAL =   1; NT HIT: gi16161685, EVALUE 0.00e+00; EST_HUMAN HIT: BI560941.1, EVALUE 0.00e+00; SWISSPROT HIT: Q9V3W6, EVALUE 1.40e+00
acctaccttggttggttctccacagtaacgttctccccccgctgatagccactgtctgccacctgggttgtagacctcttcacaatttgcttcaactcctgctccaagcgctctatgattgccttaactgtttctgggatcttcttcagtttcgccaagcccttaatgaggatacccataaacagggtgctgttttcctctggatccaattctaaatcttccttgatgtcctgcagatttatctccctcactg

SEQ ID NO: 17484 - DNA, 234 bp, Homo sapiens
  MAP TO CHR19.1; EXPRESSED IN LUNG, SIGNAL = 1.7; EXPRESSED IN HELA, SIGNAL = 1.4; EXPRESSED IN HEART, SIGNAL =   1; EXPRESSED IN BONE MARROW, SIGNAL = 0.94; EXPRESSED IN PLACENTA, SIGNAL = 1.9; EXPRESSED IN FETAL LIVER, SIGNAL = 0.96; EST_HUMAN HIT: BF740697.1, EVALUE 1.00e-125; SWISSPROT HIT: P10516, EVALUE 6.20e+00; NT HIT: gi8922288, EVALUE 2.00e-48
tctcacctttgcccatcacccgtgtaaactggctggggatgtctccgtcggcgacgggagccggggcaggctcactgccatcagtgggagctggagctggtggaggtgggtagttctccacagctggagggtccttggcctcggtgcctttgtctgtgccggggtgggctaggggaggctcagcacctggcagcggtggttcccccggggccccatccttggcagtaggggtgg

SEQ ID NO: 17485 - DNA, 187 bp, Homo sapiens
  MAP TO CHR12.1; EXPRESSED IN ADULT LIVER, SIGNAL = 3.9; EXPRESSED IN PLACENTA, SIGNAL = 6.4; EXPRESSED IN FETAL LIVER, SIGNAL = 3.9; EXPRESSED IN LUNG, SIGNAL = 5.6; EXPRESSED IN HELA, SIGNAL = 4.6; EXPRESSED IN HEART, SIGNAL = 4.4; EXPRESSED IN BONE MARROW, SIGNAL = 4.2; NT HIT: gi11436303, EVALUE 2.00e-93; SWISSPROT HIT: P22994, EVALUE 1.90e+00; EST_HUMAN HIT: BF525411.1, EVALUE 3.00e-93
ttgggtacccggccagcttttgaggtaccagccattgtggtggaggatgcccgagggaagcggcggtcctcgctggatggctcggagtctgccaagacatccctgcaggtcaccaacttggtcagcgccatcgtctttctctatgactcactcacaggggtgcccatcttggtgagatcggggtcct

SEQ ID NO: 17486 - DNA, 200 bp, Homo sapiens
  MAP TO CHR12.1; EXPRESSED IN PLACENTA, SIGNAL = 1.9; EXPRESSED IN FETAL LIVER, SIGNAL = 1.9; EXPRESSED IN LUNG, SIGNAL = 1.2; EXPRESSED IN HELA, SIGNAL =   4; EXPRESSED IN HEART, SIGNAL = 1.3; EXPRESSED IN ADULT LIVER, SIGNAL = 2.3; EXPRESSED IN BONE MARROW, SIGNAL = 1.5; NT HIT: AF126021.1, EVALUE 1.00e-102; SWISSPROT HIT: P50085, EVALUE 1.00e-20; EST_HUMAN HIT: BI193050.1, EVALUE 1.00e-102
ggagtcagacctgggcccgctgggtgatcagctgtgaggcattgaacttggccaccacactcttgagcacctcgttgacaatggacggcaacactcgttcctcgtagtccagccctaggcgctggtacatgctaggaagctcctgagcattgggtcgagacaacactcgcagggagatattcaccatctgtaggtctgag

SEQ ID NO: 17487 - DNA, 159 bp, Homo sapiens
  MAP TO CHR12.1; EXPRESSED IN FETAL LIVER, SIGNAL = 0.97; EXPRESSED IN LUNG, SIGNAL = 1.1; EXPRESSED IN HELA, SIGNAL = 1.3; EXPRESSED IN HEART, SIGNAL = 1.4; EXPRESSED IN BONE MARROW, SIGNAL = 0.8; EXPRESSED IN ADULT LIVER, SIGNAL =   1; NT HIT: gi16186504, EVALUE 2.00e-81; SWISSPROT HIT: O43306, EVALUE 1.00e-24; EST_HUMAN HIT: AI914903.1, EVALUE 2.00e-81
cagctcggtgccaatgtgctgctgttcctctgcaccaacgtcattggcatctgcacacactatccagcagaggtgtctcagcgccaggcctttcaggagacccgcggttacatccaggcccggctccacctgcagcatgagaatcggcagcaggtgggg

SEQ ID NO: 17488 - DNA, 354 bp, Homo sapiens
  MAP TO CHR9.1; EXPRESSED IN FETAL LIVER, SIGNAL = 3.8; EXPRESSED IN PLACENTA, SIGNAL = 3.2; EXPRESSED IN LUNG, SIGNAL = 2.4; EXPRESSED IN HELA, SIGNAL = 5.5; EXPRESSED IN HEART, SIGNAL = 2.5; NT HIT: gi14745306, EVALUE 0.00e+00; SWISSPROT HIT: Q08379, EVALUE 2.00e-34; EST_HUMAN HIT: BI014637.1, EVALUE 0.00e+00
cgcaccagctttacaaatccgctctgcagctcagccagctgctccttgagctcccggttctgggagagtgcgcggctgatggtagtgcggtcgttctgcatggtctccaggatttgcctgcgcgcctccgcctgctccccccagagctcggccgcccgctccagctccagcagcctctcctcctgctcccggttcaggcgactcaagccctcattgtcttgcacctgggcttgaagctgtcctgccagaccctccagctccttccgcaggtgctcagcctccgcttgtagctgctgctccacctcggagggccctgctgggggctctgggggcgggggttcagctgagaaagga

SEQ ID NO: 17489 - DNA, 350 bp, Homo sapiens
  MAP TO CHR19.1; EXPRESSED IN FETAL LIVER, SIGNAL = 0.65; EXPRESSED IN HELA, SIGNAL = 0.46; EXPRESSED IN LUNG, SIGNAL =   1; EXPRESSED IN HEART, SIGNAL =   1; EXPRESSED IN BONE MARROW, SIGNAL = 0.41; SWISSPROT HIT: Q9NP85, EVALUE 3.10e-01; EST_HUMAN HIT: R30969.1, EVALUE 1.90e+00
cacttcattttcacatcttcacatttccttatttcacatggtttcaaataaaatgcctccagcatgatttttcctttctcaagagcaaagtgaatgtgacttttcggaggggtcacaggatgcccgggaggcctgtggctgtggctggaccgctgcctgctttcagcttgactgaagggcttgtcagagttttcatctcctaagaaatgagcccctgggctggccagaaggaggagaaggcagcagtttgacccccacactgtgtttttcccactgacatcaaatcctgaggttttaaaattaatcccatacaaagacagttcttcattgtggtgcctgtttgaaattag

SEQ ID NO: 17490 - DNA, 170 bp, Homo sapiens
  MAP TO CHR5.1; EXPRESSED IN HEART, SIGNAL = 0.53; EXPRESSED IN ADULT LIVER, SIGNAL = 0.96; EXPRESSED IN BONE MARROW, SIGNAL = 0.68; EXPRESSED IN HELA, SIGNAL = 0.74; EXPRESSED IN FETAL LIVER, SIGNAL = 0.47; SWISSPROT HIT: P70478, EVALUE 1.10e+00; NT HIT: gi9910293, EVALUE 1.50e-01; EST_HUMAN HIT: BF963801.1, EVALUE 7.00e-91
catcatttgcctggattgagactgggacagctttggcttctcttgtttgatgccccatctctccttggtaactggtttaagctggtgggagtctcattaccatgatacaatggtgatactttgcacttgcatggtgaattttctccaaggagctcaaaagactttgtgtt

SEQ ID NO: 17491 - DNA, 469 bp, Homo sapiens
  MAP TO CHR19.1; EXPRESSED IN HEART, SIGNAL =  13; EXPRESSED IN BONE MARROW, SIGNAL =  11; EXPRESSED IN ADULT LIVER, SIGNAL =  11; EXPRESSED IN PLACENTA, SIGNAL =  12; EXPRESSED IN FETAL LIVER, SIGNAL =  10; EXPRESSED IN LUNG, SIGNAL =  15; EXPRESSED IN HELA, SIGNAL =   8; EST_HUMAN HIT: BG686263.1, EVALUE 1.00e-106; SWISSPROT HIT: P53539, EVALUE 3.00e-65; NT HIT: gi13631834, EVALUE 0.00e+00
gaaaaagcagagctggagtcggagatcgccgagctccaaaaggagaaggaacgtctggagtttgtgctggtggcccacaaaccgggctgcaagatcccctacgaagaggggcccgggccgggcccgctggcggaggtgagagatttgccgggctcagcaccggctaaggaagatggcttcagctggctgctgccgcccccgccaccaccgcccctgcccttccagaccagccaagacgcaccccccaacctgacggcttctctctttacacacagtgaagttcaagtcctcggcgaccccttccccgttgttaacccttcgtacacttcttcgtttgtcctcacctgcccggaggtctccgcgttcgccggcgcccaacgcaccagcggcagtgaccagccttccgatcccctgaactcgccctccctcctcgctctgtgaactctttagacacacaaaacaaacaaac

SEQ ID NO: 17492 - DNA, 265 bp, Homo sapiens
  MAP TO CHR6.1; EXPRESSED IN HEART, SIGNAL = 2.5; EXPRESSED IN ADULT LIVER, SIGNAL = 4.2; EXPRESSED IN PLACENTA, SIGNAL =   4; EXPRESSED IN FETAL LIVER, SIGNAL = 3.3; EXPRESSED IN LUNG, SIGNAL = 2.1; EXPRESSED IN HELA, SIGNAL = 4.9; EST_HUMAN HIT: BF909984.1, EVALUE 0.00e+00; SWISSPROT HIT: Q08345, EVALUE 3.00e-46; NT HIT: X99025.1, EVALUE 0.00e+00
cttccccccaggtccactgtaacaacatgcacacgctgggagcccgtctgcctggcggggtggaatgtcgcttccggcgtggccctgccatggcctgggagggggagcccatgcgccacaacctagggggcaacctgggggaccccagagcccgggctgtctcagtgccccttggcggccgtgtggctcgctttctgcagtgccgcttcctctttgcggggccctggttactcttcagcgaaatctccttcatctctggtaagcc

SEQ ID NO: 17493 - DNA, 231 bp, Homo sapiens
  MAP TO CHR13.1; EXPRESSED IN HELA, SIGNAL = 0.9; EXPRESSED IN HEART, SIGNAL = 1.1; EXPRESSED IN ADULT LIVER, SIGNAL =   1; EXPRESSED IN BONE MARROW, SIGNAL = 0.94; EXPRESSED IN FETAL LIVER, SIGNAL = 0.85; EXPRESSED IN LUNG, SIGNAL = 0.75; NT HIT: gi14757710, EVALUE 1.00e-126; EST_HUMAN HIT: BF432965.1, EVALUE 1.00e-126; SWISSPROT HIT: P16036, EVALUE 4.10e-01
acctgcactgttcactggagctctgcctcagcagaggggaacgcacaccctgagccctcccatcctgcaaattcagctttctctttgtgcttgaaggtgggtggctgaacgtgtgtgcccgtcttcgaaactgcggggagtcggaatcctcttcgggaaacgtttgccaagctgaggacggtggggacgctggcggtgtccctggtggagaatcccctggtgagtagtcct

SEQ ID NO: 17494 - DNA, 189 bp, Homo sapiens
  MAP TO CHR10.1; EXPRESSED IN HELA, SIGNAL =  24; EXPRESSED IN HEART, SIGNAL =  19; EXPRESSED IN ADULT LIVER, SIGNAL =  14; EXPRESSED IN BONE MARROW, SIGNAL =  12; EXPRESSED IN PLACENTA, SIGNAL =  21; EXPRESSED IN LUNG, SIGNAL =   8; SWISSPROT HIT: P05065, EVALUE 4.00e-20; EST_HUMAN HIT: BE712355.1, EVALUE 2.00e-63; NT HIT: gi16044804, EVALUE 1.00e-102
tggttagagatgaagagggactctctagcagcagccccagtctcactgcttggggtgtactttccttgacaggccaggctgttggccacggctcacttgactcctcctgggcagccttcaggttctccttcttcctgccccaggccttcagggcagaggcctgcagggctcggccataggagaaggtca

SEQ ID NO: 17495 - DNA, 200 bp, Homo sapiens
  MAP TO CHRX.1; EXPRESSED IN ADULT LIVER, SIGNAL = 0.88; EXPRESSED IN BONE MARROW, SIGNAL = 0.6; EXPRESSED IN FETAL LIVER, SIGNAL = 0.67; EXPRESSED IN HELA, SIGNAL = 0.4; EXPRESSED IN HEART, SIGNAL = 0.75; EST_HUMAN HIT: AU138833.1, EVALUE 1.00e-104; SWISSPROT HIT: Q93008, EVALUE 2.00e-33; NT HIT: X98296.1, EVALUE 1.00e-104
atatcatcatctacatcactacctgtgccttcaatggcaagaataccgttcctaatggaaggaatcatgtagagttgctgaatcacagaattcatgtaacaagtagcaccggcatttttcagccccacgaatcctttgggtgggcggggtccaacaggtggcagatattcccactcagtaagtgcttcacaagctgagag

SEQ ID NO: 17496 - DNA, 161 bp, Homo sapiens
  MAP TO CHR11.1; EXPRESSED IN HEART, SIGNAL = 1.4; EXPRESSED IN BONE MARROW, SIGNAL = 1.6; EXPRESSED IN PLACENTA, SIGNAL = 1.5; EXPRESSED IN FETAL LIVER, SIGNAL = 1.6; EXPRESSED IN LUNG, SIGNAL = 1.5; EXPRESSED IN HELA, SIGNAL = 3.5; SWISSPROT HIT: Q02877, EVALUE 5.00e-25; NT HIT: gi14723097, EVALUE 2.00e-83; EST_HUMAN HIT: AI610749.1, EVALUE 1.00e-85
gacactacaaaggtcagcaaattggcaaggtagtccaggtgtacagaaagaaatatgtcatctacatcgagcgggtgcagcgtgagaaggccaacggcacgactgtccacgtgggcattcacccaagcaaggtggttatcaccaggctaaaactggacaag

SEQ ID NO: 17497 - DNA, 184 bp, Homo sapiens
  MAP TO CHR3.1; EXPRESSED IN HELA, SIGNAL =   2; EXPRESSED IN LUNG, SIGNAL = 0.71; EXPRESSED IN ADULT LIVER, SIGNAL =   2; EST_HUMAN HIT: BE006004.1, EVALUE 5.00e-95; SWISSPROT HIT: Q13200, EVALUE 3.00e-27; NT HIT: U18247.1, EVALUE 3.00e-92
tactcaccactgcccaccatgcccatggcaaaaatggagttataggaaacttctggatcagcatcatgagagaatttgcttagggtatccaggatgttgagtcgtggatttgaaacagagatgagggccagtgctaaaggtacagccctccggagtgtaggctccccatatctcagctgatgat

SEQ ID NO: 17498 - DNA, 113 bp, Homo sapiens
  MAP TO CHR11.1; EXPRESSED IN HELA, SIGNAL = 2.3; EXPRESSED IN LUNG, SIGNAL = 1.4; EXPRESSED IN ADULT LIVER, SIGNAL = 3.9; EXPRESSED IN BONE MARROW, SIGNAL = 2.1; EXPRESSED IN HEART, SIGNAL = 1.6; EXPRESSED IN FETAL LIVER, SIGNAL = 2.3; EXPRESSED IN PLACENTA, SIGNAL = 1.9; NT HIT: AE006212.1, EVALUE 3.70e-01; EST_HUMAN HIT: BF891784.1, EVALUE 1.40e-01
taactctgctttacaaacccattctgatacaaattcagagagaaatgaatgtaaaacatttatttcagattgtgcctcatctcacagtaacatgtttgactaaattccagttc

SEQ ID NO: 17499 - DNA, 226 bp, Homo sapiens
  MAP TO CHR10.1; EXPRESSED IN PLACENTA, SIGNAL =  19; EXPRESSED IN FETAL LIVER, SIGNAL =  13; EXPRESSED IN LUNG, SIGNAL =  17; EXPRESSED IN HELA, SIGNAL =  12; EXPRESSED IN HEART, SIGNAL = 4.9; EXPRESSED IN ADULT LIVER, SIGNAL =  10; EXPRESSED IN BONE MARROW, SIGNAL =  11; EST_HUMAN HIT: BI258330.1, EVALUE 9.00e-85; SWISSPROT HIT: O09167, EVALUE 3.00e-21; NT HIT: gi4506610, EVALUE 1.00e-82
gcagccatcttccagtaattcgccaaaatgatgaacgcaaaggaaaagaagaaaggcacctgatgtatgttctctaggccttttagaaaacatggagttgttcctttggccatgtatatgcgaatctataagaaaggtgatattgtagacatcaagagaatggatattgtttaaaaaggaatgcccacaggtgttaccacggcaaaactggaagagtctacaatgt

SEQ ID NO: 17500 - DNA, 207 bp, Homo sapiens
  MAP TO CHR9.1; EXPRESSED IN PLACENTA, SIGNAL = 2.1; EXPRESSED IN FETAL LIVER, SIGNAL = 1.2; EXPRESSED IN LUNG, SIGNAL = 1.7; EXPRESSED IN HELA, SIGNAL = 2.1; EXPRESSED IN HEART, SIGNAL = 1.7; EXPRESSED IN BONE MARROW, SIGNAL = 1.1; EXPRESSED IN ADULT LIVER, SIGNAL = 0.66; SWISSPROT HIT: P12011, EVALUE 5.60e-02; EST_HUMAN HIT: AW501530.1, EVALUE 1.00e-110; NT HIT: AB011087.1, EVALUE 1.00e-110
caaggattcagaacaaggctctggacagagcaaggagcacagaccaggacccatcggcaacgagcgttctctgaaaaacagaaagggctcggagggggccgagcggctgcaaggggctgtcgtcccgcctgttaacggggtggagattcacgtggactccgtgctgcctgtgccacccattgaatttggagtcagtccaaaagtgag

SEQ ID NO: 17501 - DNA, 272 bp, Homo sapiens
  MAP TO CHR12.1; EXPRESSED IN PLACENTA, SIGNAL = 2.1; EXPRESSED IN FETAL LIVER, SIGNAL = 0.68; EXPRESSED IN HELA, SIGNAL = 0.88; EXPRESSED IN HEART, SIGNAL = 0.78; EXPRESSED IN ADULT LIVER, SIGNAL = 0.8; EXPRESSED IN BONE MARROW, SIGNAL = 0.87; SWISSPROT HIT: P49023, EVALUE 1.00e-53; EST_HUMAN HIT: BI916004.1, EVALUE 0.00e+00; NT HIT: U87946.1, EVALUE 0.00e+00
cctagcagaagagcttgaggaagcagttctgacagtaaggcttgtcgttctgctccttgaaggtgcccttgttgagctgcttgaggcagaaggcacagacgaagtgctcggggtggaacttcttggccatggcggtgatgcagcggccggtgatgggcttctggcagccagaacacagcgagccgcgccgctcgtggtagtgcacctcacagtagggctgcccgtcgtgctcgaagaagctgccgttcacgaatggcgtgaagcattcctgc

SEQ ID NO: 17502 - DNA, 205 bp, Homo sapiens
  MAP TO CHR15.1; EXPRESSED IN HEART, SIGNAL = 0.87; EXPRESSED IN ADULT LIVER, SIGNAL = 0.85; EXPRESSED IN BONE MARROW, SIGNAL = 0.63; EXPRESSED IN FETAL LIVER, SIGNAL = 0.74; EXPRESSED IN LUNG, SIGNAL = 0.56; EXPRESSED IN HELA, SIGNAL = 0.77; SWISSPROT HIT: P13055, EVALUE 3.70e-01
agcagccggcacggggcgcccgtccctgaggtgggggcgccgagaggagcggccgctttgtcgaggcccaggagacatctgggcgggggtgtcgcgtgggctgtgcaggctgagctcagcagaggggcccggctggaggacacatttgggagtcgtgagcacttgggtgatatttacagcccaggaagagatgagctcaccggcc

SEQ ID NO: 17503 - DNA, 411 bp, Homo sapiens
  MAP TO CHR8.1; EXPRESSED IN FETAL LIVER, SIGNAL = 1.3; EXPRESSED IN HELA, SIGNAL = 1.4; EXPRESSED IN LUNG, SIGNAL =   1; EXPRESSED IN HEART, SIGNAL = 1.2; EXPRESSED IN ADULT LIVER, SIGNAL = 0.94; EXPRESSED IN BONE MARROW, SIGNAL =   1; SWISSPROT HIT: P10272, EVALUE 7.00e-14; EST_HUMAN HIT: BF971469.1, EVALUE 9.00e-40; NT HIT: AF110520.1, EVALUE 0.00e+00
ttccttcgtggaaaggacagcgttttgttcttactggagtagatacttattctggttatggatttgcctttcctgcacgtaatgcctctgctaaaaccaccattcacggactgacagaatgcctcatctatcgtcatggtattccacacagtattgcttctgaccaaggaactcatttcacagccagagaagtacgacagtgggctcacgatcatggaattcactggtcttaccacattccccatcatcctgaagcagctgggctgatagaaagatggaatggccttttgaagacgcagttacagcgccaattaggtggtaacagcttggaaggctggggtagagttcttcagaaggcagtatatgctttgaatcagcgctcgatatatggtacagtttcacccatagcca

SEQ ID NO: 17504 - DNA, 179 bp, Homo sapiens
  MAP TO CHR1.1; EXPRESSED IN FETAL LIVER, SIGNAL = 3.4; EXPRESSED IN LUNG, SIGNAL = 2.8; EXPRESSED IN HELA, SIGNAL = 7.1; EXPRESSED IN HEART, SIGNAL =   3; EXPRESSED IN BONE MARROW, SIGNAL = 2.8; EXPRESSED IN ADULT LIVER, SIGNAL = 2.4; EXPRESSED IN PLACENTA, SIGNAL = 5.6; SWISSPROT HIT: P50993, EVALUE 3.00e-26; EST_HUMAN HIT: W22069.1, EVALUE 6.00e-82; NT HIT: J05096.1, EVALUE 2.00e-96
tccagggagccattgtggccgtgacgggtgacggggtgaacgactcccctgcattgaagaaggctgacattggcattgccatgggcatctctggctctgacgtctctaagcaggcagccgacatgatcctgctggatgacaactttgcctccatcgtcacgggggtggaggagggtgag

SEQ ID NO: 17505 - DNA, 124 bp, Homo sapiens
  MAP TO CHR1.1; EXPRESSED IN BONE MARROW, SIGNAL = 4.2; EXPRESSED IN HEART, SIGNAL = 2.6; EXPRESSED IN ADULT LIVER, SIGNAL = 4.2; EXPRESSED IN PLACENTA, SIGNAL = 4.3; EXPRESSED IN FETAL LIVER, SIGNAL = 5.1; EXPRESSED IN LUNG, SIGNAL = 2.8; EXPRESSED IN HELA, SIGNAL = 3.6; SWISSPROT HIT: P14728, EVALUE 4.00e-01; EST_HUMAN HIT: AV690724.1, EVALUE 5.00e-63; NT HIT: gi10863930, EVALUE 4.00e-63
gtaccccctgtaccggctgggtggcccacaacttcgggtgttccgaaccaacttcttcattcagctggtgcggcccggtgtggcccagcccgaggacaccgtgcagttccggatccccatggag

SEQ ID NO: 17506 - DNA, 470 bp, Homo sapiens
  MAP TO CHR5.1; EXPRESSED IN HEART, SIGNAL = 1.1; EXPRESSED IN FETAL LIVER, SIGNAL = 0.67; EXPRESSED IN LUNG, SIGNAL =   1; EXPRESSED IN HELA, SIGNAL = 0.47; NT HIT: gi14724343, EVALUE 0.00e+00; SWISSPROT HIT: Q9Y5I0, EVALUE 1.00e-29; EST_HUMAN HIT: AL589367.1, EVALUE 0.00e+00
ggactacaaagggcttgtcctgctgggaatcctcctggggactctgtgggagaccggatgcacccagatacgctattcagttccggaagagctggagaaaggctctagggtgggcgacatctccagggacctggggctggagccccgggagctcgcggagcgcggagtccgcatcatccccagaggtaggacgcagcttttcgccctgaatccgcgcagcggcagcttggtcacggcgggcaggatagaccgggaggagctctgtatgggggccatcaagtgtcaattaaatctagacattctgatggaggataaagtgaaaatatatggagtagaagtagaagtaagggacattaacgacaatgcgccttactttcgtgaaagtgaattagaaataaaaattagtgaaaatgcagccactgagatgcggttccctctaccccacgcctgggatccggatatcgggaaga

SEQ ID NO: 17507 - DNA, 178 bp, Homo sapiens
  MAP TO CHR17.1; EXPRESSED IN HELA, SIGNAL = 1.5; EXPRESSED IN BONE MARROW, SIGNAL = 0.63; EXPRESSED IN HEART, SIGNAL = 0.5; EXPRESSED IN PLACENTA, SIGNAL = 1.3; EXPRESSED IN FETAL LIVER, SIGNAL = 0.77; EXPRESSED IN LUNG, SIGNAL = 1.2; SWISSPROT HIT: Q23356, EVALUE 4.00e-16; NT HIT: gi15314378, EVALUE 1.00e-76; EST_HUMAN HIT: BG761039.1, EVALUE 1.00e-76
gcctctgacctgcccaagggctcctgttgcaggggtcaacctgctggtgggcacggagaacgggctgatgttgctggaccgaagtgggcagggcaaggtgtatggactcattgggcggcgacgcttccagcagatggatgtgctggaggggctcaacctgctcatcaccatctcaggt

SEQ ID NO: 17508 - DNA, 154 bp, Homo sapiens
  MAP TO CHR17.1; EXPRESSED IN HELA, SIGNAL = 0.4; EXPRESSED IN BONE MARROW, SIGNAL = 0.36; SWISSPROT HIT: Q13495, EVALUE 3.00e-01; EST_HUMAN HIT: BE388808.1, EVALUE 2.00e-01; NT HIT: AF263461.1, EVALUE 2.10e+00
gtggggtgcctggcagtgctgggctcagctctgcctcacaatacccacgtgccacccccagacaatggacaagggccggctgcagaggctgactcactctctgagggttagccaagccagtggggactaccccagaccactgtggagtcccagc

SEQ ID NO: 17509 - DNA, 222 bp, Homo sapiens
  MAP TO CHR22.1; EXPRESSED IN FETAL LIVER, SIGNAL = 1.1; EXPRESSED IN LUNG, SIGNAL = 1.1; EXPRESSED IN HELA, SIGNAL = 1.1; EXPRESSED IN HEART, SIGNAL = 0.96; EXPRESSED IN BONE MARROW, SIGNAL = 0.85; EXPRESSED IN ADULT LIVER, SIGNAL = 0.79; SWISSPROT HIT: Q9Y6J0, EVALUE 2.00e-34; EST_HUMAN HIT: BF874516.1, EVALUE 1.00e-115; NT HIT: gi6912457, EVALUE 1.00e-115
ggcccacctcagttgaagttccctcaatgtaggcagagactttgtccaggctaagggctggcctctctgtgcgaggcacaatggtggcaattctcttcagtaggttggccaagtcagcagacacggtgctggtcttatagctgtcaaattcaggaagggtcttgggcttaaaatactcaaacatgaacagtgcatcctcccatataagatccaccttgaaaa

SEQ ID NO: 17510 - DNA, 343 bp, Homo sapiens
  MAP TO CHR2.1; EXPRESSED IN HELA, SIGNAL =  14; EXPRESSED IN HEART, SIGNAL = 3.3; EXPRESSED IN PLACENTA, SIGNAL =  17; EXPRESSED IN FETAL LIVER, SIGNAL = 6.7; EXPRESSED IN LUNG, SIGNAL =  15; EST_HUMAN HIT: BG777815.1, EVALUE 0.00e+00; NT HIT: L05094.1, EVALUE 0.00e+00; SWISSPROT HIT: P08526, EVALUE 7.00e-43
ggacgcaaagccatcatcatgaagaacattgatgatggcacctcagatcgcccctacagccacctctggtggctggaattgactgctacccccgcaaagtgatagctgtcatgggcaagaagaagatcgccaagaggtcaaagatcaagtcttttgtgagagtttataactataatcacctaatgcccacaaggtactctgtggatatccccttgaacaaaactgtcatcagtaaggatgtcttcagagatcctgctcttaaacgcaaggcctgacgagaggtcaaggtcaagtttgaagagagatacaagataggcaagaacaagtggttcttccagaagct

SEQ ID NO: 17511 - DNA, 333 bp, Homo sapiens
  MAP TO CHR1.1; EXPRESSED IN PLACENTA, SIGNAL = 1.5; EXPRESSED IN LUNG, SIGNAL =   1; EXPRESSED IN HELA, SIGNAL = 1.7; EXPRESSED IN HEART, SIGNAL = 1.3; EXPRESSED IN ADULT LIVER, SIGNAL = 2.2; EST_HUMAN HIT: BF530906.1, EVALUE 1.20e-01; NT HIT: U41453.1, EVALUE 3.10e-01; SWISSPROT HIT: Q9Z0J6, EVALUE 2.80e-01
gggcaagaaaactgggacatctggagttcagaagtcgaggaaaatggggaagaaccaggaagatgaatacatgatcatcagctacacaaaagaacggagcaaaaagaagccgggatttgggcacaggcgtctggcaaggaggccggcagcagggctaatgaagcatttgcggcgtgggacatttgccaacgcaacaaagaagatgtgcttgggctctgcagatgtgccagggcccccagagcaaaataatgacataatcaccatcagtgtcacagaccagactgtacacaaggtgacaggggaggggaggcctgtaatgcgcacacagggagg

SEQ ID NO: 17512 - DNA, 179 bp, Homo sapiens
  MAP TO CHR7.1; EXPRESSED IN PLACENTA, SIGNAL = 3.5; EXPRESSED IN FETAL LIVER, SIGNAL = 2.8; EXPRESSED IN LUNG, SIGNAL = 4.7; EXPRESSED IN HELA, SIGNAL = 3.5; EXPRESSED IN BONE MARROW, SIGNAL = 2.7; EXPRESSED IN ADULT LIVER, SIGNAL = 1.6; EXPRESSED IN HEART, SIGNAL = 1.3; NT HIT: AJ132695.5, EVALUE 2.00e-96; SWISSPROT HIT: P15154, EVALUE 2.00e-27; EST_HUMAN HIT: BG945624.1, EVALUE 3.00e-96
ttcttcacatctagtggtatcctgaggtgcggcaccactgtcccaacactcccatcatcctagtgggaactaaacttgatcttagggatgataaagacacgatcgagaaactgaaggagaagaagctgactcccatcacctatccgcagggtctagccatggctaaggagattggtatg

SEQ ID NO: 17513 - DNA, 201 bp, Homo sapiens
  MAP TO CHR20.1; EXPRESSED IN ADULT LIVER, SIGNAL = 1.2; EXPRESSED IN HELA, SIGNAL = 1.1; EXPRESSED IN HEART, SIGNAL = 0.83; EXPRESSED IN BONE MARROW, SIGNAL = 1.2; EST_HUMAN HIT: BE818064.1, EVALUE 1.00e-103; NT HIT: M60701.1, EVALUE 1.00e-109; SWISSPROT HIT: P11387, EVALUE 2.00e-32
cagcttgctctgagagcaggcaatgaaaaggaggaaggagaaacagcggacactgtgggctgctgctcacttcgtgtggagcacatcaatctacacccagagttggatggtcaggaatatgtggtagagtttgacttcctcgggaaggactccatcagatactataacaaggtccctgttgagaaacgagtaagttaatgt

SEQ ID NO: 17514 - DNA, 215 bp, Homo sapiens
  MAP TO CHR19.1; EXPRESSED IN HEART, SIGNAL = 1.5; EXPRESSED IN FETAL LIVER, SIGNAL =   1; EXPRESSED IN LUNG, SIGNAL = 1.9; EXPRESSED IN HELA, SIGNAL = 0.89; SWISSPROT HIT: P13807, EVALUE 1.00e-32; EST_HUMAN HIT: AL135668.1, EVALUE 1.00e-101; NT HIT: Z33624.1, EVALUE 1.00e-118
ccctgtccctgttgcccacagttcctggcacagagtgaggagaagccacatgtggttgctcacttccatgagtggttggcaggcgttggactctgcctgtgtcgtgcccggcgactgcctgtagcaaccatcttcaccacccatgccacgctgctggggcgctacctgtgtgccggtgccgtggacttctacaacaacctggagaacgtgagctg

SEQ ID NO: 17515 - DNA, 180 bp, Homo sapiens
  MAP TO CHR22.1; EXPRESSED IN ADULT LIVER, SIGNAL =   2; EXPRESSED IN BONE MARROW, SIGNAL = 1.2; EXPRESSED IN FETAL LIVER, SIGNAL = 1.3; EXPRESSED IN LUNG, SIGNAL = 3.2; EXPRESSED IN HELA, SIGNAL = 1.1; EXPRESSED IN HEART, SIGNAL =   2; EST_HUMAN HIT: AV694817.1, EVALUE 2.00e-94; NT HIT: gi14776957, EVALUE 1.00e-94; SWISSPROT HIT: O43272, EVALUE 2.00e-07
tgcaggccaggccggctaccccgtgtacaagtacgtgccctatggccccgtgatggaggtgctgccctacttgtcccgccgtgccctggagaacagcagcctcatgaagggcacccatcgggagcggcagctgctgtggctggagctcttgaggcggctccgaactggcaacctcttcca

SEQ ID NO: 17516 - DNA, 152 bp, Homo sapiens
  MAP TO AC009789.19; EXPRESSED IN HELA, SIGNAL = 1.7; EXPRESSED IN HEART, SIGNAL = 2.5; EXPRESSED IN PLACENTA, SIGNAL = 1.7; EXPRESSED IN FETAL LIVER, SIGNAL = 1.8; EXPRESSED IN LUNG, SIGNAL = 3.1; SWISSPROT HIT: P54219, EVALUE 8.80e-01; EST_HUMAN HIT: AL601154.1, EVALUE 3.00e-03; NT HIT: AF287967.1, EVALUE 2.00e-80
tctctcactctctcccaagcctccatttgtgtgttcatcttgactccttctcttcctatttggatgagggaggagaaatgcaaaggaaaaataccaaatggcctcacggagatcttttttacgggagttgaaacaggcaacctgaaatgaac

SEQ ID NO: 17517 - DNA, 227 bp, Homo sapiens
  MAP TO CHR5.1; EXPRESSED IN FETAL LIVER, SIGNAL = 0.94; EXPRESSED IN HELA, SIGNAL = 1.5; EXPRESSED IN HEART, SIGNAL = 1.2; EXPRESSED IN BONE MARROW, SIGNAL =   1; EXPRESSED IN ADULT LIVER, SIGNAL = 0.8; SWISSPROT HIT: P16382, EVALUE 3.40e+00; EST_HUMAN HIT: AW839062.1, EVALUE 1.00e-117; NT HIT: AB024745.1, EVALUE 1.00e-125
ctgcaggctgtgatccccactgatgctgatccccagtacttgaacccctggacacagatcctctgatgtggacccaggactgcttcccctgcctggtccagccctggttggggagggtgggcccagctcagcagggacagtttggggagagtccgagaggctgggctgattcccttctgtgctcccacatgcttccggaacagtgacaggtgagtgaaaaccaggta

SEQ ID NO: 17518 - DNA, 302 bp, Homo sapiens
  MAP TO CHR17.1; EXPRESSED IN FETAL LIVER, SIGNAL = 2.1; EXPRESSED IN HELA, SIGNAL = 2.2; EXPRESSED IN LUNG, SIGNAL = 1.8; EXPRESSED IN HEART, SIGNAL = 1.2; EXPRESSED IN BONE MARROW, SIGNAL = 1.4; EXPRESSED IN ADULT LIVER, SIGNAL = 1.2; EXPRESSED IN PLACENTA, SIGNAL = 2.3; EST_HUMAN HIT: BF088961.1, EVALUE 1.00e-118; NT HIT: gi15314378, EVALUE 0.00e+00; SWISSPROT HIT: P02846, EVALUE 1.60e+00
agcaggcagcccaccctccctggtctctccctgcagagcctggtggcacaccgggtcccactgaagccatatgcagcacctgtaccccgatcccagtccctgcaggaccagcccacccgaaacctggctgccttcccagcctcccatgaccccgaccctgccatccccgcacccactgccacgcccagtgcccgaggagctgtcatccgccagaattcagaccccacctctgaaggacctggccccagcccgaatcccccagcctgggtccgcccagataacgaggccccacccaaggtaag

SEQ ID NO: 17519 - DNA, 267 bp, Homo sapiens
  MAP TO CHR9.1; EXPRESSED IN LUNG, SIGNAL = 1.8; EXPRESSED IN HELA, SIGNAL =   3; EXPRESSED IN ADULT LIVER, SIGNAL = 3.9; EXPRESSED IN HEART, SIGNAL = 2.3; EXPRESSED IN FETAL LIVER, SIGNAL = 2.8; SWISSPROT HIT: Q9R1Z8, EVALUE 1.20e+00; EST_HUMAN HIT: BG825117.1, EVALUE 3.60e-01
tccagaaccgattagtagagaattgcagctgtaatctgtgcccgtgatggtgggccataaagagggatgggatgtgcacagcgctcccaaggtggcgcccgcagacatggcccggggacgccgggaatgaaaaatggttttaattccctcccagcagcaataatttgattcttcataaatttttccatcaaagtgttgttgagctgagttcccacagagcaggacacgtgacagggtgggggagtgtcgggaggagcggtcagcaga

SEQ ID NO: 17520 - DNA, 229 bp, Homo sapiens
  MAP TO CHR19.1; EXPRESSED IN HELA, SIGNAL = 1.1; EXPRESSED IN HEART, SIGNAL = 0.69; EXPRESSED IN ADULT LIVER, SIGNAL = 1.4; SWISSPROT HIT: P53781, EVALUE 5.10e-01; NT HIT: AF254411.1, EVALUE 8.00e-72; EST_HUMAN HIT: BF530819.1, EVALUE 2.00e-70
cacagatcctcagccacagaaagccaccctcaagtctggggatgaccccagctcctgtgcccacctctttgggtctgccccctggcccctccagctacctgcttcctggcagcctccctctggggggctgcggttcgaccccccccacccccaccgggctggctgccacgtctgacaagagagagggcagcagcagctctgagggccgtggggacacagataaggtgag

SEQ ID NO: 17521 - DNA, 227 bp, Homo sapiens
  MAP TO CHR9.1; EXPRESSED IN FETAL LIVER, SIGNAL = 0.86; EXPRESSED IN LUNG, SIGNAL = 0.78; EXPRESSED IN HELA, SIGNAL = 0.88; EXPRESSED IN HEART, SIGNAL = 0.79; EXPRESSED IN BONE MARROW, SIGNAL = 0.86; EST_HUMAN HIT: AL525795.1, EVALUE 1.00e-101; SWISSPROT HIT: Q63342, EVALUE 2.00e-10; NT HIT: gi14745772, EVALUE 1.00e-124
ccgagaagagtgtgccatatcagcggaccctgaaggagggacaaggcacctcggtggtggcccaaggcccaagccggcccctgcccagcacggccaacgtggtggtcattggtggaggcagcttgggctgccagaccctgtaccacctggccaagctgggcatgagtggggcggtgctgctggagcgggagcggctgacctccgggaccacctggcacacggcaggt

SEQ ID NO: 17522 - DNA, 212 bp, Homo sapiens
  MAP TO CHR18.1; EXPRESSED IN HELA, SIGNAL = 0.93; EXPRESSED IN FETAL LIVER, SIGNAL = 1.6; EXPRESSED IN LUNG, SIGNAL = 1.3; EXPRESSED IN HEART, SIGNAL = 0.85; EXPRESSED IN BONE MARROW, SIGNAL = 1.5; EXPRESSED IN ADULT LIVER, SIGNAL = 0.82; EXPRESSED IN PLACENTA, SIGNAL = 1.5; SWISSPROT HIT: P25059, EVALUE 3.00e-05; NT HIT: AF003528.1, EVALUE 2.00e-72; EST_HUMAN HIT: BE064410.1, EVALUE 2.00e-54
tgtcacctagttgacactgtaattgtgacttcaaaaggccattccaccattctatcaatccagctgcttcaggatgatgggaaacatggtaagaccagtgaattccatgatcatgagcccactgccgcacttctttagccataaagtgagtgccttggtcagaggcaatgctgtgtgggatatcatgatggtggataaggcattccgtgagt

SEQ ID NO: 17523 - DNA, 170 bp, Homo sapiens
  MAP TO CHR12.1; EXPRESSED IN FETAL LIVER, SIGNAL = 1.8; EXPRESSED IN PLACENTA, SIGNAL = 3.9; EXPRESSED IN LUNG, SIGNAL = 3.4; EXPRESSED IN HELA, SIGNAL = 3.1; EXPRESSED IN HEART, SIGNAL = 2.6; EXPRESSED IN ADULT LIVER, SIGNAL = 2.8; SWISSPROT HIT: P15381, EVALUE 5.00e-27; NT HIT: Z26300.1, EVALUE 5.00e-91; EST_HUMAN HIT: AA927640.1, EVALUE 3.00e-31
ccagcgacagtgcgtggaatacgccctcaaggcccggcccctgcggaggtacatccccaagaaccagcaccagtacaaagtgtggtacgtggtcaactccacctacttcgagtacctgatgttcgtcctcatcctgctcaacaccatctgcctggccatgcaggtcagtc

SEQ ID NO: 17524 - DNA, 207 bp, Homo sapiens
  MAP TO CHR5.1; EXPRESSED IN PLACENTA, SIGNAL =  83; EXPRESSED IN HELA, SIGNAL = 1.8e+02; EXPRESSED IN LUNG, SIGNAL =  53; EXPRESSED IN BONE MARROW, SIGNAL =  67; SWISSPROT HIT: P53506, EVALUE 6.00e-33; NT HIT: AF209434.1, EVALUE 1.00e-91; EST_HUMAN HIT: BE179879.1, EVALUE 5.00e-89
ctgcatcctgtcagcaatgccagggtacatagtggtgccaccagacagcactgtgctggtgtacaggtctttgcggatgtccaagtcacacttcatgatggagttgaaggtagtttcgtggatgccacaggactccatgcccaggaaggaaggctggaagagcgcctcggggcagcagaaccactcgttgccaatggtgatgacctg

SEQ ID NO: 17525 - DNA, 281 bp, Homo sapiens
  MAP TO CHR11.1; EXPRESSED IN HELA, SIGNAL = 1.2; EXPRESSED IN HEART, SIGNAL = 1.3; EXPRESSED IN BONE MARROW, SIGNAL =   1; EXPRESSED IN PLACENTA, SIGNAL = 1.3; EXPRESSED IN LUNG, SIGNAL =   2; EST_HUMAN HIT: AW261875.1, EVALUE 0.00e+00; SWISSPROT HIT: P96335, EVALUE 1.30e+00; NT HIT: gi5453979, EVALUE 0.00e+00
aaattattcacaaaaagcagctggaaatcagaaaggcagctgccgctccagggtctcaaatccattaaaaccaccacagaacaattaaaacaatcagagagagaaaaggaaaaggaaacaacgtccaacatttggcatttggttttatccacaggttttcccagagctcctcttggaattgaaagcaaaatatattggcaaacactgcttctcaatacacaggaaggggagcctcagtgcctcctgccaacagaggcggctctgtgcagtcagactgtggg

SEQ ID NO: 17526 - DNA, 281 bp, Homo sapiens
  MAP TO CHR17.1; EXPRESSED IN FETAL LIVER, SIGNAL = 1.2; EXPRESSED IN LUNG, SIGNAL = 1.3; EXPRESSED IN PLACENTA, SIGNAL = 1.2; EXPRESSED IN HELA, SIGNAL = 1.2; EXPRESSED IN HEART, SIGNAL =   1; EXPRESSED IN ADULT LIVER, SIGNAL = 0.89; SWISSPROT HIT: P51692, EVALUE 2.00e-35; NT HIT: gi14786064, EVALUE 1.00e-113; EST_HUMAN HIT: AL513644.1, EVALUE 1.00e-113
cttttgtggcttgagggaataaatcatgcaactgttttctcatcagattctggcctctctccctctcagggcagggtgccatttgccgtgcctgacaaagtgctgtggccacagctgtgtgaggcgctcaacatgaaattcaaggccgaagtgcagagcaaccggggcctgaccaaggagaacctcgtgttcctggcgcagaaactgttcaacaacagcagcagccacctggaggactacagtggcctgtctgtgtcctggtcccagttcaacagggtgag

SEQ ID NO: 17527 - DNA, 188 bp, Homo sapiens
  MAP TO CHR20.1; EXPRESSED IN ADULT LIVER, SIGNAL = 1.6e+02; EXPRESSED IN PLACENTA, SIGNAL =  89; EXPRESSED IN HELA, SIGNAL =  54; EXPRESSED IN LUNG, SIGNAL =  79; EXPRESSED IN HEART, SIGNAL =  11; EST_HUMAN HIT: AI284250.1, EVALUE 8.00e-97; NT HIT: gi14771678, EVALUE 1.00e-102; SWISSPROT HIT: P02792, EVALUE 8.00e-29
ccatgagctcccagattcgtcaaaattattccaccgacgtggaggcagccgtcaacagcctggtcaatttgtacctgcaggcctcctacacctacctctctctgggcttctatttcgaccgcgatgatgcggctctggaaggcgtgagccacttcttccgcgaattgaccgaggagaagcgcgagggc

SEQ ID NO: 17528 - DNA, 201 bp, Homo sapiens
  MAP TO CHR13.1; EXPRESSED IN HELA, SIGNAL =   1; EXPRESSED IN HEART, SIGNAL = 1.6; EXPRESSED IN BONE MARROW, SIGNAL = 1.9; EXPRESSED IN ADULT LIVER, SIGNAL = 2.5; EXPRESSED IN LUNG, SIGNAL = 1.9; EXPRESSED IN FETAL LIVER, SIGNAL = 1.6; EST_HUMAN HIT: AL044849.1, EVALUE 2.00e-60; SWISSPROT HIT: P51587, EVALUE 3.00e-25; NT HIT: X95177.1, EVALUE 1.00e-109
ctcagcccagatgacttcaaagtcttgtaaaggggagaaagagattgatgaccaaaagaactgcaaaaagagaagagccttggatttcttgagtagactgcctttacctccacctgttagtcccatttgtacatttgtttctccggctgcacagaaggcatttcagccaccaaggagttgtggcaccaaatacgaaacacc

SEQ ID NO: 17529 - DNA, 276 bp, Homo sapiens
  MAP TO CHR5.1; EXPRESSED IN LUNG, SIGNAL = 3.1; EXPRESSED IN HELA, SIGNAL = 0.65; EXPRESSED IN HEART, SIGNAL = 1.4; EXPRESSED IN BONE MARROW, SIGNAL =   1; SWISSPROT HIT: P08571, EVALUE 7.00e-49; NT HIT: gi4557416, EVALUE 0.00e+00; EST_HUMAN HIT: AL543176.1, EVALUE 0.00e+00
cgcaacgtgtcgtgggcgacagggcgttcttggctcgccgagctgcagcagtggctcaagccaggcctcaaggtactgagcattgcccaagcacactcgcctgccttttcctgcgaacaggttcgcgccttcccggcccttaccagcctagacctgtctgacaatcctggactgggcgaacgcggactgatggcggctctctgtccccacaagttcccggccatccagaatctagcgctgcgcaacacaggaatggagacgcccacaggcgtgtgc

SEQ ID NO: 17530 - DNA, 188 bp, Homo sapiens
  MAP TO CHR7.1; EXPRESSED IN HELA, SIGNAL =   1; EXPRESSED IN HEART, SIGNAL = 0.78; EXPRESSED IN BONE MARROW, SIGNAL = 1.1; EXPRESSED IN FETAL LIVER, SIGNAL = 1.1; EXPRESSED IN PLACENTA, SIGNAL = 1.2; EXPRESSED IN LUNG, SIGNAL = 0.6; SWISSPROT HIT: Q06397, EVALUE 1.10e+00; NT HIT: gi15603881, EVALUE 6.60e-01; EST_HUMAN HIT: AW892927.1, EVALUE 9.70e-01
ttctctttggaaaatgaatactcttctgggtcccatgggagctgttccttgtggcatttgcacagacggccatctgagctgagtgcttattagatcggatgaaatatcgtttaaggttagcagccagacatcacaggccacccactggacatgctgggaatgaaaaagaggccaaaggacgagcgtct

SEQ ID NO: 17531 - DNA, 187 bp, Homo sapiens
  MAP TO CHR2.1; EXPRESSED IN FETAL LIVER, SIGNAL = 0.61; EXPRESSED IN LUNG, SIGNAL = 0.97; EXPRESSED IN HELA, SIGNAL = 0.6; EXPRESSED IN HEART, SIGNAL = 0.86; EST_HUMAN HIT: AL040601.1, EVALUE 2.00e-97; SWISSPROT HIT: P52789, EVALUE 9.00e-32; NT HIT: Z46359.1, EVALUE 9.00e-99
ggcagcaacgcctgctacatggaagagatgcgccacatcgacatggtggaaggcgatgaggggcggatgtgtatcaatatggagtggggggccttcggggacgatggctcgctcaacgacattcgcactgagtttgaccaggagattgacatgggctcactgaacccgggaaagcaactgtgagtag

SEQ ID NO: 17532 - DNA, 200 bp, Homo sapiens
  MAP TO CHR19.1; EXPRESSED IN HELA, SIGNAL = 4.1; EXPRESSED IN LUNG, SIGNAL = 1.5; EXPRESSED IN BONE MARROW, SIGNAL = 2.9; EXPRESSED IN HEART, SIGNAL = 1.5; EXPRESSED IN ADULT LIVER, SIGNAL = 3.2; EXPRESSED IN PLACENTA, SIGNAL = 3.3; EXPRESSED IN FETAL LIVER, SIGNAL = 3.1; SWISSPROT HIT: P12955, EVALUE 4.00e-31; NT HIT: gi14763032, EVALUE 1.00e-102; EST_HUMAN HIT: AL566028.1, EVALUE 1.00e-102
cacactgacctctgggtagcctcccacgtcgtgcacgtcaatgcccaggaagtggccaagcccgtgaggcataaacacggcccccaggtgagcctggaccatggcgtccacgctgccgctcaggatgcccatgtgggccagctcctccaggtggatgcggtcagccaggcggtgcatgtcaggccaccagacacctgtgg

SEQ ID NO: 17533 - DNA, 112 bp, Homo sapiens
  MAP TO CHR5.1; EXPRESSED IN FETAL LIVER, SIGNAL = 1.4; EXPRESSED IN LUNG, SIGNAL = 0.7; EXPRESSED IN HELA, SIGNAL = 1.5; EXPRESSED IN HEART, SIGNAL = 0.87; EXPRESSED IN BONE MARROW, SIGNAL = 1.4; EST_HUMAN HIT: BG697430.1, EVALUE 5.40e-01; NT HIT: Y14948.1, EVALUE 6.00e-03
gatgacattcaggcagcttgtgagcctatttttttccatataatgttgtgctgaataaaatcacaaagtaatgatttccacttgttaataaataattcttgcttgaagtgag

SEQ ID NO: 17534 - DNA, 237 bp, Homo sapiens
  MAP TO CHR4.1; EXPRESSED IN ADULT LIVER, SIGNAL = 1.5; EXPRESSED IN FETAL LIVER, SIGNAL = 0.77; EXPRESSED IN HELA, SIGNAL = 1.3; EXPRESSED IN LUNG, SIGNAL = 2.1; EXPRESSED IN HEART, SIGNAL = 1.8; EXPRESSED IN BONE MARROW, SIGNAL = 0.75; SWISSPROT HIT: P16870, EVALUE 7.00e-33; NT HIT: gi4503008, EVALUE 1.00e-100; EST_HUMAN HIT: BE064376.1, EVALUE 1.00e-99
tcacataatcagagagcacaatggaaactcacctccaggtacgctgtaccaagcaccaccgttggtggttccatctacaaagctgctgtcatcatcattcttgcgacatggtggccgattggggtcagacatggccgggttgaaagaagagtatgcccgggccaagctttggaaaatggcgtcatctggggaggagctgtattcgtgagcactacctagaaaacaaatccacaagat

SEQ ID NO: 17535 - DNA, 184 bp, Homo sapiens
  MAP TO CHR7.1; EXPRESSED IN ADULT LIVER, SIGNAL =   1; EXPRESSED IN HEART, SIGNAL =   1; EXPRESSED IN HELA, SIGNAL = 1.2; EXPRESSED IN LUNG, SIGNAL = 0.78; EST_HUMAN HIT: BI829369.1, EVALUE 3.00e-87; SWISSPROT HIT: Q99985, EVALUE 7.00e-26; NT HIT: gi5454047, EVALUE 2.00e-87
gaaagtgataaacttacactcaaagcttcttgacttatattgttaatattcagggaaagaatgtgatctttgcttcccacatatatccggtcctgatcttcatccattaataaaatcctgtagtctaaaggatggtgggaaaggctgaagtattcagaggtcttggtttctcgaagttctgaaa

SEQ ID NO: 17536 - DNA, 202 bp, Homo sapiens
  MAP TO CHR19.1; EXPRESSED IN PLACENTA, SIGNAL = 1.5; EXPRESSED IN LUNG, SIGNAL = 0.72; EXPRESSED IN HELA, SIGNAL = 1.5; EXPRESSED IN BONE MARROW, SIGNAL = 1.3; EXPRESSED IN ADULT LIVER, SIGNAL = 1.5; EXPRESSED IN HEART, SIGNAL = 0.94; EXPRESSED IN FETAL LIVER, SIGNAL = 1.4; NT HIT: gi15304761, EVALUE 1.00e-110; EST_HUMAN HIT: AL040970.1, EVALUE 1.00e-110; SWISSPROT HIT: Q92797, EVALUE 8.00e-32
ggggccgcttgcgggtgtccttgctgctcggcatgttgcgggcgatctcggcctgaggtgtgcccaggtccaccagcagggtggtgatctgggcctggaactccaaggaagccgggtgcttcagcacactcaacaggtgcagcttcagattcttacgcacactgctcacctgcgatttggccagcgtcgggggcaggttggc

SEQ ID NO: 17537 - DNA, 258 bp, Homo sapiens
  MAP TO CHR19.1; EXPRESSED IN BONE MARROW, SIGNAL = 2.1; EXPRESSED IN ADULT LIVER, SIGNAL = 1.5; EXPRESSED IN PLACENTA, SIGNAL = 3.7; EXPRESSED IN FETAL LIVER, SIGNAL = 2.4; EXPRESSED IN HELA, SIGNAL = 4.2; EXPRESSED IN LUNG, SIGNAL = 1.5; NT HIT: gi14764288, EVALUE 0.00e+00; EST_HUMAN HIT: BI223682.1, EVALUE 0.00e+00; SWISSPROT HIT: P27692, EVALUE 4.00e-07
cacctgagcaatgtcatccttgtagatgccccgcttgaggcggacccaggactttggtttcaggttggccacctccttcaccactttgagcacgtctgtcatctccttgatgggcaccatctgctggttccagtagccaagccgcaggttgcccaccccctcaatggcctgcttcacgtgggtctgcttgtaggcctccacgtagatgtagcccttcacatgctctggtgccactactgacttgatctgcaggggctg

SEQ ID NO: 17538 - DNA, 188 bp, Homo sapiens
  MAP TO CHR19.1; EXPRESSED IN LUNG, SIGNAL = 2.2; EXPRESSED IN HELA, SIGNAL = 2.6; EXPRESSED IN BONE MARROW, SIGNAL = 2.2; EXPRESSED IN HEART, SIGNAL = 2.4; EXPRESSED IN PLACENTA, SIGNAL = 3.6; SWISSPROT HIT: Q60843, EVALUE 6.50e-01; NT HIT: AF037338.1, EVALUE 1.00e-102; EST_HUMAN HIT: BG253820.1, EVALUE 1.00e-100
acccggacgtccatgaccttggtgatcttccagaggtcgatgaggaccccaatgaagacgctgacctggaccacgaagttggtctcgttgtccaggatgtagaggaggaccacgaatgactggaaaacgccgaagaagacggagcgcacggacaggccctccagggactgccggctgttccagaactg

SEQ ID NO: 17539 - DNA, 249 bp, Homo sapiens
  MAP TO CHR2.1; EXPRESSED IN ADULT LIVER, SIGNAL = 1.1; EXPRESSED IN BONE MARROW, SIGNAL =   2; EXPRESSED IN PLACENTA, SIGNAL = 1.7; EXPRESSED IN FETAL LIVER, SIGNAL = 1.6; EXPRESSED IN LUNG, SIGNAL = 1.5; EXPRESSED IN HELA, SIGNAL = 2.4; NT HIT: AF284815.1, EVALUE 0.00e+00; EST_HUMAN HIT: AI752772.1, EVALUE 0.00e+00; SWISSPROT HIT: P58215, EVALUE 3.00e-45
gctcacctgttccagggccatatttggcactgtgggtccagcctgtggcctctgtgaagcccagctcccggcagaggatgtgggcagcctgcagcgtgaagtcatcatcgcagatggtgccccattcaccagctcgctgtatctccacgcggccctcgtagggcttcctggggaagccagccagccggaaccgaagcccctggctcccggccttcttctcagggcccgtggaaggggacggagacccca

SEQ ID NO: 17540 - DNA, 149 bp, Homo sapiens
  MAP TO CHR19.1; EXPRESSED IN ADULT LIVER, SIGNAL = 0.71; EXPRESSED IN LUNG, SIGNAL = 1.3; EXPRESSED IN HELA, SIGNAL = 0.9; EXPRESSED IN HEART, SIGNAL = 1.1; EST_HUMAN HIT: BI766740.1, EVALUE 3.00e-68; SWISSPROT HIT: P53686, EVALUE 2.00e-04; NT HIT: gi14756992, EVALUE 2.00e-68
tccagcctcacctttcatccagcttagcgggtattcgtgccggcagctggcgctgacgcagtgtgatgtgtagaaggtgccgtgcgcctccaccaagtcctcctgttccagcccggctattcgctccagggtatctatgttctagaggg

SEQ ID NO: 17541 - DNA, 202 bp, Homo sapiens
  MAP TO AC021705.4; EXPRESSED IN HEART, SIGNAL = 6.1; EXPRESSED IN ADULT LIVER, SIGNAL = 2.5; EXPRESSED IN PLACENTA, SIGNAL = 2.9; EXPRESSED IN FETAL LIVER, SIGNAL = 3.1; EXPRESSED IN HELA, SIGNAL = 2.4; EST_HUMAN HIT: BG056086.1, EVALUE 5.00e-89; SWISSPROT HIT: Q62470, EVALUE 3.20e+00; NT HIT: Y13444.1, EVALUE 6.00e-97
ctacaaaaaccctaattttgtacatactgtatttttactattgaactgtattctagtggctgttcatgctccaagactttagttaccgagacatgaatactatccatgtaataagcacttgcctggaataaaatataaaactgaaataaacctgcactgaaacctgagatggagctgccagcctgcagcatctgggtcattt

SEQ ID NO: 17542 - DNA, 169 bp, Homo sapiens
  MAP TO CHR7.1; EXPRESSED IN LUNG, SIGNAL =   1; EXPRESSED IN HELA, SIGNAL =   1; EXPRESSED IN BONE MARROW, SIGNAL = 0.97; NT HIT: AF234882.1, EVALUE 4.00e-73; EST_HUMAN HIT: BF804475.1, EVALUE 5.00e-73; SWISSPROT HIT: P31386, EVALUE 1.70e-01
tcccttttggtcttctccacagctttccatgaagtctcagtttacccaaagaaggagcttcccttctttattctctttactgctggattatgttccttcacagccatgctggccctcctgacacatcagttcccggaacttatgggggtcttcgcaaaagctgtgagtg

SEQ ID NO: 17543 - DNA, 176 bp, Homo sapiens
  MAP TO CHR17.1; EXPRESSED IN ADULT LIVER, SIGNAL = 1.7; EXPRESSED IN PLACENTA, SIGNAL = 2.4; EXPRESSED IN HELA, SIGNAL = 2.3; SWISSPROT HIT: Q01453, EVALUE 1.00e-26; EST_HUMAN HIT: AW853029.1, EVALUE 2.00e-94; NT HIT: gi14771543, EVALUE 3.00e-92
cccaggtctgtgcgtgatgagtgctgcggccatctacacggtgaggcacccggagtggcatctcaactcggattactcctacggtttcgcctacatcctggcctgggtggccttccccctggcccttctcagcggtgtcatctatgtgatcttgcggaaacgcgaatgaggcgccc

SEQ ID NO: 17544 - DNA, 188 bp, Homo sapiens
  MAP TO CHR17.1; EXPRESSED IN HELA, SIGNAL =  22; EXPRESSED IN LUNG, SIGNAL =  53; EXPRESSED IN HEART, SIGNAL =  32; EXPRESSED IN ADULT LIVER, SIGNAL = 1.1e+02; EXPRESSED IN BONE MARROW, SIGNAL =  19; EXPRESSED IN PLACENTA, SIGNAL =  45; NT HIT: gi14776482, EVALUE 3.00e-89; SWISSPROT HIT: P02248, EVALUE 9.00e-30; EST_HUMAN HIT: BG114608.1, EVALUE 5.00e-89
atgcagatcttcgtgaagaccctgaccggcaagaccatcactctggaggtggagcccagtgacaccatcgaaaatgtgaaggccaagatccaagataaagaaggcatcccccccgaccagcagaggctcatctttgcaggcaagcagctggaagatggccgcactctttctgactacaacatccagaa

SEQ ID NO: 17545 - DNA, 189 bp, Homo sapiens
  MAP TO CHR7.1; EXPRESSED IN HELA, SIGNAL = 2.3; EXPRESSED IN HEART, SIGNAL = 1.5; EXPRESSED IN ADULT LIVER, SIGNAL = 2.2; EXPRESSED IN BONE MARROW, SIGNAL = 1.5; EXPRESSED IN PLACENTA, SIGNAL = 1.8; EXPRESSED IN LUNG, SIGNAL = 1.8; EXPRESSED IN FETAL LIVER, SIGNAL = 1.9; NT HIT: X64064.1, EVALUE 6.60e-01; EST_HUMAN HIT: C17756.1, EVALUE 9.80e-01; SWISSPROT HIT: P15828, EVALUE 9.60e+00
agcagtcttcaacttgtttgtgttcattgattgataatgagcagtttctctgtctacatctgtgtgggaccatgtgaggtctgctttagcctgctgggagttgagaggagggagaggcaatcacagtgtgtttaaaaaattgttctaaggatgacatttgggaggcaaatattttggccacaagccaat

SEQ ID NO: 17546 - DNA, 161 bp, Homo sapiens
  MAP TO CHR17.1; EXPRESSED IN ADULT LIVER, SIGNAL = 1.8; EXPRESSED IN LUNG, SIGNAL = 1.6; EXPRESSED IN PLACENTA, SIGNAL = 1.9; EXPRESSED IN FETAL LIVER, SIGNAL = 1.5; EXPRESSED IN HELA, SIGNAL = 2.2; EXPRESSED IN HEART, SIGNAL =   1; SWISSPROT HIT: P57082, EVALUE 4.00e-25; NT HIT: gi11425900, EVALUE 1.00e-78; EST_HUMAN HIT: AI803131.1, EVALUE 5.20e-02
gttggcaggatggtggcagggaaggctgagccagccatgccaggaaggctgtatgtccacccggattctcctgccacaggagcccactggatgcggcagctggtctccttccagaagctgaagctgacaaacaaccacctggacccctttggccatgtaag

SEQ ID NO: 17547 - DNA, 259 bp, Homo sapiens
  MAP TO CHR14.1; EXPRESSED IN HELA, SIGNAL = 0.52; EXPRESSED IN HEART, SIGNAL = 0.6; EXPRESSED IN FETAL LIVER, SIGNAL = 0.84; NT HIT: gi14754012, EVALUE 1.00e-122; EST_HUMAN HIT: AA151030.1, EVALUE 1.00e-120; SWISSPROT HIT: P27448, EVALUE 9.00e-35
acttacactagggacagtggagcttttcttgcgttcaggaatatccgccttattaggattacttgcattcccaagcatgggactggctggagcaattccctttcctccaacagcactgccacttgatttccgggaggaaattccatcttctttgaggtcactatctgcagtgctggtctgactccttttcggatacgccacaacagaaggaatagctggtccagctaaaataaagagttcattttttaaatgactgaat

SEQ ID NO: 17548 - DNA, 220 bp, Homo sapiens
  MAP TO CHR17.1; EXPRESSED IN ADULT LIVER, SIGNAL =   1; EXPRESSED IN BONE MARROW, SIGNAL = 1.2; EXPRESSED IN LUNG, SIGNAL = 0.89; EXPRESSED IN HELA, SIGNAL = 0.83; EXPRESSED IN HEART, SIGNAL = 0.61; NT HIT: gi4557568, EVALUE 1.00e-109; EST_HUMAN HIT: BF846361.1, EVALUE 4.00e-71; SWISSPROT HIT: Q09499, EVALUE 3.00e-16
gttctctgttagttcacagagacctaaagccacacaacatcctcatatccatgcccaatgcacacggcaagatcaaggccatgatctccgactttggcctctgcaagaagctggcagtgggcagacacagtttcagccgccgatctggggtgcctggcacagaaggctggatcgctccagagatgctgagcgaagactgtaaggagaaccctgtgagtaa

SEQ ID NO: 17549 - DNA, 114 bp, Homo sapiens
  MAP TO CHR19.1; EXPRESSED IN FETAL LIVER, SIGNAL = 4.3; EXPRESSED IN LUNG, SIGNAL = 2.7; EXPRESSED IN HELA, SIGNAL = 4.6; EXPRESSED IN HEART, SIGNAL = 3.2; EXPRESSED IN ADULT LIVER, SIGNAL = 5.2; EXPRESSED IN PLACENTA, SIGNAL = 3.1; NT HIT: AB052252.1, EVALUE 3.70e-01; EST_HUMAN HIT: BF577343.1, EVALUE 5.50e-01; SWISSPROT HIT: P43807, EVALUE 2.10e+00
aaaacaaaccctcagctccctgaaacatagatgacctttttaaaattccaggttcatggagtgcctctctccagatggccccaaacacttccatctattaactcgtgctcattc

SEQ ID NO: 17550 - DNA, 364 bp, Homo sapiens
  MAP TO CHR5.1; EXPRESSED IN ADULT LIVER, SIGNAL = 3.2; EXPRESSED IN PLACENTA, SIGNAL = 2.7; EXPRESSED IN FETAL LIVER, SIGNAL = 2.6; EXPRESSED IN LUNG, SIGNAL = 4.4; EXPRESSED IN HELA, SIGNAL = 2.1; EXPRESSED IN BONE MARROW, SIGNAL = 2.2; EXPRESSED IN HEART, SIGNAL = 3.8; SWISSPROT HIT: Q9Y5E7, EVALUE 1.00e-34; NT HIT: gi14270482, EVALUE 0.00e+00; EST_HUMAN HIT: BI488619.1, EVALUE 0.00e+00
aatgacaacgcgcccgagatcctgtaccccgccctccccacagacggttccactggcgtggagctggcgccccgctccgcagagcgtggctacctggtgaccaaggtggtggcggtggacagagactcgggccagaacgcctggctgtcctaccgcctgctcaaggccagcgagccgggactcttctcggtgggtctgcacacgggcgaggtgcgcacggcgcgagccctgctggacagagatgcgctcaagcagagcctcgtggtggccgtccaggaccatggccagccccctctctccgccactgtcacgctcaccgtagccgtggctgacagcatccccgaagtcctgaccgagttgggca

SEQ ID NO: 17551 - DNA, 169 bp, Homo sapiens
  MAP TO CHR7.1; EXPRESSED IN PLACENTA, SIGNAL = 2.4; EXPRESSED IN FETAL LIVER, SIGNAL = 0.99; EXPRESSED IN HELA, SIGNAL = 1.1; EXPRESSED IN HEART, SIGNAL = 1.1; EXPRESSED IN ADULT LIVER, SIGNAL = 1.1; EXPRESSED IN BONE MARROW, SIGNAL = 0.84; NT HIT: AF004877.1, EVALUE 1.00e-75; SWISSPROT HIT: P35969, EVALUE 9.80e+00
ggaattcatagatgagcatcctgcaaaagtaggtcaacattgtttccaggccaattttataacatattaaattgagagtcactgatttaataaggcagatggaaagcagatgctttttttgcctaagaaaacacagtcagtaattttgaccaattcccagtgaaggggt

SEQ ID NO: 17552 - DNA, 221 bp, Homo sapiens
  MAP TO CHR11.1; EXPRESSED IN FETAL LIVER, SIGNAL = 3.9; EXPRESSED IN LUNG, SIGNAL = 3.1; EXPRESSED IN HELA, SIGNAL = 2.6; EXPRESSED IN HEART, SIGNAL =   4; EXPRESSED IN BONE MARROW, SIGNAL = 4.9; EST_HUMAN HIT: AI491917.1, EVALUE 2.90e-01; NT HIT: U00481.1, EVALUE 3.00e-03; SWISSPROT HIT: O28377, EVALUE 1.10e+00
tgggcttagaccgaaggcagggctaagattagagagaaggaagaacttggcagtgaaggatgttgtataacctagtttttgagacaacttggggactgaggagactcccacacgcctggtctgagcccagtggacgtgcatgtggggtgatctggctgactggctgggaagggaggaggaggtcctgaggctgcatttttctgtgtcctcgatttcccgtt

SEQ ID NO: 17553 - DNA, 244 bp, Homo sapiens
  MAP TO CHR17.1; EXPRESSED IN FETAL LIVER, SIGNAL = 1.1; EXPRESSED IN LUNG, SIGNAL = 1.4; EXPRESSED IN HELA, SIGNAL = 1.3; EXPRESSED IN BONE MARROW, SIGNAL = 0.96; EXPRESSED IN HEART, SIGNAL = 1.2; EST_HUMAN HIT: AI565738.1, EVALUE 0.00e+00; NT HIT: gi7661711, EVALUE 1.00e-121; SWISSPROT HIT: Q14161, EVALUE 3.00e-32
ctcacctggcatagtcaatgggtgtgcggccattaacatcaggggagccagggtcagccccatacactacaagcagctcggcctgcagtgtctgtcctgccttggcagccacgtgcagaggtgtggtgcccttctctgggtggaagaagttggcctgggcacccagggagagcaggcgcagacatgtctccaggttgcctgtccgcacgctcgagtgtagttgctaagaggagcagagtgtgca

SEQ ID NO: 17554 - DNA, 268 bp, Homo sapiens
  MAP TO CHR19.1; EXPRESSED IN BONE MARROW, SIGNAL = 0.97; EXPRESSED IN HEART, SIGNAL = 1.3; EXPRESSED IN ADULT LIVER, SIGNAL = 0.55; EXPRESSED IN LUNG, SIGNAL =   3; EXPRESSED IN HELA, SIGNAL = 1.3; SWISSPROT HIT: Q92797, EVALUE 3.00e-39; EST_HUMAN HIT: AL040970.1, EVALUE 0.00e+00; NT HIT: U49240.1, EVALUE 0.00e+00
ctcacccagcttcatcttcttgagtgtggagtccgagtcatcgcggggccgcttgcgggtgtccttgctgctcggcatgttgcgggcgatctcggcctgaggtgtgcccaggtccaccagcagggtggtgatctgggcctggaactccaaggaagccgggtgcttcagcacactcaacaggtgcagcttcagattcttacgcacactgctcacctgcgatttggccagcgtcgggggcaggttggctgtgaggaaagtggcaggagct

SEQ ID NO: 17555 - DNA, 235 bp, Homo sapiens
  MAP TO CHR20.1; EXPRESSED IN ADULT LIVER, SIGNAL = 2.5e+02; EXPRESSED IN PLACENTA, SIGNAL =  91; EXPRESSED IN HELA, SIGNAL =  21; EXPRESSED IN LUNG, SIGNAL =  67; EXPRESSED IN HEART, SIGNAL =  11; SWISSPROT HIT: P02792, EVALUE 1.00e-25; EST_HUMAN HIT: BG531500.1, EVALUE 1.00e-115; NT HIT: gi14771684, EVALUE 1.00e-129
ctcttccaggacatcaagaagccagctgaagatgagtggggtaaaaccccagatgccatgaaagctgccatggccctggagaaaaagctgaaccaggcccttttggatcttcatgccctggattctgcccacatggacccccatctctgtgacttcctggagactcacttcctagatgaggaagtgaagctcatcaagaagatgggtgaccacctgacgaacctccacaggctgg

SEQ ID NO: 17556 - DNA, 221 bp, Homo sapiens
  MAP TO CHR17.1; EXPRESSED IN LUNG, SIGNAL = 0.76; EXPRESSED IN HELA, SIGNAL = 0.9; EXPRESSED IN HEART, SIGNAL = 1.1; EST_HUMAN HIT: BE260736.1, EVALUE 1.00e-101; NT HIT: AB011096.1, EVALUE 1.00e-118
aggtgttcagcgacatcggcgccatccagagcctgaaacgcctggtttcctactctaccaatggcactaagtcggcgctggccaagcgcgcgctgcgcctgctgggcgaggaggtgccacggcccatcctgccctccgtgcccagctggaaggaggccgaggttcagacgtggctgcagcagatcggtttctccaagtactgcgagagcttccgggtagag

SEQ ID NO: 17557 - DNA, 337 bp, Homo sapiens
  MAP TO CHR1.1; EXPRESSED IN FETAL LIVER, SIGNAL = 0.96; EXPRESSED IN LUNG, SIGNAL = 0.73; EXPRESSED IN HELA, SIGNAL = 0.88; EXPRESSED IN HEART, SIGNAL = 1.1; EXPRESSED IN BONE MARROW, SIGNAL = 0.93; SWISSPROT HIT: P31442, EVALUE 2.50e+00; NT HIT: AB037810.1, EVALUE 0.00e+00; EST_HUMAN HIT: BI006075.1, EVALUE 0.00e+00
tacctttcccatagaagaatttgcggtaataataggccccaaggtcaatgtgttctatgatgtagcgcttcactttctccctgtgaataggctggttttctctgggcacttccaagacggagacacctgcatttgtgcagtgagagctgagtgacgattcgaaagagcagctttccccagaactgaaagaggatgagttggctcgagagagcgcaatccgcctgtcgccttcccctccagtctcatttctaaagtaaggacaactaaggacgaggtcgttacttttcccatcaccctcatcggcatccaggttctctttggagttgaggtcctcctt

SEQ ID NO: 17558 - DNA, 279 bp, Homo sapiens
  MAP TO CHRX.1; EXPRESSED IN FETAL LIVER, SIGNAL = 0.61; EXPRESSED IN HELA, SIGNAL = 0.79; EXPRESSED IN HEART, SIGNAL = 0.62; EXPRESSED IN ADULT LIVER, SIGNAL = 0.91; EXPRESSED IN BONE MARROW, SIGNAL = 0.88; EST_HUMAN HIT: BF761862.1, EVALUE 3.80e-01; NT HIT: AF154505.1, EVALUE 4.00e-77; SWISSPROT HIT: P01356, EVALUE 6.90e+00
agagaagtaacatttgtgtaacttgttgaaatatttgaaaacataaggaagaaggaaaaacaacattccagaagagcttactttggttggctgaatttccctgcaagaggagctaatgagctgtcatttcagttctcccaaaggtggtattagtttgtacaagctcttgctcattgccctgcccttcctgcctgctccccatcagacatctcaaacctctaagggtatacaggccattacccacaatgaattcaccaacagaggggatgcagttaaaca

SEQ ID NO: 17559 - DNA, 371 bp, Homo sapiens
  MAP TO CHR19.1; EXPRESSED IN FETAL LIVER, SIGNAL = 1.4; EXPRESSED IN LUNG, SIGNAL =   1; EXPRESSED IN HELA, SIGNAL = 1.7; EXPRESSED IN HEART, SIGNAL = 1.3; EST_HUMAN HIT: BI196652.1, EVALUE 5.00e-72; SWISSPROT HIT: P56722, EVALUE 2.00e-01
gcccccgctgcggggacgccagctcccgctgctgctctgtgcgccgtctggagagaagggagattcactgccctggctacgtcctcccagtgaaggtggtggcagagtgtggctgccagaagtgtctgccccctcgggggctggtccggggccgtgttgtggctgctgactccggggagccgctacgcttcgccaggattctgctgggccaggagcccatcggcttcaccgcctaccagggcgactttaccattgaggtgccgccctccacccagcggctggtggtgacttttgtggaccccagcggtgagttcatggacgctgtccgggtcttgccttttgatcctcgaggtgccggcgtgtaccacgag

SEQ ID NO: 17560 - DNA, 188 bp, Homo sapiens
  MAP TO CHR5.1; EXPRESSED IN HELA, SIGNAL = 1.1; EXPRESSED IN BONE MARROW, SIGNAL = 0.94; EXPRESSED IN HEART, SIGNAL = 1.3; EXPRESSED IN LUNG, SIGNAL = 1.1; NT HIT: gi14766271, EVALUE 7.00e-84; EST_HUMAN HIT: BE271942.1, EVALUE 1.00e-83; SWISSPROT HIT: O02491, EVALUE 1.10e+00
cctagctgcctggctcgagtaactggggagctgaccatgaccttccctgctggcatcgtgcgtgtgttcagcgggaccccaccaccacctgtcctcagcttccggcttgtacacacaaccgctattgagcacttccagcccaacgccgatctgctgttcaggtactatggaggggcagtgggagaggg

SEQ ID NO: 17561 - DNA, 213 bp, Homo sapiens
  MAP TO CHR1.1; EXPRESSED IN ADULT LIVER, SIGNAL = 0.89; EXPRESSED IN BONE MARROW, SIGNAL = 0.99; EXPRESSED IN PLACENTA, SIGNAL = 1.6; EXPRESSED IN FETAL LIVER, SIGNAL = 0.86; EXPRESSED IN HELA, SIGNAL = 1.5; EXPRESSED IN HEART, SIGNAL = 0.91; SWISSPROT HIT: Q14814, EVALUE 3.00e-35; NT HIT: gi11421868, EVALUE 1.00e-113; EST_HUMAN HIT: BF990719.1, EVALUE 1.00e-114
ctgcaggtgactttcaccaagcggaagtttggcctgatgaagaaggcgtatgagctgagcgtgctatgtgactgcgagatcgcactcatcatcttcaaccactccaacaagctgttccagtacgccagcaccgacatggacaaggtgctgctcaagtacacggagtacaatgagccacacgagagccgcaccaacgccgacatcatcgaggtg

SEQ ID NO: 17562 - DNA, 168 bp, Homo sapiens
  MAP TO CHR12.1; EXPRESSED IN PLACENTA, SIGNAL = 1.4; EXPRESSED IN LUNG, SIGNAL = 0.87; EXPRESSED IN HELA, SIGNAL = 1.6; EXPRESSED IN BONE MARROW, SIGNAL =   1; EXPRESSED IN ADULT LIVER, SIGNAL = 1.3; NT HIT: gi14761652, EVALUE 4.00e-48; EST_HUMAN HIT: BF874143.1, EVALUE 6.00e-48; SWISSPROT HIT: Q9YTR8, EVALUE 2.60e+00
gaagttcaaccaagggctcagtagggggactggcaggagaaggtgccaagggggaagggggcggggagggttcttcaggaggtggggccgagagctgtcgcacatccagattggagacattgtaggtatagctgtgctgagtgggtggctctggggcggggctctcct

SEQ ID NO: 17563 - DNA, 371 bp, Homo sapiens
  MAP TO CHR2.1; EXPRESSED IN PLACENTA, SIGNAL = 1.2; EXPRESSED IN LUNG, SIGNAL = 0.57; EXPRESSED IN HELA, SIGNAL = 0.88; EST_HUMAN HIT: BF577176.1, EVALUE 1.00e-129; SWISSPROT HIT: P52583, EVALUE 6.00e-07; NT HIT: gi4507720, EVALUE 0.00e+00
taggcccaccatcaattgatctaaaagaattcatggaggttgaagaaggaaccaatgttaacattgtggccaaaattaaaggtgtgccattcccgacactaacctggtttaaagctcctccaaagaagcctgataacaaagaacctgttctctatgacacccatgtcaacaaactggtggtagatgatacttgcactttagttattccgcagtctcgcaggagtgacactggcttatataccatcacagctgtaaataatctgggaacagcatcaaaggagatgagactgaatgtcctgggtaaagactgcatggtttggttaaaattacttgtttttctgttcataaataacatttggctttaaaatcat

SEQ ID NO: 17564 - DNA, 123 bp, Homo sapiens
  MAP TO CHR19.1; EXPRESSED IN BONE MARROW, SIGNAL = 3.6; EXPRESSED IN PLACENTA, SIGNAL = 4.5; EXPRESSED IN HELA, SIGNAL = 6.1; EXPRESSED IN FETAL LIVER, SIGNAL = 5.5; EXPRESSED IN LUNG, SIGNAL = 2.7; EXPRESSED IN HEART, SIGNAL = 5.4; SWISSPROT HIT: P18887, EVALUE 5.00e-14; NT HIT: gi14763675, EVALUE 5.00e-53; EST_HUMAN HIT: AI459765.1, EVALUE 7.00e-53
ctccctcagagtctgacctgactgtaccccctcaatgtctatatcttcctggagcactggtgaggctgctttggtctcttcaggggttgggggcttctggggtgagctgggtccagctgcctg

SEQ ID NO: 17565 - DNA, 215 bp, Homo sapiens
  MAP TO CHRX.1; EXPRESSED IN LUNG, SIGNAL = 0.84; EXPRESSED IN HELA, SIGNAL = 3.5; EXPRESSED IN BONE MARROW, SIGNAL = 0.87; EXPRESSED IN PLACENTA, SIGNAL = 2.2; EXPRESSED IN FETAL LIVER, SIGNAL = 3.1; SWISSPROT HIT: P51805, EVALUE 5.00e-32; NT HIT: L44140.1, EVALUE 1.00e-118; EST_HUMAN HIT: AI751311.1, EVALUE 1.00e-104
ctctgctccagagagcttgctccgcacggccagcagccctgatagcctccgctcacgggcacccatgattacgcctgaccaggagacaggcaccaaattgtggcacctggtgaaaaaccacgaccatgccgaccatcgcgagggggaccgtggcagcaagatggtctccgagatctacctgacacggctgctggccaccaaggtatgggcctgcc

SEQ ID NO: 17566 - DNA, 107 bp, Homo sapiens
  MAP TO CHR12.1; EXPRESSED IN ADULT LIVER, SIGNAL = 1.7; EXPRESSED IN BONE MARROW, SIGNAL = 1.7; EXPRESSED IN LUNG, SIGNAL =   1; EXPRESSED IN HELA, SIGNAL =   1; EXPRESSED IN HEART, SIGNAL = 1.2; NT HIT: gi14765036, EVALUE 1.40e+00; SWISSPROT HIT: P71613, EVALUE 6.10e+00; EST_HUMAN HIT: BG035321.1, EVALUE 3.20e-02
ataaatcaatgctggcactcccttggcagtgggctctcctctgagctgcccagatggcaggcaagcctggggctccaggggcagccaggcactcaggaggggggagg

SEQ ID NO: 17567 - DNA, 212 bp, Homo sapiens
  MAP TO CHR19.1; EXPRESSED IN LUNG, SIGNAL = 1.6; EXPRESSED IN HELA, SIGNAL = 0.93; EXPRESSED IN HEART, SIGNAL = 1.2; EXPRESSED IN ADULT LIVER, SIGNAL = 0.51; EXPRESSED IN BONE MARROW, SIGNAL = 0.97; NT HIT: gi14756987, EVALUE 1.00e-115; EST_HUMAN HIT: AI970816.1, EVALUE 1.00e-114; SWISSPROT HIT: Q15653, EVALUE 7.00e-35
caggagcccacgtgcggccggagcccccttcatttggcagtggaggcccaggcagccgatgtgctggagcttctcctgagggcaggcgcgaaccctgctgcccgcatgtacggtggccgcaccccactcggcagtgccatgctccggcccaaccccatcctcgcccgcctcctccgtgcacacggagcccctgagcccgagggcgaggacga

SEQ ID NO: 17568 - DNA, 243 bp, Homo sapiens
  MAP TO CHR3.1; EXPRESSED IN HEART, SIGNAL = 1.2; EXPRESSED IN BONE MARROW, SIGNAL = 0.64; EXPRESSED IN LUNG, SIGNAL = 1.3; EXPRESSED IN HELA, SIGNAL = 0.41; NT HIT: AB063285.1, EVALUE 9.00e-07; EST_HUMAN HIT: AA080876.1, EVALUE 2.00e-08; SWISSPROT HIT: Q99546, EVALUE 1.00e+00
ccggggacctgccccttttcttgtctgcctcctgtcatcattaatcatgttgtccaggcacccaggctgtttgtgctgaggggtgcattcaggcctacactgagcttccctcagggcccccttggccttcctcccatgttcattggtgatcaaagtccagagggggctgaggtgggagggggctggcatttcagcactgccccaagtgcaagcacaccttgccaggttgcaacagcacccaag

SEQ ID NO: 17569 - DNA, 229 bp, Homo sapiens
  MAP TO CHR19.1; EXPRESSED IN BONE MARROW, SIGNAL = 1.2; EXPRESSED IN ADULT LIVER, SIGNAL = 1.4; EXPRESSED IN PLACENTA, SIGNAL = 1.8; EXPRESSED IN FETAL LIVER, SIGNAL = 1.7; EXPRESSED IN LUNG, SIGNAL = 1.1; EXPRESSED IN HELA, SIGNAL = 1.7; EXPRESSED IN HEART, SIGNAL = 1.1; NT HIT: gi14786907, EVALUE 1.00e-121; EST_HUMAN HIT: BE902938.1, EVALUE 1.00e-118; SWISSPROT HIT: P30847, EVALUE 3.40e+00
ccagctccagctccgcccaccgcagccccagcctcagggtaccgtaggggcctctggggccacggggcagccccagccccaaggtactgcccagcccccgccaggtgcccctcaaggccctcctggagcagcttctggcccaccccctcctggacccatccttcggccccagaaccctggggccaaccctcagctgcgaagcctcctcctcaacccaccaccggtgaga

SEQ ID NO: 17570 - DNA, 235 bp, Homo sapiens
  MAP TO CHR12.1; EXPRESSED IN HEART, SIGNAL = 1.8; EXPRESSED IN PLACENTA, SIGNAL = 1.2; EXPRESSED IN FETAL LIVER, SIGNAL = 1.1; EXPRESSED IN LUNG, SIGNAL = 1.8; EXPRESSED IN HELA, SIGNAL = 1.4; SWISSPROT HIT: P34657, EVALUE 8.00e-23; NT HIT: gi14769150, EVALUE 1.00e-129; EST_HUMAN HIT: BI754142.1, EVALUE 1.00e-129
ggctgcggtacttgcgcttgttgagcacgatgctgccatacaccaggatgtcgttaaagaggaagaagatgcgcggcttggccttcttgcggcactctttggtcagcacgccctcgcccagcagcactcggcctggcagcgccagcggctgccccgaggccccgaagcagctctccactgccgcgatgcgctggctgttgatctccgtgttggccaagtggtccaccatcgtctc

SEQ ID NO: 17571 - DNA, 200 bp, Homo sapiens
  MAP TO CHR1.1; EXPRESSED IN BONE MARROW, SIGNAL = 3.1; EXPRESSED IN HEART, SIGNAL = 1.8; EXPRESSED IN ADULT LIVER, SIGNAL = 2.9; EXPRESSED IN PLACENTA, SIGNAL = 3.6; EXPRESSED IN FETAL LIVER, SIGNAL = 2.8; EXPRESSED IN LUNG, SIGNAL = 1.3; EXPRESSED IN HELA, SIGNAL = 4.7; EST_HUMAN HIT: AA984658.1, EVALUE 1.00e-104; SWISSPROT HIT: P06687, EVALUE 5.00e-33; NT HIT: J05096.1, EVALUE 1.00e-109
gactgatcttcggtggtgtcagcctcatggatttggttgtcgaaccacatgtgggcgacggtcatgcggttctgggtgagggtgcccgtcttgtccgagcagatggtggacgtggagcccagcgtctccaccgcctccaggttcttcaccaggcagttcttccgtgccatgcgcttggctgtcagggtcaggcacacctg

SEQ ID NO: 17572 - DNA, 147 bp, Homo sapiens
  MAP TO CHR1.1; EXPRESSED IN FETAL LIVER, SIGNAL = 2.5; EXPRESSED IN LUNG, SIGNAL = 1.8; EXPRESSED IN HELA, SIGNAL = 2.3; EXPRESSED IN ADULT LIVER, SIGNAL = 3.6; EXPRESSED IN HEART, SIGNAL = 2.3; SWISSPROT HIT: P48778, EVALUE 3.00e-16; EST_HUMAN HIT: BG479078.1, EVALUE 5.00e-73; NT HIT: gi14764748, EVALUE 2.00e-77
actcacagtccttgggcctcttctcctcagctgtgaagatgattgcgcccccgggccgctctgggtgcgggaaggggtagccgttctccttgagctggtcctgggtgagcaggtactccctgaggcggctgtacagggcagcccctg

SEQ ID NO: 17573 - DNA, 290 bp, Homo sapiens
  MAP TO CHR19.1; EXPRESSED IN ADULT LIVER, SIGNAL = 4.4; EXPRESSED IN BONE MARROW, SIGNAL = 4.2; EXPRESSED IN PLACENTA, SIGNAL = 6.1; EXPRESSED IN FETAL LIVER, SIGNAL = 4.6; EXPRESSED IN LUNG, SIGNAL = 3.1; EXPRESSED IN HELA, SIGNAL = 7.9; EXPRESSED IN HEART, SIGNAL = 1.9; NT HIT: gi4506072, EVALUE 0.00e+00; SWISSPROT HIT: Q16512, EVALUE 4.00e-08; EST_HUMAN HIT: BI261313.1, EVALUE 0.00e+00
gggtcgggaagcaccacgtgggcgtgcagctcctgcagctgctggtgcagcaggtcgaggcggcgcgaggagccccgcagcagcagctctacggggcccaggctgcggcccaggtcagtggtggcccgccgcaggttctcagcaccctccttcagcttcagctccttgcggatttcccgccgcagccgctcccgctccagctccagctgctgctgtaccccgggggccgccaggtctgccccggccaggcccagctgctctagcagggaccagctgcgaggctcactctg

SEQ ID NO: 17574 - DNA, 232 bp, Homo sapiens
  MAP TO AC011435.1; EXPRESSED IN FETAL LIVER, SIGNAL = 0.71; EXPRESSED IN LUNG, SIGNAL = 1.1; EXPRESSED IN HELA, SIGNAL = 1.3; EXPRESSED IN HEART, SIGNAL = 0.8; EXPRESSED IN BONE MARROW, SIGNAL = 0.83; NT HIT: gi14781152, EVALUE 1.00e-116; EST_HUMAN HIT: AW978157.1, EVALUE 1.00e-116; SWISSPROT HIT: P08894, EVALUE 7.90e+00
ttgtgtttgttttatagagccatttcctgcttttaagtcttggcaggaggactctgagtctggagaagctcagctgtctccacaagctggaagaatgaatcatcaccccttggaagaggactgtcctccagtattatcacaccgcagtttagattttggtcaaagccagcgtttcctacatgatccagaaaagttggattcctcatctaaagcactgtcttttactaggtat

SEQ ID NO: 17575 - DNA, 164 bp, Homo sapiens
  MAP TO CHR17.1; EXPRESSED IN FETAL LIVER, SIGNAL = 0.94; EXPRESSED IN LUNG, SIGNAL = 1.6; EXPRESSED IN HELA, SIGNAL = 0.94; EXPRESSED IN HEART, SIGNAL = 1.4; SWISSPROT HIT: P04626, EVALUE 4.00e-25; NT HIT: M12036.1, EVALUE 2.00e-87; EST_HUMAN HIT: BG222449.1, EVALUE 6.00e-85
tccaggggatgagctacctggaggatgtgcggctcgtacacagggacttggccgctcggaacgtgctggtcaagagtcccaaccatgtcaaaattacagacttcgggctggctcggctgctggacattgacgagacagagtaccatgcagatgggggcaaggtt

SEQ ID NO: 17576 - DNA, 219 bp, Homo sapiens
  MAP TO CHR17.1; EXPRESSED IN HEART, SIGNAL = 0.66; EXPRESSED IN BONE MARROW, SIGNAL = 0.51; EXPRESSED IN HELA, SIGNAL =   1; SWISSPROT HIT: P10941, EVALUE 2.30e+00; EST_HUMAN HIT: BI045691.1, EVALUE 1.00e-104; NT HIT: U43582.1, EVALUE 2.00e-01
cccctgtgctgttccgtgtctggcagacacaagcgccgtggtcatggagattgaccacgaccgccgggtggtgtacacagagactctggcactggctgggcaggaccgggagctgctgctggctgctgctcagcccactgaggaacaggtgctgagccggcttaccgcgcccgtcgtcaccactcagcttgacaccaagaatatctcctttgagaggtg

SEQ ID NO: 17577 - DNA, 201 bp, Homo sapiens
  MAP TO CHR2.1; EXPRESSED IN PLACENTA, SIGNAL =  56; EXPRESSED IN LUNG, SIGNAL =  19; EXPRESSED IN HELA, SIGNAL =  38; EST_HUMAN HIT: BE886223.1, EVALUE 3.00e-93; NT HIT: gi10863894, EVALUE 2.00e-93; SWISSPROT HIT: P46250, EVALUE 2.80e-01
ccacgaggtgtgttttattttcattattcatacaaataattttctataatatcccggggcaaaccggagaatttggcagtccgattgggggggggtcccttcagagacccacaggccggtggcatcggcgcggagtgcccaggttcacagtgcagcttgtggctcgtgtccatcttgcaggtggctcttcctccacatcac

SEQ ID NO: 17578 - DNA, 314 bp, Homo sapiens
  MAP TO CHR4.1; EXPRESSED IN BONE MARROW, SIGNAL = 4.3; EXPRESSED IN PLACENTA, SIGNAL =   2; EXPRESSED IN LUNG, SIGNAL =   5; EXPRESSED IN HELA, SIGNAL = 9.9; SWISSPROT HIT: P00338, EVALUE 5.00e-42; NT HIT: X02153.1, EVALUE 0.00e+00; EST_HUMAN HIT: BG721787.1, EVALUE 0.00e+00
tcttgctgatgtgccccagctgtgataatgaccagcttggaatttgcagttacattatagtctttgccagagacaatctttggcattccaaggaaaaggctgccatgttggagattcatcatctctcccttcaatttgtcctccatgacatcaacaagagcaagttcatctgccaagtccttcactaagatactgatggcacaggccatgtgaacagcaccatcctcaacaactataatcatattctggggggtctgttcttcctttagaagattatgaatcagctgatccttgagaattgccatattggactt

SEQ ID NO: 17579 - DNA, 257 bp, Homo sapiens
  MAP TO CHR5.1; EXPRESSED IN FETAL LIVER, SIGNAL = 1.1; EXPRESSED IN LUNG, SIGNAL = 1.6; EXPRESSED IN HELA, SIGNAL = 1.2; EXPRESSED IN HEART, SIGNAL = 1.3; EXPRESSED IN BONE MARROW, SIGNAL =   1; EST_HUMAN HIT: BG120377.1, EVALUE 0.00e+00; NT HIT: gi16171280, EVALUE 0.00e+00; SWISSPROT HIT: P49590, EVALUE 5.00e-42
taggacctaccttcatcctctgctccacaatgtagaagattcgctcaaccccaatgctgagtcccacacatggcaccttgtggcccttggggtcaaacatgcccaccagcccatcatagcgcccaccagcagccacactgcccacattcaggggctcctccccagcctgagttggggtctgcagcagcactgcttcatagatcactcctgtatagtagtctaggccccgagccaggctgaggtcaaaggagatctgt

SEQ ID NO: 17580 - DNA, 153 bp, Homo sapiens
  MAP TO CHR7.1; EXPRESSED IN HELA, SIGNAL = 1.2; EXPRESSED IN LUNG, SIGNAL = 1.2; EXPRESSED IN ADULT LIVER, SIGNAL = 2.1; EXPRESSED IN HEART, SIGNAL = 1.1; EXPRESSED IN BONE MARROW, SIGNAL = 1.9; EXPRESSED IN PLACENTA, SIGNAL = 1.4; NT HIT: AE001343.1, EVALUE 1.30e-01; SWISSPROT HIT: P20647, EVALUE 5.80e+00
catctgctttgtttcccttttctatttccaaaccctaattccctcattttcttattatccccaattggagtgactgatagtttgtgtatattaaaatttgaagtacttgctgagaagggatatctgctgaattacttgaattttacataagga

SEQ ID NO: 17581 - DNA, 208 bp, Homo sapiens
  MAP TO CHR20.1; EXPRESSED IN BONE MARROW, SIGNAL = 1.8; EXPRESSED IN HEART, SIGNAL = 1.6; EXPRESSED IN PLACENTA, SIGNAL =   3; EXPRESSED IN FETAL LIVER, SIGNAL = 2.2; EXPRESSED IN LUNG, SIGNAL =   2; EXPRESSED IN HELA, SIGNAL =   7; EST_HUMAN HIT: BI830148.1, EVALUE 6.00e-98; NT HIT: AB001517.1, EVALUE 1.00e-113; SWISSPROT HIT: P48553, EVALUE 4.00e-34
tccttaccagcgtccagttgggaggagtgtgcagaatgatgggggaggtacttgaacagcctgacgtcgggcagggggagatacccggcgaagagcggcatcacttccatgtggaccctgtgagtggcccgagcagccactggcatggagatgacaccgcagcttttcccacacactgcccagttgctactgttgtcgacaactgaaa

SEQ ID NO: 17582 - DNA, 142 bp, Homo sapiens
  MAP TO CHR22.1; EXPRESSED IN HEART, SIGNAL = 2.2; EXPRESSED IN BONE MARROW, SIGNAL = 2.8; EXPRESSED IN PLACENTA, SIGNAL = 2.6; EXPRESSED IN FETAL LIVER, SIGNAL = 3.2; EXPRESSED IN HELA, SIGNAL = 3.4; EXPRESSED IN LUNG, SIGNAL = 1.7; NT HIT: gi14776795, EVALUE 2.00e-74; SWISSPROT HIT: P03952, EVALUE 2.60e+00; EST_HUMAN HIT: Z44561.1, EVALUE 7.00e-72
actcagaagttgcatttgccatggccactggctccagctggggtttggtgccagtgttattacagggtctgcggagtatcagccattggcttggcctctctctgttcctccctctgcacctagaactcttatccttcctgtg

SEQ ID NO: 17583 - DNA, 207 bp, Homo sapiens
  MAP TO CHR12.1; EXPRESSED IN FETAL LIVER, SIGNAL =   6; EXPRESSED IN LUNG, SIGNAL = 3.3; EXPRESSED IN HELA, SIGNAL = 7.4; EXPRESSED IN HEART, SIGNAL = 3.3; EXPRESSED IN BONE MARROW, SIGNAL = 6.1; NT HIT: X51956.1, EVALUE 1.00e-113; SWISSPROT HIT: P09104, EVALUE 5.00e-33; EST_HUMAN HIT: BE277550.1, EVALUE 1.00e-108
agccttggagctggtgaaggaagccatcgacaaggctggctacacggaaaagatcgttattggcatggatgttgctgcctcagagttttatcgtgatggcaaatatgacttggacttcaagtctcccactgatccttcccgatacatcactggggaccagctgggggcactctaccaggactttgtcagggactatcctggtgagag

SEQ ID NO: 17584 - DNA, 297 bp, Homo sapiens
  MAP TO CHR12.1; EXPRESSED IN HELA, SIGNAL = 1.5; EXPRESSED IN HEART, SIGNAL = 0.63; EXPRESSED IN ADULT LIVER, SIGNAL = 0.71; EXPRESSED IN BONE MARROW, SIGNAL = 0.97; EXPRESSED IN FETAL LIVER, SIGNAL = 0.83; EXPRESSED IN LUNG, SIGNAL = 0.63; EST_HUMAN HIT: BE925891.1, EVALUE 1.00e-44; SWISSPROT HIT: O31214, EVALUE 4.50e+00; NT HIT: gi14761652, EVALUE 1.00e-125
agattccccaagctaaccttcacccttgagcagctcatcggtgtccaggtccccatccttcttgtcatcagggccaagggcatctgagggctcagaaccctccaatcctgcctcgcctgggaggccaagccgtcctcgccgttggcgccgcttgtgcagtggtgacatggtcaggttacgcagcaaggccatgccagtttctgtcagccacacaccttcgaagcgaaagtactggggctctgcataagaggaaagagtatgtgatccctggatggaagccccagggaaaccagaact

SEQ ID NO: 17585 - DNA, 322 bp, Homo sapiens
  MAP TO CHR1.1; EXPRESSED IN PLACENTA, SIGNAL = 2.1; EXPRESSED IN HELA, SIGNAL = 2.1; EXPRESSED IN HEART, SIGNAL = 0.84; EXPRESSED IN BONE MARROW, SIGNAL =   2; EXPRESSED IN ADULT LIVER, SIGNAL = 1.2; SWISSPROT HIT: P30203, EVALUE 1.70e+00; NT HIT: AL163278.2, EVALUE 4.70e+00; EST_HUMAN HIT: BG759359.1, EVALUE 1.10e-01
gctgccatgtaacactgggctgggctccaggccagggtgaacccagccgggcagagaaagccctgggaatgagccaggccatcacctgggagtctccacagctcacaggacatggctgcaggcataagccctcccatgggtgccctctgcacagctctgagcaggagtgtctgatctggcagcgacctgctgtgcagggggcaaatgacatttaatttcctcttggtttccctatagtacagatgaaaggccgtcacctgcgtctgggtctggcggcacagctggaagtgttcccagacatgctactctggagagttcccaa

SEQ ID NO: 17586 - DNA, 105 bp, Homo sapiens
  MAP TO CHR22.1; EXPRESSED IN BONE MARROW, SIGNAL = 4.4; EXPRESSED IN ADULT LIVER, SIGNAL = 7.7; EXPRESSED IN PLACENTA, SIGNAL =   5; EXPRESSED IN FETAL LIVER, SIGNAL = 4.4; EXPRESSED IN HELA, SIGNAL = 4.9; EXPRESSED IN LUNG, SIGNAL = 2.1; EXPRESSED IN HEART, SIGNAL = 2.7; EST_HUMAN HIT: BG027566.1, EVALUE 2.00e-46; SWISSPROT HIT: P54198, EVALUE 1.00e-12; NT HIT: gi14777004, EVALUE 1.00e-46
tcacacaggtacatcggccccagcaccgtgttcggctccagtggtaagcttgccaatgtggagcagtggcggtgtgtctctatcctccggaatcattcaggcggt

SEQ ID NO: 17587 - DNA, 173 bp, Homo sapiens
  MAP TO CHR17.1; EXPRESSED IN PLACENTA, SIGNAL =  11; EXPRESSED IN FETAL LIVER, SIGNAL =   5; EXPRESSED IN LUNG, SIGNAL =   8; EXPRESSED IN HELA, SIGNAL =  10; EXPRESSED IN HEART, SIGNAL = 4.3; EXPRESSED IN ADULT LIVER, SIGNAL = 2.7; SWISSPROT HIT: P11467, EVALUE 7.00e-03; NT HIT: AF082185.1, EVALUE 5.00e-88; EST_HUMAN HIT: BG826224.1, EVALUE 7.00e-88
tcccaccagggccacctgaatacctgcagcttcaatgtcattccctgccctaatcgctgccccatgaagctgagccgccgtgatctacctgcacacttgcagcatgactgccccaagcggcgcctcaagtgcgagttttgtggctgtgacttcagtggggaggcctatgaggt

SEQ ID NO: 17588 - DNA, 169 bp, Homo sapiens
  MAP TO CHR16.1; EXPRESSED IN PLACENTA, SIGNAL = 1.2; EXPRESSED IN FETAL LIVER, SIGNAL = 1.1; EXPRESSED IN LUNG, SIGNAL = 1.7; EXPRESSED IN HELA, SIGNAL = 0.77; EXPRESSED IN HEART, SIGNAL = 1.2; EXPRESSED IN BONE MARROW, SIGNAL = 0.9; EXPRESSED IN ADULT LIVER, SIGNAL = 1.3; SWISSPROT HIT: P32396, EVALUE 5.70e+00; NT HIT: U64791.1, EVALUE 2.00e-90; EST_HUMAN HIT: AA487448.1, EVALUE 3.00e-90
tacctgtccttgagctctcgtgtcactcgcttggtgatccgtccacacatcaggccaatcaggaacaatatacagatgctcccactgatcacagagagaatgtagttcttagatggagacgtcattacttgcatggcaagatcagagaagccatctgctggggccacct

SEQ ID NO: 17589 - DNA, 187 bp, Homo sapiens
  MAP TO CHR19.1; EXPRESSED IN BONE MARROW, SIGNAL = 1.3; EXPRESSED IN ADULT LIVER, SIGNAL = 1.6; EXPRESSED IN PLACENTA, SIGNAL = 2.1; EXPRESSED IN FETAL LIVER, SIGNAL = 1.7; EXPRESSED IN LUNG, SIGNAL = 0.84; EXPRESSED IN HELA, SIGNAL = 3.4; EXPRESSED IN HEART, SIGNAL =   1; SWISSPROT HIT: Q92523, EVALUE 4.00e-16; NT HIT: AF233073.1, EVALUE 6.60e-01; EST_HUMAN HIT: AA349751.1, EVALUE 5.00e-98
cacctccatgacagccaacacgtggctgtcttccaccggggccgattcttccgcatggggacccactcccgaaacagcctgctttccccgagagccctggagcagcagtttcagagaatcctggatgatccctcaccggcctgcccccacgaggaacatctggcagctctgacagctgctcccaggt

SEQ ID NO: 17590 - DNA, 209 bp, Homo sapiens
  MAP TO CHR5.1; EXPRESSED IN ADULT LIVER, SIGNAL = 2.9; EXPRESSED IN HELA, SIGNAL = 2.1; EXPRESSED IN LUNG, SIGNAL = 1.6; EXPRESSED IN HEART, SIGNAL = 2.2; EXPRESSED IN BONE MARROW, SIGNAL = 1.8; SWISSPROT HIT: Q59342, EVALUE 1.90e+00; NT HIT: AL445563.1, EVALUE 4.80e-02
ctgaagccaggctgcctggtattaccccttggttcttcatgagtctgtcttctcctgggccatgagcataccccttctccggcattattccatttcctttcacaagtccttaagatgaaggaaaataaaaattttaggtgaacagagggttttctgacttttcagcagtgatcaatgtgggtgtcaaatagactgatttccaaaatata

SEQ ID NO: 17591 - DNA, 178 bp, Homo sapiens
  MAP TO AC021705.4; EXPRESSED IN HELA, SIGNAL = 0.79; EXPRESSED IN FETAL LIVER, SIGNAL = 0.76; EXPRESSED IN LUNG, SIGNAL = 1.1; EXPRESSED IN HEART, SIGNAL = 1.1; SWISSPROT HIT: P17656, EVALUE 9.90e-02; NT HIT: gi14770788, EVALUE 1.00e-88; EST_HUMAN HIT: AL539655.1, EVALUE 3.00e-87
gggcggtcacctgcagttttccgccaggtattgcacgaccttgtccagaactttctcgatgagcgccgtgcgtacccatacgtgtttcaaggcctgagggctgagggccggggccttcccgctggctgagccctgtctccgcagggcctcctggctgacccctgagggtttcctgcaa

SEQ ID NO: 17592 - DNA, 293 bp, Homo sapiens
  MAP TO CHR17.1; EXPRESSED IN HELA, SIGNAL = 6.9; EXPRESSED IN LUNG, SIGNAL = 2.5; EXPRESSED IN HEART, SIGNAL = 3.2; EXPRESSED IN BONE MARROW, SIGNAL = 5.5; EXPRESSED IN ADULT LIVER, SIGNAL = 7.5; EXPRESSED IN PLACENTA, SIGNAL =   6; EXPRESSED IN FETAL LIVER, SIGNAL = 8.1; SWISSPROT HIT: P08353, EVALUE 6.70e-01; NT HIT: gi8392973, EVALUE 1.70e-02; EST_HUMAN HIT: BG678532.1, EVALUE 4.00e-01
ggggtgggggtggtcggcggccatgaactggtctctggaaggagcccctctggcccatatttcacagacaccccagacggagcctgctgtcaggagcgctgtctaatttcctcccgactgccggcccggatccccccaacaaagaggggcattgtgtcctgcccccacccctggcatctgctccacagagatccggcaggggatgcacagaggggatttgtgggatgaaggccccgcatcctgtgccacagcccccagaagggccacagattcttgagtagaaagagcctggt

SEQ ID NO: 17593 - DNA, 170 bp, Homo sapiens
  MAP TO CHR13.1; EXPRESSED IN BONE MARROW, SIGNAL = 0.62; EXPRESSED IN ADULT LIVER, SIGNAL = 0.61; EXPRESSED IN LUNG, SIGNAL =   1; EXPRESSED IN HELA, SIGNAL = 0.5; EXPRESSED IN HEART, SIGNAL = 0.84; SWISSPROT HIT: P40468, EVALUE 7.00e-03; NT HIT: gi12957487, EVALUE 2.00e-90; EST_HUMAN HIT: AA393984.1, EVALUE 8.70e-01
ttccctgctgtaaagaagaaatttatggcggagctaaaagaattacggcacaaagagcagaacccatatgtggttcaaagcattatcagcttaataatgggcatgaaattctttcgaattaagatgtatccagtggaggattttgaggcctctcttcagtttatgcaggt

SEQ ID NO: 17594 - DNA, 203 bp, Homo sapiens
  MAP TO CHR12.1; EXPRESSED IN HELA, SIGNAL =   1; EXPRESSED IN BONE MARROW, SIGNAL = 0.91; EXPRESSED IN HEART, SIGNAL = 0.73; EXPRESSED IN PLACENTA, SIGNAL = 1.2; EXPRESSED IN FETAL LIVER, SIGNAL =   1; EXPRESSED IN LUNG, SIGNAL = 0.78; NT HIT: gi4502932, EVALUE 1.00e-103; SWISSPROT HIT: Q12860, EVALUE 3.00e-32; EST_HUMAN HIT: BI520118.1, EVALUE 1.00e-102
atgtttgcagattcggtattgggctgcccatgacaaagaagaagctgcaaacagagttcaagtcaccagccaagagtactcggccaggctcgagaaccttctgccagacacccagtattttatagaagtcggggcctgcaatagtgcagggtgtggacctccaagtgacatgattgaggctttcaccaagaaagcacgtgagt

SEQ ID NO: 17595 - DNA, 185 bp, Homo sapiens
  MAP TO CHR5.1; EXPRESSED IN HELA, SIGNAL = 0.64; EXPRESSED IN ADULT LIVER, SIGNAL = 1.6; EXPRESSED IN LUNG, SIGNAL = 0.88; EXPRESSED IN FETAL LIVER, SIGNAL = 0.74; EST_HUMAN HIT: AI927652.1, EVALUE 3.00e-81; SWISSPROT HIT: P13015, EVALUE 6.50e-01; NT HIT: gi15295718, EVALUE 3.00e-83
cagcctggagctcacatcttcactgtcacttccactgaatgagtgttctggctccagccccttctcagggatgcttctctcctcctctggcatcagctcatccagccagaggagttcctgtggtgagaagaccctctccagggcctttcggacccccacaaggcccagcaactgcaggaatagaa

SEQ ID NO: 17596 - DNA, 343 bp, Homo sapiens
  MAP TO CHR12.1; EXPRESSED IN HELA, SIGNAL = 0.95; EXPRESSED IN BONE MARROW, SIGNAL = 0.88; EXPRESSED IN HEART, SIGNAL = 0.95; EXPRESSED IN ADULT LIVER, SIGNAL = 0.86; EXPRESSED IN FETAL LIVER, SIGNAL = 0.86; EXPRESSED IN LUNG, SIGNAL = 0.92; EST_HUMAN HIT: H84977.1, EVALUE 4.00e-57; SWISSPROT HIT: P17955, EVALUE 3.00e-01; NT HIT: gi16163752, EVALUE 0.00e+00
ctcacctccaagtccttctcaagctccagtccagcctccatcagattgtgctcaaattcctcccgctgctccttcctctcctcctccagggcatcgagcggtcccagctcaatgtcacctgggcccccagcatgaggctccttgcctgtctccccattggagacgatagccagcgagtggccagggaagccttgggccaggtgcaccccgcgtttccggtagtggtaggcaagtacatagtcgaccttcctctgactgtcatggaagtgcatgcggctaagacgggcctccaaggacacaggctcattggcatccagatagttgttgatgacctggccagaga

SEQ ID NO: 17597 - DNA, 156 bp, Homo sapiens
  MAP TO CHR4.1; EXPRESSED IN HELA, SIGNAL = 0.88; EXPRESSED IN LUNG, SIGNAL = 0.76; EXPRESSED IN BONE MARROW, SIGNAL = 0.66; EXPRESSED IN FETAL LIVER, SIGNAL = 0.61; SWISSPROT HIT: P51111, EVALUE 3.00e-11; NT HIT: L27357.1, EVALUE 9.00e-83; EST_HUMAN HIT: BE378835.1, EVALUE 5.00e-82
tacctggacaagctgctctgcagaaggagagacttccatttctttccttgtcactccgaagctgcctttcaggcttgtgtccttgacctgctgctgcagcaagggcaccaaatacctcagggtgagcagcacgccaagaatcagcagagtggagtg

SEQ ID NO: 17598 - DNA, 203 bp, Homo sapiens
  MAP TO CHR5.1; EXPRESSED IN FETAL LIVER, SIGNAL = 1.1; EXPRESSED IN LUNG, SIGNAL = 1.4; EXPRESSED IN HELA, SIGNAL = 0.8; EXPRESSED IN BONE MARROW, SIGNAL = 0.72; EXPRESSED IN ADULT LIVER, SIGNAL = 0.98; NT HIT: gi14861871, EVALUE 1.00e-110; EST_HUMAN HIT: AI805761.1, EVALUE 1.00e-110; SWISSPROT HIT: Q9Y5E8, EVALUE 3.30e-02
gcctcgcactttgtgggcgtggacggggttcgggctttcctgcagacctattcccacgaggtctccctcaccgcggactcgcggaagagtcacctgatcttctcccaacccagctatgcagacacgctcatcagccgggagagttgtgagaaaagcgagcctcttctgataactcaggatttacttgaaacaaaaggagaccc

SEQ ID NO: 17599 - DNA, 501 bp, Homo sapiens
  MAP TO CHR8.1; EXPRESSED IN HELA, SIGNAL = 1.5; EXPRESSED IN LUNG, SIGNAL =   2; EXPRESSED IN HEART, SIGNAL = 1.4; EXPRESSED IN ADULT LIVER, SIGNAL = 1.6; EXPRESSED IN PLACENTA, SIGNAL = 2.5; EXPRESSED IN FETAL LIVER, SIGNAL = 1.2; EST_HUMAN HIT: AA714294.1, EVALUE 7.00e-32; SWISSPROT HIT: Q99062, EVALUE 1.60e+00; NT HIT: AF110520.1, EVALUE 0.00e+00
aggaaggatcttgataagacactcaaaggttttgctgttaccctttctccagttcttccccagagggacctacggccttttacaagggtaactgtacactggggaaaaggaaataatcagacttttcggggtctgctggatactggttctgagttgacactgatcccaggggatcccaagaaacattgtggccctccagttaaagtaggggcttatggagggcaggtgattaatggagttttgactgatgtccgactcacagtaggtccagtaggtccccggacacatcctgtggtgatttccccagttccagaatgtataattgggatagatatactcagaaattggcagaattctcatattggttccctgaactgtagagtgagggctattatggttggaaaggccaaatggaagcctttagagttgcctctgccaaagaaaatagtgaatcaaaaaacagtatcgtattcctggaggaattgcagaaattactgccac

SEQ ID NO: 17600 - DNA, 267 bp, Homo sapiens
  MAP TO CHR5.1; EXPRESSED IN HEART, SIGNAL = 1.2; EXPRESSED IN FETAL LIVER, SIGNAL = 1.1; EXPRESSED IN HELA, SIGNAL = 0.95; EXPRESSED IN LUNG, SIGNAL = 0.89; NT HIT: AF228740.1, EVALUE 1.60e-02; SWISSPROT HIT: Q9Z2V9, EVALUE 1.00e-18; EST_HUMAN HIT: BF446538.1, EVALUE 0.00e+00
tgatgtctacctgtgctttctttagcagatcagatataggagcacaccagccgggcatgagcctctccagctctaaggtgatgatgaccaaggccagtgtggagcccttgaactgcagcagctggtggcccgccatacagtgctgcagctgcctggtcagggatgcgacgtggagggaaggattcctctgaggcagcagctccaacacatggggccagctcaggaccaccagggcatggaactggagaccatggtttttaatgttag

SEQ ID NO: 17601 - DNA, 173 bp, Homo sapiens
  MAP TO CHR7.1; EXPRESSED IN HELA, SIGNAL = 0.72; EXPRESSED IN HEART, SIGNAL = 0.5; EXPRESSED IN FETAL LIVER, SIGNAL = 0.56; SWISSPROT HIT: Q14168, EVALUE 3.00e-13; EST_HUMAN HIT: BG752266.1, EVALUE 6.00e-82; NT HIT: gi14751796, EVALUE 4.00e-82
ctcttattttttcaggctcatgagaggctagaagattccaaactagaagctgtcagtgacaataacttggaattagtcaatgaaattcttgaagacatcactcctctaataaatgtggatgaaaatgtggcagaattggttggtatactcaaagaacctcacttccaggtaac

SEQ ID NO: 17602 - DNA, 212 bp, Homo sapiens
  MAP TO CHR1.1; EXPRESSED IN HELA, SIGNAL =   1; EXPRESSED IN BONE MARROW, SIGNAL =   1; EXPRESSED IN HEART, SIGNAL =   2; EXPRESSED IN FETAL LIVER, SIGNAL = 1.4; EXPRESSED IN LUNG, SIGNAL = 2.7; SWISSPROT HIT: O14896, EVALUE 1.00e-33; EST_HUMAN HIT: AW591502.1, EVALUE 1.00e-112; NT HIT: gi5453699, EVALUE 1.00e-112
cctgaacaggtcattccagtagtggctcggatgatctacgagatgttttctggtgatttcacacgatcctttgatagtggcagtgtccgcctgcagatctcaaccccagacatcaaggataacatcgttgctcagctgaagcagctgtaccgcatccttcaaacccaggagagctggcagcccatgcagcccacccccagcatgcaactgcc

SEQ ID NO: 17603 - DNA, 176 bp, Homo sapiens
  MAP TO CHR2.1; EXPRESSED IN FETAL LIVER, SIGNAL = 0.98; EXPRESSED IN HELA, SIGNAL = 0.7; EXPRESSED IN HEART, SIGNAL = 0.84; EXPRESSED IN BONE MARROW, SIGNAL =   1; EXPRESSED IN ADULT LIVER, SIGNAL = 0.93; SWISSPROT HIT: Q01014, EVALUE 2.50e+00; EST_HUMAN HIT: BG498322.1, EVALUE 2.30e-01
atttgattatttataacttcagaaagtttcttttgcacagtaatttgccaggctttcatctgcagcagccagcatttgatagaaatatggaaaatggcctgaaccttaaatggcaaacagatgaggaggtccaatgaaaatcacacatgtttgaagaccatgtgttttcccatgaa

SEQ ID NO: 17604 - DNA, 178 bp, Homo sapiens
  MAP TO CHR17.1; EXPRESSED IN FETAL LIVER, SIGNAL = 1.8; EXPRESSED IN HELA, SIGNAL = 0.48; EXPRESSED IN LUNG, SIGNAL = 8.6; EXPRESSED IN HEART, SIGNAL = 4.1; EXPRESSED IN BONE MARROW, SIGNAL = 1.4; NT HIT: gi14727237, EVALUE 4.00e-48; SWISSPROT HIT: P24044, EVALUE 2.00e-12; EST_HUMAN HIT: BG540977.1, EVALUE 3.00e-50
tgggattctacccaagagacctcattatcgtttccacttcctttgttgttatagttccatcattgtctctgtcaaatagggaaaaagcttctatgaattctggaatctgctcttcagtcagtttggtctgctatgctgcaagtcctaccggtttccgagacgtgaccacacaaccact

SEQ ID NO: 17605 - DNA, 111 bp, Homo sapiens
  MAP TO CHR5.1; EXPRESSED IN PLACENTA, SIGNAL =  15; EXPRESSED IN LUNG, SIGNAL = 9.3; EXPRESSED IN HELA, SIGNAL =   5; SWISSPROT HIT: P20342, EVALUE 2.00e-13; EST_HUMAN HIT: BG256883.1, EVALUE 7.00e-56; NT HIT: gi14734624, EVALUE 9.00e-39
ctacttgagggagatgaagcgggaggagtgggtggacccaatgccaggccggccgtgcttcacgggcttgtaggtgatggagaactcgcccaggtcgtggccgatcatctc

SEQ ID NO: 17606 - DNA, 262 bp, Homo sapiens
  MAP TO CHR6.1; EXPRESSED IN BONE MARROW, SIGNAL = 1.1; EXPRESSED IN FETAL LIVER, SIGNAL = 1.1; EXPRESSED IN LUNG, SIGNAL = 5.1; EXPRESSED IN HELA, SIGNAL = 2.8; EXPRESSED IN HEART, SIGNAL = 1.6; SWISSPROT HIT: P15311, EVALUE 3.00e-36; NT HIT: gi13631371, EVALUE 1.00e-89; EST_HUMAN HIT: BE910350.1, EVALUE 2.00e-89
caccagcagctgccgctgcacacgctcgttcttctctgcctcagtgatgcgcttctcctcattgcggtcatcccggatgccctcactagacagctccgcgctgtagcccgtgggctctgcgccctcatcctgcaagctctcctggacatggtagctcaccggctcgtacacggggggtggtgggggcgggggtgctgtcatcaccaggtgcagctcctccttggtcttcaccaggtcatcctgggcttctttggcctttgga

SEQ ID NO: 17607 - DNA, 182 bp, Homo sapiens
  MAP TO CHR11.1; EXPRESSED IN HELA, SIGNAL = 0.8; EXPRESSED IN LUNG, SIGNAL = 0.84; EXPRESSED IN HEART, SIGNAL = 0.93; EXPRESSED IN BONE MARROW, SIGNAL =   1; SWISSPROT HIT: Q03164, EVALUE 2.00e-28; EST_HUMAN HIT: AA837477.1, EVALUE 1.00e-92; NT HIT: Z69774.1, EVALUE 1.00e-97
ccactcaccttcaatactttctgcacagatctgaaagccatcatcactggaaatttcaaaaacaagtcctttcttgggttttttctcagtaatgctttccttccgcttttgttcttgctgaagccaaagcatcagtggggagctgaaattactttcctcttcttccactgttttaggttcta

SEQ ID NO: 17608 - DNA, 198 bp, Homo sapiens
  MAP TO CHR5.1; EXPRESSED IN ADULT LIVER, SIGNAL = 0.73; EXPRESSED IN BONE MARROW, SIGNAL = 0.77; EXPRESSED IN HELA, SIGNAL = 0.59; EXPRESSED IN FETAL LIVER, SIGNAL = 0.62; SWISSPROT HIT: Q9Y496, EVALUE 4.00e-25; NT HIT: gi6857803, EVALUE 2.00e-90; EST_HUMAN HIT: AA663562.1, EVALUE 2.00e-85
ttttagtgattgttgcaattaaatgattcaaataggaaaaaagaaagtctccccagacaagatgattgaaatgcaagcaaaaattgatgaggagagaaaagcacttgaaacaaagctcgacatggaagaagaagaaagaaacaaggctagagctgaattagagaaacgggaaaaagatcttcttaaagcccagtgagt

SEQ ID NO: 17609 - DNA, 256 bp, Homo sapiens
  MAP TO CHR22.1; EXPRESSED IN PLACENTA, SIGNAL = 2.4; EXPRESSED IN LUNG, SIGNAL = 1.6; EXPRESSED IN HELA, SIGNAL = 3.5; EXPRESSED IN HEART, SIGNAL = 1.2; EXPRESSED IN ADULT LIVER, SIGNAL = 1.7; EXPRESSED IN BONE MARROW, SIGNAL = 1.9; EST_HUMAN HIT: BF087654.1, EVALUE 0.00e+00; SWISSPROT HIT: Q15459, EVALUE 1.00e-34; NT HIT: gi14778219, EVALUE 0.00e+00
gctttcacttgcaggtgacctgggatggccactcaggcagcatggcccggacccagcaggctgcccaggccaacatcaccctccaggagcagattgaggccattcacaaggccaaaggcctggtgccagaggatgacactaaagagaagattggccccagcaagcccaatgaaatccctcaacagccaccgccaccatcttcagccaccaacatccccagctcggctccacccatcacttcagtgccccgaccacc

SEQ ID NO: 17610 - DNA, 258 bp, Homo sapiens
  MAP TO CHR20.1; EXPRESSED IN BONE MARROW, SIGNAL = 1.2; EXPRESSED IN PLACENTA, SIGNAL = 1.4; EXPRESSED IN FETAL LIVER, SIGNAL = 1.2; EXPRESSED IN LUNG, SIGNAL = 0.96; EXPRESSED IN HELA, SIGNAL = 1.4; EXPRESSED IN HEART, SIGNAL = 1.1; EST_HUMAN HIT: AL570166.1, EVALUE 0.00e+00; SWISSPROT HIT: P17886, EVALUE 5.00e-33; NT HIT: gi16195058, EVALUE 0.00e+00
ttttattttccagggaacttccataggcaaatgtccaaagaacaaattatttaaagtttacatagaattggagctacagcttcgagaatttgacagatgccggaagctttatgaaaagttcctggaatttggacctgaaaattgtacctcatggattaaattcgctgaattagagacaatccttggtgatattgacagagcacgggcaatctatgaattagccatcagtcagccacgtttagacatgccagaggtgag

SEQ ID NO: 17611 - DNA, 361 bp, Homo sapiens
  MAP TO CHR3.1; EXPRESSED IN FETAL LIVER, SIGNAL = 0.63; EXPRESSED IN LUNG, SIGNAL = 1.3; EXPRESSED IN HELA, SIGNAL = 0.92; EXPRESSED IN HEART, SIGNAL = 0.97; EXPRESSED IN BONE MARROW, SIGNAL = 0.56; EST_HUMAN HIT: BG706552.1, EVALUE 1.00e-130; SWISSPROT HIT: Q44427, EVALUE 5.60e-01; NT HIT: gi15295424, EVALUE 0.00e+00
gggaggggtcagggctagggcccattctactgcctcccagcaggtactgatgctctgacagacccagtcacggatcctggacccaacccctctgacacagccatatggcgccgcatctttcagtcctcgtacattcgggagcagtatgtgctcacccactgctctgccagccccgagccaggcccaggctccacaggcagcagtgagtccccaggctcacagggccctggctcccccgaaggtagtgctcccttggagcccccttctcagcagggctgccgcagtctggcctggggagaacctgcaggctcccgctcctgtcccctgcctgcacccacaccagctccattcaaggtgagat

SEQ ID NO: 17612 - DNA, 168 bp, Homo sapiens
  MAP TO CHR7.1; EXPRESSED IN HELA, SIGNAL = 0.6; EXPRESSED IN ADULT LIVER, SIGNAL = 0.55; EXPRESSED IN BONE MARROW, SIGNAL = 0.84; SWISSPROT HIT: Q07785, EVALUE 3.00e-04; NT HIT: gi15299185, EVALUE 2.00e-47; EST_HUMAN HIT: AA812064.1, EVALUE 2.00e-47
ttcttctctctctaggggagtaggttgcatctttgttgaaatgatccaaggagttgctgcttttccaggaatgaaagacattcaggatcaacttgaacgaatatttctggtaagtcctttacagagtatttctaagaaaaattggtttctaattagtcacttagtgac

SEQ ID NO: 17613 - DNA, 254 bp, Homo sapiens
  MAP TO CHR8.1; EXPRESSED IN HEART, SIGNAL = 2.5; EXPRESSED IN BONE MARROW, SIGNAL = 2.4; EXPRESSED IN PLACENTA, SIGNAL = 2.7; EXPRESSED IN FETAL LIVER, SIGNAL = 2.6; EXPRESSED IN HELA, SIGNAL = 2.8; EST_HUMAN HIT: BF971469.1, EVALUE 3.00e-91; SWISSPROT HIT: P25059, EVALUE 9.00e-03; NT HIT: AL163246.2, EVALUE 9.00e-72
aagtgtggcagtgggctcatgctcatggaattcactgatcttaccatcttccccatcatcctgaaggagctggattgatagaatggtggaatggccttttgaagccacaactacaacaccaactaggtgacgatactttgcagggctggggcaaagttctccagaaggcagtgtatgctctgaatcagcatccaataaatggtactgtttctcccatagccagaattcacaggtccagaaatcaaggggtagaa

SEQ ID NO: 17614 - DNA, 129 bp, Homo sapiens
  MAP TO CHR20.1; EXPRESSED IN HELA, SIGNAL = 0.93; EXPRESSED IN BONE MARROW, SIGNAL = 1.1; EXPRESSED IN FETAL LIVER, SIGNAL = 0.75; NT HIT: AF041260.1, EVALUE 1.00e-66; EST_HUMAN HIT: AW602108.1, EVALUE 1.00e-66
acctgctaaaccatctttactgttatttgccagaaaagactggaccagagacgtaaataatacacctcaatatacaacagctcgggcttaatttctaggcagaatttcatttgctggccatcagaagaa

SEQ ID NO: 17615 - DNA, 195 bp, Homo sapiens
  MAP TO CHR19.1; EXPRESSED IN FETAL LIVER, SIGNAL = 1.3; EXPRESSED IN LUNG, SIGNAL = 1.4; EXPRESSED IN HELA, SIGNAL = 0.97; EXPRESSED IN HEART, SIGNAL = 1.4; EXPRESSED IN ADULT LIVER, SIGNAL = 2.5; EXPRESSED IN BONE MARROW, SIGNAL = 0.85; NT HIT: gi14765215, EVALUE 4.00e-98; EST_HUMAN HIT: AL134734.1, EVALUE 5.00e-98; SWISSPROT HIT: P23468, EVALUE 1.00e-29
acctgtagccatcaatgaagctggcgttgatgtagtcagagccctccacaccccggatgggttgcagacagacccgtgtgctctcatagggcatgatgttcaccaggcggttcttgaacttgttacaaggcagattggcactgatgaagcgtgacgtgtgggccttggagttagccagccgctgtggggaggagg

SEQ ID NO: 17616 - DNA, 150 bp, Homo sapiens
  MAP TO CHR7.1; EXPRESSED IN BONE MARROW, SIGNAL = 1.1; EXPRESSED IN ADULT LIVER, SIGNAL = 1.4; EXPRESSED IN FETAL LIVER, SIGNAL = 0.98; EXPRESSED IN LUNG, SIGNAL = 0.88; EXPRESSED IN HELA, SIGNAL = 0.45; EST_HUMAN HIT: BF916607.1, EVALUE 3.00e-74; NT HIT: U80735.1, EVALUE 2.00e-74; SWISSPROT HIT: P55196, EVALUE 7.70e+00
acatgctgtgaacatggctttcctcctggtgggaaggccactgggaagtgaagggctcggtgcggcggtaccattttcttcttctttaagactgtgtttaaccagtgtgcagtaacacatctctttctttctcttattgcctgtcaaaca

SEQ ID NO: 17617 - DNA, 124 bp, Homo sapiens
  MAP TO CHR19.1; EXPRESSED IN HELA, SIGNAL =   1; EXPRESSED IN HEART, SIGNAL = 0.88; EXPRESSED IN BONE MARROW, SIGNAL =   1; EXPRESSED IN ADULT LIVER, SIGNAL = 0.98; EXPRESSED IN FETAL LIVER, SIGNAL = 1.2; EXPRESSED IN LUNG, SIGNAL = 0.59; NT HIT: gi14759716, EVALUE 3.00e-60; EST_HUMAN HIT: AV705863.1, EVALUE 5.00e-60; SWISSPROT HIT: P16415, EVALUE 4.00e-15
tttttacctatacagtccaggttcctaatggtttcccacatcacatctctgtacagactcttctgtgatggacccagcaaagcccactcttcctgggtgaagttcaccgccacatcctcaaagg

SEQ ID NO: 17618 - DNA, 214 bp, Homo sapiens
  MAP TO CHR1.1; EXPRESSED IN BONE MARROW, SIGNAL = 2.7; EXPRESSED IN HEART, SIGNAL = 1.6; EXPRESSED IN ADULT LIVER, SIGNAL = 1.7; EXPRESSED IN PLACENTA, SIGNAL = 2.1; EXPRESSED IN FETAL LIVER, SIGNAL =   2; EXPRESSED IN LUNG, SIGNAL = 1.7; EXPRESSED IN HELA, SIGNAL = 1.4; SWISSPROT HIT: Q83262, EVALUE 6.30e+00; NT HIT: AF113513.1, EVALUE 1.90e-01
ccgggatgtgctgggctgtgctctgctgtcttatctcatcttgtctgatgttactgacatagtagaatgcagatttcattgtggtgtaaaatgtcttctgggttatttcaaagcagccattgaaaattccctttctaacactgtcagaattggaagctgttgatgtcagtaaatgtcttagtgctgtttctaggcatacaaaatacctcacatc

SEQ ID NO: 17619 - DNA, 180 bp, Homo sapiens
  MAP TO CHR12.1; EXPRESSED IN BONE MARROW, SIGNAL = 1.3; EXPRESSED IN LUNG, SIGNAL = 0.91; EXPRESSED IN HELA, SIGNAL = 1.2; EXPRESSED IN ADULT LIVER, SIGNAL = 1.9; EXPRESSED IN HEART, SIGNAL = 0.93; NT HIT: AE006412.1, EVALUE 1.60e-01; EST_HUMAN HIT: AL157686.1, EVALUE 2.30e-01; SWISSPROT HIT: Q9JJK4, EVALUE 5.70e+00
aagggggccatgaattcccacagcctaatacagtgctgagtgcctggtaggcatttgatttaatctgttttctttggaggaaacccagtaacatatgggagggagtttgtttgtatacacattcttttaaaatatacattgatcatctttcctgttgtgttagctttatttcctggggaa

SEQ ID NO: 17620 - DNA, 169 bp, Homo sapiens
  MAP TO CHR14.1; EXPRESSED IN PLACENTA, SIGNAL =  12; EXPRESSED IN FETAL LIVER, SIGNAL = 8.5; EXPRESSED IN HELA, SIGNAL = 6.9; EXPRESSED IN LUNG, SIGNAL =  22; EXPRESSED IN BONE MARROW, SIGNAL =  27; EXPRESSED IN HEART, SIGNAL = 4.5; EXPRESSED IN ADULT LIVER, SIGNAL = 7.2; EST_HUMAN HIT: AW403059.1, EVALUE 1.00e-58; NT HIT: J03618.1, EVALUE 2.00e-90; SWISSPROT HIT: P01783, EVALUE 3.00e-20
acccactccagccccttctccggagcctggcagacccagtgcatccaggagctactgaaggtgaatccagaggctgcacaggagagtctcagggaccctccaggctgtaccaagcctcacccagactccaccagctgcacctcacactggacacctgcaaacacagaga

SEQ ID NO: 17621 - DNA, 207 bp, Homo sapiens
  MAP TO CHR19.1; EXPRESSED IN BONE MARROW, SIGNAL =   3; EXPRESSED IN HEART, SIGNAL = 4.3; EXPRESSED IN PLACENTA, SIGNAL = 2.6; EXPRESSED IN LUNG, SIGNAL = 5.9; EXPRESSED IN HELA, SIGNAL = 1.6; EST_HUMAN HIT: AW368893.1, EVALUE 5.00e-83; SWISSPROT HIT: P30679, EVALUE 1.00e-24; NT HIT: gi4504038, EVALUE 3.00e-83
ggagctgcttttgggagttgaagggtatagaaagttctagaattacttaccctggaaactggggaaataggtagccaggtgggaggtggggattttctcctccaggatgtcggttttgttgagaaagaggatgacggatgtgcttttgaaccagggtagttccaggatagtcccaaacaatgcgaggctctccttcatgcggttctg

SEQ ID NO: 17622 - DNA, 440 bp, Homo sapiens
  MAP TO CHR19.1; EXPRESSED IN LUNG, SIGNAL = 0.94; EXPRESSED IN HELA, SIGNAL = 0.41; EXPRESSED IN BONE MARROW, SIGNAL = 0.46; EXPRESSED IN HEART, SIGNAL = 0.66; SWISSPROT HIT: P38334, EVALUE 3.00e-22; NT HIT: gi7706227, EVALUE 0.00e+00; EST_HUMAN HIT: BF055057.1, EVALUE 0.00e+00
gaagaccatgtctggaagcttctactttgtaattgttggtcaccatgataatccagtttttgaaatggagtttttgccagctgggaaggcagaatccaaagacgaccatcgtcatctgaaccagttcatagctcatgctgctctcgacctcgtagatgagaacatgtggctgtcgaacaacatgtacttgaaaactgtggacaagttcaacgagtggtttgtgtcagcatttgtcaccgcggggcatatgaggtttattatgcttcatgacataagacaagaagatggaataaagaacttctttactgatgtttatgatttatatataaaattttcaatgaatccattttatgaacccaattctcctattcgatcaagtgcatttgacagaaaagttcagtttcttgggaagaaacaccttttaagctgaatggagaaaa

SEQ ID NO: 17623 - DNA, 124 bp, Homo sapiens
  MAP TO AF322450.1; EXPRESSED IN BONE MARROW, SIGNAL = 1.7; EXPRESSED IN HEART, SIGNAL = 1.6; EXPRESSED IN ADULT LIVER, SIGNAL = 0.9; EXPRESSED IN PLACENTA, SIGNAL = 1.9; EXPRESSED IN FETAL LIVER, SIGNAL = 1.6; EXPRESSED IN LUNG, SIGNAL = 1.7; EXPRESSED IN HELA, SIGNAL =   2; NT HIT: gi7706564, EVALUE 5.00e-56; EST_HUMAN HIT: BG765779.1, EVALUE 5.00e-57
tacccaataacatatatgtcaagattgaggttccggttgttcagctgaagcaggtcactgagatctagagggggcgctgccgaagccacgttccaagtcacgacgtgtatgctgcggaagggat

SEQ ID NO: 17624 - DNA, 99 bp, Homo sapiens
  MAP TO CHR6.1; EXPRESSED IN LUNG, SIGNAL = 2.9; EXPRESSED IN HELA, SIGNAL = 1.8; EXPRESSED IN PLACENTA, SIGNAL = 3.2; EXPRESSED IN FETAL LIVER, SIGNAL = 2.2; EST_HUMAN HIT: AI935086.1, EVALUE 1.00e-29; NT HIT: AL163246.2, EVALUE 3.00e-29
aggaaatacagaatgggtagtagaaggtagtcatcaataccagctataaccacatgaccagctgcagaaacaaggactgtaattgtcatgagtatttct

SEQ ID NO: 17625 - DNA, 205 bp, Homo sapiens
  MAP TO CHR19.1; EXPRESSED IN BONE MARROW, SIGNAL = 1.2; EXPRESSED IN HEART, SIGNAL = 1.2; EXPRESSED IN ADULT LIVER, SIGNAL = 2.1; EXPRESSED IN FETAL LIVER, SIGNAL = 1.6; EXPRESSED IN HELA, SIGNAL = 1.9; EXPRESSED IN LUNG, SIGNAL = 1.2; EST_HUMAN HIT: BE795729.1, EVALUE 1.00e-101; SWISSPROT HIT: P28994, EVALUE 8.40e-01
tccaggtgacgagcacagtgccccttgtagggcgctcgggcatcctgggcgagctgcacaacaacatcttctgtggtgtggcctgcggtcggggccggatggcgggcagtaccttctgtgtgtcctactcgggcctcctctgccagttcaatgagaagagggtgctggagaagtggatcaacctgaaggtaccacctccctctct

SEQ ID NO: 17626 - DNA, 134 bp, Homo sapiens
  MAP TO CHR7.1; EXPRESSED IN HELA, SIGNAL = 0.56; EXPRESSED IN HEART, SIGNAL = 0.44; EXPRESSED IN BONE MARROW, SIGNAL = 0.74; EST_HUMAN HIT: AI445902.1, EVALUE 1.70e-01; SWISSPROT HIT: P35363, EVALUE 9.00e-01; NT HIT: AE005407.1, EVALUE 1.80e+00
cttgcaggctctaggatctgagctaagtgctctgcatggatcattcatcttggcctcacaacaagcctaaggtgcaaagttcatttaccacctaaatgcatctctgtctgtcccctgtggagctcaggaactga

SEQ ID NO: 17627 - DNA, 254 bp, Homo sapiens
  MAP TO CHR7.1; EXPRESSED IN LUNG, SIGNAL = 1.3; EXPRESSED IN HELA, SIGNAL =  46; EXPRESSED IN HEART, SIGNAL =  18; EXPRESSED IN ADULT LIVER, SIGNAL =  45; EXPRESSED IN BONE MARROW, SIGNAL = 3.9; EXPRESSED IN PLACENTA, SIGNAL =  31; EXPRESSED IN FETAL LIVER, SIGNAL =  11; SWISSPROT HIT: Q59695, EVALUE 9.90e-02; NT HIT: AF252549.1, EVALUE 0.00e+00
ctgaattgctgacagcttatctcatcagcgccagtgagccacttggcccaaatggggactgcctccccttcctcccagcgggaaccagggagcttccctcccaccctcaaaccagcttttgcttcttcccctctgctctgagccagcccctcctctgctgagccaagggggctggagccaggcaccgccacgggggaggggagaggtgtgctcaggaaggacgaggcctggagaggggccgagagcccccgcag

SEQ ID NO: 17628 - DNA, 140 bp, Homo sapiens
  MAP TO CHR17.1; EXPRESSED IN PLACENTA, SIGNAL = 1.4; EXPRESSED IN FETAL LIVER, SIGNAL = 1.3; EXPRESSED IN LUNG, SIGNAL = 1.1; EXPRESSED IN HELA, SIGNAL = 1.2; EXPRESSED IN ADULT LIVER, SIGNAL = 0.47; EST_HUMAN HIT: BF343906.1, EVALUE 4.00e-73; SWISSPROT HIT: P14266, EVALUE 2.60e+00; NT HIT: gi14771227, EVALUE 3.00e-73
gtgccacagctactgtttcttaaaggactgcttctgccctctgcctgccagtgcccattccactgtgaggtgtcattccctgcatctagtgacaactgtctggattgcctgctgcaaagctttgatttggcaaaggagac

SEQ ID NO: 17629 - DNA, 252 bp, Homo sapiens
  MAP TO CHR7.1; EXPRESSED IN HELA, SIGNAL = 1.5; EXPRESSED IN LUNG, SIGNAL =   1; EXPRESSED IN BONE MARROW, SIGNAL = 1.7; EXPRESSED IN HEART, SIGNAL = 1.4; EXPRESSED IN ADULT LIVER, SIGNAL = 1.7; EXPRESSED IN PLACENTA, SIGNAL = 1.2; EXPRESSED IN FETAL LIVER, SIGNAL =   2; EST_HUMAN HIT: BE938667.1, EVALUE 1.00e-87; SWISSPROT HIT: O14063, EVALUE 1.90e+00; NT HIT: gi13631241, EVALUE 0.00e+00
aaccttaactgtagctcctgggaagaaaagccagttgcctgtgtccactgggtcgagactatcttctaaaacgacttgtctgtgagctgaattgatgatcaagatgttatctaaggcccagcaggcttcatacacttcacctacacgaagattttcctgcttccactgaaattggacattctcccctttggcgtcctcaggaaggtagaggatatggatgattgtgctgacattggaaggggctctggaaca

SEQ ID NO: 17630 - DNA, 299 bp, Homo sapiens
  MAP TO CHR1.1; EXPRESSED IN PLACENTA, SIGNAL = 1.5; EXPRESSED IN LUNG, SIGNAL = 0.94; EXPRESSED IN HELA, SIGNAL = 1.9; EXPRESSED IN HEART, SIGNAL = 1.1; EXPRESSED IN ADULT LIVER, SIGNAL = 1.8; SWISSPROT HIT: Q61116, EVALUE 4.00e-56; NT HIT: gi15301654, EVALUE 0.00e+00; EST_HUMAN HIT: AV745182.1, EVALUE 1.00e-75
aagcacttaccacactcatcacatttgtatggtttttcttcagtgtggactctctgatgggtatgaagatttgagctacaactaaagcgtttaccacaatccccacatttatatggtttctctccagtgtgaattctttcatgggcctgaagatgtgatctctgagtgaagcccttcccacacacctcacatttataaggtttctctccagtgtgaactctgcaatgaatgttaagatctgtgctacgactgaagcccttcccacaactgtcacatctatagggcttctctcctgtgtg

SEQ ID NO: 17631 - DNA, 256 bp, Homo sapiens
  MAP TO CHR17.1; EXPRESSED IN FETAL LIVER, SIGNAL = 2.3; EXPRESSED IN HELA, SIGNAL = 1.3; EXPRESSED IN LUNG, SIGNAL = 3.5; EXPRESSED IN HEART, SIGNAL = 2.9; EXPRESSED IN ADULT LIVER, SIGNAL = 2.5; EXPRESSED IN PLACENTA, SIGNAL = 1.5; EST_HUMAN HIT: AL048333.2, EVALUE 1.00e-124; SWISSPROT HIT: P51116, EVALUE 5.00e-13; NT HIT: gi13651393, EVALUE 1.00e-125
ttcttccatcttttacccaaccaggaggtagagcagcttcgcttggagaggctacaaattgatgagcagcttcggcagattgggctgggctttcgccctcctgggagtgggcggggcagcggtggcagcgacaaggctggatatagcactgatgagagctcctcctcctccctccatgcgactcgaacctatgggggcagctatgggggccgtggccgtggccggaggacaggcggtcctgcctatggtgagacag

SEQ ID NO: 17632 - DNA, 176 bp, Homo sapiens
  MAP TO CHR7.1; EXPRESSED IN HEART, SIGNAL = 0.89; EXPRESSED IN FETAL LIVER, SIGNAL = 0.49; EXPRESSED IN LUNG, SIGNAL = 0.79; EXPRESSED IN HELA, SIGNAL = 1.9; EXPRESSED IN BONE MARROW, SIGNAL = 0.36; EST_HUMAN HIT: BG168530.1, EVALUE 7.00e-91; SWISSPROT HIT: P15121, EVALUE 1.00e-26; NT HIT: M59783.1, EVALUE 1.00e-94
cagtcccctccagggcaggtgactgaggccgtgaaggtggccattgacgtcgggtaccgccacatcgactgtgcccatgtgtaccagaatgagaatgaggtgggggtggccattcaggagaagctcagggagcaggtggtgaagcgtgaggagctcttcatcgtcagcaaggtatc

SEQ ID NO: 17633 - DNA, 132 bp, Homo sapiens
  MAP TO CHR5.1; EXPRESSED IN ADULT LIVER, SIGNAL = 1.6; EXPRESSED IN PLACENTA, SIGNAL = 1.3; EXPRESSED IN LUNG, SIGNAL = 1.1; EXPRESSED IN FETAL LIVER, SIGNAL =   1; EXPRESSED IN HELA, SIGNAL = 1.4; EXPRESSED IN HEART, SIGNAL = 0.72; EST_HUMAN HIT: AA973019.1, EVALUE 1.00e-60; SWISSPROT HIT: P49419, EVALUE 2.00e-17; NT HIT: gi14735827, EVALUE 9.00e-61
tctgcattaggttatggatcgccctggaaattatgtagaaccgacaattgtgacaggtcttggccacgatgcgtccattgcacacacagagacttttgctccgattctctatgtctttaaattcaaggtaaa

SEQ ID NO: 17634 - DNA, 246 bp, Homo sapiens
  MAP TO AC011430.5; EXPRESSED IN PLACENTA, SIGNAL = 5.3; EXPRESSED IN FETAL LIVER, SIGNAL = 4.1; EXPRESSED IN LUNG, SIGNAL = 4.5; EXPRESSED IN HELA, SIGNAL = 4.8; EXPRESSED IN HEART, SIGNAL = 3.5; EXPRESSED IN BONE MARROW, SIGNAL = 4.8; NT HIT: gi12731110, EVALUE 1.00e-129; SWISSPROT HIT: Q60716, EVALUE 4.00e-38; EST_HUMAN HIT: AL544836.1, EVALUE 1.00e-129
aatctccttaccaagggagagcaggcggcgggtgagctccagggcacggtgcagatcacccaactggaagacagcatagctgaggtagtccagcacctgtgacttggttgtggtggcctcctccccggcatcaagctgctttagcacctgctccatccacaacaccgtatgataatagtccccttcattgtaggccgagcggcccatcccaaagcagtcatccacactcagcattgcctggtactt

SEQ ID NO: 17635 - DNA, 183 bp, Homo sapiens
  MAP TO CHR5.1; EXPRESSED IN HELA, SIGNAL = 0.69; EXPRESSED IN HEART, SIGNAL = 0.51; SWISSPROT HIT: O95704, EVALUE 2.00e-31; NT HIT: AB024745.1, EVALUE 9.00e-99; EST_HUMAN HIT: BI919092.1, EVALUE 2.00e-94
ctacctaccgtgcctgggtcctctgcatctcctagttcccaggttgggcgctgccactgggtgctaccgctgggtacatgccagtagtaagtacctgcagcatcgtggatcttcctccagccaggaggcaggccagcctccacctccagactgtggtccccccacaagtcatctacaggaaca

SEQ ID NO: 17636 - DNA, 162 bp, Homo sapiens
  MAP TO CHR16.1; EXPRESSED IN HELA, SIGNAL = 1.7; EXPRESSED IN LUNG, SIGNAL = 0.71; EST_HUMAN HIT: BF842245.1, EVALUE 6.00e-79; SWISSPROT HIT: P53796, EVALUE 1.00e-12; NT HIT: U41302.1, EVALUE 6.00e-84
ctgagcagcctggccccccagatcgtgtacttcactgctacattcccctacgtggtcctggtcgtgctgcttgtgcttggagtgctgctgcctggcgccctggacagcatcatttactatctcaagcctgactggtcaaagctggggtcccctcaggtgagg

SEQ ID NO: 17637 - DNA, 240 bp, Homo sapiens
  MAP TO AC019146.4; EXPRESSED IN FETAL LIVER, SIGNAL = 0.94; EXPRESSED IN HELA, SIGNAL = 0.88; EXPRESSED IN BONE MARROW, SIGNAL = 0.7; EXPRESSED IN HEART, SIGNAL = 0.97; EST_HUMAN HIT: BG493905.1, EVALUE 0.00e+00; SWISSPROT HIT: Q9P2Q2, EVALUE 8.80e-02; NT HIT: gi14752378, EVALUE 0.00e+00
cagtgatttcggtggaaaagtacaaggtattcttccatgatggatatgatatggtaataacaggctgggatctaatgggacccagggaactgagagactggaaggtacaccaggaaggccgcaatgtgttttatacaaattgtatgctgtcctagtaacttttccatcagaggccttataaatcaggagtgaagaatcttctgctgcatgagataacaagtaggaaccctcctgcaagct

SEQ ID NO: 17638 - DNA, 182 bp, Homo sapiens
  MAP TO CHR5.1; EXPRESSED IN PLACENTA, SIGNAL =  38; EXPRESSED IN LUNG, SIGNAL = 8.7; EXPRESSED IN HELA, SIGNAL =  75; EXPRESSED IN HEART, SIGNAL =  23; EST_HUMAN HIT: BF976403.1, EVALUE 2.00e-66; NT HIT: AF261085.1, EVALUE 4.00e-64; SWISSPROT HIT: P04406, EVALUE 2.00e-20
gtggaaggacccatgaccacagtccatgctatcactgccacccagaagattgtggatggcccctccgggaaactggcataacggccgtggagctctccagaacatcatccctgcctctactggcactgccaaagctgtgggcaaggtcatccctgagctgaacaggaagcttactggcatgg

SEQ ID NO: 17639 - DNA, 146 bp, Homo sapiens
  MAP TO CHR17.1; EXPRESSED IN BONE MARROW, SIGNAL = 1.4; EXPRESSED IN FETAL LIVER, SIGNAL = 1.9; EXPRESSED IN PLACENTA, SIGNAL = 1.7; EXPRESSED IN LUNG, SIGNAL = 1.1; EXPRESSED IN HELA, SIGNAL = 2.6; EXPRESSED IN HEART, SIGNAL = 1.8; EXPRESSED IN ADULT LIVER, SIGNAL = 2.9; NT HIT: gi7661671, EVALUE 3.00e-73; EST_HUMAN HIT: AA887805.1, EVALUE 5.00e-73; SWISSPROT HIT: P34666, EVALUE 5.00e-04
cacataccctcatgcccatgtagaaggggatgacagtgacacgtatgttctcagttgtttcccgatgaacatcggagagctccagccaggggtgattcttctcttgccaggcccttagcgtctcccgagccacaaaaggaggtgct

SEQ ID NO: 17640 - DNA, 162 bp, Homo sapiens
  MAP TO CHR12.1; EXPRESSED IN HELA, SIGNAL = 0.85; EXPRESSED IN ADULT LIVER, SIGNAL = 1.4; EXPRESSED IN BONE MARROW, SIGNAL = 1.1; EXPRESSED IN LUNG, SIGNAL = 0.59; EST_HUMAN HIT: BG001951.1, EVALUE 3.00e-03; SWISSPROT HIT: Q64726, EVALUE 7.60e+00; NT HIT: X04964.1, EVALUE 1.40e-01
aaatacaggaatcctagcttccttcttactccataaggcaaactttcaaataataagcagatccacagcagatggactggtttttagcactcctgagggggagaggatggagccagtctgtctctgtctctctctaaatctagagagaacgtgagccagcgt

SEQ ID NO: 17641 - DNA, 173 bp, Homo sapiens
  MAP TO CHR17.1; EXPRESSED IN FETAL LIVER, SIGNAL = 1.3; EXPRESSED IN LUNG, SIGNAL = 2.1; EXPRESSED IN HELA, SIGNAL = 1.1; EXPRESSED IN HEART, SIGNAL = 1.5; NT HIT: gi13385657, EVALUE 2.00e-31; SWISSPROT HIT: P35325, EVALUE 5.00e-01; EST_HUMAN HIT: BI223654.1, EVALUE 1.00e-89
ccttacctcctgtggggggctgggaggagatggcaggcatgatgggtggatggctggtttcggggggatatattcagtcacagccatcagcttctgccgctgaaagtgcatcacacgacggtggcgggtaacagccttggagccatagcggacagtctggagggtaggcagcc

SEQ ID NO: 17642 - DNA, 326 bp, Homo sapiens
  MAP TO CHR3.1; EXPRESSED IN HELA, SIGNAL =  23; EXPRESSED IN HEART, SIGNAL =  12; EXPRESSED IN ADULT LIVER, SIGNAL = 2.6; EXPRESSED IN PLACENTA, SIGNAL =  17; EXPRESSED IN FETAL LIVER, SIGNAL = 7.2; EXPRESSED IN LUNG, SIGNAL = 4.9; NT HIT: gi16166702, EVALUE 1.00e-110; SWISSPROT HIT: P05065, EVALUE 6.00e-44; EST_HUMAN HIT: BF793050.1, EVALUE 1.00e-110
cacctccgcttactaggcatggttaaagatgaagagggactcactggcagcagccccagcctgaccgcttggagtatactttccttgacaggcgtggctatctgccagggctcacttgacatactccttctgcacagccttcaggttctccttcttcctgccccaggccttcagggcagaggcctgcagggctcagctatatgagaaggtcaggccccagggcttcaggagggggcacttgttaatggcattgaggttgatggacacttccttgctctggcctccagacaggaaggtgatcccagggacagtggggggcactgtgc

SEQ ID NO: 17643 - DNA, 215 bp, Homo sapiens
  MAP TO CHR7.1; EXPRESSED IN FETAL LIVER, SIGNAL = 0.82; EXPRESSED IN HELA, SIGNAL = 1.1; EXPRESSED IN LUNG, SIGNAL = 0.73; EXPRESSED IN HEART, SIGNAL = 6.2; EXPRESSED IN ADULT LIVER, SIGNAL =   1; NT HIT: AF252549.1, EVALUE 1.00e-118; SWISSPROT HIT: P21333, EVALUE 3.00e-22; EST_HUMAN HIT: BG828246.1, EVALUE 1.00e-113
gtacctgcattgcgagtgtccacgatgaactctgccacctggaatgtgtgtccctcggaaagccccttgccccagacccgcaccttgctggcgtccccgatctcagatggccccaccaggatcttgaaggggctgttggtgacatgcttgccactcttgcgcacgctcaccacgtgctccccgacctccttgggggtgaaggagatccctgtgga

SEQ ID NO: 17644 - DNA, 139 bp, Homo sapiens
  MAP TO CHR13.1; EXPRESSED IN ADULT LIVER, SIGNAL = 1.4; EXPRESSED IN BONE MARROW, SIGNAL = 1.3; EXPRESSED IN HEART, SIGNAL = 0.89; EXPRESSED IN FETAL LIVER, SIGNAL = 1.4; EXPRESSED IN PLACENTA, SIGNAL = 1.2; EXPRESSED IN HELA, SIGNAL =   1; EXPRESSED IN LUNG, SIGNAL = 0.69; NT HIT: gi5174740, EVALUE 7.00e-68; SWISSPROT HIT: P15374, EVALUE 2.00e-20; EST_HUMAN HIT: N39937.1, EVALUE 1.00e-67
agtttcttaaacaattaggtctacatcctaactggcaattcgttgatgtatatggaatggatcctgaactccttagcatggtaccaagaccagtctgtgcagtcttacttctctttcctattacagaaaaggtaattgt

SEQ ID NO: 17645 - DNA, 245 bp, Homo sapiens
  MAP TO CHR3.1; EXPRESSED IN PLACENTA, SIGNAL = 1.5; EXPRESSED IN HELA, SIGNAL = 1.2; EXPRESSED IN FETAL LIVER, SIGNAL = 2.1; EXPRESSED IN LUNG, SIGNAL = 1.9; EXPRESSED IN ADULT LIVER, SIGNAL =   3; EXPRESSED IN BONE MARROW, SIGNAL = 2.2; EXPRESSED IN HEART, SIGNAL = 2.3; SWISSPROT HIT: P28357, EVALUE 4.10e+00; EST_HUMAN HIT: BE241545.1, EVALUE 2.10e-02; NT HIT: gi13376769, EVALUE 1.40e-02
catacctggggaatgaagatgaagcagttgattgtagttgtacaaacaaagatccctccagatgtgagtccaaagaccaggttgggccaggaatgcaagtatctggtgactacaaaaagcagcccagcagccagtacaaggaggttgacccccaccatgatggttaaggactgattcacaggaggggagctgacatggccagtcaggccagccaggtaggcaccatacagcaggagcagaccctg

SEQ ID NO: 17646 - DNA, 212 bp, Homo sapiens
  MAP TO CHR7.1; EXPRESSED IN BONE MARROW, SIGNAL = 9.4; EXPRESSED IN ADULT LIVER, SIGNAL =  12; EXPRESSED IN HEART, SIGNAL = 6.3; EXPRESSED IN FETAL LIVER, SIGNAL =  11; EXPRESSED IN PLACENTA, SIGNAL = 9.1; EXPRESSED IN HELA, SIGNAL =   8; EXPRESSED IN LUNG, SIGNAL = 5.8; SWISSPROT HIT: P07942, EVALUE 6.00e-36; EST_HUMAN HIT: BF841013.1, EVALUE 1.00e-111; NT HIT: M61924.1, EVALUE 1.00e-114
acttaccattccttccacttcttcattgaatccatccacaggggcacattcgctggcatgaccatagcagaagcaatttcctcgaaccaccatatcataaactgcataataatacttttctctgatttccatcctggaatccagaaggttatctcccaaagtatgcagtttcacaaacttgattctcaagttggtaatttttaataaatcta

SEQ ID NO: 17647 - DNA, 188 bp, Homo sapiens
  MAP TO CHR20.1; EXPRESSED IN FETAL LIVER, SIGNAL = 1.3; EXPRESSED IN HELA, SIGNAL =   2; EXPRESSED IN LUNG, SIGNAL = 1.1; EXPRESSED IN HEART, SIGNAL = 1.3; NT HIT: U56088.1, EVALUE 1.00e-102; SWISSPROT HIT: Q15269, EVALUE 8.00e-29; EST_HUMAN HIT: BG259045.1, EVALUE 5.00e-95
gctgacactcacttccccttggccgcgtgcttggctgtaatcttgtccagctccttcctgccagtcttgaggtcatgcctgccctcaatggagcccgtctgcaccgcgttctcagggtcccagaaggtgatctgtgagttcagtgtggccacagccagctccgcaccatcagggcgaaaagtcacagc

SEQ ID NO: 17648 - DNA, 212 bp, Homo sapiens
  MAP TO CHR2.1; EXPRESSED IN HELA, SIGNAL = 1.1e+02; EXPRESSED IN ADULT LIVER, SIGNAL =  17; EXPRESSED IN PLACENTA, SIGNAL =  56; EXPRESSED IN FETAL LIVER, SIGNAL =  27; EXPRESSED IN LUNG, SIGNAL =  35; NT HIT: AY014272.1, EVALUE 2.00e-87; SWISSPROT HIT: P53473, EVALUE 3.00e-29; EST_HUMAN HIT: AL533610.1, EVALUE 2.00e-70
gccacacgcagctcgttgtagaaggtgtggtgccagatcttctccatgtcatcccagttggtgatgatgccgtgttccatggggtacttcagggtcaggatgcctcttttgctctgggcctccttgcccacataggactctttctgatgcatgccccccatcatgccctgctgcctggggcgccccacgatggaagggaagacagcccgggg

SEQ ID NO: 17649 - DNA, 199 bp, Homo sapiens
  MAP TO CHR3.1; EXPRESSED IN HELA, SIGNAL = 3.7; EXPRESSED IN HEART, SIGNAL = 3.4; EXPRESSED IN PLACENTA, SIGNAL =   3; EXPRESSED IN FETAL LIVER, SIGNAL = 2.9; EXPRESSED IN LUNG, SIGNAL = 3.5; SWISSPROT HIT: Q12894, EVALUE 8.00e-14; EST_HUMAN HIT: AL530189.1, EVALUE 7.00e-85; NT HIT: U09585.1, EVALUE 5.00e-85
cttgctgcatgggctgactggaaagcatcccacagggaagggcgaggaacaagccctggctgctgctgtgctaggcctgctctgcgtgcagctgggccctggacctaagggtgaggagctgtttcacagcctgcagcctctgctggtctctgtgctcagtgacagcacagctagccctgctgcccggctccacgtgagt

SEQ ID NO: 17650 - DNA, 228 bp, Homo sapiens
  MAP TO CHR7.1; EXPRESSED IN FETAL LIVER, SIGNAL = 3.9; EXPRESSED IN PLACENTA, SIGNAL = 2.7; EXPRESSED IN HELA, SIGNAL = 2.9; EXPRESSED IN LUNG, SIGNAL = 2.7; EXPRESSED IN HEART, SIGNAL = 3.3; EXPRESSED IN ADULT LIVER, SIGNAL = 4.9; EXPRESSED IN BONE MARROW, SIGNAL = 3.6; NT HIT: AF126036.1, EVALUE 8.20e-01; SWISSPROT HIT: P09225, EVALUE 7.60e+00; EST_HUMAN HIT: BG388067.1, EVALUE 1.20e+00
aagaggaaatgctgtcttgagtgttgttaaacattctgtgggttaccaaggaaggctgggaaatctcttctggagatctcagaaaatgagaaagattcttaaagttggagtcataaaaactcagggttggcagagaccttaaaggtcacttagctgaaccacccatctggtgcttgaatcacctcaacactatccttgccaagtggtcattgttaaactattttatga

SEQ ID NO: 17651 - DNA, 372 bp, Homo sapiens
  MAP TO CHR14.1; EXPRESSED IN HELA, SIGNAL =   7; EXPRESSED IN BONE MARROW, SIGNAL =  16; EXPRESSED IN HEART, SIGNAL = 4.1; EXPRESSED IN ADULT LIVER, SIGNAL = 5.2; EXPRESSED IN PLACENTA, SIGNAL = 6.4; EXPRESSED IN FETAL LIVER, SIGNAL = 5.5; NT HIT: X67301.1, EVALUE 0.00e+00; SWISSPROT HIT: P01871, EVALUE 2.00e-67; EST_HUMAN HIT: AI510816.1, EVALUE 0.00e+00
agcagggtcagtagcaggtgccagctgtgtcggacatgaccagggacacgttgtacagggtgggtttaccggtggacttgtccacggtcctctcggtgaccctgttgggcagggcctcatgggccaccacgcaggtgtaggtctcccccgtgttccattcctcttcggacacggtcaggatgctgtgggcgaagtaccggcctggggcctggggctcaggcattggggcgctggtcacatacttctccggggacaagggctgccccctctgcatccactgcacgaagacgtccgcgggagagaagcccgtcaccaggcacgtgatggtggccgactcccgcaggttcagctgctcccgggctggtggcagca

SEQ ID NO: 17652 - DNA, 425 bp, Homo sapiens
  MAP TO CHR12.1; EXPRESSED IN ADULT LIVER, SIGNAL = 0.76; EXPRESSED IN PLACENTA, SIGNAL = 1.7; EXPRESSED IN LUNG, SIGNAL = 1.1; EXPRESSED IN HELA, SIGNAL = 1.9; EXPRESSED IN HEART, SIGNAL = 1.1; EXPRESSED IN BONE MARROW, SIGNAL =   1; NT HIT: gi14761659, EVALUE 0.00e+00; SWISSPROT HIT: Q9RSH4, EVALUE 4.20e-01
acctgccgttgcttctccagctctgtttggctaaggccggacatgcctgggtcctgggtacctgggagttcagctgtcgccaaagagctacccattccagtccctgggtcttctcgcttttcgacaggagaggtgatgcctgatcgctgtgaggctccatgggacaggtaggggagggatccgtcgggtgcaggtggtggcagaaccgacggagggcgtagtggggacagcccatagctctcccctgtggacccgctgctgggccccagggggctgcccgatgggtggaagttccctgtggctactgtgtagtttgtgctttgaggcttgcccaaggtggggccgggcccaaaatggctgttgatcccatggggtggcgggagaccaggctgagggacagggggctttagggaaggctcccctac

SEQ ID NO: 17653 - DNA, 137 bp, Homo sapiens
  MAP TO CHR22.1; EXPRESSED IN HELA, SIGNAL = 7.1; EXPRESSED IN FETAL LIVER, SIGNAL = 5.4; EXPRESSED IN LUNG, SIGNAL = 3.4; EXPRESSED IN HEART, SIGNAL = 4.4; EXPRESSED IN ADULT LIVER, SIGNAL = 4.8; EXPRESSED IN BONE MARROW, SIGNAL = 6.2; EXPRESSED IN PLACENTA, SIGNAL = 6.4; NT HIT: AB051432.1, EVALUE 2.00e-65; EST_HUMAN HIT: AI870670.1, EVALUE 2.00e-65; SWISSPROT HIT: Q93847, EVALUE 1.80e-01
aacaggtctcagagtggcctggtacacatctggagcctgcagacgcggagagcggttaccaccctggatggccacggcggccagtgtgtgacctggctgcagacgctgccccaggggcgccagctcctcaggtgggt

SEQ ID NO: 17654 - DNA, 269 bp, Homo sapiens
  MAP TO CHR19.1; EXPRESSED IN HELA, SIGNAL = 1.1; EXPRESSED IN LUNG, SIGNAL = 1.5; EXPRESSED IN HEART, SIGNAL = 1.5; EST_HUMAN HIT: BI830310.1, EVALUE 1.00e-117; SWISSPROT HIT: P55459, EVALUE 4.30e-01; NT HIT: AB037816.1, EVALUE 1.00e-117
aggtgtatacagctggcactcagtgcttgcacattctccactggcagaatgactcccggcgtggctcgggctccccggaagacacccctcgaagcagtggtgcctctagcatcttcgacctgaggaacctggcagctgactcattgctgccctctctgctagagcgggcggccccagaagatgtggaccggcgcaatgaaacccttcgacggcagcaccggcccccggccctgctcaccctctacccggcacctgacgaggtgggtgcc

SEQ ID NO: 17655 - DNA, 138 bp, Homo sapiens
  MAP TO CHR19.1; EXPRESSED IN PLACENTA, SIGNAL = 1.2; EXPRESSED IN FETAL LIVER, SIGNAL = 1.5; EXPRESSED IN LUNG, SIGNAL = 1.4; EXPRESSED IN HELA, SIGNAL = 1.1; EXPRESSED IN HEART, SIGNAL = 1.5; EXPRESSED IN BONE MARROW, SIGNAL = 1.6; NT HIT: gi14760067, EVALUE 3.00e-64; SWISSPROT HIT: P17024, EVALUE 3.00e-18; EST_HUMAN HIT: BF684931.1, EVALUE 4.00e-64
cttacctacagaagccaggttcctgaaggtttcctgcatcacatctctgtagagattcttctgggaaggatccagcaaagcccactcctcctgggtgaagttcacatctacatcctcaaagaccactgaatcctgaaa

SEQ ID NO: 17656 - DNA, 301 bp, Homo sapiens
  MAP TO CHR17.1; EXPRESSED IN LUNG, SIGNAL = 1.1; EXPRESSED IN HELA, SIGNAL = 0.75; EXPRESSED IN HEART, SIGNAL = 1.1; EXPRESSED IN ADULT LIVER, SIGNAL = 1.3; EXPRESSED IN BONE MARROW, SIGNAL = 0.84; SWISSPROT HIT: Q02280, EVALUE 4.00e-08; NT HIT: gi6912445, EVALUE 1.00e-122
tctttccctcaagtgtccccaaccgccacccctctccccttagaacgtgtttgagccaaagccatcagtgcccgagtacaaggtggcctccgtgggggggtctcgctgcctcctcctccactacagcgtctccaaggccatctgggacggccttatcctccttgccaccttctacgttgcggtcaccgtcccctacaatgtctgtttctcgggtgacgatgacacccccatcacttcgcgacacacccttgtcagcgacatcgccgtggaaatgctcttcatcctaggtcagaccttctgc

SEQ ID NO: 17657 - DNA, 151 bp, Homo sapiens
  MAP TO CHR19.1; EXPRESSED IN ADULT LIVER, SIGNAL = 3.2; EXPRESSED IN PLACENTA, SIGNAL = 1.9; EXPRESSED IN FETAL LIVER, SIGNAL = 1.8; EXPRESSED IN LUNG, SIGNAL = 1.4; EXPRESSED IN HELA, SIGNAL = 2.2; EXPRESSED IN HEART, SIGNAL = 1.9; EXPRESSED IN BONE MARROW, SIGNAL = 1.5; NT HIT: gi14764226, EVALUE 2.00e-53; EST_HUMAN HIT: BF036148.1, EVALUE 2.00e-53
agatgtggatcaatccatgtgctcaggtgatctttgactcagacccagcccccaaggacacgagtggtgcagctgcgttggagatgatgtctcaggccatgattaggtaggtggtcctgctgtccaccttggcctgctccttgctgcctct

SEQ ID NO: 17658 - DNA, 201 bp, Homo sapiens
  MAP TO CHR7.1; EXPRESSED IN HELA, SIGNAL = 0.86; EXPRESSED IN ADULT LIVER, SIGNAL = 0.62; EXPRESSED IN HEART, SIGNAL = 0.63; EXPRESSED IN BONE MARROW, SIGNAL = 0.7; EXPRESSED IN FETAL LIVER, SIGNAL = 0.48; SWISSPROT HIT: P20456, EVALUE 1.40e+00; NT HIT: gi14743430, EVALUE 3.00e-03; EST_HUMAN HIT: BG743312.1, EVALUE 4.00e-03
gcctttgtttgattgagaaattactgtggctgtggcagctgtaataaaagggaacagagccccatgggcgacagctttatcgccatctacaacccaggatggattcggtggcagcactgtgcccaaggccagagatttctttcatctgcggctggctgggcccagggacttgtcaagcccaagttagcatatcgattgcag

SEQ ID NO: 17659 - DNA, 150 bp, Homo sapiens
  MAP TO CHR1.1; EXPRESSED IN BONE MARROW, SIGNAL = 3.9; EXPRESSED IN PLACENTA, SIGNAL = 3.2; EXPRESSED IN FETAL LIVER, SIGNAL = 3.6; EXPRESSED IN LUNG, SIGNAL = 4.4; EXPRESSED IN HELA, SIGNAL = 3.8; EXPRESSED IN ADULT LIVER, SIGNAL = 5.6; SWISSPROT HIT: Q10033, EVALUE 3.40e+00; NT HIT: AF310282.1, EVALUE 3.00e-79; EST_HUMAN HIT: AI565093.1, EVALUE 1.00e-64
tttagtgaaatagaaaaatctggtactattccgatagccaaaccaagtgaaactgagcagtctgaaactgattgtgatgttggtgaggcccttgatgctagtgctccaattgaacaaccttcctttgtcagtccacctgacaggtgggta

SEQ ID NO: 17660 - DNA, 209 bp, Homo sapiens
  MAP TO CHR17.1; EXPRESSED IN ADULT LIVER, SIGNAL = 0.86; EXPRESSED IN BONE MARROW, SIGNAL = 0.8; EXPRESSED IN FETAL LIVER, SIGNAL = 0.94; EXPRESSED IN HELA, SIGNAL = 0.37; EXPRESSED IN LUNG, SIGNAL = 0.65; SWISSPROT HIT: Q91055, EVALUE 1.90e+00; NT HIT: gi14764905, EVALUE 1.90e-01; EST_HUMAN HIT: BF219851.1, EVALUE 2.80e-01
ggagcagcactcccaagttcctgctcactccacttcctggcatctgtcctgatgcatgccaaggaggctctttctgtacagcatgttctaatggggatgtagagcaccctccaccccctcacatatgtcctgagctggcatgaacaccagctcactggctgagcttccctggctcagtccccagtgttgggggtgacaatgaaggcagg

SEQ ID NO: 17661 - DNA, 239 bp, Homo sapiens
  MAP TO CHR7.1; EXPRESSED IN BONE MARROW, SIGNAL = 1.2; EXPRESSED IN FETAL LIVER, SIGNAL = 0.95; EXPRESSED IN HELA, SIGNAL = 1.5; SWISSPROT HIT: O75690, EVALUE 6.60e+00; NT HIT: gi14744071, EVALUE 0.00e+00; EST_HUMAN HIT: AA382656.1, EVALUE 3.00e-72
agttctcattgctggggaccatgctaccatagctcttcccgtaggactcaaggctcatttttatagaaggggactggacttgaagcagctgcatttcttccaggcagagctgcaagtctgcctgcagcctcttccgctcctctaggagcctcccttgctcttgctgcaagagctcctgcttcgcctgaccggcgtcatacatcacctgcagggcctgcatctgctccatgagcagcttg

SEQ ID NO: 17662 - DNA, 183 bp, Homo sapiens
  MAP TO CHR20.1; EXPRESSED IN FETAL LIVER, SIGNAL = 1.2; EXPRESSED IN HELA, SIGNAL = 0.93; EXPRESSED IN BONE MARROW, SIGNAL = 0.81; EXPRESSED IN HEART, SIGNAL = 1.2; SWISSPROT HIT: Q9Y6D5, EVALUE 8.00e-29; NT HIT: gi14786249, EVALUE 1.00e-94; EST_HUMAN HIT: AU124958.1, EVALUE 3.00e-87
caggtctcccaccatccgggacatggcgatccgctgcattgcccagatggtgaactcccaggcggccaacatccgctcaggttggaagaacatctttgccgtgttccaccaggcagcctctgatcatgatgggaacattgtggagctggccttccagaccacttgccacattgtcagtaagtg

SEQ ID NO: 17663 - DNA, 390 bp, Homo sapiens
  MAP TO CHR5.1; EXPRESSED IN PLACENTA, SIGNAL =  31; EXPRESSED IN HELA, SIGNAL =  15; EXPRESSED IN HEART, SIGNAL =  16; EST_HUMAN HIT: AW090143.1, EVALUE 0.00e+00; SWISSPROT HIT: P25111, EVALUE 1.00e-41; NT HIT: gi16159822, EVALUE 0.00e+00
gatttaataaagttttatttttccaaatgtacagctggttggacctattcatgcatcttcaccagcagctggagcatctccacccttggtatttctggtgtaaattacttgagctctgtgctttgaaaccagtttgataagtcctttactaaggagctcctgaagggctgccctggccagggagcctcgaatcttcagtctctcagagaccacagctggggttataagtttatagttgggaacttccttacagagtttgtcataggtagctttgtcaaacaagactaagttattgagcttgtcccgaactttgcctttggaccacttcttctttttggccttgcccccggatttgttcactgggtctttgtctttcttggctgactttcc

SEQ ID NO: 17664 - DNA, 143 bp, Homo sapiens
  MAP TO CHR22.1; EXPRESSED IN HEART, SIGNAL =   5; EXPRESSED IN ADULT LIVER, SIGNAL = 4.2; EXPRESSED IN PLACENTA, SIGNAL = 8.1; EXPRESSED IN FETAL LIVER, SIGNAL = 4.9; EXPRESSED IN LUNG, SIGNAL = 5.7; EXPRESSED IN HELA, SIGNAL = 8.3; NT HIT: gi14777092, EVALUE 5.00e-75; EST_HUMAN HIT: W88734.1, EVALUE 4.00e-67
gagccaggttttgtaaacattcaggagccacttcccaggtcagcaactgcgagcgttttctgctggtttgtacgataagcctttaaccaagctttatttctacttgcaataaaggatgatccactctgggaggttaaaataaa

SEQ ID NO: 17665 - DNA, 182 bp, Homo sapiens
  MAP TO CHR22.1; EXPRESSED IN ADULT LIVER, SIGNAL = 6.4; EXPRESSED IN PLACENTA, SIGNAL = 1.5; EXPRESSED IN FETAL LIVER, SIGNAL = 3.2; EXPRESSED IN LUNG, SIGNAL = 2.1; EXPRESSED IN HELA, SIGNAL = 1.5; EXPRESSED IN BONE MARROW, SIGNAL = 1.7; EXPRESSED IN HEART, SIGNAL = 1.8; SWISSPROT HIT: O43272, EVALUE 3.00e-30; NT HIT: gi14776959, EVALUE 1.00e-97; EST_HUMAN HIT: BI602093.1, EVALUE 4.00e-74
caggatgcctatgacaatgtgaccctggacgtggagctggctcgccgtgagggctggtgttttggggccaagctggtgcggggcgcatacctggcccaggagcgagcccgtgcggcagagatcggctatgaggaccccatcaaccccacgtacgaggccaccaacgccatgtaccacaggtg

SEQ ID NO: 17666 - DNA, 260 bp, Homo sapiens
  MAP TO CHR19.1; EXPRESSED IN HELA, SIGNAL = 4.5; EXPRESSED IN BONE MARROW, SIGNAL = 4.3; EXPRESSED IN HEART, SIGNAL = 6.3; EXPRESSED IN ADULT LIVER, SIGNAL = 4.6; EXPRESSED IN PLACENTA, SIGNAL = 3.4; EXPRESSED IN FETAL LIVER, SIGNAL = 3.7; EXPRESSED IN LUNG, SIGNAL =  12; EST_HUMAN HIT: BG287691.1, EVALUE 0.00e+00; SWISSPROT HIT: O84806, EVALUE 2.30e-01; NT HIT: gi14756107, EVALUE 0.00e+00
aacaggtcaatgtgggcctggtcctgccggaagaagagcaggccctgcgagtcggctgagccgttggcgccgggcccacttgggtctcccacgcccagcagcagcaggtagaagcggctcgacttgagggcatggtgctcgtgtgggtaggtgatgaccagccggtcccgcacgccgcggaccaccagcactgccgacggctccgtcaccgtcacgtaggtaatcaggccccgcggccatacctcccgtacccgtggctc

SEQ ID NO: 17667 - DNA, 171 bp, Homo sapiens
  MAP TO CHR5.1; EXPRESSED IN PLACENTA, SIGNAL = 3.9; EXPRESSED IN FETAL LIVER, SIGNAL = 2.9; EXPRESSED IN LUNG, SIGNAL = 1.8; EXPRESSED IN HELA, SIGNAL =   5; EXPRESSED IN HEART, SIGNAL = 1.3; EXPRESSED IN ADULT LIVER, SIGNAL = 2.5; EXPRESSED IN BONE MARROW, SIGNAL = 2.6; NT HIT: gi14781268, EVALUE 6.00e-69; EST_HUMAN HIT: AL557809.1, EVALUE 8.00e-69; SWISSPROT HIT: Q9Z0E8, EVALUE 7.00e-09
ggtttggcaggaagaacgttctcttcgcaaccatggctgtacagactggttcagcttcctgcagattttctccatcagctgggagatgttcactgtgtatttgtcatcgtgggcatgggccagatctccaactatgtggtagccttctactaggtaggaatggcttctggg

SEQ ID NO: 17668 - DNA, 182 bp, Homo sapiens
  MAP TO CHR5.1; EXPRESSED IN FETAL LIVER, SIGNAL = 2.7; EXPRESSED IN LUNG, SIGNAL = 3.4; EXPRESSED IN HELA, SIGNAL = 2.9; EXPRESSED IN HEART, SIGNAL = 2.4; EXPRESSED IN ADULT LIVER, SIGNAL = 2.3; EXPRESSED IN BONE MARROW, SIGNAL =   3; SWISSPROT HIT: P16579, EVALUE 1.90e+00
acacccaggatctcagaacagcacttcccccaccaatctgtccacggtggccttagccaaacccgaggaatgaaggcttaacgggaatgtgtcataagaaaaatattccattagagttttctctcccagattccacgcccacatttctgcctgcctgttggacatctccagttagatgaccc

SEQ ID NO: 17669 - DNA, 260 bp, Homo sapiens
  MAP TO CHR19.1; EXPRESSED IN HELA, SIGNAL = 3.2; EXPRESSED IN FETAL LIVER, SIGNAL = 4.3; EXPRESSED IN LUNG, SIGNAL =   6; EXPRESSED IN BONE MARROW, SIGNAL = 3.2; EXPRESSED IN HEART, SIGNAL = 5.6; EXPRESSED IN ADULT LIVER, SIGNAL = 3.5; EXPRESSED IN PLACENTA, SIGNAL =   3; SWISSPROT HIT: Q14112, EVALUE 3.00e-09; NT HIT: AB011541.1, EVALUE 6.00e-08; EST_HUMAN HIT: AA583931.1, EVALUE 4.00e-04
tcactcacgtgcggttgcagtgtgagatgccatcaccctggtagccccgctggcagtgacactcgtagctgaggggcgtgttcaggcaggtcgcccgcgggtggcaccgggccaggcccaggcgacactcatccacgtcaggacagcgggcgtatgcccagcgggcagggagggccacgggaagccccaggccctcccccacccacagggagcagttacccccaccgaggggccctgagaagtccccctgtaggcacctg

SEQ ID NO: 17670 - DNA, 382 bp, Homo sapiens
  MAP TO CHR19.1; EXPRESSED IN LUNG, SIGNAL =  11; EXPRESSED IN HELA, SIGNAL = 0.65; EXPRESSED IN HEART, SIGNAL = 5.3; EXPRESSED IN ADULT LIVER, SIGNAL = 1.2; EXPRESSED IN BONE MARROW, SIGNAL = 3.9; EXPRESSED IN FETAL LIVER, SIGNAL = 3.3; NT HIT: gi13430887, EVALUE 0.00e+00; EST_HUMAN HIT: BI093435.1, EVALUE 0.00e+00; SWISSPROT HIT: Q05481, EVALUE 4.00e-64
actggagagaaaccctacaaatgtgaagaatgtggcaaagcctttaaccactcctcaaaacttactatacataagataattcatactggagagaaaccttacaaatgtgaagaatgtggcaaagcttttaaccaatcctcaaaccttaccaaacataagataattcatactggagagaaactctacaaatgtgaagaatgtggcaaagcttttaaccgatcctcaaaccttactacacataagagaattcacactggagagaaaccctacaaatgtgaagaatgtggcaaagctttcaaccgatcctcaaaccttactaaacataacataattcatactggagagaaatcttacaaatgtgaagaatgtggtaaagccttta

SEQ ID NO: 17671 - DNA, 412 bp, Homo sapiens
  MAP TO CHR5.1; EXPRESSED IN ADULT LIVER, SIGNAL = 0.82; EXPRESSED IN BONE MARROW, SIGNAL = 0.86; EXPRESSED IN FETAL LIVER, SIGNAL = 0.56; EXPRESSED IN HELA, SIGNAL = 0.74; EXPRESSED IN HEART, SIGNAL = 0.76; NT HIT: gi14724357, EVALUE 0.00e+00; SWISSPROT HIT: Q9Y5I4, EVALUE 9.00e-37; EST_HUMAN HIT: BG910706.1, EVALUE 0.00e+00
gaacaattcttgagtctgcagaagatcctgatattagtatgaattcgctgagcaaataccaactaagtcctaacgagtatttctcattggtggagaaagacaatcctgatggtggcaaatatccagaattagtattgcagaagactctggaccgagaaacgcagagcgctcaccacttggtactgaccgccttagatggtggggaccctccccgaagcggtactgctcagataagaatcctggtaatagatgccaatgacaaccccccagtgttcagccaggacgtgtacagggttagccttcgggaagacgtgcctccaggcacctccatcctgagagtgaaggccactgaccaggacgagggcatcaactcagagatcacttattccttctttggtgtggctgacaaagc

SEQ ID NO: 17672 - DNA, 269 bp, Homo sapiens
  MAP TO CHR12.1; EXPRESSED IN PLACENTA, SIGNAL = 1.5; EXPRESSED IN FETAL LIVER, SIGNAL = 1.2; EXPRESSED IN LUNG, SIGNAL = 0.97; EXPRESSED IN HELA, SIGNAL = 1.7; EXPRESSED IN ADULT LIVER, SIGNAL = 1.4; NT HIT: X57075.1, EVALUE 1.00e-128; SWISSPROT HIT: P15828, EVALUE 4.90e+00; EST_HUMAN HIT: BG335074.1, EVALUE 9.20e-02
ctgcccaatatgggtcctgggtggcctctcgcctctctctttccctgggcccccagccagctcccccctcccccagagatgctccctgctcacttcattcctgcctcatagttggaatgacagtggctcccagaacccctggggagtgtggagggtgatgggggtctggggaggcagccaggcccaagagcaggttaatgttacagccctggataagtgagctgggcgggttgacgtcagggcgatgatgggtggaggggagggccggg

SEQ ID NO: 17673 - DNA, 211 bp, Homo sapiens
  MAP TO CHR22.1; EXPRESSED IN HELA, SIGNAL = 1.1; EXPRESSED IN HEART, SIGNAL = 1.1; EXPRESSED IN ADULT LIVER, SIGNAL = 2.6; EXPRESSED IN FETAL LIVER, SIGNAL = 1.1; EXPRESSED IN LUNG, SIGNAL =   1; SWISSPROT HIT: P54198, EVALUE 2.00e-20; EST_HUMAN HIT: BE693380.1, EVALUE 1.00e-108; NT HIT: gi14776998, EVALUE 1.00e-108
atgacagggacttctccacggcattctttaacagcatccccctctcgggctccctggcgggcaccatgctctcttctcatagcagtccacagctactgccactggactccagtacccctaactccttcggcgcctcgaagccttgcacagagcctgtggtggctgccagtgccagacctgcaggcgattctgtcaataaagacaggttagt

SEQ ID NO: 17674 - DNA, 187 bp, Homo sapiens
  MAP TO CHR7.1; EXPRESSED IN FETAL LIVER, SIGNAL = 0.9; EXPRESSED IN LUNG, SIGNAL = 0.86; EXPRESSED IN HELA, SIGNAL = 1.2; EXPRESSED IN HEART, SIGNAL = 1.2; EXPRESSED IN ADULT LIVER, SIGNAL = 1.8; SWISSPROT HIT: P31714, EVALUE 4.30e+00; EST_HUMAN HIT: BG000711.1, EVALUE 5.00e-89; NT HIT: gi14670391, EVALUE 3.00e-89
ggggattttcttatattcctacccgggcttcaaattctgatgtttcttccacatatccaagtcctcctttttgtaaccttgttgcaacttcaatgagatcactacgaaggaagtttaaaagctcctggttgccatcacaagattttagacccaaatttggcttccgtgctagatgaatagagtgaat

SEQ ID NO: 17675 - DNA, 205 bp, Homo sapiens
  MAP TO CHR14.1; EXPRESSED IN ADULT LIVER, SIGNAL = 0.67; EXPRESSED IN FETAL LIVER, SIGNAL = 3.6; EXPRESSED IN HELA, SIGNAL = 1.1; EXPRESSED IN LUNG, SIGNAL = 7.2; EXPRESSED IN HEART, SIGNAL = 2.5; SWISSPROT HIT: P24049, EVALUE 5.00e-14; EST_HUMAN HIT: BF976493.1, EVALUE 1.00e-43; NT HIT: gi14722100, EVALUE 3.00e-46
acaaagcacctaagatgtgccaccagacctccagagctcatggtgggattaacccatacatgagctctccctgtcgcatcgaaatgatccttactgcgaaggaacaaattgttcctaaaccagaagattgcccacaagaaaaagatatccctgaggaaacaaaaacttatggcacaggaataaattcagcactaaaataaatgca

SEQ ID NO: 17676 - DNA, 217 bp, Homo sapiens
  MAP TO CHR19.1; EXPRESSED IN BONE MARROW, SIGNAL = 0.93; EXPRESSED IN FETAL LIVER, SIGNAL = 1.2; EXPRESSED IN HELA, SIGNAL = 1.1; EXPRESSED IN LUNG, SIGNAL = 0.71; SWISSPROT HIT: P25341, EVALUE 1.00e-12; NT HIT: AB023190.1, EVALUE 1.00e-115; EST_HUMAN HIT: AL520607.1, EVALUE 1.00e-110
caccttccacatattccatgaccatgcagaggtggcgccgagtctcaaaggagcagaacatgccgaccacaaacgggttctcggcgaaggtgaggatatcgcgctccacaaaggcctgctggatctggttgcggaggatcaagttctgcttgttgatctttttcatggcaaagcgctgccgcgtgtcgcggtgccgcaccaggtagacagcgctgca

SEQ ID NO: 17677 - DNA, 192 bp, Homo sapiens
  MAP TO CHR1.1; EXPRESSED IN PLACENTA, SIGNAL = 1.6; EXPRESSED IN FETAL LIVER, SIGNAL = 0.57; EXPRESSED IN HELA, SIGNAL = 0.96; EXPRESSED IN LUNG, SIGNAL = 0.86; SWISSPROT HIT: Q05513, EVALUE 9.00e-30; NT HIT: gi10864649, EVALUE 1.00e-104; EST_HUMAN HIT: AL538613.1, EVALUE 1.00e-104
cctcgtcatcatgcaccagctctttcttcaccactttcatggcgtaaatttggtcattcttcttcaaccgcaccaggagaaccttggcgtagctcccgcgcccgatgactctgattaggtcaaagtcctgcagcccaagcccctgagagattttgattccatccatcccatcgataactggcttaaggtcct

SEQ ID NO: 17678 - DNA, 208 bp, Homo sapiens
  MAP TO CHR8.1; EXPRESSED IN LUNG, SIGNAL = 0.79; EXPRESSED IN HELA, SIGNAL = 0.85; EXPRESSED IN HEART, SIGNAL = 0.81; EXPRESSED IN BONE MARROW, SIGNAL = 0.79; EXPRESSED IN ADULT LIVER, SIGNAL = 0.89; NT HIT: U25764.1, EVALUE 1.00e-113; EST_HUMAN HIT: BF724610.1, EVALUE 1.00e-107; SWISSPROT HIT: Q14596, EVALUE 8.00e-35
gatactgcaccagacccgaggcccaaattgctggcctttgtgagaaagacgccaatgggaagtatacgttccctccaaggctggggcaatgaactccacagatacaactcccacatggccggccttgaggcagggaaccaaaacatccttcttttctgtggaagccaaagtcaggtttccccacatgaacttgagctgaaaagaacag

SEQ ID NO: 17679 - DNA, 352 bp, Homo sapiens
  MAP TO CHR5.1; EXPRESSED IN BONE MARROW, SIGNAL =   1; EXPRESSED IN PLACENTA, SIGNAL = 3.4; EXPRESSED IN HELA, SIGNAL = 3.1; EXPRESSED IN FETAL LIVER, SIGNAL = 1.1; EXPRESSED IN LUNG, SIGNAL = 1.7; SWISSPROT HIT: Q9NRJ7, EVALUE 8.00e-36; NT HIT: gi14724284, EVALUE 0.00e+00; EST_HUMAN HIT: BI036374.1, EVALUE 1.00e-105
tggaccagaatgacaatgccccagaaatcctgtaccctgccctccccactgatggttctactggtgtggagctggcaccccgctctgcagagcctggctacctggtgaccaaggtggtggcagtggacagagactcaggccagaatgcttggctctcctaccgcctattcaaggccagtgagccagggctcttctcggtggggctgcacacaggtgaagtgcgcacagctcgggccctgctagatagagatgcgctcaaacagagccttgtggtggctgtacaggaccatggccagccccctctctcggccactgtcacgctcacagtagccatagctgacagcatcccaga

SEQ ID NO: 17680 - DNA, 166 bp, Homo sapiens
  MAP TO CHR19.1; EXPRESSED IN HELA, SIGNAL = 1.7; EXPRESSED IN HEART, SIGNAL = 1.2; EXPRESSED IN BONE MARROW, SIGNAL = 1.1; EXPRESSED IN PLACENTA, SIGNAL = 2.4; EXPRESSED IN FETAL LIVER, SIGNAL = 1.1; NT HIT: gi14277708, EVALUE 1.00e-88; EST_HUMAN HIT: BG540566.1, EVALUE 2.00e-81; SWISSPROT HIT: P17672, EVALUE 2.00e+00
tggcctgcccccaggtgcatggcggcctgctgcagatcttccctgagggccggcccgtggtagccaacatcgagccactctttgaccggttgctcattttctggtctgaccggcggaacccccacgaggtgaagccagcctatgccaccaggtatgacctgtactt

SEQ ID NO: 17681 - DNA, 189 bp, Homo sapiens
  MAP TO CHR7.1; EXPRESSED IN PLACENTA, SIGNAL = 1.7; EXPRESSED IN FETAL LIVER, SIGNAL = 1.4; EXPRESSED IN LUNG, SIGNAL = 1.3; EXPRESSED IN HELA, SIGNAL = 1.9; EXPRESSED IN ADULT LIVER, SIGNAL = 1.8; NT HIT: gi14782029, EVALUE 8.00e-87; EST_HUMAN HIT: AW965433.1, EVALUE 1.00e-83; SWISSPROT HIT: Q9Y2N3, EVALUE 1.00e-11
gttaccttcttttattttcctggccatcaaggaatatttggtcttcttcctccactgtccttttcttcttcttctctttgagggcactcagtacagtctcctttgcacatgggtctggggcattacttgatggtgacgacagtgttgagctgattatctgctctggtctataatgaaagacaagattct

SEQ ID NO: 17682 - DNA, 188 bp, Homo sapiens
  MAP TO CHR7.1; EXPRESSED IN HEART, SIGNAL = 1.4; EXPRESSED IN ADULT LIVER, SIGNAL = 2.2; EXPRESSED IN HELA, SIGNAL = 1.3; EXPRESSED IN FETAL LIVER, SIGNAL = 0.97; EXPRESSED IN LUNG, SIGNAL = 1.4; NT HIT: gi16162420, EVALUE 3.00e-55; EST_HUMAN HIT: AL597142.1, EVALUE 5.00e-89; SWISSPROT HIT: O00458, EVALUE 9.00e-22
gccattttagtgcctgtggtaattttggttcttccattggttaggaacgggattttccaacagaaaccattaaatttggtcctgaacgcatgtatattgattgctgggtaaaaaaacacacctatgacacctttaaggaggttcttggatcagggatgcagtaccacttgcaggtaagtgtcatcctt

SEQ ID NO: 17683 - DNA, 362 bp, Homo sapiens
  MAP TO CHR19.1; EXPRESSED IN HELA, SIGNAL = 0.47; EXPRESSED IN FETAL LIVER, SIGNAL = 0.95; EXPRESSED IN HEART, SIGNAL = 1.1; SWISSPROT HIT: P17024, EVALUE 9.00e-57; NT HIT: gi13652274, EVALUE 2.00e-83; EST_HUMAN HIT: AV735076.1, EVALUE 4.00e-57
tgtaaacagtgtggtaaagccttcagttgttccagttcctttcgaatgcatgaaagaattcacactggagagaaaccctatgaatgtaaacagtgtggtaaagcctttagtttttctagttcctttcggatgcatgaaaggactcacactggagagaaaccctatgaatgtaaacaatgtggtaaagccttcagttgttccagttcctttcgaatgcatgaaaggactcacactggggagaaaccctatgaatgtaaacagtgtggtaaggcgtttagttgttccagttccattcgaatacatgaaaggactcacactggagagaaaccttatgagtgtaaacaatgtggtaaggccttcag

SEQ ID NO: 17684 - DNA, 164 bp, Homo sapiens
  MAP TO CHR19.1; EXPRESSED IN HELA, SIGNAL = 0.81; EXPRESSED IN FETAL LIVER, SIGNAL = 0.75; EXPRESSED IN LUNG, SIGNAL = 1.4; EXPRESSED IN HEART, SIGNAL = 1.1; SWISSPROT HIT: P46821, EVALUE 1.00e-12; NT HIT: gi14766300, EVALUE 2.00e-87; EST_HUMAN HIT: AI720374.1, EVALUE 2.00e-87
caggtgaccctgatccccactttcgactcggtggccatgcatacgtggtacgcagagacgcacgcccggcaccaggcgctgggcatcacggtgttgggcagcaacagcatggtgtccatgcaggatgacgccttcccggcctgcaaggtggagttctagcccca

SEQ ID NO: 17685 - DNA, 173 bp, Homo sapiens
  MAP TO CHR22.1; EXPRESSED IN HELA, SIGNAL = 0.82; EXPRESSED IN HEART, SIGNAL = 1.2; EXPRESSED IN BONE MARROW, SIGNAL = 0.82; SWISSPROT HIT: P54198, EVALUE 2.00e-27; NT HIT: gi7219909, EVALUE 2.00e-87; EST_HUMAN HIT: BE543250.1, EVALUE 3.00e-87
cttcacagaaattctagctactctgagaggtcattctggcttggtcaaagggttgacatgggaccctgttggtaaatacatagcttctcaagctgatgaccgcagcctaaaggtgtggaggacgctggactggcagttggagaccagcatcaccaagccttttgatgaggtaa

SEQ ID NO: 17686 - DNA, 352 bp, Homo sapiens
  MAP TO AL355377.5; EXPRESSED IN ADULT LIVER, SIGNAL = 3.2; EXPRESSED IN LUNG, SIGNAL = 2.8; EXPRESSED IN HELA, SIGNAL = 3.7; EXPRESSED IN BONE MARROW, SIGNAL = 2.3; EXPRESSED IN HEART, SIGNAL = 2.4; SWISSPROT HIT: Q9QYJ3, EVALUE 6.00e-42; NT HIT: gi16180779, EVALUE 0.00e+00; EST_HUMAN HIT: BI908057.1, EVALUE 0.00e+00
ttgaggctgatcagggcactgtagagcacgttggtgccatctcggcggaagtgtgcatggggcttgtctttgagcacaaagacgatgtcagcagggatgttgtcaggtgtggcgtcgccttctttggggaaggtgatcttggtgccttccttccagccacgcttgatgactatgtgcaggatcttgtcctcggtgcgcacagttcgcccatcagggttgaggcgacgccttgtgatcttcatgcgcttggtggagccatggtagatctcctacagggacacccgcagctcgtgcaccactggggggtcctgcaccttgcgccgagggtacagtggttttggggctcgccttg

SEQ ID NO: 17687 - DNA, 154 bp, Homo sapiens
  MAP TO CHR7.1; EXPRESSED IN HELA, SIGNAL = 0.98; EXPRESSED IN HEART, SIGNAL = 1.7; EXPRESSED IN ADULT LIVER, SIGNAL = 1.1; EXPRESSED IN FETAL LIVER, SIGNAL = 1.4; SWISSPROT HIT: Q64430, EVALUE 5.10e-01
tctttaactggcgttgtgacgtcttacgtcatgatgttgcgtcaccacgtgatgacgctgtgccatcacaacacatcatcgcatattgacacaatgtcatggcataatatcatcaaattaaattcatcagcactccccacagcctggccccagg

SEQ ID NO: 17688 - DNA, 217 bp, Homo sapiens
  MAP TO CHR7.1; EXPRESSED IN PLACENTA, SIGNAL = 2.7; EXPRESSED IN FETAL LIVER, SIGNAL = 2.9; EXPRESSED IN LUNG, SIGNAL = 1.5; EXPRESSED IN HELA, SIGNAL = 3.4; EXPRESSED IN HEART, SIGNAL = 1.8; EST_HUMAN HIT: BI915087.1, EVALUE 1.00e-110; NT HIT: gi13628940, EVALUE 1.00e-112; SWISSPROT HIT: P10071, EVALUE 2.00e-27
gacttaccatctgtagggctcagcccacgggttgctgagatcatggagagcgatgggctgctgtgcaaggagcggatatagtccatgtagggattaatgtagggatgtggagggctgaagggagactcggaagcagcagtggggttccggtgtggggagatcctaatgaagggcaggtccggatacgtagggctactagataaggcggaagtcctgg

SEQ ID NO: 17689 - DNA, 129 bp, Homo sapiens
  MAP TO CHR19.1; EXPRESSED IN ADULT LIVER, SIGNAL = 0.88; EXPRESSED IN FETAL LIVER, SIGNAL = 0.92; EXPRESSED IN HELA, SIGNAL = 0.92; SWISSPROT HIT: P52737, EVALUE 4.00e-18; EST_HUMAN HIT: AA133978.1, EVALUE 7.00e-50; NT HIT: X60076.1, EVALUE 2.00e-55
aagaattcacactggagagaaaccatatgaatgtaaacaatgtggtaaatcctttagttattctgctacccttcgaatacacgaaagaactcacactggagaaaagccttatgaatgtcagcaatgtgg

SEQ ID NO: 17690 - DNA, 122 bp, Homo sapiens
  MAP TO CHR8.1; EXPRESSED IN HEART, SIGNAL =   1; EXPRESSED IN HELA, SIGNAL = 0.73; EXPRESSED IN LUNG, SIGNAL = 0.69; SWISSPROT HIT: P14199, EVALUE 6.00e+00; NT HIT: D10872.1, EVALUE 4.00e-01
gtgccaaaccaaacagtttgccatttgctctgactgttttattgccctgaaactatgcactcagcttcttctgaggcttccaacacacaatgaatccacagaaaaaataaataatgtaaagg

SEQ ID NO: 17691 - DNA, 443 bp, Homo sapiens
  MAP TO CHR18.1; EXPRESSED IN FETAL LIVER, SIGNAL = 2.5; EXPRESSED IN HELA, SIGNAL = 2.9; EXPRESSED IN LUNG, SIGNAL = 1.1; EXPRESSED IN ADULT LIVER, SIGNAL = 2.3; EXPRESSED IN BONE MARROW, SIGNAL = 2.2; EXPRESSED IN PLACENTA, SIGNAL = 2.1; EST_HUMAN HIT: BI830442.1, EVALUE 0.00e+00; SWISSPROT HIT: Q01718, EVALUE 2.00e-67; NT HIT: X65633.1, EVALUE 0.00e+00
gcggcgcatggtcaacgatgctgtggtaccgcagctgcatggaagatggtgattgtatcgttccgcagcaatcacagacaggctgaagatggagccaagcagggagaggacaaacagggagtcgatgatgtcatcggctgtggtttcaaaactgccacgtggcttgagatagcccatgtttctcaatatgatcaggatattttccaagatcttatataggctgcccagcatatcagatatggccaagctacagatgaaaaagtacatgggtgcctggagattcttattcttgaacacagccagcaggacgatcagattctccaaaactccaacaatggaaattgtgaaaaatatctcctccggcaaaaccacacgaggacagtcggaattatttcttgctgtgttgttgatgttttcatacgagttgataatgtgcttcattt

SEQ ID NO: 17692 - DNA, 256 bp, Homo sapiens
  MAP TO CHR7.1; EXPRESSED IN BONE MARROW, SIGNAL = 3.8; EXPRESSED IN PLACENTA, SIGNAL =  15; EXPRESSED IN HELA, SIGNAL = 1.2; EXPRESSED IN LUNG, SIGNAL = 2.5; EST_HUMAN HIT: BF088485.1, EVALUE 0.00e+00; SWISSPROT HIT: P08123, EVALUE 4.00e-35; NT HIT: AF004877.1, EVALUE 0.00e+00
tccactctgggtggctgagtctcaagtcacggcatgtgcgagctgggttctttctagagccttcaggagtaagaagggtctcaatctggttgttgagagacttcagagtagcatcaacttcatagtccttgggtctgagagaaggtgctgagcgaggctggtcagccctgtagaagtctccatcgtaaccaaagtcataaccaccaccgcttacacctggaggtccaggagggccagggggaccaggggggccctg

SEQ ID NO: 17693 - DNA, 264 bp, Homo sapiens
  MAP TO CHR7.1; EXPRESSED IN FETAL LIVER, SIGNAL = 0.81; EXPRESSED IN HELA, SIGNAL = 0.45; EST_HUMAN HIT: BF746954.1, EVALUE 3.00e-26; SWISSPROT HIT: P10071, EVALUE 4.00e-20; NT HIT: M57609.1, EVALUE 1.00e-110
acacataatggattcaggaaaatacatacctgattgcacttgcagataagtgaccataggagccacttgctgaagagctgctacgggaattattgagaatcgtgaccaaggagttgggagacgtccttatcatggtctgaaggtcaaagctatgatcggagagtggtgatatggacagtgtacgttttcggctcggcctggctgacagcctggggctggagaatctggtgcctgttatataaacaaaaaagaacctaattacct

SEQ ID NO: 17694 - DNA, 330 bp, Homo sapiens
  MAP TO CHR2.1; EXPRESSED IN HELA, SIGNAL =  48; EXPRESSED IN HEART, SIGNAL =  33; EXPRESSED IN PLACENTA, SIGNAL =  99; EXPRESSED IN LUNG, SIGNAL =  34; SWISSPROT HIT: P05386, EVALUE 7.00e-30; NT HIT: gi13636437, EVALUE 0.00e+00; EST_HUMAN HIT: AA308588.1, EVALUE 0.00e+00
gctcgcctgcatctactcggccctcattctgcacgacgatgaggtgacagtcacggaggataagatcaatgccctcattaaagcagccggtgtaaatgttgaacctttttggcctggcttgtttgcaaaggccctggccaacgtcaacattgggagcctcatctgcaatgtaggggctggtggacctgctccagcagctggtgctgcaccagcaggacgtcctgccccctccactgctgctgctccagctgaggagaagaaagtggaagcaaagaaagaagaatccaaggagtctgatgatgacatgggccttggtctttttgactaaac

SEQ ID NO: 17695 - DNA, 132 bp, Homo sapiens
  MAP TO CHR3.1; EXPRESSED IN PLACENTA, SIGNAL = 5.3; EXPRESSED IN LUNG, SIGNAL = 3.3; EXPRESSED IN HELA, SIGNAL = 2.5; EXPRESSED IN ADULT LIVER, SIGNAL = 3.2; SWISSPROT HIT: P38402, EVALUE 5.00e-18; NT HIT: M20588.1, EVALUE 2.00e-68; EST_HUMAN HIT: AW410490.1, EVALUE 6.00e-66
gcaaagtcgatctgcaggttgcccatggctttgacaatggccatgatggactggatggtgttgctgtagacaaccgcccggtactgccggcattcctcctcggagtagccatcctcgtggatgatcctgata

SEQ ID NO: 17696 - DNA, 231 bp, Homo sapiens
  MAP TO CHR6.1; EXPRESSED IN PLACENTA, SIGNAL =  24; EXPRESSED IN LUNG, SIGNAL =  13; EXPRESSED IN HELA, SIGNAL =  11; EST_HUMAN HIT: AI814759.1, EVALUE 1.00e-101; SWISSPROT HIT: P35979, EVALUE 6.00e-32; NT HIT: gi16194624, EVALUE 1.00e-108
ttaaacacagtgggaatatcacttttgatgagatcgtcaacattgctccacggatgcggcaccgatctttagccagagatctcactggaaccattaaagagatcctggggactgcccagtctgtgggctgcaatgttgatggccgccaccctcatgacatcatagatgacatcaacagtggtgctgtggaatgcccagctagttaagcacaaaggaaaatatttcaataaa

SEQ ID NO: 17697 - DNA, 187 bp, Homo sapiens
  MAP TO CHR5.1; EXPRESSED IN LUNG, SIGNAL = 1.5; EXPRESSED IN HELA, SIGNAL = 1.1; EXPRESSED IN HEART, SIGNAL = 1.1; EXPRESSED IN ADULT LIVER, SIGNAL = 1.8; EST_HUMAN HIT: AA370905.1, EVALUE 3.00e-90; SWISSPROT HIT: P51172, EVALUE 1.10e+00; NT HIT: gi14727663, EVALUE 2.00e-90
tccacaaaaccacttgccataggctgatgaaaaatgttagagggggctaccattccagaatcatctctctccattggctgatgttgggagaatgtgcttgggtctgataattgttgatgcattggatggttccccatcacagattgcgaccaacctgataagccttctggaaagaataattgaaaac

SEQ ID NO: 17698 - DNA, 115 bp, Homo sapiens
  MAP TO CHR10.1; EXPRESSED IN HELA, SIGNAL = 1.2e+02; EXPRESSED IN LUNG, SIGNAL =  29; EXPRESSED IN BONE MARROW, SIGNAL =  49; EXPRESSED IN PLACENTA, SIGNAL = 1.1e+02; SWISSPROT HIT: P40429, EVALUE 5.00e-16; NT HIT: gi14757411, EVALUE 2.00e-58; EST_HUMAN HIT: AI984282.1, EVALUE 3.00e-58
ttcttcttccggtagtggatcttggctttctctttcctcttctcctccagggtggctgtcactgcctggtacttccagccaacctcgtgagccaggcgccccagataggcaaact

SEQ ID NO: 17699 - DNA, 213 bp, Homo sapiens
  MAP TO CHR14.1; EXPRESSED IN HELA, SIGNAL = 0.45; EXPRESSED IN HEART, SIGNAL = 0.52; SWISSPROT HIT: P04437, EVALUE 8.00e-07; NT HIT: M87473.1, EVALUE 4.00e-89
ttccttttgcacaggtatgagtagaggagaggatgtggagcagagtcttttcctgagtgtccgagagggagacagctccgttataaactgcacttacacagacagctcctccacctacttatactggtataagcaagaacctggagcaggtctccagttgctgacgtatattttttcaaatatggacatgaaacaagaccaaagactcactgt

SEQ ID NO: 17700 - DNA, 183 bp, Homo sapiens
  MAP TO AL080313.13; EXPRESSED IN PLACENTA, SIGNAL = 0.66; EXPRESSED IN LUNG, SIGNAL = 0.66; EXPRESSED IN ADULT LIVER, SIGNAL = 0.74; EXPRESSED IN FETAL LIVER, SIGNAL = 0.63; EXPRESSED IN BONE MARROW, SIGNAL = 0.66; EST_HUMAN HIT: AA398099.1, EVALUE 1.00e-44; SWISSPROT HIT: Q50315, EVALUE 2.30e+00; NT HIT: AF159143.1, EVALUE 3.60e-01
ataatggcattggctgtaccagtggcccagatccttcacctgcagaagagcttcccagagaggagcaagccttcctgccgtcacctctggtgtcatcctataggacattaaaaccaactcaagattgtgttgaaaactgttttccttttgaggatgctaataagaacaagatcatatcaacgg

SEQ ID NO: 17701 - DNA, 110 bp, Homo sapiens
  MAP TO AL096794.3; EXPRESSED IN BONE MARROW, SIGNAL = 0.67; EXPRESSED IN FETAL LIVER, SIGNAL = 0.63; NT HIT: X96581.1, EVALUE 9.40e-01; EST_HUMAN HIT: BF941637.1, EVALUE 5.20e-01; EST_HUMAN HIT: AA063015.1, EVALUE 3.50e-01; SWISSPROT HIT: P05152, EVALUE 9.10e+00
taaacaccatgttttatccacagggagaaccatattctgccctgtcccttatacacagtaaaatgctttgaacttttctggacatcattagggatgtgtaaagccaacat

SEQ ID NO: 17702 - DNA, 142 bp, Homo sapiens
  MAP TO AL035695.17; EXPRESSED IN LUNG, SIGNAL = 1.3; EXPRESSED IN ADULT LIVER, SIGNAL = 1.1; EXPRESSED IN FETAL LIVER, SIGNAL = 1.1; EXPRESSED IN PLACENTA, SIGNAL = 1.2; EXPRESSED IN BONE MARROW, SIGNAL = 0.97; NT HIT: M34956.1, EVALUE 6.90e-02; EST_HUMAN HIT: BF676776.1, EVALUE 1.20e-01
tagtaacagacggtggggaggaggggaagaaggaggaagaggaggaaaaggagatgactcagctatagttcccctaaccctcttggtttatgaagcagctcagaaacttattagaacaaattccagcatccgagaccactga

SEQ ID NO: 17703 - DNA, 178 bp, Homo sapiens
  MAP TO CHR22_121.0; EXPRESSED IN BONE MARROW, SIGNAL = 1.9; EXPRESSED IN FETAL LIVER, SIGNAL = 1.8; EXPRESSED IN HEART, SIGNAL = 1.8; EXPRESSED IN PLACENTA, SIGNAL = 1.7; EXPRESSED IN ADULT LIVER, SIGNAL = 0.64; NT HIT: gi14779316, EVALUE 8.00e-96; EST_HUMAN HIT: BG762236.1, EVALUE 1.00e-95; SWISSPROT HIT: P80026, EVALUE 1.90e+00
tcaaagcttgattttgaattctgtgggctgcgtggtcacagaggcccctgaggacttgaagagtgccttcaggatggtgtcagggtccacttcggcaggggggttggaggaggaggcagagttcaccctgcgaggcagctcgctctcctttttcattgatgggctgtcactcagccgc

SEQ ID NO: 17704 - DNA, 167 bp, Homo sapiens
  MAP TO AL138499.1; EXPRESSED IN FETAL LIVER, SIGNAL = 1.3; EXPRESSED IN BONE MARROW, SIGNAL = 1.2; EXPRESSED IN PLACENTA, SIGNAL = 1.3; EXPRESSED IN LUNG, SIGNAL = 1.7; EXPRESSED IN ADULT LIVER, SIGNAL = 2.2; EST_HUMAN HIT: AW379396.1, EVALUE 4.00e-89; NT HIT: gi4826813, EVALUE 3.00e-89; SWISSPROT HIT: Q9ZMV8, EVALUE 9.80e+00
atttacagagtaaatttgtggccaaagaaaatgaagtacagagtctgcatagtaagcttacagataccttggtatcaaaacaacagttggagcaaagactaatgcagttaatggaatcagagcagaaaagggtgaacaaagaagagtctctacaaatgcaggttcag

SEQ ID NO: 17705 - DNA, 72 bp, Homo sapiens
  MAP TO CHR22_125.0; EXPRESSED IN PLACENTA, SIGNAL = 0.54; EXPRESSED IN FETAL LIVER, SIGNAL = 0.48; NT HIT: AF119413.1, EVALUE 1.40e-02; EST_HUMAN HIT: BG945841.1, EVALUE 1.20e+00
ctgtcagtgactttgtggaattcaggcaatcctgcagcattactctcattgacttcatcaaagttctgactc

SEQ ID NO: 17706 - DNA, 180 bp, Homo sapiens
  MAP TO AL160191.1; EXPRESSED IN FETAL LIVER, SIGNAL = 0.43; EXPRESSED IN PLACENTA, SIGNAL = 0.53; EXPRESSED IN BONE MARROW, SIGNAL = 0.43; NT HIT: gi14784360, EVALUE 5.00e-97; EST_HUMAN HIT: BI522813.1, EVALUE 3.00e-84; SWISSPROT HIT: P57103, EVALUE 8.00e-29
ttaccatcttggatgatgaccatgcaggcatcttcacttttgaatgtgatactattcatgtcagtgagagtattggtgttatggaggtcaaggttctgcggacatcaggtgcccggggtacagtcatcgtcccctttaggacagtagaagggacagccaagggtggcggtgaggactttg

SEQ ID NO: 17707 - DNA, 32 bp, Homo sapiens
  MAP TO CHR22_130.0; EXPRESSED IN FETAL LIVER, SIGNAL = 0.46; EXPRESSED IN BONE MARROW, SIGNAL = 0.48; EXPRESSED IN PLACENTA, SIGNAL = 0.31; NT HIT: AF048729.1, EVALUE 9.20e-01; EST_HUMAN HIT: BF954776.1, EVALUE 3.20e-01
tttataattgttatgtggctgtgctgatataa

SEQ ID NO: 17708 - DNA, 114 bp, Homo sapiens
  MAP TO AC025745.1; EXPRESSED IN ADULT LIVER, SIGNAL = 0.58; EXPRESSED IN FETAL LIVER, SIGNAL = 0.51; EXPRESSED IN PLACENTA, SIGNAL = 4.4; EXPRESSED IN LUNG, SIGNAL = 0.64; SWISSPROT HIT: P40798, EVALUE 6.00e+00; EST_HUMAN HIT: BF986551.1, EVALUE 4.00e-05; NT HIT: D13171.1, EVALUE 9.40e-02
tccctcgcactcccacagctcctcgacctggccactgaagactgacatggcccaggacaccaaacccctcctccatcatggcatcagagcccagggtaattctactagtagcag

SEQ ID NO: 17709 - DNA, 109 bp, Homo sapiens
  MAP TO AC022263.3; EXPRESSED IN BONE MARROW, SIGNAL =  12; EXPRESSED IN PLACENTA, SIGNAL = 6.5; EXPRESSED IN FETAL LIVER, SIGNAL =  13; EXPRESSED IN LUNG, SIGNAL =  17; SWISSPROT HIT: P46574, EVALUE 2.00e-12; NT HIT: gi14775227, EVALUE 7.00e-55; EST_HUMAN HIT: BG204052.1, EVALUE 2.00e-50
aagaaggcatccccccgatcagcagaggctcatctttgcaggcaagcagctggaagatggcggtactctttctgactacaacatccagaaggagtcgaccctgcacctg

SEQ ID NO: 17710 - DNA, 104 bp, Homo sapiens
  MAP TO AL159176.2; EXPRESSED IN FETAL LIVER, SIGNAL = 1.6; EXPRESSED IN ADULT LIVER, SIGNAL = 2.4; EXPRESSED IN BONE MARROW, SIGNAL = 1.9; EXPRESSED IN HEART, SIGNAL = 2.3; EXPRESSED IN PLACENTA, SIGNAL = 2.3; EXPRESSED IN LUNG, SIGNAL = 2.4; NT HIT: L27595.1, EVALUE 3.30e-01; EST_HUMAN HIT: BI856140.1, EVALUE 3.10e-02; SWISSPROT HIT: P49717, EVALUE 4.70e+00
atgtctcctaaaatggggaaacactatgcagaatctgaaacttatgtgtcatatgacacaggcaagcgcagggacagcgaagggggaatgaagggagttagaaa

SEQ ID NO: 17711 - DNA, 142 bp, Homo sapiens
  MAP TO AC015956.3; EXPRESSED IN FETAL LIVER, SIGNAL = 0.49; EXPRESSED IN ADULT LIVER, SIGNAL = 0.64; EXPRESSED IN BONE MARROW, SIGNAL = 0.46; EXPRESSED IN PLACENTA, SIGNAL = 0.74; EXPRESSED IN LUNG, SIGNAL = 0.78; NT HIT: gi4826933, EVALUE 2.00e-74; EST_HUMAN HIT: BG682083.1, EVALUE 3.00e-74; SWISSPROT HIT: P54612, EVALUE 2.00e+00
ctttttctagtagagtttgtcttaatgtctttgcaagcagcactcgcacgttaggaaccctgtcatttgctaaggttagcagatgcggcatgagatgcacagcaaactggtccatgggaaggcagtcatcctcaatgacagt

SEQ ID NO: 17712 - DNA, 130 bp, Homo sapiens
  MAP TO AC023112.3; EXPRESSED IN PLACENTA, SIGNAL = 0.69; EXPRESSED IN LUNG, SIGNAL = 0.93; EXPRESSED IN ADULT LIVER, SIGNAL = 0.97; EXPRESSED IN FETAL LIVER, SIGNAL =   1; EXPRESSED IN BONE MARROW, SIGNAL = 0.92; SWISSPROT HIT: P40480, EVALUE 1.00e-01; NT HIT: AF105002.1, EVALUE 1.70e+00; EST_HUMAN HIT: N33739.1, EVALUE 9.00e-28
ctgcctgtgcagctgtgattagggctgtgttcccctcgctgtcctgccagttgacgtcaacgtgggggcactctgctaaggccaccacggtatccacaaagccgtggtagcaggcgacaataaggccggt

SEQ ID NO: 17713 - DNA, 166 bp, Homo sapiens
  MAP TO AL136362.1; EXPRESSED IN BONE MARROW, SIGNAL = 0.74; EXPRESSED IN LUNG, SIGNAL = 0.75; EXPRESSED IN FETAL LIVER, SIGNAL = 0.62; EXPRESSED IN ADULT LIVER, SIGNAL = 0.77; EXPRESSED IN PLACENTA, SIGNAL = 0.71; SWISSPROT HIT: Q60377, EVALUE 5.10e-01; NT HIT: AF288742.1, EVALUE 5.00e-20; EST_HUMAN HIT: BF981537.1, EVALUE 2.00e-29
atcctcaagctccacttgtaagtctagttcttttgctacttccataacatctacagtggcttccttcaatgaagtcttgaacccctcaaagtcatccatgagcgggggaatcaccttcttccaagttcttgtcaatattgatattttgacctcctcccatgaatca

SEQ ID NO: 17714 - DNA, 75 bp, Homo sapiens
  MAP TO AC011165.3; EXPRESSED IN FETAL LIVER, SIGNAL = 0.75; EXPRESSED IN BONE MARROW, SIGNAL = 0.69; EXPRESSED IN LUNG, SIGNAL = 0.89; EXPRESSED IN ADULT LIVER, SIGNAL = 0.95; NT HIT: U78027.1, EVALUE 8.80e-01; EST_HUMAN HIT: BF246864.1, EVALUE 3.20e-01
gacgaaatcaatcattgtcaaactttggacaggctcactcagaaacccaatgtgtgcaaccgatgagagtatcat

SEQ ID NO: 17715 - DNA, 84 bp, Homo sapiens
  MAP TO CHR21_19.0; EXPRESSED IN FETAL LIVER, SIGNAL = 1.8; EXPRESSED IN BONE MARROW, SIGNAL = 1.9; EXPRESSED IN LUNG, SIGNAL = 4.1; EXPRESSED IN ADULT LIVER, SIGNAL = 1.5; NT HIT: M17143.1, EVALUE 2.60e-01; EST_HUMAN HIT: BE297544.1, EVALUE 3.70e-01
atatgcattcaccaggactatgtctatatttcttattgcattatcatatgttgtgtctatttgtcctgtttgtgcagtagtttc

SEQ ID NO: 17716 - DNA, 296 bp, Homo sapiens
  MAP TO CHR22_35.0; EXPRESSED IN BONE MARROW, SIGNAL =   4; EXPRESSED IN LUNG, SIGNAL = 4.5; EXPRESSED IN ADULT LIVER, SIGNAL = 4.7; EXPRESSED IN FETAL LIVER, SIGNAL = 4.1; EXPRESSED IN PLACENTA, SIGNAL =   5; EST_HUMAN HIT: BG179256.1, EVALUE 0.00e+00; NT HIT: gi13647183, EVALUE 0.00e+00; SWISSPROT HIT: Q01469, EVALUE 8.00e-51
tggccaagccagattgtatcatcacttgtgatggcaaaaacctcaccataaaaactgagagcactttgaaaacaacacagttttcttgtaccctgggagagaagtttgaagaaaccacagctgatggcagaaaaactcagactgtgtgcaactttacagatggtgcattggttcagcatcaggagtgggatgggaaggaaagcacaataacaagaacattgaaagatgggaaattagtggtggactgtgtcatgaaccatgtcgcctgtactcggatctatgaaaaagtacaataa

SEQ ID NO: 17717 - DNA, 170 bp, Homo sapiens
  MAP TO AC016665.2; EXPRESSED IN BONE MARROW, SIGNAL =   1; EXPRESSED IN PLACENTA, SIGNAL =   1; EXPRESSED IN LUNG, SIGNAL = 1.2; EXPRESSED IN FETAL LIVER, SIGNAL = 0.83; EST_HUMAN HIT: BE219587.1, EVALUE 8.70e-01; NT HIT: AF238477.1, EVALUE 9.20e+00; SWISSPROT HIT: P18519, EVALUE 3.30e+00
acccatagtagattctgcaacctccgtgaatattgagccccactattgttctgctacgctcagttttgctgtccagaaattgggtttcattggatttgctagggcttttcttgccttcttttccatggagattgatgctgacatgcatcagatgatggtaacactccacc

SEQ ID NO: 17718 - DNA, 185 bp, Homo sapiens
  MAP TO CHR22_170.0; EXPRESSED IN LUNG, SIGNAL = 0.82; EXPRESSED IN ADULT LIVER, SIGNAL = 0.74; EXPRESSED IN FETAL LIVER, SIGNAL = 0.68; EXPRESSED IN BONE MARROW, SIGNAL = 0.66; SWISSPROT HIT: P08120, EVALUE 8.50e-01; EST_HUMAN HIT: AW884064.1, EVALUE 2.40e-01
ctggcaggtgccatagagctaggtgatgtgggtggtgctgaggacagaggtgggaggacacttggactgctggcaggaatggactctgtggtcctgggagctgtggcatcccttccccacccctgtagccccggagcacctggaccacctctccctgcagagcggacaggcacttcctcagatat

SEQ ID NO: 17719 - DNA, 337 bp, Homo sapiens
  MAP TO CHR22_124.0; EXPRESSED IN BONE MARROW, SIGNAL = 0.58; EXPRESSED IN FETAL LIVER, SIGNAL = 0.52; EXPRESSED IN PLACENTA, SIGNAL = 0.55; EXPRESSED IN LUNG, SIGNAL = 0.54; EXPRESSED IN ADULT LIVER, SIGNAL = 0.96; EST_HUMAN HIT: BG575171.1, EVALUE 0.00e+00; NT HIT: gi14861833, EVALUE 0.00e+00; SWISSPROT HIT: Q9Y5I1, EVALUE 4.90e-01
tgataaccctatgtctgacgtatacggcgccaacctgttccaccagtacctgcagaaggcaacgcatgatggggcgccagaactaggggccgggggcacacggcagcaacagccctcagcaagccagagctgcatctccatcctggtgtgtacaggcgtctacaatcccaggaacccacagtccacggagcctgtccttggaggaggggagcctccattccacgggcaccgagacttatgcttcagtccagggctcatggaggcctcccacgtggtgaatgacgtgaatgaggctgtgcagctggtcttccgcaaggagggctgggctttggagtga

SEQ ID NO: 17720 - DNA, 248 bp, Homo sapiens
  MAP TO AC013632.3; EXPRESSED IN BONE MARROW, SIGNAL = 1.9; EXPRESSED IN FETAL LIVER, SIGNAL = 1.5; EXPRESSED IN LUNG, SIGNAL = 3.2; EXPRESSED IN ADULT LIVER, SIGNAL = 1.6; EST_HUMAN HIT: BG213636.1, EVALUE 2.00e-67; NT HIT: M19469.1, EVALUE 1.50e-02; SWISSPROT HIT: Q9VG17, EVALUE 9.50e+00
ctatgatgtacctaaatgaagaagaagaagaagaggaagaagcagaaaaagaagcagaagcagcagcagcagcagcagcggcagaagaagaagaagaagaagaggaaggaggaagaaattttaccaaaaatttgaaatattttaaaatattttccctcctttgttttgtcacaggcaagtcctggaaatgtgaacctctcatattttatcacacacttttgattattgtactagccagtcaagaacat

SEQ ID NO: 17721 - DNA, 188 bp, Homo sapiens
  MAP TO AL159176.2; EXPRESSED IN PLACENTA, SIGNAL = 0.82; EXPRESSED IN FETAL LIVER, SIGNAL = 0.61; EXPRESSED IN ADULT LIVER, SIGNAL = 0.63; EXPRESSED IN LUNG, SIGNAL = 0.72; EXPRESSED IN BONE MARROW, SIGNAL = 0.67; EST_HUMAN HIT: BF240386.1, EVALUE 3.00e-84; NT HIT: gi14729707, EVALUE 1.00e-102; SWISSPROT HIT: P53867, EVALUE 3.00e-05
gaaacaattgggaaatattctgatgatcatgaaatgcgaaatgaagtttatcataggaaaatcatctcttggtttggtgattcccccttggctctttttggcttacatcaactaatagaatatggaaagaagtctgggaaaaaagcaggagattggtatggaccagctgtggttgctcacattttaag

SEQ ID NO: 17722 - DNA, 171 bp, Homo sapiens
  MAP TO AL035367.1; EXPRESSED IN HEART, SIGNAL = 1.2; EXPRESSED IN LUNG, SIGNAL = 1.4; EXPRESSED IN PLACENTA, SIGNAL = 1.4; EXPRESSED IN ADULT LIVER, SIGNAL = 1.4; EXPRESSED IN FETAL LIVER, SIGNAL =   1; EXPRESSED IN BONE MARROW, SIGNAL = 1.1; SWISSPROT HIT: Q13472, EVALUE 2.00e-26; EST_HUMAN HIT: AU130137.1, EVALUE 2.00e-91; NT HIT: gi11427857, EVALUE 1.00e-91
gagctgcctttactaggttccagaccctgcggcttcagaggatttttcctgaggtgctggcagagcagctcatcagttacggcagctgccagttccccacactgggctttgtggtggagcggttcaaagccattcaggcttttgtaccagaaatcttccacagaattaaag

SEQ ID NO: 17723 - DNA, 208 bp, Homo sapiens
  MAP TO AC005283.2; EXPRESSED IN FETAL LIVER, SIGNAL = 2.2; EXPRESSED IN BONE MARROW, SIGNAL = 1.9; EXPRESSED IN PLACENTA, SIGNAL =   3; EXPRESSED IN LUNG, SIGNAL = 2.2; EXPRESSED IN HEART, SIGNAL = 2.4; EXPRESSED IN ADULT LIVER, SIGNAL =   2; SWISSPROT HIT: P27653, EVALUE 9.50e+00; NT HIT: gi16189072, EVALUE 1.00e-113; EST_HUMAN HIT: AW263143.1, EVALUE 4.00e-99
cccaagacttatacccaggatgatgtgtgtttgattgaatcagggatgactcagttacagagcctcacagttacagttccaagaagaaaactgtcaaaaccaaaactgaaattgaagattataaatcagaatagcgtggccgtccttcagacccctccagacatccaatcagaacattcaagggatggtgatatggatgatagtcgag

SEQ ID NO: 17724 - DNA, 283 bp, Homo sapiens
  MAP TO CHR22_114.0; EXPRESSED IN BONE MARROW, SIGNAL = 0.69; EXPRESSED IN FETAL LIVER, SIGNAL = 0.61; EXPRESSED IN LUNG, SIGNAL = 0.99; EXPRESSED IN PLACENTA, SIGNAL =   1; EXPRESSED IN ADULT LIVER, SIGNAL = 0.9; SWISSPROT HIT: P40523, EVALUE 8.10e-01; NT HIT: gi7657125, EVALUE 0.00e+00
ctgaggttttaggccaccctgtgggccctggaggcctgtgggggccacatcaagcctgggagagaccatagggtcctggagggctgtggtgttggctttgctggggcgcttggaccctttctgatgtggtggccccttccgaaggtgctgcttctgtcgaggcttgggaggggctgggctccgggagctgggagttggggaggtggcccgggagctccaggaggcattgtagaaggtcctgggctgcaggcgagcgaggggcactgtgccgtacatcctacac

SEQ ID NO: 17725 - DNA, 131 bp, Homo sapiens
  MAP TO AL136317.2; EXPRESSED IN HEART, SIGNAL = 5.8; EXPRESSED IN LUNG, SIGNAL = 6.5; EXPRESSED IN BONE MARROW, SIGNAL = 6.3; EXPRESSED IN PLACENTA, SIGNAL = 7.5; EXPRESSED IN ADULT LIVER, SIGNAL = 5.6; EXPRESSED IN FETAL LIVER, SIGNAL = 6.9; EST_HUMAN HIT: BG468753.1, EVALUE 4.00e-30; SWISSPROT HIT: Q08094, EVALUE 1.00e-12; NT HIT: gi14765608, EVALUE 3.00e-30
gcccatgccgaaggcctggccgctctgatgagcgccctgcgtgtatcccatcttcagggacgtggaggagttgtcacacttgtcgattcccagcttggtgtcataggtgtgctcattactcctatctagct

SEQ ID NO: 17726 - DNA, 134 bp, Homo sapiens
  MAP TO CHR22_179.0; EXPRESSED IN PLACENTA, SIGNAL = 0.69; EXPRESSED IN ADULT LIVER, SIGNAL = 0.56; EXPRESSED IN FETAL LIVER, SIGNAL = 0.55; SWISSPROT HIT: Q9WZN3, EVALUE 5.20e-01; NT HIT: AF012872.1, EVALUE 1.00e-69; EST_HUMAN HIT: BI016416.1, EVALUE 2.00e-69
gctgagctgagtgagctccgcagcactatcatcaacctgctggacccccctcccgaggtgtccgcactcatcaacaagctggacttcgccatgtccacctacctcctctctgtgtaccggctggagtacatgag

SEQ ID NO: 17727 - DNA, 78 bp, Homo sapiens
  MAP TO AC021607.4; EXPRESSED IN BONE MARROW, SIGNAL = 0.71; EXPRESSED IN FETAL LIVER, SIGNAL = 0.78; EXPRESSED IN PLACENTA, SIGNAL = 0.8; EXPRESSED IN LUNG, SIGNAL = 0.95; EXPRESSED IN ADULT LIVER, SIGNAL = 0.86; EST_HUMAN HIT: BF979627.1, EVALUE 5.30e+00
cttaagaaacagaagatcataaatgactttgaagttcttattgatctaatggatcacattcattccttcccccagatt

SEQ ID NO: 17728 - DNA, 150 bp, Homo sapiens
  MAP TO AC015833.3; EXPRESSED IN BONE MARROW, SIGNAL = 0.41; EXPRESSED IN PLACENTA, SIGNAL = 0.45; EXPRESSED IN LUNG, SIGNAL = 0.52; EXPRESSED IN FETAL LIVER, SIGNAL = 0.39; SWISSPROT HIT: P48380, EVALUE 3.00e-21; NT HIT: gi16160675, EVALUE 3.00e-79; EST_HUMAN HIT: BG196913.1, EVALUE 8.00e-78
gttgccgctgtaagtgcctttgcccagactctgcgaagatacacgtcgcttaatcacctggcccaggcagctcgtgcagtgcttcagaacacttcccaaatcaaccagatgcttagtgacctcaaccgtgtcgactttgccaatgtccag

SEQ ID NO: 17729 - DNA, 101 bp, Homo sapiens
  MAP TO AC013613.3; EXPRESSED IN PLACENTA, SIGNAL = 1.1; EXPRESSED IN FETAL LIVER, SIGNAL = 0.99; EXPRESSED IN BONE MARROW, SIGNAL = 1.1; NT HIT: U93163.1, EVALUE 1.00e-16; EST_HUMAN HIT: BE350127.1, EVALUE 1.00e-20
ctagtcagggtcaggatcatcaatatcactatctcccacatccacaccttgttctactggaaggtctttaggggcaataacacccatggagctgtcctctc

SEQ ID NO: 17730 - DNA, 150 bp, Homo sapiens
  MAP TO AC021635.3; EXPRESSED IN BONE MARROW, SIGNAL = 0.74; EXPRESSED IN PLACENTA, SIGNAL = 0.86; EXPRESSED IN ADULT LIVER, SIGNAL = 0.7; EXPRESSED IN LUNG, SIGNAL = 0.73; EXPRESSED IN FETAL LIVER, SIGNAL = 0.62; SWISSPROT HIT: Q95209, EVALUE 5.80e+00; NT HIT: AL161548.2, EVALUE 5.10e-01
ataatagtaccaatactgataagaattgcagatgtgcagatcaaaaagcgcctcagcttgatgtatagtattacaaaaggctatatcaaaagtcaagaagatgccaaacttctaataaaacaaatagctgtctgtgaatcaatatatcag

SEQ ID NO: 17731 - DNA, 186 bp, Homo sapiens
  MAP TO AC015956.3; EXPRESSED IN PLACENTA, SIGNAL = 0.83; EXPRESSED IN LUNG, SIGNAL = 0.79; EXPRESSED IN FETAL LIVER, SIGNAL = 0.6; SWISSPROT HIT: P34913, EVALUE 5.60e+00; EST_HUMAN HIT: BF032372.1, EVALUE 1.00e-100; NT HIT: gi14759681, EVALUE 1.00e-100
gatgttgtacctcaggcgttgttagatcagtatttatctatgactgacccttctcgtgcacagacggttgacactgaaattgctaagcactgtgcatatagcctccctggtgtggccttgacactcggaagacagaattggcactgcctgagagagacgtatgagactctggcctcagacatgcag

SEQ ID NO: 17732 - DNA, 456 bp, Homo sapiens
  MAP TO CHR22_183_2.0; EXPRESSED IN FETAL LIVER, SIGNAL = 0.56; EXPRESSED IN PLACENTA, SIGNAL = 0.86; EXPRESSED IN LUNG, SIGNAL = 1.2; EXPRESSED IN ADULT LIVER, SIGNAL = 0.87; SWISSPROT HIT: Q9UKB7, EVALUE 2.00e-91; NT HIT: AK024483.1, EVALUE 0.00e+00; EST_HUMAN HIT: BG741994.1, EVALUE 0.00e+00
ggacggcttgttgtgggcacttctcacccctgaaaatctgggacctcaacagtgggcagctgatgacacacttggacagagactttcccccaagggctggggtgctggatgtcatatatgagtcccctttcgcactgctctcctgtggctatgacacctatgttcgctactgggactgccgcaccagtgtccggaaatgtgtcatggagtgggaggagccccacaacagcaccctgtactgcctgcagacagatggcaaccacttgcttgccacaggttcctccttctatagcgttgtacggctgtgggaccggcaccaaagggcctgcccgcacaccttcccgctgacgtcgacccgcctcggcagccctgtgtactgcctgcatctcaccaccaagcatctctatgctgcgctgtcttacaacctccacgtcctggatattcaaaacccgtgac

SEQ ID NO: 17733 - DNA, 136 bp, Homo sapiens
  MAP TO AC022478.3; EXPRESSED IN FETAL LIVER, SIGNAL = 1.8; EXPRESSED IN LUNG, SIGNAL = 3.6; EXPRESSED IN ADULT LIVER, SIGNAL = 3.1; EXPRESSED IN BONE MARROW, SIGNAL = 1.9; SWISSPROT HIT: Q09665, EVALUE 4.50e+00; NT HIT: AL163210.2, EVALUE 1.00e-44; EST_HUMAN HIT: BF959202.1, EVALUE 1.00e-54
atgtgggaaagttcggaactccttagagacttgttgaatggctttgaccaaaatgttgataatgatatggacaatgaaatccaggctgaggtggtctcagatggagatgaggaacttgctgggaactggagcaaag

SEQ ID NO: 17734 - DNA, 171 bp, Homo sapiens
  MAP TO AC021252.3; EXPRESSED IN FETAL LIVER, SIGNAL = 1.8; EXPRESSED IN LUNG, SIGNAL = 2.5; EXPRESSED IN ADULT LIVER, SIGNAL = 2.6; NT HIT: gi16159910, EVALUE 8.00e-59; EST_HUMAN HIT: BI915864.1, EVALUE 1.00e-58; SWISSPROT HIT: O80507, EVALUE 4.40e+00
gtcctttgtcatccagcaaatcccaagcagcaacctgttcatggtggtggtggacagcagctgcctctgtgaatctgtggcccccatcaccatggcacccattgaaatcaggtatatccttttgtgtgcaggtccactcactaccacggaaaccagtaaggggtatcagtg

SEQ ID NO: 17735 - DNA, 200 bp, Homo sapiens
  MAP TO CHR22_184_1.0; EXPRESSED IN FETAL LIVER, SIGNAL = 0.64; EXPRESSED IN ADULT LIVER, SIGNAL = 0.29; SWISSPROT HIT: P25637, EVALUE 7.30e+00; EST_HUMAN HIT: BF879105.1, EVALUE 2.60e-01
aactgtaaaggcagagctgtaattttccaagatgaagatgattatgggaggagcaggtgtggacatgccaagcttgagctgatcaccagacatccaagtacaaatggcaaggacacagttggatagatgagtctgaagttcaaagaagaggttcaagttggtgataccaatttgggagtcatgttgaatgcagaaagaat

SEQ ID NO: 17736 - DNA, 255 bp, Homo sapiens
  MAP TO AC011676.4; EXPRESSED IN PLACENTA, SIGNAL = 2.4; EXPRESSED IN LUNG, SIGNAL = 3.3; EXPRESSED IN ADULT LIVER, SIGNAL = 1.9; EXPRESSED IN FETAL LIVER, SIGNAL = 1.9; EXPRESSED IN BONE MARROW, SIGNAL = 2.2; NT HIT: gi14747475, EVALUE 0.00e+00; EST_HUMAN HIT: BF846373.1, EVALUE 1.00e-126; SWISSPROT HIT: O05519, EVALUE 7.50e-02
ctctatatttctgaaggtggaaatctccaagtagcctggccttccttcggttaggaggaacaggcgcttctgggtcatggcgatcttgccaacgcctaggtttgtcttgacggagctggacaacttacacacacactcgtttttatccaggtgttccatcaccagccacggcagactgacctcctgggcttctgcttccgtctccttccagcagttgtagaaatctttgaatgtttctgggtcgatttgtttctc

SEQ ID NO: 17737 - DNA, 132 bp, Homo sapiens
  MAP TO AC023123.3; EXPRESSED IN FETAL LIVER, SIGNAL = 0.49; EXPRESSED IN PLACENTA, SIGNAL = 0.65; EXPRESSED IN ADULT LIVER, SIGNAL = 0.67; EST_HUMAN HIT: BG399536.1, EVALUE 3.00e-55; SWISSPROT HIT: P93526, EVALUE 7.80e+00; NT HIT: D82820.1, EVALUE 4.40e-01
aatgaggcaagtaattgatttccttatgaagaggccaggcagtccatttttcatggcgttcagcgtgcacagcaaatctaaaaccattgtctggcaaatgcagctcgcagccgcaattatttttttcaccag

SEQ ID NO: 17738 - DNA, 154 bp, Homo sapiens
  MAP TO AL078623.28; EXPRESSED IN PLACENTA, SIGNAL = 0.52; EXPRESSED IN LUNG, SIGNAL = 0.47; EXPRESSED IN ADULT LIVER, SIGNAL = 0.54; EXPRESSED IN FETAL LIVER, SIGNAL = 0.45; NT HIT: AJ012469.1, EVALUE 1.30e-01; EST_HUMAN HIT: BE245535.1, EVALUE 7.80e-01
gcaccttttggaaggttaatcagttcttgtgagtcatcaagctgaccccaacatattactgtgtgctcttcaatgacattttcaccccataagacactaagttcctggaagacaaacacaggaactatttactgtgtttttgtatcttccatac

SEQ ID NO: 17739 - DNA, 143 bp, Homo sapiens
  MAP TO AL096771.11; EXPRESSED IN LUNG, SIGNAL = 0.93; EXPRESSED IN ADULT LIVER, SIGNAL = 0.62; EXPRESSED IN FETAL LIVER, SIGNAL = 0.55; EXPRESSED IN BONE MARROW, SIGNAL = 0.59; EST_HUMAN HIT: AW419020.1, EVALUE 4.00e-73; NT HIT: gi14757166, EVALUE 8.00e-74; SWISSPROT HIT: Q99715, EVALUE 2.00e-22
tgcctttacccagacctcaggatctgaaactcagagatgtgactcacagcactatgaatgtcttttgggaacctgtgcctggaaaagtgcgtaaatatattgttcgatacaaaacaccagaagaggatgtcaaagaggtaggt

SEQ ID NO: 17740 - DNA, 211 bp, Homo sapiens
  MAP TO AJ239319.2; EXPRESSED IN FETAL LIVER, SIGNAL = 1.4; EXPRESSED IN HEART, SIGNAL = 1.2; EXPRESSED IN BONE MARROW, SIGNAL = 0.96; EST_HUMAN HIT: BE617052.1, EVALUE 1.00e-107; SWISSPROT HIT: Q15233, EVALUE 6.00e-33; NT HIT: Y11293.1, EVALUE 1.00e-114
ggaacgagagcagccacccagatttgcacagcctggctcctttgagtatgaatatgccatgcgctggaaggcactcattgagatggagaagcagcagcaggaccaagtggaccgcaacatcaaggaggctcgtgagaagctggagatggagatggaagctgcacgccatgagcaccaggtcatgctaatgagacagggtgagtctaggcct

SEQ ID NO: 17741 - DNA, 78 bp, Homo sapiens
  MAP TO AL136978.3; EXPRESSED IN FETAL LIVER, SIGNAL = 0.74; EXPRESSED IN BONE MARROW, SIGNAL = 0.68; EXPRESSED IN PLACENTA, SIGNAL = 0.83; EXPRESSED IN LUNG, SIGNAL = 0.79; EXPRESSED IN ADULT LIVER, SIGNAL = 0.96; NT HIT: AF336365.1, EVALUE 5.90e-02
atgacctcaaaaatcgtggacaagcctgaaaacctgagaaggatgacagtcttctaccaggagcaagggattttccag

SEQ ID NO: 17742 - DNA, 165 bp, Homo sapiens
  MAP TO AL136317.2; EXPRESSED IN FETAL LIVER, SIGNAL = 1.5; EXPRESSED IN BONE MARROW, SIGNAL = 0.92; EXPRESSED IN PLACENTA, SIGNAL = 1.3; EXPRESSED IN LUNG, SIGNAL = 0.91; EXPRESSED IN ADULT LIVER, SIGNAL = 1.2; NT HIT: AE007559.1, EVALUE 2.30e+00
tcaattgtttttccaatatgtatttagtttgatttttaataatcttctctctctcttttttcttttcttctcctttacctcttgctcctcttccttactctccttgccttcctcctcagtctcctcatcctcatcttcctcctcatcctctttctttgttttcat

SEQ ID NO: 17743 - DNA, 214 bp, Homo sapiens
  MAP TO AC012186.3; EXPRESSED IN PLACENTA, SIGNAL = 0.88; EXPRESSED IN FETAL LIVER, SIGNAL = 0.75; EXPRESSED IN LUNG, SIGNAL = 1.1; EXPRESSED IN ADULT LIVER, SIGNAL = 0.78; EXPRESSED IN BONE MARROW, SIGNAL = 0.84; NT HIT: gi15318057, EVALUE 1.00e-117; EST_HUMAN HIT: AL554834.1, EVALUE 1.00e-117; SWISSPROT HIT: P34110, EVALUE 1.00e-09
tgaagaaacaactggtgacatcagtgattccatggattttgtactgctcaactttgcagaaatgaacaagctctgggtgcgaatgcagcatcagggacatagccgagatagagaaaaaagagaacgagaaagacaagaactgagaattttagtgggaacaaatttggtgcgcctcagtcagttggaaggtgtaaatgtggaacgttacaaacag

SEQ ID NO: 17744 - DNA, 235 bp, Homo sapiens
  MAP TO AL137785.2; EXPRESSED IN FETAL LIVER, SIGNAL =   1; EXPRESSED IN BONE MARROW, SIGNAL = 0.73; EXPRESSED IN ADULT LIVER, SIGNAL = 1.5; EXPRESSED IN LUNG, SIGNAL = 1.7; NT HIT: gi12751486, EVALUE 4.00e-95; EST_HUMAN HIT: BG740732.1, EVALUE 6.00e-95; SWISSPROT HIT: P40986, EVALUE 2.00e-03
atcctttccaagaaaacaggctttcagagatgaacactttctcaaaccgttctacttcgtatgtgttcgtctcatagtggaagccagtgtcatggtttccagcaactaccttcagctgcacatgacttgggtgtctgaacattttccgaaactgctccacatcatccacccaggcctcagaggtgctccacttcccttcatcaaagacatcctccaggatgaagacgacttccgg

SEQ ID NO: 17745 - DNA, 134 bp, Homo sapiens
  MAP TO CHR22_118.0; EXPRESSED IN LUNG, SIGNAL = 2.2; EXPRESSED IN FETAL LIVER, SIGNAL = 1.9; EXPRESSED IN BONE MARROW, SIGNAL = 1.2; EXPRESSED IN ADULT LIVER, SIGNAL = 3.8; SWISSPROT HIT: P29126, EVALUE 1.40e-01; NT HIT: gi4505562, EVALUE 1.00e-69; EST_HUMAN HIT: AU139718.1, EVALUE 2.00e-69
ctgcatggctgcaagaacctctggatcactaagaatttcattgagtccaggcattccagccattccaggcatgccccctcccattccaggcattcctccgggaaaattaccaggcattcccccaggaaagccac

SEQ ID NO: 17746 - DNA, 357 bp, Homo sapiens
  MAP TO CHR22_176.0; EXPRESSED IN FETAL LIVER, SIGNAL = 0.79; EXPRESSED IN LUNG, SIGNAL = 0.77; EXPRESSED IN ADULT LIVER, SIGNAL = 0.89; EXPRESSED IN BONE MARROW, SIGNAL = 0.59; EXPRESSED IN PLACENTA, SIGNAL = 0.69; NT HIT: gi14777960, EVALUE 0.00e+00; SWISSPROT HIT: P10235, EVALUE 3.20e-01; EST_HUMAN HIT: AI744272.1, EVALUE 0.00e+00
tcacttggccatgtcgatcaggctctgcagtgaggtgggcacccacgtcttctcgccctggacaaagaccactccccggtcgatgtagatcacaatgcggccaaaggtgtagagctgcttcccttcgtgtcgcttcccaatgacgggcatgaagacaatgttgtgctcctcagccttggtctcaatgaggtccttaaagttcatgggcacagagctagcggccacgccaatgcccctctgagccatgttctcagcctcccgcctctcctgcatggcctcgtactggaagtccttcctccgctccgtgtgggtgagataggcaatgttctcccgtgctcctggctgcatgtaggcacc

SEQ ID NO: 17747 - DNA, 176 bp, Homo sapiens
  MAP TO AL035367.1; EXPRESSED IN BONE MARROW, SIGNAL = 0.66; EXPRESSED IN FETAL LIVER, SIGNAL = 0.74; EXPRESSED IN ADULT LIVER, SIGNAL =   1; EXPRESSED IN LUNG, SIGNAL = 1.5; EST_HUMAN HIT: BF763906.1, EVALUE 2.00e-94; NT HIT: gi16165553, EVALUE 1.00e-94; SWISSPROT HIT: Q24020, EVALUE 8.00e-08
acgtggatctgtcctgcaatgacctgacacgggtgcccgagtgtctgtacaccctccccagcctgcgccgcctcaacctcagcagcaaccagatcacggagctgtccctgtgcatagaccagtgggtgcacgtggaaactctgaacctgtcccgaaatcagctcacctcactgccc

SEQ ID NO: 17748 - DNA, 147 bp, Homo sapiens
  MAP TO AJ239319.2; EXPRESSED IN PLACENTA, SIGNAL = 0.6; EXPRESSED IN LUNG, SIGNAL = 0.6; EXPRESSED IN BONE MARROW, SIGNAL = 0.53; EXPRESSED IN ADULT LIVER, SIGNAL = 0.68; EXPRESSED IN FETAL LIVER, SIGNAL = 0.48; NT HIT: gi11056013, EVALUE 2.00e-03; EST_HUMAN HIT: BG289819.1, EVALUE 9.00e-53
gcacgtccctcaatgatgtgctatttgtgttccttactcagatgcgccagggccgaggtaggctgggcgaggaagactctgatgtagatattgaagggtatgatgatgaggaggaggatgggaaacctaagactccagccccagtga

SEQ ID NO: 17749 - DNA, 85 bp, Homo sapiens
  MAP TO AL138839.1; EXPRESSED IN FETAL LIVER, SIGNAL = 0.41; EST_HUMAN HIT: BE740179.1, EVALUE 9.60e-02
aaggcaccaagctcttttccattttagatatattgcaagctgtcccttctggcaaaatgagagtaggaaaaagaagaagccagga

SEQ ID NO: 17750 - DNA, 91 bp, Homo sapiens
  MAP TO AC013697.3; EXPRESSED IN FETAL LIVER, SIGNAL = 0.91; EXPRESSED IN PLACENTA, SIGNAL = 1.1; EXPRESSED IN LUNG, SIGNAL = 1.1; EXPRESSED IN ADULT LIVER, SIGNAL = 1.1; EXPRESSED IN BONE MARROW, SIGNAL = 0.94; EST_HUMAN HIT: AA984295.1, EVALUE 9.00e-30; NT HIT: AL163246.2, EVALUE 2.00e-20; SWISSPROT HIT: P23074, EVALUE 3.60e+00
aaaccacatctggtacagcagctgcaattggagtcaccacttggttacacttaagataatccattgtcattatccaagatccatctgtctt

SEQ ID NO: 17751 - DNA, 186 bp, Homo sapiens
  MAP TO CHR22_131.0; EXPRESSED IN PLACENTA, SIGNAL = 0.77; EXPRESSED IN LUNG, SIGNAL = 0.58; EXPRESSED IN FETAL LIVER, SIGNAL = 0.43; SWISSPROT HIT: P31688, EVALUE 9.70e+00; NT HIT: AB048403.1, EVALUE 4.20e-02; EST_HUMAN HIT: BF902358.1, EVALUE 6.00e-39
ttggctttaggcaagcaaggcagccccaggtgccagggggtgatgaggtcaccacggagaccatggtggtggtagcggcagaggtggcagcagggttggtggcaggcatggggaggtcaaccggtcccacaagaggttgggttctggtttcttctgtcttggcttctttctcgtcttcttggtgtc

SEQ ID NO: 17752 - DNA, 155 bp, Homo sapiens
  MAP TO AL136297.2; EXPRESSED IN LUNG, SIGNAL = 0.72; EXPRESSED IN ADULT LIVER, SIGNAL = 0.94; EXPRESSED IN FETAL LIVER, SIGNAL = 0.71; EXPRESSED IN BONE MARROW, SIGNAL = 0.69
tgatgagtgttaactcactttcctttgtctctgccaagctgaattatggattctgcttttcccaaacctttattttcttcataatcattcccagtttctgtcccgtattcctcacatgcatatttatctcaaggttccatgtgagtgtacaattc

SEQ ID NO: 17753 - DNA, 125 bp, Homo sapiens
  MAP TO AL137793.1; EXPRESSED IN PLACENTA, SIGNAL = 1.1; EXPRESSED IN LUNG, SIGNAL = 1.1; EXPRESSED IN BONE MARROW, SIGNAL = 0.83; EXPRESSED IN ADULT LIVER, SIGNAL =   1; EXPRESSED IN FETAL LIVER, SIGNAL = 0.82; EST_HUMAN HIT: R24111.1, EVALUE 6.10e-01; NT HIT: U59711.1, EVALUE 1.60e+00
agagagggtttgattgtgtctgtgaccgcagcctacctcacctcccgcacctcatgtgatgctgccagagatggtgaggagggggctgctgctgctgctgctggtggaggagatgatgaacagaa

SEQ ID NO: 17754 - DNA, 191 bp, Homo sapiens
  MAP TO CHR22_154.0; EXPRESSED IN BONE MARROW, SIGNAL = 6.8; EXPRESSED IN ADULT LIVER, SIGNAL =  11; EXPRESSED IN LUNG, SIGNAL = 7.8; EXPRESSED IN FETAL LIVER, SIGNAL = 8.1; NT HIT: gi15431292, EVALUE 8.00e-84; SWISSPROT HIT: Q9CZM2, EVALUE 3.00e-26; EST_HUMAN HIT: BF210051.1, EVALUE 1.00e-83
tatatataacgtaaccttgcttggccttgtttgtagcccagtcggtgcactttatcaggccgggtggggcggggagccctgtggagagcagatagctggcggtactgccagcagcggaccctcagaagaaagcgcatgacatcagactgcttctttctccatagctccaggatgtacttgtatgcacccat

SEQ ID NO: 17755 - DNA, 243 bp, Homo sapiens
  MAP TO CHR22_3.0; EXPRESSED IN FETAL LIVER, SIGNAL = 1.7; EXPRESSED IN PLACENTA, SIGNAL = 3.1; EXPRESSED IN ADULT LIVER, SIGNAL = 2.9; EXPRESSED IN LUNG, SIGNAL =   3; EXPRESSED IN BONE MARROW, SIGNAL = 1.6; EXPRESSED IN HEART, SIGNAL = 1.8; EST_HUMAN HIT: BE889750.1, EVALUE 0.00e+00; NT HIT: gi14778870, EVALUE 0.00e+00; SWISSPROT HIT: Q13753, EVALUE 1.10e+00
ctagaattcatcatcagagctgagcaggagagtcttctcgttgtcgcgggcgccactgaggctgtgggagcgggagaggccgtgggcgccaccacgccaggtgggcccaggctccagggtggactgctgcgtgtactgctggtaggcaggtgagaagttgtggatggcgtcctgcacgatgtcgtgcgggttcatggtctccttgaggctgctggagatgctcttcatgggggcacagcggcc

SEQ ID NO: 17756 - DNA, 269 bp, Homo sapiens
  MAP TO CHR22_163.0; EXPRESSED IN PLACENTA, SIGNAL = 0.58; EXPRESSED IN ADULT LIVER, SIGNAL = 0.54; EXPRESSED IN FETAL LIVER, SIGNAL = 0.55; EXPRESSED IN BONE MARROW, SIGNAL = 0.51; NT HIT: gi12232476, EVALUE 1.00e-104; SWISSPROT HIT: P11120, EVALUE 8.00e-03; EST_HUMAN HIT: AA177083.1, EVALUE 3.60e-01
taatcaattatccattttgtaaaaactaattttagctcattttcaaagagatgcttatgtgctgcagacattcttacctcctcaaggaaacagctaaagttctggagaaaatatttccaatttatatagggggttagatgaattcttagtttcctcaaaaaataatgatactgattgtccgttagtttgtaacagaaatccttaagaacttgtccgaattctgtagcctttacaaatcctgtatcctctttatccaatgcagaaaatgc

SEQ ID NO: 17757 - DNA, 120 bp, Homo sapiens
  MAP TO CHR22_121.0; EXPRESSED IN FETAL LIVER, SIGNAL = 1.8; EXPRESSED IN BONE MARROW, SIGNAL = 1.2; EXPRESSED IN HEART, SIGNAL = 1.4; EXPRESSED IN LUNG, SIGNAL = 1.7; EXPRESSED IN ADULT LIVER, SIGNAL = 1.8; EST_HUMAN HIT: BE646167.1, EVALUE 3.00e-61; NT HIT: gi14779297, EVALUE 2.00e-61; SWISSPROT HIT: P51111, EVALUE 1.60e+00
cagttccagtttgtggaagtcccaggcaatcactgtgtccacatgagcgaaccccagcacgtggccagtatcatcagctccttcttacagtgcacacacatgctcccagcccagctgtag

SEQ ID NO: 17758 - DNA, 232 bp, Homo sapiens
  MAP TO CHR22_81.0; EXPRESSED IN FETAL LIVER, SIGNAL = 0.67; EXPRESSED IN BONE MARROW, SIGNAL = 0.61; EXPRESSED IN PLACENTA, SIGNAL = 0.95; EXPRESSED IN ADULT LIVER, SIGNAL =   1; EXPRESSED IN LUNG, SIGNAL = 0.75; NT HIT: gi14779142, EVALUE 1.00e-128; SWISSPROT HIT: P22912, EVALUE 5.30e-01; EST_HUMAN HIT: BE894488.1, EVALUE 1.00e-106
atggtggagagcatgaagtacccctttaggcagggcatgcggctggaagtggtggacaagtcccaggtgtcacgcactcgcatggctgtggtggacacagtaatcgggggtcgcctacggctcctctacgaggatggtgacagtgacgacgacttctggtgccacatgtggagccccctgatccacccagtgggttggtcacgacgtgtgggccacggcatcaagatgtcag

SEQ ID NO: 17759 - DNA, 232 bp, Homo sapiens
  MAP TO AL137784.2; EXPRESSED IN PLACENTA, SIGNAL = 0.93; EXPRESSED IN LUNG, SIGNAL = 0.77; EXPRESSED IN ADULT LIVER, SIGNAL = 0.82; EXPRESSED IN FETAL LIVER, SIGNAL = 0.59; EXPRESSED IN BONE MARROW, SIGNAL = 0.67; SWISSPROT HIT: P36328, EVALUE 7.90e+00; NT HIT: AF292401.1, EVALUE 8.30e-01; EST_HUMAN HIT: AA954186.1, EVALUE 1.00e-28
aagtttcaaagcagtaattacaccttgcggcactacccggttcggccggtgcctggctggagggcgccggagagcctggagcagggcgccaggaggccggagcaggaggagaaggagtaggaggaagtggtcactagcgcggcggccgccggcccgcaatggtgctaccctggttgctgctcgagactgcgcgcagggcggtcctcgggtccgcggaggctgcgctctgcgg

SEQ ID NO: 17760 - DNA, 180 bp, Homo sapiens
  MAP TO AL137798.1; EXPRESSED IN BONE MARROW, SIGNAL = 2.4; EXPRESSED IN HEART, SIGNAL = 1.3; EXPRESSED IN PLACENTA, SIGNAL = 1.9; EXPRESSED IN LUNG, SIGNAL = 1.9; EXPRESSED IN FETAL LIVER, SIGNAL =   2; NT HIT: gi14743839, EVALUE 5.00e-97; EST_HUMAN HIT: BG393693.1, EVALUE 8.00e-97
ctgctgcttctcgctctcggccaggaggaggccctcgtcatgctcctgctgcagggcagcaatctcctcactcagctgttccttctcagccttccgccgggccagcagctcctcctgctcacgctgcagctgactctgcagctgggcccgctcggcctccagctcccgccatgctgcctc

SEQ ID NO: 17761 - DNA, 169 bp, Homo sapiens
  MAP TO CHR22_196.0; EXPRESSED IN ADULT LIVER, SIGNAL = 0.33; EXPRESSED IN FETAL LIVER, SIGNAL = 1.3; EXPRESSED IN HEART, SIGNAL = 1.3; NT HIT: AF355273.1, EVALUE 1.50e-01; EST_HUMAN HIT: BF214490.1, EVALUE 8.60e-01; SWISSPROT HIT: Q00888, EVALUE 9.80e+00
tgcaaagatatcttatgtattctgctttgtgatcctgggactgagattctgcaagcaacatttcagctttgccagctgctccctgttgcgagtggtgggtggtaaagatctagaagaggcagagggatttgctcgtatcctcgtcatggccttcctctctgctgttcct

SEQ ID NO: 17762 - DNA, 125 bp, Homo sapiens
  MAP TO AL133266.3; EXPRESSED IN BONE MARROW, SIGNAL = 0.48; EXPRESSED IN LUNG, SIGNAL = 0.46; EXPRESSED IN FETAL LIVER, SIGNAL = 0.43; NT HIT: gi14759941, EVALUE 3.00e-51; EST_HUMAN HIT: BE622609.1, EVALUE 1.50e-01
ccagaatgctgtcattttgaatcaaagaatcattcttctcattcctgctaattttaaatataagtttgcagacattaagaagattctttctactcactttaagctgcagagaaagaaacacatct

SEQ ID NO: 17763 - DNA, 81 bp, Homo sapiens
  MAP TO AL136230.3; EXPRESSED IN PLACENTA, SIGNAL = 0.71; EXPRESSED IN LUNG, SIGNAL = 0.77; EXPRESSED IN ADULT LIVER, SIGNAL = 0.8; EXPRESSED IN BONE MARROW, SIGNAL = 0.61; EXPRESSED IN FETAL LIVER, SIGNAL = 0.73; SWISSPROT HIT: P38078, EVALUE 8.20e+00; EST_HUMAN HIT: BG768690.1, EVALUE 1.40e+00
gggtatgaacaaagtagaggaactgatgatgatgatgccagatactttcacccaacttagtgggaggatggattttaccat

SEQ ID NO: 17764 - DNA, 96 bp, Homo sapiens
  MAP TO AL136115.5; EXPRESSED IN FETAL LIVER, SIGNAL = 1.8; EXPRESSED IN PLACENTA, SIGNAL = 1.7; EXPRESSED IN LUNG, SIGNAL = 3.4; EXPRESSED IN ADULT LIVER, SIGNAL =   3; EST_HUMAN HIT: BE161594.1, EVALUE 5.00e-47; NT HIT: gi14722701, EVALUE 3.00e-47
ctctgtgaacttgttgagagtagcattggtagggttgtgagttatcagaaaacgcatgttctcataggagatctccacaggggctggacggttcat

SEQ ID NO: 17765 - DNA, 135 bp, Homo sapiens
  MAP TO AC024326.2; EXPRESSED IN PLACENTA, SIGNAL = 1.2; EXPRESSED IN LUNG, SIGNAL = 1.4; EXPRESSED IN ADULT LIVER, SIGNAL = 1.3; EXPRESSED IN FETAL LIVER, SIGNAL = 1.3; EXPRESSED IN BONE MARROW, SIGNAL = 0.98; EST_HUMAN HIT: BF739117.1, EVALUE 3.00e-46; NT HIT: AF280107.1, EVALUE 3.00e-14
ctggggaatctgcctgatagttccattggggatcctcttggggaactgctctaatgccttcctggaggtctggctcatggagctggcagttgtcagcatgagattgggctagagaaaaaactctttcctgttcat

SEQ ID NO: 17766 - DNA, 201 bp, Homo sapiens
  MAP TO AL138832.2; EXPRESSED IN FETAL LIVER, SIGNAL = 0.89; EXPRESSED IN PLACENTA, SIGNAL =   1; EXPRESSED IN BONE MARROW, SIGNAL =   1; EXPRESSED IN LUNG, SIGNAL = 1.3; EXPRESSED IN ADULT LIVER, SIGNAL = 0.95; EST_HUMAN HIT: BF376488.1, EVALUE 1.00e-109; NT HIT: U35115.1, EVALUE 7.10e-01; SWISSPROT HIT: Q9QXZ0, EVALUE 9.70e-02
cttatgtttgtcaagtagttgctggatttcctctttggaagacacgatgattttctggtctcctgccatcttctcctgaccagtttctagcaggtcagccagatcttgtagggccctctcatactgactcttgagtgtaaggttctgattcagaccactcctccgggagccaatgatcatcatcagctcatcatacatgtc

SEQ ID NO: 17767 - DNA, 216 bp, Homo sapiens
  MAP TO AF235094.1; EXPRESSED IN HEART, SIGNAL = 1.2; EXPRESSED IN PLACENTA, SIGNAL = 0.93; EXPRESSED IN LUNG, SIGNAL = 1.2; EXPRESSED IN ADULT LIVER, SIGNAL =   1; EXPRESSED IN FETAL LIVER, SIGNAL = 0.85; SWISSPROT HIT: Q9ZDW2, EVALUE 3.40e-01; NT HIT: AF087913.1, EVALUE 6.00e-54; EST_HUMAN HIT: AA308930.1, EVALUE 3.00e-10
cagggctgcaactctgtgcacagaccaaggaaggagaagccacagaagctggtaaagtacttccttggtggtgaaattctggagggctgaatgtgtgtatgtgtgaatgatcacagacaaccctgcttgcagtgtggtttgtgtggacggtgacaagtcctcctgctggacagtgagtgggtcccctccatggttccggttctgtagtgacctcat

SEQ ID NO: 17768 - DNA, 84 bp, Homo sapiens
  MAP TO AC015957.3; EXPRESSED IN FETAL LIVER, SIGNAL = 0.45; EXPRESSED IN PLACENTA, SIGNAL = 0.62; EXPRESSED IN LUNG, SIGNAL = 0.58; EXPRESSED IN ADULT LIVER, SIGNAL = 0.45; EXPRESSED IN BONE MARROW, SIGNAL = 0.56; NT HIT: AJ307077.1, EVALUE 2.60e-01
agtcttagcagaactagccacagcaaagttatcaagtttgttttccaccttcctctttcccattttacttttcttaccctccat

SEQ ID NO: 17769 - DNA, 83 bp, Homo sapiens
  MAP TO AL138995.1; EXPRESSED IN PLACENTA, SIGNAL = 0.83; EXPRESSED IN ADULT LIVER, SIGNAL = 0.56; EXPRESSED IN FETAL LIVER, SIGNAL = 0.49; EST_HUMAN HIT: BE931459.1, EVALUE 3.70e-01
ccattatactcaagaatgagatctccaagaatagcgttttcttcgttgcaggccactggccagcatccagccagacgcctcat

SEQ ID NO: 17770 - DNA, 217 bp, Homo sapiens
  MAP TO AJ239319.2; EXPRESSED IN FETAL LIVER, SIGNAL = 0.45; EXPRESSED IN BONE MARROW, SIGNAL = 0.49; EXPRESSED IN PLACENTA, SIGNAL = 0.44; EXPRESSED IN LUNG, SIGNAL = 0.46; EXPRESSED IN ADULT LIVER, SIGNAL = 0.61; SWISSPROT HIT: P35238, EVALUE 7.00e-17; NT HIT: AB018339.1, EVALUE 3.10e+00
gcaccaagagggacctgtggagtaaccttgagacagtgaagaagctgaaggagcagagcctagtacccacgactccccagcaaggcacttccctggctaagcagttgggggctgtgaagtatctggaatattcggccctgatgcaggatggggtgcatgaggtatttttagaagctgtccgggctgtgctttaccctgctacaaagaacaccaagaa

SEQ ID NO: 17771 - DNA, 221 bp, Homo sapiens
  MAP TO AC011950.4; EXPRESSED IN BONE MARROW, SIGNAL = 0.7; EXPRESSED IN FETAL LIVER, SIGNAL = 0.56; EXPRESSED IN PLACENTA, SIGNAL = 0.73; EXPRESSED IN ADULT LIVER, SIGNAL = 0.8; EXPRESSED IN LUNG, SIGNAL = 0.63; NT HIT: U65590.1, EVALUE 3.10e+00; SWISSPROT HIT: P03130, EVALUE 3.20e+00; EST_HUMAN HIT: BG284492.1, EVALUE 2.90e-01
caccaggttgtttccacagccctccaaggtgctgagattgatgataaaaatgaccactgctggaaaggtgttgttattgatgaaccctctgcagtgggagtccccatgccttccattcagtgccagatctgtttccgaataacccgagaaaagtaccgtgcaaaaattaatcttcatcgtaatagcctgcactccacaatagacactgatgtctctttcag

SEQ ID NO: 17772 - DNA, 450 bp, Homo sapiens
  MAP TO AL133215.16; EXPRESSED IN FETAL LIVER, SIGNAL = 2.3; EXPRESSED IN PLACENTA, SIGNAL = 2.4; EXPRESSED IN LUNG, SIGNAL = 2.4; EXPRESSED IN ADULT LIVER, SIGNAL = 3.2; SWISSPROT HIT: Q28183, EVALUE 7.00e-14; EST_HUMAN HIT: BE297892.1, EVALUE 0.00e+00; NT HIT: gi14747311, EVALUE 1.00e-126
ggagttcgtggagcgggaggtgatcgacttcgcccgacggaatccaggggtcgtaatatatgtaaactcgcgtccgtgctgcgtgcccagagtagtggccgaataccgtgagtggggccgggctcgggctggagggcgggatcaggggctcgacccgctatcctccttctcgcttggtcgcaccggccagcttccacccactctcacccctcttctgccagttaacggggctgtgcgcgaggagagcatccactgcaagtcggtcgaggagatctcgacgctggtgcagaagctggccgaccagtcgggcttggacgtgatccgcatccgcaagcccttccacaccgacaaccctagcatccagggccagtggcaccccttcaccaacaagccgaccacgttccgcgggctacgcccccgagaggttcaggatcctgccccagcccaggt

SEQ ID NO: 17773 - DNA, 321 bp, Homo sapiens
  MAP TO CHR22_111.0; EXPRESSED IN FETAL LIVER, SIGNAL = 0.47; EXPRESSED IN LUNG, SIGNAL = 0.54; EXPRESSED IN ADULT LIVER, SIGNAL = 0.49; EST_HUMAN HIT: BF529326.1, EVALUE 1.00e-112; SWISSPROT HIT: Q9NZ72, EVALUE 1.00e-19; NT HIT: gi14777886, EVALUE 0.00e+00
tcagtttccacttttgggagtgccaccctggaggccaacgcattgggcaggggaagcggctccgttcccttcccaacgcaggaggcgcaggtgctgaagcagctggtggagccgcgcgagcacgagcgggaggtgctgcacaaggcgctggaggagaataacaacttcagccgccaggcggaggagaagctcaactacaaatggagctcagcaaggagatccgcgaggcgcacctggccgcactgcgcgagcggctgcgcgaggagctgcacgcggccgaggtgcgcaggaacaaggagcagcgagaggagatgtcgggct

SEQ ID NO: 17774 - DNA, 284 bp, Homo sapiens
  MAP TO CHR22_169.0; EXPRESSED IN HEART, SIGNAL = 1.3; EXPRESSED IN FETAL LIVER, SIGNAL = 1.2; EXPRESSED IN BONE MARROW, SIGNAL = 0.97; SWISSPROT HIT: O70194, EVALUE 3.00e-41; NT HIT: gi14778605, EVALUE 0.00e+00; EST_HUMAN HIT: AW770019.1, EVALUE 0.00e+00
cttcttcttcctcttcttcctcctcctcttcctcctcatcttcatcagagctgaaggtgccatcagggaggctgtagacacggatgacctgcttgttggggtccttgaggatgaggtatttgccctcctccagcttcatgcagatgtcaatgacgcagcgtaaaatgccccaggcattctccacgctcaggttgatctggctggcaaactcattaggcttgaactgctgggtgcctaggatgacgtggcgtgaggagtctttcacgtggtaccgagacacataa

SEQ ID NO: 17775 - DNA, 342 bp, Homo sapiens
  MAP TO AC015478.3; EXPRESSED IN HEART, SIGNAL = 1.5; EXPRESSED IN PLACENTA, SIGNAL = 1.4; EXPRESSED IN LUNG, SIGNAL = 2.1; EXPRESSED IN ADULT LIVER, SIGNAL =   2; EXPRESSED IN FETAL LIVER, SIGNAL = 1.8; EXPRESSED IN BONE MARROW, SIGNAL = 1.7; EST_HUMAN HIT: BI159871.1, EVALUE 4.70e-01; NT HIT: AB037201.1, EVALUE 5.00e+00
tcatctgcagtgcaacatcaaaaatggagttggactctttattacaatggtgataatggtaataatggtgatggtggtggtgggagtggtggtggtgataattatagtggtaatgataataatgattgtgaaggtgatggtgatgatgatggtgatgataatcatgatggtgatggtggtgatgatggtgatgatgatgatggtgacagtgatggtgatggtggtggtgataataatggtagtggtgatggtgatgatgatgaaggtgggtcctgtggcttgcctctctcttgctccttcctctgttttggtcagagatgtcttcacaatccatcctcccat

SEQ ID NO: 17776 - DNA, 216 bp, Homo sapiens
  MAP TO AC016709.4; EXPRESSED IN FETAL LIVER, SIGNAL = 1.3; EXPRESSED IN LUNG, SIGNAL = 2.3; EXPRESSED IN ADULT LIVER, SIGNAL =   2; SWISSPROT HIT: P44267, EVALUE 2.90e+00; NT HIT: U91328.1, EVALUE 1.00e-21; EST_HUMAN HIT: BF926096.1, EVALUE 4.00e-59
atgcaggtcataaagaccttgctgataaaacagattgcaataaagaagccagccaaatcccaccaaaatcaagatggcgatgagagtgacctctggttgttctcacggctacacttccaccagcaccatgacaatttactaatgccatggcagagtcgggaagttaccccatatggtctacaaaggggaggcatgaataatccactacttgtttag

SEQ ID NO: 17777 - DNA, 82 bp, Homo sapiens
  MAP TO AC016687.2; EXPRESSED IN FETAL LIVER, SIGNAL = 0.74; EXPRESSED IN PLACENTA, SIGNAL = 0.87; EXPRESSED IN BONE MARROW, SIGNAL = 0.65; EXPRESSED IN LUNG, SIGNAL = 0.71; EXPRESSED IN ADULT LIVER, SIGNAL = 0.77; NT HIT: U18375.1, EVALUE 2.50e-01; EST_HUMAN HIT: BI819085.1, EVALUE 3.60e-01
atcaaattcacagtctgacattctgacatattctgcccgctcagctgctgtggagttgaactcctctgtcgagtccatatcc

SEQ ID NO: 17778 - DNA, 214 bp, Homo sapiens
  MAP TO AC021011.2; EXPRESSED IN FETAL LIVER, SIGNAL = 3.4; EXPRESSED IN BONE MARROW, SIGNAL = 2.8; EXPRESSED IN PLACENTA, SIGNAL = 3.6; EXPRESSED IN LUNG, SIGNAL = 5.1; EXPRESSED IN ADULT LIVER, SIGNAL = 5.6; NT HIT: M30161.1, EVALUE 1.90e-01; SWISSPROT HIT: O35607, EVALUE 4.80e+00
tgctcgatatacaacccaagctacaaatagagccctgtgtcaagcagcatatgccaatttatcccagcatttttgtaagacatcctgttgatgctggagatggcagtcatggctcataccttcatttcctcaggactgtgaagttcttgactcatcctcataaagatgtcaatgatatgatattctgggggtccgggggaactactattccaag

SEQ ID NO: 17779 - DNA, 507 bp, Homo sapiens
  MAP TO AC013341.3; EXPRESSED IN ADULT LIVER, SIGNAL = 0.6; EXPRESSED IN FETAL LIVER, SIGNAL = 0.68; EXPRESSED IN LUNG, SIGNAL =   1; EXPRESSED IN BONE MARROW, SIGNAL = 0.84; SWISSPROT HIT: P21414, EVALUE 4.00e-05; NT HIT: AL163246.2, EVALUE 0.00e+00; EST_HUMAN HIT: BF983020.1, EVALUE 2.00e-75
gtgacctcagcagaggaggatcttaataatcaagtggataggatgacctgttcccaggccacccctgtcatcacccagtgggcccatgaacagagtggctgtggtggcagggatggaagttatgtatgggctcagcaacatggacttccactcaccaaggctgacttggatatgggcactgctgagtgcccagtttgccagcagcagagaccaatgttgagccttcaatatggcaccattccttggggtgatcagccagctacctggtggcagattgattgtattggatctcttccatcaaggaaatggaagaggtttgtccctactggaataaacgcttactccggatatgggtttccctatcctgcatggaatgcttctgccaagactaccatctgtgaactcatggaatgccttatccaccatcatgatattccacacaacattgcctctgaccaaggcactcactttatggctaaagaagtgcgtcagtggtctcatgcttag

SEQ ID NO: 17780 - DNA, 134 bp, Homo sapiens
  MAP TO CHR22_13.0; EXPRESSED IN HEART, SIGNAL = 2.3; EXPRESSED IN ADULT LIVER, SIGNAL = 2.1; EXPRESSED IN FETAL LIVER, SIGNAL = 2.1; EXPRESSED IN BONE MARROW, SIGNAL = 3.1; NT HIT: gi7657020, EVALUE 4.00e-63; SWISSPROT HIT: Q9Y2N3, EVALUE 2.00e-03; EST_HUMAN HIT: AL045185.1, EVALUE 3.00e-58
agatggggtaccgggtcactgctgaagacctggaccgggagaaggaggcggccttccagcgcatcaacagtgcactgcaggttgaggaccaggccatctcggactgcagaccctcacggccttcccacactttg

SEQ ID NO: 17781 - DNA, 275 bp, Homo sapiens
  MAP TO CHR22_124.0; EXPRESSED IN BONE MARROW, SIGNAL = 0.61; EXPRESSED IN LUNG, SIGNAL = 0.8; EXPRESSED IN ADULT LIVER, SIGNAL = 0.93; EXPRESSED IN FETAL LIVER, SIGNAL = 0.66; NT HIT: gi14776808, EVALUE 1.00e-113; SWISSPROT HIT: P36151, EVALUE 6.00e-03; EST_HUMAN HIT: AI365586.1, EVALUE 1.00e-113
agcccacccacctttgggttcctgttggacatcgatggagtgcttgtgcggggccacagagtgatccctgctgctctgaaagccttccgaaggctggtgaactcccaggggcagctgcgggtgcccgtggtttttgttacaaatgctgggaacatcttacaacacagcaaagcccaggagctgtcagccctgctggggtgcgaggtgagaaggcagccagaggcatggaagcccaaggacctggttcctaatggagccgctgccccagctccaag

SEQ ID NO: 17782 - DNA, 250 bp, Homo sapiens
  MAP TO CHR22_179.0; EXPRESSED IN FETAL LIVER, SIGNAL = 0.82; EXPRESSED IN BONE MARROW, SIGNAL = 0.69; EXPRESSED IN LUNG, SIGNAL = 0.61; EXPRESSED IN ADULT LIVER, SIGNAL = 0.63; SWISSPROT HIT: P53074, EVALUE 4.90e-01; NT HIT: AF012872.1, EVALUE 1.00e-55; EST_HUMAN HIT: BF900834.1, EVALUE 2.00e-55
atgaatctgtggttgattttacacctacagggcttagggtttcctcagcaaataacctcctttctccctctcttcttggcacatcagctcacccgacgactgccacccatcaaagaagctaagcctcggttacagaagctcttccgagacttctggctgtattccgttctgatgggattcgctgtggagggctcaggtagggggatcatctctctcccagtgaagacggagtgcagagtgaaggtaaagg

SEQ ID NO: 17783 - DNA, 175 bp, Homo sapiens
  MAP TO AC016672.4; EXPRESSED IN PLACENTA, SIGNAL = 1.1; EXPRESSED IN ADULT LIVER, SIGNAL = 1.9; EXPRESSED IN FETAL LIVER, SIGNAL = 1.2; EXPRESSED IN BONE MARROW, SIGNAL = 0.83; EST_HUMAN HIT: BI831776.1, EVALUE 7.00e-94; NT HIT: gi15300542, EVALUE 5.00e-94; SWISSPROT HIT: O01975, EVALUE 8.00e-04
gatcaagacttcaaatcccaaaagaacttcatcattaacatgacttgcagattttgctggcagcttcctgaaacagattacgagtgtaccaactccaccagctgcatgacggtgtcctgtcctcggcagcgctaccctgccaactgcacggtgcgggaccacgtccactgcttgg

SEQ ID NO: 17784 - DNA, 227 bp, Homo sapiens
  MAP TO AC023152.3; EXPRESSED IN FETAL LIVER, SIGNAL = 3.6; EXPRESSED IN BONE MARROW, SIGNAL = 3.8; EST_HUMAN HIT: BE420422.1, EVALUE 1.00e-59; SWISSPROT HIT: Q04018, EVALUE 2.30e-01; NT HIT: AL163246.2, EVALUE 3.00e-37
tcagaggtcttcatggcagcccctcccatcacaggcttggaggcctagaagaaaaaagtggtttagtgggctggggccagggtccccatgctgtgtgcagcctgggaacttggtgccctgcgtcccagctgctccagccatggatgaaaggggccaacatagagcttgggccatggcttcagagggtgcaagcccaaagccttggccgcttccatgtggtgttaagc

SEQ ID NO: 17785 - DNA, 260 bp, Homo sapiens
  MAP TO CHR22_2.0; EXPRESSED IN BONE MARROW, SIGNAL = 1.1; EXPRESSED IN FETAL LIVER, SIGNAL = 1.4; EXPRESSED IN LUNG, SIGNAL = 1.8; EXPRESSED IN ADULT LIVER, SIGNAL = 1.6; EXPRESSED IN PLACENTA, SIGNAL = 1.4; EST_HUMAN HIT: BG386344.1, EVALUE 1.00e-115; SWISSPROT HIT: Q19713, EVALUE 6.90e-01; NT HIT: gi13655074, EVALUE 1.00e-115
gagatccaaagcaggaccttgcttatgaacgtcagtatgaacagcaaacctatcaggtgatccctgaggtgatcaaaaacttcatccagtatttccacaaaactgtctcagatttgattgaccagaaagtgtatgagctacaggccagtcgtgtctccagtgatgtcattgaccagaaggtgtatgagatccaggacatctatgagaacaggtatgggctactggctgaaagggcctctttctgggtgggactggcctgg

SEQ ID NO: 17786 - DNA, 165 bp, Homo sapiens
  MAP TO AL136128.2; EXPRESSED IN LUNG, SIGNAL = 0.56; EXPRESSED IN FETAL LIVER, SIGNAL = 0.49; EXPRESSED IN ADULT LIVER, SIGNAL = 0.65; EST_HUMAN HIT: BG025210.1, EVALUE 6.00e-88; SWISSPROT HIT: P50876, EVALUE 1.00e-03; NT HIT: AB021132.1, EVALUE 5.70e-01
cttgcactttggacacttctgggcattcctctgcccatgctcaatttcgctggcccagtgacgcaacaatttgtctccttttttgtactccttgcagttaacaccttcatgccaaggagagtggcacttaaaacaccagacgaattggcaggtagggcactggat

SEQ ID NO: 17787 - DNA, 141 bp, Homo sapiens
  MAP TO AL132656.3; EXPRESSED IN BONE MARROW, SIGNAL = 0.57; EXPRESSED IN LUNG, SIGNAL = 0.59; EXPRESSED IN FETAL LIVER, SIGNAL = 0.49; NT HIT: AJ277892.1, EVALUE 7.40e+00; EST_HUMAN HIT: BI438403.1, EVALUE 4.00e-64
gaatgagtcagagcagtattgtaatcttgatgaagatgttgatgtagataatactcccatttccaatgcactggccaaattacaaggcattgcactgaaagctttacatactttatttaaaaacattttacaaccttttag

SEQ ID NO: 17788 - DNA, 31 bp, Homo sapiens
  MAP TO CHR22_6.0; EXPRESSED IN HEART, SIGNAL = 3.5; EXPRESSED IN LUNG, SIGNAL =   5; EXPRESSED IN PLACENTA, SIGNAL =   3; EXPRESSED IN ADULT LIVER, SIGNAL = 5.7; EXPRESSED IN FETAL LIVER, SIGNAL =   4; EXPRESSED IN BONE MARROW, SIGNAL = 3.2; NT HIT: M16225.1, EVALUE 2.20e-01; EST_HUMAN HIT: AL602651.1, EVALUE 3.20e-01
ttccggcctgcttagccaccatggccctcag

SEQ ID NO: 17789 - DNA, 241 bp, Homo sapiens
  MAP TO CHR22_11.0; EXPRESSED IN LUNG, SIGNAL = 0.6; EXPRESSED IN ADULT LIVER, SIGNAL = 0.61; EXPRESSED IN PLACENTA, SIGNAL = 0.55; EXPRESSED IN FETAL LIVER, SIGNAL = 0.52; EXPRESSED IN BONE MARROW, SIGNAL = 0.55; EST_HUMAN HIT: AW503297.1, EVALUE 0.00e+00; NT HIT: gi14779016, EVALUE 0.00e+00; SWISSPROT HIT: P34620, EVALUE 1.00e+00
tgtgacacccagcccctgccagtcccccatggccccgtggagccgagaggcggtgctgagtctctatcgggctctgttgcgccagggccgacagcttcgctacactgatcgagacttctactttgcctccatccgccgtgaattccgaaaaaatcagaagctagaggacgctgaggcccgggagaggcagctggagaagggcctggtctttctcaacggcaaattggggaggatcatttag

SEQ ID NO: 17790 - DNA, 174 bp, Homo sapiens
  MAP TO AL139177.1; EXPRESSED IN FETAL LIVER, SIGNAL = 0.52; EXPRESSED IN PLACENTA, SIGNAL = 0.66; EXPRESSED IN LUNG, SIGNAL = 0.55; EXPRESSED IN ADULT LIVER, SIGNAL = 0.5; EXPRESSED IN BONE MARROW, SIGNAL = 0.55; EST_HUMAN HIT: BG222179.1, EVALUE 3.00e-28; NT HIT: AJ278499.1, EVALUE 9.50e+00; SWISSPROT HIT: Q9PJU7, EVALUE 1.30e-01
ctcagtagctgctgcaaggagtcttcaagctcctttgctcgagcctggcatatggactccattttttctaattcgaattcctgacccacgagccaactgataagctccttcacatgtgctttgggcagatgcttcttcacatgcttcagtacgctgtccacctgctttatttta

SEQ ID NO: 17791 - DNA, 162 bp, Homo sapiens
  MAP TO AC011225.5; EXPRESSED IN FETAL LIVER, SIGNAL = 0.89; EXPRESSED IN ADULT LIVER, SIGNAL = 1.2; EXPRESSED IN BONE MARROW, SIGNAL = 0.93; SWISSPROT HIT: Q47499, EVALUE 2.60e+00; EST_HUMAN HIT: BG620584.1, EVALUE 8.20e-01; NT HIT: gi14523048, EVALUE 1.40e-01
gatgttcaaatggaggtgttcactatatggtatggtggttctggagctcaggaaaaagatcaggctggaaatcttcagcacataggaaattctgaagtcatgggaatagatgaacttacccaggaagacaaaggcaaaggaaaacagaactcagatagacct

SEQ ID NO: 17792 - DNA, 201 bp, Homo sapiens
  MAP TO AC004846.2; EXPRESSED IN HEART, SIGNAL = 1.5; EXPRESSED IN PLACENTA, SIGNAL = 1.9; EXPRESSED IN LUNG, SIGNAL = 2.7; EXPRESSED IN ADULT LIVER, SIGNAL =   2; EXPRESSED IN FETAL LIVER, SIGNAL =   2; EXPRESSED IN BONE MARROW, SIGNAL = 1.6; NT HIT: AF171938.1, EVALUE 1.00e-109; EST_HUMAN HIT: AW938120.1, EVALUE 1.00e-109; SWISSPROT HIT: P49757, EVALUE 1.00e-32
aaaggttgagccatgcagtaggctgtgcttttgcagcctgtttagagcgcaagcagaagcgggagaaggaatgtggagtgactgctacttttgatgctagtcggaccacttttacaagagaaggatcattccgtgtcacaacagccactgaacaagcagaaagagaggagatcatgaaacaaatgcaagatgccaagaaag

SEQ ID NO: 17793 - DNA, 96 bp, Homo sapiens
  MAP TO AC012482.3; EXPRESSED IN PLACENTA, SIGNAL = 1.4; EXPRESSED IN LUNG, SIGNAL = 2.1; EXPRESSED IN ADULT LIVER, SIGNAL = 2.7; EXPRESSED IN FETAL LIVER, SIGNAL = 2.1; EXPRESSED IN BONE MARROW, SIGNAL = 1.5; NT HIT: gi13644880, EVALUE 3.00e-47; SWISSPROT HIT: P52441, EVALUE 9.30e-01; EST_HUMAN HIT: BE280173.1, EVALUE 2.80e-02
ggaccgaggaagccatgaacactacaagccttttggcgcctgctgctgagataatggccacacctggcagcccatcccaggccagccctacctcgg

SEQ ID NO: 17794 - DNA, 413 bp, Homo sapiens
  MAP TO AL136311.2; EXPRESSED IN PLACENTA, SIGNAL = 0.84; EXPRESSED IN LUNG, SIGNAL = 0.87; EXPRESSED IN FETAL LIVER, SIGNAL = 0.73; SWISSPROT HIT: O95816, EVALUE 3.00e-72; EST_HUMAN HIT: BI758084.1, EVALUE 0.00e+00; NT HIT: AF095192.1, EVALUE 0.00e+00
gagaaagagaagaattaaatctgactgcaaaccgtttgatgggaagaactctcaccgttgaagtgtcagtagaaacaattagaaacccccagcagcaagaatccctaaagcatgccacaaggattattgatgaggtggtcaataagtttctggatgatttgggaaatgccaagagtcatttaatgtcgctctacagtgcatgttcatctgaggtgccacatgggccagttgatcagaagtttcaatccatagtaattggctgtgctcttgaagatcagaagaaaattaagagaagattagagactctgcttagaaatattgaaaactctgacaaggccatcaagctattagagcattctaaaggagctggttccaaaactctgcaacaaaatgctgaaagcagattcaattag

SEQ ID NO: 17795 - DNA, 179 bp, Homo sapiens
  MAP TO AL133476.4; EXPRESSED IN FETAL LIVER, SIGNAL = 1.2; EXPRESSED IN HEART, SIGNAL = 1.5; EXPRESSED IN PLACENTA, SIGNAL = 1.9; EXPRESSED IN LUNG, SIGNAL = 2.1; EXPRESSED IN ADULT LIVER, SIGNAL = 1.9; EXPRESSED IN BONE MARROW, SIGNAL = 1.5; NT HIT: gi15298905, EVALUE 2.00e-96; SWISSPROT HIT: Q60843, EVALUE 1.90e+00; EST_HUMAN HIT: BG819049.1, EVALUE 3.00e-87
atggggagcccccctgactctgtgctggccgagctgaggcgcagtcgggagagggaagggcccgctgcctcgccagcagaaaatgaggaaggggcctcagagccttcacctggaggcatcaagtggggacacctctttggctcccgaaaagcccagcgggaggcccggcccacaaatag

SEQ ID NO: 17796 - DNA, 81 bp, Homo sapiens
  MAP TO AC011585.3; EXPRESSED IN FETAL LIVER, SIGNAL = 0.57; EXPRESSED IN BONE MARROW, SIGNAL = 0.62; EXPRESSED IN LUNG, SIGNAL = 0.94; NT HIT: AL163246.2, EVALUE 5.00e-15; EST_HUMAN HIT: BE865602.1, EVALUE 1.00e-13
cttcatcgaggagtagtagtcgatttcatcttgatagtccaggtcaatcaccccaaccaacactggaactctcttcttaac

SEQ ID NO: 17797 - DNA, 153 bp, Homo sapiens
  MAP TO AC012661.4; EXPRESSED IN FETAL LIVER, SIGNAL = 0.62; EXPRESSED IN ADULT LIVER, SIGNAL = 0.35; NT HIT: L11910.1, EVALUE 2.00e-03; EST_HUMAN HIT: AV717903.1, EVALUE 2.00e-60; SWISSPROT HIT: P23643, EVALUE 4.40e+00
atacccagtggtgggattgctgaatcagacagagccaatagacgatcagtaatggtggccaatcatcagctagaaacaaagtatttagcagtgcttgaaaacaccaaaactctgagaccactgaccttccaaaacttcaacagccctgagtga

SEQ ID NO: 17798 - DNA, 156 bp, Homo sapiens
  MAP TO AC018692.5; EXPRESSED IN HEART, SIGNAL = 2.9; EXPRESSED IN PLACENTA, SIGNAL =   3; EXPRESSED IN LUNG, SIGNAL = 6.8; EXPRESSED IN ADULT LIVER, SIGNAL = 6.4; EXPRESSED IN FETAL LIVER, SIGNAL = 3.6; SWISSPROT HIT: Q9QXV8, EVALUE 1.10e+00; EST_HUMAN HIT: BI011251.1, EVALUE 7.00e-29; NT HIT: AL163210.2, EVALUE 7.00e-25
caggaaaagctgcaggcactcaacaccaacctgtgaaagcagccagaagggaggctgtaccctgccaagccataggagtggagcttctcaaagccatgatatcccatctcttgcatctgtgtgacctggatgtgagacatggagtcaaaggacatc

SEQ ID NO: 17799 - DNA, 92 bp, Homo sapiens
  MAP TO AC018704.5; EXPRESSED IN FETAL LIVER, SIGNAL = 0.49; EXPRESSED IN BONE MARROW, SIGNAL = 0.53; EXPRESSED IN LUNG, SIGNAL = 0.58; EXPRESSED IN ADULT LIVER, SIGNAL = 0.65; SWISSPROT HIT: P98158, EVALUE 6.20e+00; NT HIT: gi14770736, EVALUE 2.90e-01; EST_HUMAN HIT: BG826238.1, EVALUE 4.20e-01
atggcagtgttgacattggaatggagctgctttgcagaaaattcagaaaaacacattgactaccaatctttccttaacttttcattccaaat

SEQ ID NO: 17800 - DNA, 300 bp, Homo sapiens
  MAP TO AC012186.3; EXPRESSED IN FETAL LIVER, SIGNAL = 0.9; EXPRESSED IN HEART, SIGNAL = 2.2; EXPRESSED IN LUNG, SIGNAL = 1.3; EXPRESSED IN ADULT LIVER, SIGNAL = 0.95; NT HIT: gi16165102, EVALUE 0.00e+00; EST_HUMAN HIT: BE538665.1, EVALUE 0.00e+00; SWISSPROT HIT: P29837, EVALUE 2.70e+00
aaaataaagcgcttaaaattcagacaagtggagagccagatgtggctgaaagagtggatctagaagagctgattgagtgtgcaactggtaaaatggagctttgtgcaagaactgacccttctgagcaagtcgagggaaattgtgaaattgtaaatgaactaattgctgcctccacacagaaaggccagataaagaagaaaaggttgagtgaactggggatcacgcaagctgatgacaacttaatgtcacaggagatgtttgttgggattgtggggaaccagttcaagtggaatgggaaag

SEQ ID NO: 17801 - DNA, 452 bp, Homo sapiens
  MAP TO AC011799.5; EXPRESSED IN FETAL LIVER, SIGNAL = 0.5; EXPRESSED IN BONE MARROW, SIGNAL = 0.64; EXPRESSED IN PLACENTA, SIGNAL = 0.59; EXPRESSED IN LUNG, SIGNAL = 0.49; EXPRESSED IN ADULT LIVER, SIGNAL = 0.55; NT HIT: gi4885602, EVALUE 0.00e+00; EST_HUMAN HIT: BF115573.1, EVALUE 0.00e+00; SWISSPROT HIT: Q9Y6H5, EVALUE 7.00e-53
tgccttattctttcctttgctagcggagctggcagggtttcccttggcatctgtcttcctcccaagtgaggtcaagggcaatgtagaggttttcagctggttggctgcctggtagttattattattgttttggttgccacttagtgtctccatgatagatcgaaaggctccaaaaggccttttcagttgatcccccgattcgttacttgtggaggtccgctggagagtcctgcccttatctttgtctttttctccattcagttcaaggctaggctgctccatctgcaccacaggctcctcaaaggtaactctcagttttaagttctgagatgtcctacgcttggaagatggagacttgagggcactcttgggacttgtggcaactttctgggcagcagtactgtcagggctgggctgctgagggtcaccagagggctggtttggaggaatac

SEQ ID NO: 17802 - DNA, 295 bp, Homo sapiens
  MAP TO AL138784.1; EXPRESSED IN PLACENTA, SIGNAL = 1.9; EXPRESSED IN LUNG, SIGNAL = 2.2; EXPRESSED IN ADULT LIVER, SIGNAL =   2; EXPRESSED IN FETAL LIVER, SIGNAL = 2.3; NT HIT: gi14733830, EVALUE 0.00e+00; SWISSPROT HIT: P27806, EVALUE 5.80e+00; EST_HUMAN HIT: BE745745.1, EVALUE 0.00e+00
ttactttttcactctgaaagacttcttcatggtggatttgcccttgcccggcaattttacttcctttcttgcactggttgcaggcttctttgaggagccaccactaggtttcttgatgactgtggatgagggtctggtcttcttggcaggcgttttggccttaggaggtgctttcttaggcaagggcctagctttcccccgctgggcagctgagactttaggtgcaggtttggaccctctctgcttcacagatgcggccttccctggggacttggctggggttttcttctgcaac

SEQ ID NO: 17803 - DNA, 218 bp, Homo sapiens
  MAP TO CHR22_85.0; EXPRESSED IN FETAL LIVER, SIGNAL = 2.8; EXPRESSED IN BONE MARROW, SIGNAL = 1.4; EXPRESSED IN HEART, SIGNAL = 1.7; EXPRESSED IN LUNG, SIGNAL = 1.7; EXPRESSED IN ADULT LIVER, SIGNAL = 1.9; SWISSPROT HIT: Q62101, EVALUE 1.60e-01
ctttcatctgatttcactggtacatgggcaaatttatcattattatcgttggcccccaagcccatctttccctgcactgttagctgtgttgtcactggcctctgaaatgcagccttcttctgctcctgcacctgctgagctcctatgcatcccttatccacagcggccatcagtgcaggttcactgtctgccacctggtgctcggctaggacccagtg

SEQ ID NO: 17804 - DNA, 366 bp, Homo sapiens
  MAP TO AL160191.1; EXPRESSED IN PLACENTA, SIGNAL = 0.9; EXPRESSED IN LUNG, SIGNAL = 0.9; EXPRESSED IN ADULT LIVER, SIGNAL = 0.78; EXPRESSED IN FETAL LIVER, SIGNAL = 0.6; EXPRESSED IN BONE MARROW, SIGNAL = 0.6; EST_HUMAN HIT: BI906774.1, EVALUE 0.00e+00; NT HIT: gi15147253, EVALUE 0.00e+00; SWISSPROT HIT: P57103, EVALUE 1.00e-65
ctctgccttcctccattttgggctggttacctttgtgctcttcctgaatggtcttcgagcagaggctggtggctcaggggacgtgccaagcacagggcagaacaatgagtcctgttcagggtcatcggactgcaaggagggtgtcatcctgccaatctggtacccggagaacccttcccttggggacaagattgccagggtcattgtctattttgtggccctgatatacatgttccttggggtgtccatcattgctgaccgcttcatggcatctattgaagtcatcacctctcaagagagggaggtgacaattaagaaacccaatggagaaaccagcacaaccactattcgggtctggaatgaaac

SEQ ID NO: 17805 - DNA, 148 bp, Homo sapiens
  MAP TO AL136103.2; EXPRESSED IN FETAL LIVER, SIGNAL = 4.6; EXPRESSED IN HEART, SIGNAL = 5.1; EXPRESSED IN LUNG, SIGNAL = 6.1; EXPRESSED IN BONE MARROW, SIGNAL = 5.8; EXPRESSED IN PLACENTA, SIGNAL = 6.3; EXPRESSED IN ADULT LIVER, SIGNAL = 4.6; EST_HUMAN HIT: AW028410.1, EVALUE 7.40e-01; SWISSPROT HIT: Q06886, EVALUE 4.50e+00; NT HIT: AF182444.2, EVALUE 1.30e-01
gagtacaggacatgccccagcgtgccaggtattgccgttctttatctggtagctctttgaagtagaattcacatttgtacagggcattatgtcttttggggaaaacatttctatttagaatgtaaactatatcatcctcagggtaacc

SEQ ID NO: 17806 - DNA, 257 bp, Homo sapiens
  MAP TO AL138842.2; EXPRESSED IN ADULT LIVER, SIGNAL = 0.81; EXPRESSED IN FETAL LIVER, SIGNAL = 0.4; NT HIT: gi16157228, EVALUE 0.00e+00; EST_HUMAN HIT: AU122108.1, EVALUE 0.00e+00; SWISSPROT HIT: O25136, EVALUE 2.60e+00
ttccatcatggtgatgttcaagaagatcaagtcttttgaggtggtctttaacgaccctgaaaaggtgtacggcagtggcgagaaggtggctggccgggtgatagtggaggtgtgtgaagttactcgtgtcaaagccgttaggatcctggcttgcggagtggctaaagtgctttggatgcagggatcccagcagtgcaaacagacttcggagtacctgcgctatgaagacacgcttcttctggaagaccagccaacag

SEQ ID NO: 17807 - DNA, 372 bp, Homo sapiens
  MAP TO AL137800.2; EXPRESSED IN FETAL LIVER, SIGNAL = 0.67; EXPRESSED IN BONE MARROW, SIGNAL = 0.6; EXPRESSED IN ADULT LIVER, SIGNAL = 0.87; EXPRESSED IN PLACENTA, SIGNAL = 0.72; SWISSPROT HIT: Q92540, EVALUE 7.00e-72; NT HIT: gi13639134, EVALUE 0.00e+00; EST_HUMAN HIT: BG029661.1, EVALUE 0.00e+00
tatcaacaggcagatgcctccaaacagctgtggaatccccctcaggttcaaggcccattagggaaaattatgcctgtgaaacagccctactaccttcagacccaagaccccataaaactgtttgagccgtcattgcaacctcctgtaatgcagcagcagcctctagaaaaaaaaatgaagccttttcccatggagccatataaccataatccctcagaagtcaaggtcccagaattctactgggattcttcctacagcatggctgataacagatctgtaatggcacagcaagcaaacatagaccgcaggggcaaacggtcaccaggagtcttccgtccagagcaggatcctgtacccagaatgccgtttgag

SEQ ID NO: 17808 - DNA, 116 bp, Homo sapiens
  MAP TO AL139014.1; EXPRESSED IN BONE MARROW, SIGNAL = 0.58; EXPRESSED IN PLACENTA, SIGNAL = 0.53; EXPRESSED IN LUNG, SIGNAL = 0.51; EXPRESSED IN FETAL LIVER, SIGNAL = 0.53; NT HIT: gi15295890, EVALUE 5.00e-59; SWISSPROT HIT: P04540, EVALUE 3.50e+00; EST_HUMAN HIT: BI711201.1, EVALUE 7.00e-59
cttttgtgttctgtctgtacttttgtttcaaacagtacactaatcattttctctttgcatttctttccacttgagtccacatctactttggaggttttctgaagaatcaagtactc

SEQ ID NO: 17809 - DNA, 127 bp, Homo sapiens
  MAP TO AC022263.3; EXPRESSED IN BONE MARROW, SIGNAL = 0.5; EXPRESSED IN PLACENTA, SIGNAL = 0.49; EXPRESSED IN FETAL LIVER, SIGNAL = 0.52; EXPRESSED IN ADULT LIVER, SIGNAL = 0.43; SWISSPROT HIT: Q9Y2G7, EVALUE 7.00e-12; EST_HUMAN HIT: BE281270.1, EVALUE 1.00e-60; NT HIT: gi13652777, EVALUE 9.00e-24
ctagtgagaccaggctgctgtagttctccatcattacatctctgtataagtccttctgagcagtgtccaggcactcccattcctcctgagagaagtctatagacagatcctggaacatgcccaaccc

SEQ ID NO: 17810 - DNA, 207 bp, Homo sapiens
  MAP TO AL137799.2; EXPRESSED IN HEART, SIGNAL = 1.2; EXPRESSED IN BONE MARROW, SIGNAL = 0.82; EXPRESSED IN ADULT LIVER, SIGNAL = 1.9; EXPRESSED IN LUNG, SIGNAL = 1.2; EXPRESSED IN FETAL LIVER, SIGNAL = 0.74; SWISSPROT HIT: O00519, EVALUE 4.00e-19; EST_HUMAN HIT: AL539545.1, EVALUE 1.00e-108; NT HIT: AF098012.1, EVALUE 1.00e-113
ctatgactgcagtaaccccctctttggccagaccgtgaacccatggaagtcctccaaaagcccagggggctcctcagggggtgaaggggccctcatcgggtctggaggctcccccctgggcttaggcactgatatcggaggcagcatccgcttcccctcctccttctgcggcatctgcggcctcaagcccacagggaaccgcctcag

SEQ ID NO: 17811 - DNA, 152 bp, Homo sapiens
  MAP TO AC023112.3; EXPRESSED IN PLACENTA, SIGNAL = 0.56; EXPRESSED IN LUNG, SIGNAL = 0.69; EXPRESSED IN FETAL LIVER, SIGNAL = 0.62; EXPRESSED IN ADULT LIVER, SIGNAL = 0.6; EXPRESSED IN BONE MARROW, SIGNAL = 0.56; SWISSPROT HIT: P74876, EVALUE 8.80e-01; NT HIT: AF009663.1, EVALUE 6.00e-13; EST_HUMAN HIT: W94033.1, EVALUE 3.00e-80
aggagtgggctcccgataagaggatgaattcagccctccttcctcttctttcacgtgttctcttgcccttccaccctccaccatgggatgacacaccaagaaggccttcaccagatgtgggcccttgaccttggacttcccagcctccagaa

SEQ ID NO: 17812 - DNA, 333 bp, Homo sapiens
  MAP TO U82695.2; EXPRESSED IN FETAL LIVER, SIGNAL = 0.93; EXPRESSED IN BONE MARROW, SIGNAL = 0.81; EXPRESSED IN LUNG, SIGNAL = 0.77; EXPRESSED IN PLACENTA, SIGNAL = 0.88; EXPRESSED IN ADULT LIVER, SIGNAL = 0.88; NT HIT: U82695.2, EVALUE 0.00e+00; EST_HUMAN HIT: BF346020.1, EVALUE 8.00e-49; SWISSPROT HIT: Q16720, EVALUE 1.00e-35
gactctcctctcaaagccgtgcagatgttgtgggtgaacttgatcatggacacatttgcctctctggccctggcgacggagccacccacagagtcgctgctgctgcggaagccgtacggccgcgacaagcccctcatctcccgcaccatgatgaagaacattctgggccacgccgtgtaccagctcgccatcatcttcaccctgctgtttgtcggtaggctggccagtggcacccgggaggacttcgggacactgttgccaccacctcgggctcagattctgtctggtgtgtctccacctgtgtctccgcacccagtacggggtgggacgctg

SEQ ID NO: 17813 - DNA, 133 bp, Homo sapiens
  MAP TO AL136443.5; EXPRESSED IN BONE MARROW, SIGNAL = 0.58; EXPRESSED IN LUNG, SIGNAL = 0.5; EXPRESSED IN PLACENTA, SIGNAL = 0.59; EXPRESSED IN ADULT LIVER, SIGNAL = 0.47; EXPRESSED IN FETAL LIVER, SIGNAL = 0.64; EST_HUMAN HIT: BE501268.1, EVALUE 1.70e-01
atctctggaagttcccagtgacaggaatgaccaaacggtcttgtctggacatctccactagattttcagtctttgcatcattcagttcaaggacgaaaatagcaattaccctagtcgtttgcctgaccattgc

SEQ ID NO: 17814 - DNA, 194 bp, Homo sapiens
  MAP TO AC025170.2; EXPRESSED IN BONE MARROW, SIGNAL = 0.49; EXPRESSED IN LUNG, SIGNAL = 0.53; EXPRESSED IN PLACENTA, SIGNAL = 0.52; EXPRESSED IN ADULT LIVER, SIGNAL = 0.48; EXPRESSED IN FETAL LIVER, SIGNAL = 0.45; SWISSPROT HIT: Q05916, EVALUE 3.30e+00; EST_HUMAN HIT: AI638165.1, EVALUE 1.00e-105
catttcttctgatgcagcagtagctgcagatcctgcaccaagagcagaaacaggaacgtgaacagaagatgcggaagcagccctggtagaagtcatcgaagcagctgagggaacggcagtcgcgctggctcctccgacggcggctggtggggatggcagcagtggtgatgtaactggtaagggcatcggaggag

SEQ ID NO: 17815 - DNA, 134 bp, Homo sapiens
  MAP TO AL136115.5; EXPRESSED IN LUNG, SIGNAL = 0.48; EXPRESSED IN PLACENTA, SIGNAL = 0.54; EXPRESSED IN BONE MARROW, SIGNAL = 0.53; EXPRESSED IN ADULT LIVER, SIGNAL = 0.55; EXPRESSED IN FETAL LIVER, SIGNAL = 0.59; EST_HUMAN HIT: BI256457.1, EVALUE 1.70e-01; SWISSPROT HIT: O83348, EVALUE 5.90e+00; NT HIT: AF107890.1, EVALUE 1.10e-01
ctgctcacacctctcacaggttgttgtggtctcaggcattttggtgtcccccagggctgaggcagtgaagacagcaggagctactgcttttacatctctctccaggacaagaaagagggcatcttcaccctgcc

SEQ ID NO: 17816 - DNA, 203 bp, Homo sapiens
  MAP TO CHR22_105.0; EXPRESSED IN LUNG, SIGNAL = 3.1; EXPRESSED IN FETAL LIVER, SIGNAL = 2.5; EXPRESSED IN BONE MARROW, SIGNAL = 2.1; NT HIT: M58602.1, EVALUE 1.00e-110; EST_HUMAN HIT: BI837150.1, EVALUE 1.00e-110; SWISSPROT HIT: P19971, EVALUE 3.00e-33
cttgcagccacatgccgccagggcaggtgcgaggaccaggctgaccttgtcacccacaccccctgtggaatgcttgtccacaagctgctggcgccaggcctctggccactccagctgctgtcccgactgagccagggcctgggtcagcaccgaggtctcctccagatccatgccccgaagtcggatggccatcagcatggccc

SEQ ID NO: 17817 - DNA, 294 bp, Homo sapiens
  MAP TO AC004846.2; EXPRESSED IN PLACENTA, SIGNAL = 0.44; EXPRESSED IN ADULT LIVER, SIGNAL = 0.56; EXPRESSED IN FETAL LIVER, SIGNAL = 0.56; EST_HUMAN HIT: BI009015.1, EVALUE 0.00e+00; SWISSPROT HIT: P49757, EVALUE 3.00e-39; NT HIT: AF171938.1, EVALUE 0.00e+00
ctgaaacagataagatagtcgttggttcatcagttgcccctggcaacactgccccatccccatcctctcccacctctcctacttctgatgccacgacctctctggagatgaacaatcctcatgccatcccacgccggcatgctccaattgaacagcttgctcgccaaggctctttccgaggttttcctgctcttagccagaagatgtcaccctttaaacgccaactatccctacgcatcaatgagttgccttccactatgcagaggaagactgatttccccattaaaaatgcag

SEQ ID NO: 17818 - DNA, 125 bp, Homo sapiens
  MAP TO AC012482.3; EXPRESSED IN FETAL LIVER, SIGNAL = 0.53; EXPRESSED IN BONE MARROW, SIGNAL = 0.54; EST_HUMAN HIT: H08544.1, EVALUE 7.00e-50; SWISSPROT HIT: O43525, EVALUE 5.00e-18; NT HIT: gi4758629, EVALUE 5.00e-50
ctcgtctgaaggtactttatcctggaaagcatgtcgagatgcccggcagaatactgctcaatcacatccttcacatcgtaaggcctcaaagtctccttgaatttttttttatagagacggaattg

SEQ ID NO: 17819 - DNA, 188 bp, Homo sapiens
  MAP TO AL139022.1; EXPRESSED IN PLACENTA, SIGNAL = 1.7; EXPRESSED IN FETAL LIVER, SIGNAL = 1.6; EXPRESSED IN LUNG, SIGNAL = 2.1; EXPRESSED IN ADULT LIVER, SIGNAL = 2.1; EXPRESSED IN BONE MARROW, SIGNAL = 1.7; NT HIT: gi14752287, EVALUE 1.00e-102; EST_HUMAN HIT: BI766055.1, EVALUE 1.00e-101; SWISSPROT HIT: P25912, EVALUE 8.00e-18
tccgtgcactggagaaggcgaggtcaagtgcccaactgcagaccaactacccctcctcagacaacagcctctacaccaacgccaagggcagcaccatctctgccttcgatgggggctcggactccagctcggagtctgagcctgaagagccccaaagcaggaagaagctccggatggaggccagctaa

SEQ ID NO: 17820 - DNA, 218 bp, Homo sapiens
  MAP TO AL121976.2; EXPRESSED IN FETAL LIVER, SIGNAL = 0.41; EXPRESSED IN PLACENTA, SIGNAL = 0.34; EXPRESSED IN ADULT LIVER, SIGNAL = 0.5; NT HIT: AF010237.1, EVALUE 2.00e-01; SWISSPROT HIT: P31111, EVALUE 4.60e-01; EST_HUMAN HIT: AW263565.1, EVALUE 1.00e-119
tgttcccacatgatatcatctcttctcaatttcatttgaagattatgaactcgtattggatgaaagctgctgtttttctgaaaaaggttagtgtcagtcaaacattttctggggctattttttatgttctttgatcctttagggtagctgtcttcttgctgaatacctgaagcttcactcatctttgagttttgaactttttgctgcagtttacagac

SEQ ID NO: 17821 - DNA, 167 bp, Homo sapiens
  MAP TO AL078623.28; EXPRESSED IN FETAL LIVER, SIGNAL = 0.72; EXPRESSED IN PLACENTA, SIGNAL = 0.69; EXPRESSED IN LUNG, SIGNAL = 0.72; EXPRESSED IN BONE MARROW, SIGNAL = 0.57; EXPRESSED IN ADULT LIVER, SIGNAL = 0.73; SWISSPROT HIT: Q35539, EVALUE 7.50e+00; NT HIT: AP003016.2, EVALUE 1.50e-01
ccataataatgctgtataatcaaccatctcaaaactgggtgtcttacaacaactagcatttcccaagtctgcaggtctgtatctggggtggctttggctgggctcagcaggcagttctgctttaagctaaacatcaggtagacttgacatggcttgggtttgagcat

SEQ ID NO: 17822 - DNA, 125 bp, Homo sapiens
  MAP TO AL139152.1; EXPRESSED IN ADULT LIVER, SIGNAL = 0.75; EXPRESSED IN BONE MARROW, SIGNAL = 0.58; EXPRESSED IN PLACENTA, SIGNAL = 0.74; EXPRESSED IN LUNG, SIGNAL = 0.62; EXPRESSED IN FETAL LIVER, SIGNAL = 0.71; NT HIT: X77600.1, EVALUE 4.10e-01; SWISSPROT HIT: Q9ZDV9, EVALUE 4.60e+00; EST_HUMAN HIT: AI686660.1, EVALUE 8.00e-62
caattgacccagcaaacgaggacacaaacgtgttgaagggtaaggtggtgagaggcgtgtttgggggtggtggtgatgagcaagtatgtgaaggagaggtagtgcctaaacttgaaaatcaaaaa

SEQ ID NO: 17823 - DNA, 153 bp, Homo sapiens
  MAP TO AL121993.2; EXPRESSED IN FETAL LIVER, SIGNAL = 1.3; EXPRESSED IN BONE MARROW, SIGNAL = 1.3; EXPRESSED IN HEART, SIGNAL = 1.3; EXPRESSED IN LUNG, SIGNAL = 1.6; EXPRESSED IN ADULT LIVER, SIGNAL = 2.1; EXPRESSED IN PLACENTA, SIGNAL = 1.7; SWISSPROT HIT: Q9UNX4, EVALUE 7.00e-15; EST_HUMAN HIT: BE740018.1, EVALUE 6.00e-48; NT HIT: gi5803220, EVALUE 4.00e-48
gatgttatcggcttcaatatggctggtcttgattatctcaagagggaatgcgaggcaaaaagtgaagttatgttttttgctgatgctactagccacttggaagagaagaagaggaagaggaaaaagagggagaagttgattctaacgttgact

SEQ ID NO: 17824 - DNA, 204 bp, Homo sapiens
  MAP TO AL136381.1; EXPRESSED IN PLACENTA, SIGNAL = 0.76; EXPRESSED IN LUNG, SIGNAL = 1.1; EXPRESSED IN ADULT LIVER, SIGNAL = 1.1; EXPRESSED IN FETAL LIVER, SIGNAL = 0.67; SWISSPROT HIT: Q16513, EVALUE 1.00e-35; NT HIT: gi5453973, EVALUE 1.00e-111; EST_HUMAN HIT: AW665769.1, EVALUE 1.00e-109
ttaacaccaatcagcaatgtagtcaaaatctctgaacatttcctgctcctcttccgaaagtatccttggttctcgaggtggagtcagaataggtgcttctgaggtaaattcatcatcaaaattactaacatcttctcgtcctcttatggtaggtataaatggtggctttacttttttgtccatcagagcgctccaatcaattag

SEQ ID NO: 17825 - DNA, 167 bp, Homo sapiens
  MAP TO AL138747.1; EXPRESSED IN FETAL LIVER, SIGNAL = 0.4; EXPRESSED IN ADULT LIVER, SIGNAL = 0.32; SWISSPROT HIT: P29098, EVALUE 4.40e+00; NT HIT: gi16164840, EVALUE 3.70e-02; EST_HUMAN HIT: AA385542.1, EVALUE 1.00e-05
atgaaacaccaaaatgcattgaatgcagctaaagaagtgcttaagggagaaattacagttgtaaaatactacactaaaaatgaagacagaaagacatcctgtgttcatgatttggaaaacaatattgttaagatgtcagtgctcaccacagcaattaacagactcaa

SEQ ID NO: 17826 - DNA, 422 bp, Homo sapiens
  MAP TO AL136122.1; EXPRESSED IN FETAL LIVER, SIGNAL = 0.75; EXPRESSED IN PLACENTA, SIGNAL = 0.9; EXPRESSED IN ADULT LIVER, SIGNAL = 0.96; EXPRESSED IN BONE MARROW, SIGNAL = 0.72; SWISSPROT HIT: P31629, EVALUE 8.00e-66; NT HIT: gi12731807, EVALUE 0.00e+00; EST_HUMAN HIT: BE767354.1, EVALUE 0.00e+00
caagctcctctcccagggacttctcaccctcaagccaccattcctctccaggatatgattcttcaccctgtcgagataattcaccaaagaggtatctgatacccaaaggagatttatctcccaggagacatttatcacctaggagagatctgtcacccatgagacatctttcaccaagaaaggaagctgcattgagaagagagatgtcccaaagagatgtttcaccaagaaggcatttgtctccaaggaggccagtgtctcctgggaaagatatcacagcaagaagagacctctctcctagaagagagagaagatacatgaccacaataagagcgccatctcccagaagggctttataccataacccaccattgtccatgggacagtatttgcaagcagagccaattgtattggggcctcct

SEQ ID NO: 17827 - DNA, 186 bp, Homo sapiens
  MAP TO AJ239319.2; EXPRESSED IN FETAL LIVER, SIGNAL = 0.6; EXPRESSED IN BONE MARROW, SIGNAL = 0.61; EXPRESSED IN PLACENTA, SIGNAL = 0.7; EXPRESSED IN LUNG, SIGNAL = 0.62; EXPRESSED IN ADULT LIVER, SIGNAL = 0.55; SWISSPROT HIT: P14943, EVALUE 2.00e-14; NT HIT: AF217413.1, EVALUE 1.00e-100; EST_HUMAN HIT: BF530894.1, EVALUE 1.00e-100
gtttcctgagtactggagatcaggctgccaagggcaactatgggctccttgaccagatccaggccctccgctgggtgagcgagaatattgccttcttcgggggagacccccgccggatcactgtctttggctcgggcattggtgcatcctgcgtcagcctcctcacgttgtcacatcactcagagg

SEQ ID NO: 17828 - DNA, 143 bp, Homo sapiens
  MAP TO AL136972.1; EXPRESSED IN FETAL LIVER, SIGNAL = 0.59; EXPRESSED IN BONE MARROW, SIGNAL = 0.72; EXPRESSED IN PLACENTA, SIGNAL = 0.72; EXPRESSED IN LUNG, SIGNAL = 0.7; EXPRESSED IN ADULT LIVER, SIGNAL = 0.69; EST_HUMAN HIT: BG721566.1, EVALUE 7.00e-75; SWISSPROT HIT: Q05140, EVALUE 1.00e-21; NT HIT: gi7662227, EVALUE 5.00e-75
ctcatttccatgcaccatgagatgatgtgttgtcactaaagccttaaacacaaccacccagctactgtttgttgcccgctcaaagagagtgtcggccatctgaggaatattaacattggtctcgttggtagcctggatcaaat

SEQ ID NO: 17829 - DNA, 202 bp, Homo sapiens
  MAP TO AC015938.3; EXPRESSED IN BONE MARROW, SIGNAL = 0.5; EXPRESSED IN PLACENTA, SIGNAL = 0.62; EXPRESSED IN ADULT LIVER, SIGNAL = 0.61; EXPRESSED IN FETAL LIVER, SIGNAL = 0.59; SWISSPROT HIT: O15553, EVALUE 8.50e-02; EST_HUMAN HIT: BE090809.1, EVALUE 2.60e-01
gagggctgtcctgggtcaagggagaaaatggctgtcttgatggtcccgacactggggaatggtgggtccccttgcggttgggtgaccagggcaggcagggaaacacatgtggttacgcagccacacctgtgttccagaccgtacagccaaccccacccagcgaccagactcctgctggcatcggggacgctgagaggttcgg

SEQ ID NO: 17830 - DNA, 161 bp, Homo sapiens
  MAP TO CHR22_167.0; EXPRESSED IN BONE MARROW, SIGNAL = 1.2; EXPRESSED IN PLACENTA, SIGNAL = 1.2; EXPRESSED IN LUNG, SIGNAL = 0.92; EXPRESSED IN FETAL LIVER, SIGNAL = 1.1; EXPRESSED IN ADULT LIVER, SIGNAL = 0.77; SWISSPROT HIT: Q13323, EVALUE 5.00e-25; NT HIT: X89986.1, EVALUE 1.00e-85; EST_HUMAN HIT: BE559728.1, EVALUE 1.00e-85
atgtctgaagtaagacccctctccagagacatcttgatggagaccctcctgtatgagcagctcctggaacccccgaccatggaggttcttggcatgactgactctgaagaggacctggaccctatggaggacttcgattctttggaatgcatggagggcag

SEQ ID NO: 17831 - DNA, 203 bp, Homo sapiens
  MAP TO AC023120.3; EXPRESSED IN BONE MARROW, SIGNAL = 0.57; EXPRESSED IN ADULT LIVER, SIGNAL = 0.49; EXPRESSED IN FETAL LIVER, SIGNAL = 0.56; NT HIT: gi15300388, EVALUE 1.00e-110; EST_HUMAN HIT: BF800343.1, EVALUE 1.00e-110
ttctccttctgtaggttctcaatctgctcagtcagtactctctcctcctgctgcatagctgcttgctgctgttctgtgatgtcagtctccatggctgcctcactagtcaaggtctcctctgagacatcagacacagaaggcaaccgaactacaacaggagacgatggacctggatagtttcctcgacgaatacgcccctttcc

SEQ ID NO: 17832 - DNA, 253 bp, Homo sapiens
  MAP TO AC020550.2; EXPRESSED IN BONE MARROW, SIGNAL = 2.8; EXPRESSED IN FETAL LIVER, SIGNAL = 4.3; EXPRESSED IN ADULT LIVER, SIGNAL = 8.8; EXPRESSED IN PLACENTA, SIGNAL = 3.3; EXPRESSED IN LUNG, SIGNAL = 4.1; EST_HUMAN HIT: AU124924.1, EVALUE 0.00e+00; SWISSPROT HIT: P19226, EVALUE 3.00e-42; NT HIT: gi14730099, EVALUE 0.00e+00
ctctcctgatttccactggattagcacctttgctaatcttctcgaagccttccttggctatagagcgtgccagtacagtagcagtggtagtgccatccccagcttcttcatttgtgttattggcaacatcttgaacaagtttagctccaatgtttttgtatttatcttttaagtcaattgactttgcaacagtcacaccatcttttgttactttgggacttccccaactctgctcaataatcactgttcttcc

SEQ ID NO: 17833 - DNA, 347 bp, Homo sapiens
  MAP TO CHR21_42.0; EXPRESSED IN LUNG, SIGNAL =   2; EXPRESSED IN FETAL LIVER, SIGNAL = 0.51; SWISSPROT HIT: Q9UHI8, EVALUE 1.00e-55; EST_HUMAN HIT: BE767617.1, EVALUE 1.00e-107; NT HIT: gi14780106, EVALUE 0.00e+00
ctgtctggtgaaaagaattgctgtgtcatagtgctctgcatcccggtcactgggtgggttgtgctgcttctgccagttgcaaaagttccgcagagtgagggcagcattggaggtcacttccggccccttctgttcatcgtggatgaccaagatcttcaccaccaccaggctaactgaattacgaatgctggggtgtttgtacaatctggctgccaccgaaaacaacgtgagaaggtaatgctttagaccactgccgtggaattctgccatcgactggtctgccacaagcatggtttccacatagcggtgactggacacaaatcgcttctttcttatgcttccagttc

SEQ ID NO: 17834 - DNA, 228 bp, Homo sapiens
  MAP TO AJ239319.2; EXPRESSED IN FETAL LIVER, SIGNAL = 0.69; EXPRESSED IN BONE MARROW, SIGNAL = 0.82; EXPRESSED IN PLACENTA, SIGNAL = 1.1; EXPRESSED IN LUNG, SIGNAL = 0.89; EXPRESSED IN ADULT LIVER, SIGNAL = 0.86; SWISSPROT HIT: P34420, EVALUE 7.60e+00; NT HIT: gi11419842, EVALUE 1.00e-125; EST_HUMAN HIT: AA134809.1, EVALUE 1.00e-125
gtcataaacgtggagcagagctctgtcttcttgatgccatctcgggttgaaatctccctggtcaaggctgacccaggatcctgggcccagctggagcaccctgatgcactagctaagaaggctagggcaggggttgtgttagagatggatgaggaagaatctgacgattcagatgatgatctgagctggacagaggaggaggaagaggaggaagcaatgggggaatag

SEQ ID NO: 17835 - DNA, 97 bp, Homo sapiens
  MAP TO CHR22_16.0; EXPRESSED IN FETAL LIVER, SIGNAL = 0.94; EXPRESSED IN LUNG, SIGNAL = 0.87; EXPRESSED IN PLACENTA, SIGNAL = 0.9; EXPRESSED IN BONE MARROW, SIGNAL = 0.8; EXPRESSED IN ADULT LIVER, SIGNAL = 1.2; SWISSPROT HIT: P81324, EVALUE 3.60e+00; NT HIT: AB035662.1, EVALUE 1.20e+00
ctgacagctgttggtgaatacctcaatgtcccaggcaccctaccccctgctgaggatgcagcagagaatgagacaagatcccatccctcaaggagct

SEQ ID NO: 17836 - DNA, 210 bp, Homo sapiens
  MAP TO CHR22_110.0; EXPRESSED IN FETAL LIVER, SIGNAL = 0.69; EXPRESSED IN LUNG, SIGNAL = 0.65; EXPRESSED IN ADULT LIVER, SIGNAL = 0.77; EXPRESSED IN BONE MARROW, SIGNAL = 0.7; NT HIT: gi14779641, EVALUE 3.00e-77; EST_HUMAN HIT: AW500529.1, EVALUE 1.00e-114; SWISSPROT HIT: Q13415, EVALUE 1.30e-01
gaacccgagcgtcatgttagggtgaagcagaggacctcagtgctgaacatgctaaggaggttggacaaaatcaggttcagaggtcacaagagagatgacttcctcgatctagcggagtctccaaatgcctcggacaccgaatgcagcgacgaaatccccctgaaggtaccgcggacctcgccccgggacagcgaggagctgagggaccct

SEQ ID NO: 17837 - DNA, 178 bp, Homo sapiens
  MAP TO AC012661.4; EXPRESSED IN FETAL LIVER, SIGNAL = 0.6; EXPRESSED IN LUNG, SIGNAL = 0.81; EXPRESSED IN BONE MARROW, SIGNAL = 0.55; EXPRESSED IN ADULT LIVER, SIGNAL = 0.69; NT HIT: gi16163994, EVALUE 5.00e-51; EST_HUMAN HIT: BG988908.1, EVALUE 8.00e-63; SWISSPROT HIT: Q95157, EVALUE 2.00e-12
agaattcctcctcctgggactctcagaggatccagaactgcagccggtcctcgctttgctgtccctgtccctgtccatgtatatggtcacggtgctgaggaacctgctcagcatcctggctgtcagctctgactccccgctccacacccccatgtgcttcttcctctccaaactgtgc

SEQ ID NO: 17838 - DNA, 77 bp, Homo sapiens
  MAP TO AC018692.5; EXPRESSED IN LUNG, SIGNAL = 6.4; EXPRESSED IN ADULT LIVER, SIGNAL = 5.4; EXPRESSED IN FETAL LIVER, SIGNAL = 4.1; EXPRESSED IN BONE MARROW, SIGNAL = 5.2; NT HIT: AL163227.2, EVALUE 1.00e-09; EST_HUMAN HIT: BF959202.1, EVALUE 2.00e-15
gcctaaaatgatgttaatgatacggacaatgaaatccaggatgaggtggtctccaatggagatgaggatcttggcga

SEQ ID NO: 17839 - DNA, 238 bp, Homo sapiens
  MAP TO AC013718.3; EXPRESSED IN BONE MARROW, SIGNAL = 0.5; EXPRESSED IN ADULT LIVER, SIGNAL = 0.62; EXPRESSED IN FETAL LIVER, SIGNAL = 0.62; NT HIT: AF113921.1, EVALUE 4.00e-92; SWISSPROT HIT: Q09328, EVALUE 9.00e-31; EST_HUMAN HIT: AL524151.1, EVALUE 3.20e-01
ggccagtgacgaggaaaggctctgtcccttcatcaccaacacttgtgcctttctcttcctcttcaggtacaaggtgacctgccaaagctcagagctggccaaggacatcctggtgccctcctttgaccctaagaataagcactgtgtgtttcaaggtgacctcctgctcttcagctgtgcaggcgcccaccccaggcaccagagggtctgcccctgccgggacttcatcaagggccag

SEQ ID NO: 17840 - DNA, 119 bp, Homo sapiens
  MAP TO CHR21_19.0; EXPRESSED IN HEART, SIGNAL = 1.2; EXPRESSED IN PLACENTA, SIGNAL = 1.4; EXPRESSED IN LUNG, SIGNAL = 4.8; EXPRESSED IN ADULT LIVER, SIGNAL = 1.5; EXPRESSED IN FETAL LIVER, SIGNAL = 1.9; EXPRESSED IN BONE MARROW, SIGNAL = 2.5; EST_HUMAN HIT: H84497.1, EVALUE 1.00e-05; NT HIT: Z97336.1, EVALUE 2.50e-02
taataatgtcgtctacatctgaagatagttttctttctttccaatctgtaactatatgtcttgtcttgtcttatcggattagtgagggcttccggtatgatgttgtaaagaagcggtaa

SEQ ID NO: 17841 - DNA, 124 bp, Homo sapiens
  MAP TO AL136122.1; EXPRESSED IN FETAL LIVER, SIGNAL = 0.63; EXPRESSED IN BONE MARROW, SIGNAL = 0.46; EXPRESSED IN PLACENTA, SIGNAL = 0.5; EXPRESSED IN LUNG, SIGNAL = 0.54; EXPRESSED IN ADULT LIVER, SIGNAL = 0.81; SWISSPROT HIT: P39120, EVALUE 7.90e+00
gtgccaggactggtgctcatctttgcccttcaacgctgtagcctcagttccaaggaggagaaggatcagctgcgtgccggggacaacttcctcatcatcctcccagggaagtctgtcggaggtt

SEQ ID NO: 17842 - DNA, 238 bp, Homo sapiens
  MAP TO AL135920.4; EXPRESSED IN FETAL LIVER, SIGNAL = 0.97; EXPRESSED IN PLACENTA, SIGNAL = 1.1; EXPRESSED IN LUNG, SIGNAL = 2.3; EXPRESSED IN ADULT LIVER, SIGNAL = 1.2; EST_HUMAN HIT: BF664048.1, EVALUE 1.00e-83; SWISSPROT HIT: Q16781, EVALUE 3.00e-30; NT HIT: gi14763418, EVALUE 1.00e-83
aggccgaactcaggttctgatggccgagctgccccacaggatcatcaaggaaacccagcgtttgctggcagagccagttcctggcatcaaagcagaaccagatgaaagcaacgcccgttattttcatgtggtcattgctggggaatcaaaggattccccctttgagggagggacttttaaacgtgaactattacttgcagaagaatacccaatggcagcccctaaagtacgtttcatg

SEQ ID NO: 17843 - DNA, 111 bp, Homo sapiens
  MAP TO AL137855.1; EXPRESSED IN FETAL LIVER, SIGNAL = 0.72; EXPRESSED IN PLACENTA, SIGNAL = 0.73; EXPRESSED IN LUNG, SIGNAL = 0.79; EXPRESSED IN ADULT LIVER, SIGNAL = 0.84; EXPRESSED IN BONE MARROW, SIGNAL = 0.72; SWISSPROT HIT: P05894, EVALUE 1.20e+00; NT HIT: AF408198.1, EVALUE 6.00e-06; EST_HUMAN HIT: AI498226.1, EVALUE 4.00e-05
ctggtccaatcaatcttgtgcgtaagtcagacaccacctcctcaagctcatctataaaatctcctgcattctgccgcagaaccagcaacccattttctctgggacccttct

SEQ ID NO: 17844 - DNA, 199 bp, Homo sapiens
  MAP TO CHR22_28.0; EXPRESSED IN FETAL LIVER, SIGNAL = 6.3; EXPRESSED IN BONE MARROW, SIGNAL = 6.1; EXPRESSED IN PLACENTA, SIGNAL = 6.6; EXPRESSED IN LUNG, SIGNAL = 6.6; EXPRESSED IN ADULT LIVER, SIGNAL =   7; NT HIT: X74795.2, EVALUE 4.00e-95; EST_HUMAN HIT: BG575139.1, EVALUE 5.00e-95; SWISSPROT HIT: P33992, EVALUE 3.00e-29
gctgggatcaccaccaccctgaactcccgctgctccgtcctggctgctgccaactcagtgttcggccgctgggatgagacgaagggggaggacaacattgacttcatgcccaccatcttgtcgcgcttcgacatgatcttcatcgtcaaggatgagcacaatgaggagagggatgtggtacgtccaggggcagggctgg

SEQ ID NO: 17845 - DNA, 171 bp, Homo sapiens
  MAP TO AL160236.1; EXPRESSED IN PLACENTA, SIGNAL = 0.49; EXPRESSED IN ADULT LIVER, SIGNAL = 0.41; EXPRESSED IN FETAL LIVER, SIGNAL = 0.42; SWISSPROT HIT: P46963, EVALUE 4.40e+00; NT HIT: AF025533.1, EVALUE 1.50e-01; EST_HUMAN HIT: BI910567.1, EVALUE 2.20e-01
atgatggttcaagggataggcaagggattaaataacatactacaaaacctcaactggataaagagggaagtaagaatgagtgtggggggtcagtgcaaaggtggtagaatcaatgaattgatagaagtcttggtaggggtgaaaactgtcagagttgaagtacttgagagg

SEQ ID NO: 17846 - DNA, 351 bp, Homo sapiens
  MAP TO AL135926.3; EXPRESSED IN BONE MARROW, SIGNAL = 0.76; EXPRESSED IN PLACENTA, SIGNAL = 0.46; EXPRESSED IN FETAL LIVER, SIGNAL = 0.74; SWISSPROT HIT: P08547, EVALUE 5.00e-23; NT HIT: AB026898.1, EVALUE 2.00e-21; EST_HUMAN HIT: AU136217.1, EVALUE 2.00e-19
tgttttcaataagtggtggtgtaataactggacatccacatgcaaagaaaaaatgaacctagacacagaccttacacccttcacaaaaatttactcaaaatggatcacagacctaaatgtaatccacaaagttacaaaactcttagaagataatagaggagaaaatatagataaccttgagtatggcaatgactttttagatacaacaccaaaggtatggtccatgaaagaaataattggtatgctggactttattaaaagtaaaaacttctgctctgcagaagacaatgtcaatagaataagaagaaaagccacaggatgggagaaaaatagctgcaaaagacaaatctg

SEQ ID NO: 17847 - DNA, 220 bp, Homo sapiens
  MAP TO AL132671.19; EXPRESSED IN FETAL LIVER, SIGNAL = 0.76; EXPRESSED IN LUNG, SIGNAL = 0.56; EXPRESSED IN ADULT LIVER, SIGNAL = 0.42; NT HIT: gi14756936, EVALUE 1.00e-121; SWISSPROT HIT: P08922, EVALUE 8.00e-37
atgtcatcctgatcagtgatattattgaactctttgaattaggcccttctgcctggcagaactggacctatgaggtgaaagtatccacccaagaccctcctgaagtcactcatattttcttgaacataagtggaaccatgctgaatgtacctgagctgcagagtgctatgaaatacaaggtttctgtgagagcaagttctccaaagaggccaggcccctg

SEQ ID NO: 17848 - DNA, 176 bp, Homo sapiens
  MAP TO AL135909.3; EXPRESSED IN FETAL LIVER, SIGNAL = 0.41; EXPRESSED IN PLACENTA, SIGNAL = 0.47; EXPRESSED IN LUNG, SIGNAL = 0.48; NT HIT: AL163218.2, EVALUE 2.40e+00; EST_HUMAN HIT: AI001977.1, EVALUE 2.30e-01; SWISSPROT HIT: P50051, EVALUE 2.50e+00
cttgtatttgctttgagtctcccctgaatccccacacgtggtgggtccactggaattctgtgtccagggggcatcgcgaacactgtatgtgaatgagcagcaaggatcaatggacatgcatgttgcatgtcactactcagctcacatgcatgctccgttttcatgttggagtacac

SEQ ID NO: 17849 - DNA, 425 bp, Homo sapiens
  MAP TO AL160231.1; EXPRESSED IN BONE MARROW, SIGNAL = 0.58; EXPRESSED IN FETAL LIVER, SIGNAL =   2; SWISSPROT HIT: P05783, EVALUE 3.00e-54; NT HIT: gi4557887, EVALUE 1.00e-105; EST_HUMAN HIT: BG822552.1, EVALUE 1.00e-108
tctaaagtcatcagcagcaagatgggcactgtcaatctgcagaacgatgcaggcatggctcacagtatttgcaaagatctgagccctcagatccttgatgttcttgaagtaatgcccccaatctctgacctggggtcccttcttctgcaggtgctcctgcattttgctctccagcttccatttcttggtctccagactcctcactctgtccaggcagtaggccagggagtcgttcaggccttgcatggtctccttctcattctggatgccctccactcctgccagacccctggccatccccacagccaggcccccagaccccaagttgccccagaaactggtggagtgggacatggagatctgggagcccaagcccccagcacctgcatagatgttggccatgctgctgactggcagggcgccat

SEQ ID NO: 17850 - DNA, 304 bp, Homo sapiens
  MAP TO AC011802.4; EXPRESSED IN PLACENTA, SIGNAL = 0.63; EXPRESSED IN BONE MARROW, SIGNAL = 0.69; EXPRESSED IN LUNG, SIGNAL = 0.64; EXPRESSED IN ADULT LIVER, SIGNAL = 0.74; EXPRESSED IN FETAL LIVER, SIGNAL = 0.69; SWISSPROT HIT: P35584, EVALUE 1.50e-01; NT HIT: AL163302.2, EVALUE 4.40e+00
atgaggcccagggggccaggcggtgggctgcaggggctgggtgcccccagcgtctcccagggcagctctggcctcccagtgccaagctccttccaggaatttgaaagggccaggccggtaggggtggggctgggggtcccccctgggcagaggatgtggcctggggggaaaaggagggggacctggggacagtgggagggccaggagccaagccctaaacagggaatgcaaagcttctgcccccagctgccctacgaggtggccaagaaagagaggctcagcctgaggaggaagaagaagcctg

SEQ ID NO: 17851 - DNA, 241 bp, Homo sapiens
  MAP TO AC025475.2; EXPRESSED IN BONE MARROW, SIGNAL = 0.76; EXPRESSED IN LUNG, SIGNAL = 1.2; EXPRESSED IN ADULT LIVER, SIGNAL = 0.81; EXPRESSED IN FETAL LIVER, SIGNAL = 0.77; SWISSPROT HIT: P07572, EVALUE 5.10e-02; EST_HUMAN HIT: AA078318.1, EVALUE 4.00e-56; NT HIT: AL163209.2, EVALUE 7.00e-60
agagaccttgatcacttttcgctcccacaagatttcacactggtccattttattaatgacattatgctgattggatccagtgagcaagaagtagcaaacacactgaacttattggtgaaacatttgtgtgctagaggatgggaaataaatccaactaaaattcagggaccttctacctcagtaaaatttctaggggtccagtggtgtggggcctattggaatattccttctaaggtgaagg

SEQ ID NO: 17852 - DNA, 128 bp, Homo sapiens
  MAP TO AF168787.1; EXPRESSED IN FETAL LIVER, SIGNAL = 9.8; EXPRESSED IN PLACENTA, SIGNAL = 7.7; EXPRESSED IN BONE MARROW, SIGNAL = 2.4; EXPRESSED IN LUNG, SIGNAL = 3.1; EXPRESSED IN ADULT LIVER, SIGNAL = 6.3; SWISSPROT HIT: P38570, EVALUE 3.50e+00; NT HIT: gi6007850, EVALUE 2.00e-09; EST_HUMAN HIT: BG291806.1, EVALUE 2.50e+00
gcaggtcttgtgcagcacggccacagcgtaacctggggcaagggtggtgtggctgtgaacacaccgtgtgctcccacctggcctctctcttggccccggcaccttcccagtcaggccttcaaagtggc

SEQ ID NO: 17853 - DNA, 103 bp, Homo sapiens
  MAP TO AC017082.3; EXPRESSED IN FETAL LIVER, SIGNAL = 0.58; EXPRESSED IN LUNG, SIGNAL = 0.98; EXPRESSED IN BONE MARROW, SIGNAL = 0.64; SWISSPROT HIT: P48747, EVALUE 4.70e+00; NT HIT: AL163246.2, EVALUE 2.00e-21; EST_HUMAN HIT: AA714294.1, EVALUE 9.00e-18
ccaatgtgggggttctgtcagctgctaaatgtcaatggcaattatgcattctggcactgggaaaatgaccacagaatgagtccgtggacccactggagccact

SEQ ID NO: 17854 - DNA, 212 bp, Homo sapiens
  MAP TO AC025176.1; EXPRESSED IN PLACENTA, SIGNAL = 0.72; EXPRESSED IN FETAL LIVER, SIGNAL = 0.53; EXPRESSED IN ADULT LIVER, SIGNAL = 0.49; EXPRESSED IN BONE MARROW, SIGNAL = 0.54; SWISSPROT HIT: Q9UKP5, EVALUE 6.00e-37; NT HIT: gi14727533, EVALUE 1.00e-116; EST_HUMAN HIT: AI620021.1, EVALUE 2.80e-01
aatattcatcacactcaaaatgtaatgttcaatgtctttgcggccatggtagcccaccatcattttgtctgccactaccaatgtctccacaaaccgttcaatgctcactgatctcttctgtctgtggtggatatgtgtgttgttaattggtagtgaataagaaacagtggatgtgtcattcagccaccaaggtttgccacttcttgtgaaat

SEQ ID NO: 17855 - DNA, 97 bp, Homo sapiens
  MAP TO AC020721.4; EXPRESSED IN FETAL LIVER, SIGNAL = 0.49; EXPRESSED IN BONE MARROW, SIGNAL = 0.68; NT HIT: AL161592.2, EVALUE 1.20e+00; EST_HUMAN HIT: F07882.1, EVALUE 1.80e+00
gatactgaagcaggatcccacacttgaagccccacacttgcagaaagcaacaactgtttgtctagatttctttgggaaagaagatgagaaggatcag

SEQ ID NO: 17856 - DNA, 303 bp, Homo sapiens
  MAP TO AC015889.3; EXPRESSED IN FETAL LIVER, SIGNAL = 0.4; EXPRESSED IN BONE MARROW, SIGNAL = 0.46; EXPRESSED IN PLACENTA, SIGNAL = 0.45; EXPRESSED IN ADULT LIVER, SIGNAL = 0.38; EST_HUMAN HIT: AV721843.1, EVALUE 1.60e+00; SWISSPROT HIT: P34708, EVALUE 1.60e+00
agcatggtctggaaacgcacaagaccatgcttcccctagtggtcagtggcatgtttgactgcggtcggagcctcagcttctcctgccccgttgcccagtcaccatgcctggtctcacctcttctccccaggcctcatccagctcaactactcatggagatgcagatgctgctagctcactcccattctcccctcatcttcaccatcagaagtggagggggtgatgcctggctcatgatggtcctgtgcgaaaggagggagaacaagcccacagtaggccttcacccagaggtggctactatga

SEQ ID NO: 17857 - DNA, 155 bp, Homo sapiens
  MAP TO AC015833.3; EXPRESSED IN FETAL LIVER, SIGNAL = 0.48; EXPRESSED IN PLACENTA, SIGNAL = 0.51; EXPRESSED IN ADULT LIVER, SIGNAL = 0.59; NT HIT: gi4506494, EVALUE 4.00e-82; EST_HUMAN HIT: BI011353.1, EVALUE 1.00e-05; SWISSPROT HIT: P48380, EVALUE 4.00e-25
caatctgagtgaaatagaaagtcgacttccgaaagcaaagctgataactctgtgcaaacatgagtctatcctgaaatggatgtgtaactgtgaccatgggatgtaccaggctttggtggagattctcatccccgacgtccttagacctattccta

SEQ ID NO: 17858 - DNA, 160 bp, Homo sapiens
  MAP TO AL158832.2; EXPRESSED IN BONE MARROW, SIGNAL = 0.71; EXPRESSED IN LUNG, SIGNAL = 0.68; EXPRESSED IN FETAL LIVER, SIGNAL = 0.62; EST_HUMAN HIT: BF107121.1, EVALUE 5.00e-39; SWISSPROT HIT: P38144, EVALUE 2.60e+00; NT HIT: U11687.1, EVALUE 5.50e-01
caaccacagagtccacatcagttacctccctctcaagggtggagacattgaagaagcttgataagcttatgggtgcccaggcaaagggcatccggtatttccccaaacgctggcagaaggattcagcttggagttttagtttttcaatcttttctttact

SEQ ID NO: 17859 - DNA, 126 bp, Homo sapiens
  MAP TO AC011802.4; EXPRESSED IN LUNG, SIGNAL = 2.3; EXPRESSED IN FETAL LIVER, SIGNAL = 1.3; EXPRESSED IN BONE MARROW, SIGNAL = 1.5; EST_HUMAN HIT: BE276901.1, EVALUE 9.00e-65; NT HIT: gi14728822, EVALUE 6.00e-65
gggtctcgtaacatgccgggcctgtctgcagccacgctggcctctctgggtgggacttcctctcggagaggcagcggagacacctccatctccatcgacaccgaggcatccatcagggaaatcaag

SEQ ID NO: 17860 - DNA, 154 bp, Homo sapiens
  MAP TO AC017112.5; EXPRESSED IN PLACENTA, SIGNAL = 0.41; EXPRESSED IN FETAL LIVER, SIGNAL = 0.4; NT HIT: AE002317.3, EVALUE 1.30e-01; EST_HUMAN HIT: AA227330.1, EVALUE 2.00e-81; SWISSPROT HIT: P10127, EVALUE 7.60e+00
aaacagtttgctagatgatgctaaggcccgcttaagaaagtatgatattggaggcaaatattctcacttgccatataacaaatactccgtccttttgccattggtggctaaagaaggaaaactccatttgttgttcaccgtccggtcagagaag

SEQ ID NO: 17861 - DNA, 128 bp, Homo sapiens
  MAP TO CHR22_182.0; EXPRESSED IN PLACENTA, SIGNAL = 0.78; EXPRESSED IN ADULT LIVER, SIGNAL = 0.75; EXPRESSED IN BONE MARROW, SIGNAL = 0.69; EXPRESSED IN FETAL LIVER, SIGNAL = 0.98; SWISSPROT HIT: P10265, EVALUE 7.00e-05; NT HIT: X72791.1, EVALUE 6.60e+00; EST_HUMAN HIT: BE395061.1, EVALUE 5.00e-57
gttttcaaggacaacaacccctacagaaaataccaccacttcagggagtcagccaattacaacaatccaacagctgtcccgcgccacagcaggcagcaccgcagtagatttatgttccacccaaatgg

SEQ ID NO: 17862 - DNA, 195 bp, Homo sapiens
  MAP TO AL135920.4; EXPRESSED IN FETAL LIVER, SIGNAL = 1.8; EXPRESSED IN LUNG, SIGNAL = 3.1; EXPRESSED IN ADULT LIVER, SIGNAL = 2.3; EXPRESSED IN BONE MARROW, SIGNAL = 2.1; EST_HUMAN HIT: AI540211.1, EVALUE 8.00e-51; SWISSPROT HIT: O41033, EVALUE 2.90e-01; NT HIT: AL163246.2, EVALUE 2.00e-41
aggtcttagttccaaagggaagaacgctgccaccaggagacacaacaattccactaaactggaagttaagactgccacctggacacattgggctcctcctacctttaagtcaacaggctaagggagttacagtgttggctggggtgattgacctggactatcaagatgaattcagtctactcctccacaacagag

SEQ ID NO: 17863 - DNA, 93 bp, Homo sapiens
  MAP TO AL137062.3; EXPRESSED IN BONE MARROW, SIGNAL = 0.71; EXPRESSED IN PLACENTA, SIGNAL =   1; EXPRESSED IN ADULT LIVER, SIGNAL = 1.1; EXPRESSED IN FETAL LIVER, SIGNAL = 0.8; NT HIT: gi14758343, EVALUE 2.90e-01
atgagccttcctcgtgagggttggagatggagggagaagggatggagagtaaggatgggacggaggttgtggagcagcagaccaacacgccag

SEQ ID NO: 17864 - DNA, 315 bp, Homo sapiens
  MAP TO AC017013.4; EXPRESSED IN FETAL LIVER, SIGNAL = 1.1; EXPRESSED IN BONE MARROW, SIGNAL = 1.1; EXPRESSED IN PLACENTA, SIGNAL = 1.2; EXPRESSED IN LUNG, SIGNAL = 2.1; EXPRESSED IN ADULT LIVER, SIGNAL = 1.3; SWISSPROT HIT: P40013, EVALUE 6.00e-16; NT HIT: gi6912493, EVALUE 1.00e-123; EST_HUMAN HIT: AL559431.1, EVALUE 1.00e-124
atggacatgctgttccctggctccattgacttgaagaaagtaaaattccaggctaagctagaacatgagtgcatccagaacttcaaaatactacaagcaggttttaagaagctgggtgttgacaaaataattcctgtcgacaaatcagtaaaaggaaagtttcaggacaattttgaatttgttcagtggttcaagaagttttttgatgcaaactatgatggaaaaatctatgaccctgtggctgccagacaaggtcaagaaattgcagtggctcactccctccttgctccagctccgaataaacccaagttctag

SEQ ID NO: 17865 - DNA, 127 bp, Homo sapiens
  MAP TO CHR22_145.0; EXPRESSED IN LUNG, SIGNAL = 0.61; EXPRESSED IN FETAL LIVER, SIGNAL = 0.7; EXPRESSED IN PLACENTA, SIGNAL = 0.76; NT HIT: gi14778388, EVALUE 2.00e-65; SWISSPROT HIT: P18099, EVALUE 2.00e+00; EST_HUMAN HIT: BE828632.1, EVALUE 2.00e-65
tacaggccagagcggatggtcatttccagcagagagccctgcctgctgccttccacacatggaacagactctggcgatggcgccaccaggaaaatgtcctcagtgcaagagcaacacgtttccacag

SEQ ID NO: 17866 - DNA, 143 bp, Homo sapiens
  MAP TO AC021260.4; EXPRESSED IN LUNG, SIGNAL = 1.6; EXPRESSED IN BONE MARROW, SIGNAL = 1.7; EXPRESSED IN PLACENTA, SIGNAL = 1.6; EXPRESSED IN ADULT LIVER, SIGNAL = 1.4; EXPRESSED IN FETAL LIVER, SIGNAL = 1.8; SWISSPROT HIT: Q9QY06, EVALUE 8.90e-01; EST_HUMAN HIT: BI868416.1, EVALUE 6.00e-60; NT HIT: gi14742641, EVALUE 4.80e-01
attccatgaaagtgtttttcacaaacctcctgtagctgcagggacatgagtcccagttgatcctggcgtctttccaccagctccctttctgtgcgcatctctctctccagttcctgaagccgccgctccacccgatctgaaac

SEQ ID NO: 17867 - DNA, 127 bp, Homo sapiens
  MAP TO AC013816.3; EXPRESSED IN FETAL LIVER, SIGNAL = 0.49; EXPRESSED IN PLACENTA, SIGNAL = 0.78; EXPRESSED IN LUNG, SIGNAL = 0.78; EXPRESSED IN ADULT LIVER, SIGNAL = 0.55; SWISSPROT HIT: P17841, EVALUE 1.60e+00; EST_HUMAN HIT: AV692879.1, EVALUE 6.20e-01
agctttgatgacaaagccaccgtgcagtaggtgtttactctcattggggcttctcttcctcctaattgctagatttgtgctacccactttgatattagaatgcatatttttttttctgtttgttctc

SEQ ID NO: 17868 - DNA, 157 bp, Homo sapiens
  MAP TO AL133553.2; EXPRESSED IN FETAL LIVER, SIGNAL = 0.95; EXPRESSED IN LUNG, SIGNAL =   1; EXPRESSED IN PLACENTA, SIGNAL = 0.79; NT HIT: U69668.1, EVALUE 2.00e-83; SWISSPROT HIT: P12270, EVALUE 1.00e-13; EST_HUMAN HIT: AI990460.1, EVALUE 4.00e-83
ccttcagattctgcctccacaaatacttcatctccatcatcacctgttgctgtttcatttgttgtagataaagtgccagtggatgtagtcaccattggaacagattgagaggcatgttccgaagcatcagaggtggtgctctcagtaaatacagtca

SEQ ID NO: 17869 - DNA, 153 bp, Homo sapiens
  MAP TO AL133492.1; EXPRESSED IN FETAL LIVER, SIGNAL = 1.2; EXPRESSED IN LUNG, SIGNAL = 1.9; EXPRESSED IN BONE MARROW, SIGNAL = 1.6; NT HIT: AL163303.2, EVALUE 6.00e-81; EST_HUMAN HIT: BF981537.1, EVALUE 3.00e-34; SWISSPROT HIT: Q09215, EVALUE 1.00e+01
atgggaggaggtcacaacatcaacaaagtttggaagaagttgattccaaccctcatggatgcctttaaggggttccatcctttattgaaggaagtcactgcagatgtggtgaaaacagcaagagaactagaattagaagtggagcctgaagat

SEQ ID NO: 17870 - DNA, 203 bp, Homo sapiens
  MAP TO AL133408.3; EXPRESSED IN BONE MARROW, SIGNAL = 0.73; EXPRESSED IN PLACENTA, SIGNAL = 0.78; EXPRESSED IN LUNG, SIGNAL = 0.86; EXPRESSED IN FETAL LIVER, SIGNAL = 0.75; EST_HUMAN HIT: BI766212.1, EVALUE 9.00e-26; SWISSPROT HIT: P35361, EVALUE 2.20e-01; NT HIT: AJ271736.1, EVALUE 1.00e-24
aaggagcaaaggcagcaagcaggggagcaacaagcaggttcctaatactgttattactcctattataagagttttaaatcctaatgctgggaaccattttccaaatacagacccaggatcaaatccatgccaaacctgcacaggcatatgtgctagctttgtcatgtctctgacgatgttttcgactacttggccttggtcat

SEQ ID NO: 17871 - DNA, 81 bp, Homo sapiens
  MAP TO AL136444.1; EXPRESSED IN BONE MARROW, SIGNAL = 1.1; EXPRESSED IN FETAL LIVER, SIGNAL = 1.1; NT HIT: AL163246.2, EVALUE 2.50e-01; EST_HUMAN HIT: AL121212.1, EVALUE 6.00e-03
ttattcatccaacaaatatttattttgttcctttccaatagaattcaggtccatgaatgtggattctttcttgaagttttg

SEQ ID NO: 17872 - DNA, 115 bp, Homo sapiens
  MAP TO AC022263.3; EXPRESSED IN FETAL LIVER, SIGNAL = 0.83; EXPRESSED IN BONE MARROW, SIGNAL = 0.7; EXPRESSED IN LUNG, SIGNAL = 0.75; NT HIT: AF025772.1, EVALUE 3.80e-01
catctctctccccttctgcctgttgtctacactctcgatccacatcatcaccttcactcctgacccactgtcctctgccttcagcaacacccttgaccagctggccttctggtgg

SEQ ID NO: 17873 - DNA, 314 bp, Homo sapiens
  MAP TO AL138788.1; EXPRESSED IN FETAL LIVER, SIGNAL =  12; EXPRESSED IN HEART, SIGNAL =  12; NT HIT: gi14742436, EVALUE 0.00e+00; SWISSPROT HIT: P27817, EVALUE 3.00e-09; EST_HUMAN HIT: BG676581.1, EVALUE 0.00e+00
attgctgttgttgatggtgaaacttacctccatcacttctccctgcacaggagggttggaatactgtggtcgacgcccatagggtctccgcatgtagtaaggtgggaaccttcgcctgcggtagggccggcgttgttgggcctggccttcgggagcactctccgatccctcgttcttttccccactctcactattctggtaattttgctggtaattgcgtggaggacccctacgacgtggatagcgtctataatggttacggtctgctgcatatttactgccttgaactggaacaccaccaggacctgtaacat

SEQ ID NO: 17874 - DNA, 126 bp, Homo sapiens
  MAP TO AL136445.1; EXPRESSED IN FETAL LIVER, SIGNAL = 7.3; EXPRESSED IN BONE MARROW, SIGNAL = 7.8; EXPRESSED IN HEART, SIGNAL = 5.3; EXPRESSED IN PLACENTA, SIGNAL = 7.9; SWISSPROT HIT: P37752, EVALUE 3.50e+00; EST_HUMAN HIT: BG196007.1, EVALUE 8.00e-22
aagatagatgatccttcagaggaacaggagacagtgcggctgtattcggtgcagcttggggccttgaaggagggaaacaagacaagggagttaattcctaggggtccttggagagaagaacaatga

SEQ ID NO: 17875 - DNA, 176 bp, Homo sapiens
  MAP TO AC016729.5; EXPRESSED IN ADULT LIVER, SIGNAL = 9.5; EXPRESSED IN FETAL LIVER, SIGNAL =   7; EXPRESSED IN BONE MARROW, SIGNAL = 7.5; EXPRESSED IN HEART, SIGNAL = 8.4; NT HIT: gi14740378, EVALUE 1.00e-94; SWISSPROT HIT: Q9Y7R3, EVALUE 2.50e+00; EST_HUMAN HIT: BG533761.1, EVALUE 2.00e-94
cgtgctcttgctaaaactggagctgaatctatcagtttgcttgagttatgtcgaaatacgaacagaaaacaagctgccgcaaagttctacagcttcttggttcttaaaaagcagcaagctattgagctgacacaggaagaaccgtacagtgacatcatcgcaacacctggaccaag

SEQ ID NO: 17876 - DNA, 136 bp, Homo sapiens
  MAP TO AL109804.24; EXPRESSED IN FETAL LIVER, SIGNAL = 0.45; EXPRESSED IN BONE MARROW, SIGNAL = 0.41; EXPRESSED IN ADULT LIVER, SIGNAL = 0.57; SWISSPROT HIT: P34474, EVALUE 3.50e+00; EST_HUMAN HIT: BG122848.1, EVALUE 1.00e-70; NT HIT: gi14771527, EVALUE 7.00e-71
ctggtgacaatcccattttctgcaagaatgaaggctgcagcaggattggcagccctgatgaggctctgcagctgaacaaggagagggtgccgctgctccgtggtgtgactggtgaataccacgttactcaccaggc

SEQ ID NO: 17877 - DNA, 222 bp, Homo sapiens
  MAP TO AC019196.4; EXPRESSED IN FETAL LIVER, SIGNAL = 1.3; EXPRESSED IN PLACENTA, SIGNAL = 1.8; EXPRESSED IN LUNG, SIGNAL = 1.7; EXPRESSED IN BONE MARROW, SIGNAL = 1.5; SWISSPROT HIT: P57993, EVALUE 2.40e+00; EST_HUMAN HIT: BF944542.1, EVALUE 7.00e-67; NT HIT: X89211.1, EVALUE 2.00e-63
gcctgttgacttaaaggtaggaggagcccaaagtgtccaggtggcaaccttaacttccagtttaatggaatcattgctgtgtgtcctggtggcagcattcctccctctggaactaagacctctaggtccaaagaatgtaatgttgaaggaacaggaagcaaaaattttgctagtggatcagtaggggtgatgatgagtggtgtcacttccacttccacctct

SEQ ID NO: 17878 - DNA, 162 bp, Homo sapiens
  MAP TO AL139144.1; EXPRESSED IN BONE MARROW, SIGNAL = 0.75; EXPRESSED IN PLACENTA, SIGNAL = 0.66; EXPRESSED IN FETAL LIVER, SIGNAL = 0.79; EXPRESSED IN LUNG, SIGNAL = 0.72; EXPRESSED IN ADULT LIVER, SIGNAL = 0.79; EST_HUMAN HIT: AI052249.1, EVALUE 2.10e-01; SWISSPROT HIT: P11293, EVALUE 2.60e+00
gtgtcaaacttagacctctctctgcccgggaagcccttcctgaccctgaccctgcaggtctggctgaaaagcctcctctcagagctcccacggctgtctatacagctcatcatgatctttctcgccctggagtgggttgcgggtctacctgtctgccctctg

SEQ ID NO: 17879 - DNA, 91 bp, Homo sapiens
  MAP TO AL138889.2; EXPRESSED IN PLACENTA, SIGNAL = 0.39; EXPRESSED IN ADULT LIVER, SIGNAL = 0.42; EXPRESSED IN FETAL LIVER, SIGNAL = 0.45; EST_HUMAN HIT: BI561695.1, EVALUE 1.60e+00; NT HIT: AE004366.1, EVALUE 2.80e-01
gattatatgccagagagtgcaatggcagaaggcagaagaggagatacagaacaagaagatggtgggagacattttgcaatttatcaagata

SEQ ID NO: 17880 - DNA, 142 bp, Homo sapiens
  MAP TO AL137800.2; EXPRESSED IN FETAL LIVER, SIGNAL = 0.74; EXPRESSED IN ADULT LIVER, SIGNAL = 0.83; EXPRESSED IN LUNG, SIGNAL = 1.5; SWISSPROT HIT: P19878, EVALUE 3.00e-22; EST_HUMAN HIT: AI906403.1, EVALUE 7.00e-72; NT HIT: gi14732278, EVALUE 2.00e-74
ctgcccgttgaacatgaccgtggcccagttatcattgcccttcttcaagacaaagacaatgttccctggcatgacctggagctcttcttttgtctcaggcacaaacccaaatagcacacggtgagcctccccttccagagcc

SEQ ID NO: 17881 - DNA, 99 bp, Homo sapiens
  MAP TO AC022057.2; EXPRESSED IN BONE MARROW, SIGNAL = 0.81; EXPRESSED IN ADULT LIVER, SIGNAL = 0.84; EXPRESSED IN FETAL LIVER, SIGNAL =   1; EXPRESSED IN LUNG, SIGNAL = 0.86; NT HIT: AJ272265.1, EVALUE 5.00e-03; EST_HUMAN HIT: BE960613.1, EVALUE 2.00e-03
atggctattactaaaaacaacgacaacaacaacaagaaccaccaagaaaataatgtgttggcaaagatgtggagaaagtggaaatcttgtgtattgatg

SEQ ID NO: 17882 - DNA, 206 bp, Homo sapiens
  MAP TO AF235094.1; EXPRESSED IN FETAL LIVER, SIGNAL = 0.73; EXPRESSED IN ADULT LIVER, SIGNAL = 0.76; EXPRESSED IN BONE MARROW, SIGNAL = 0.64; EXPRESSED IN LUNG, SIGNAL = 0.59; EST_HUMAN HIT: AU117441.1, EVALUE 2.70e-01; SWISSPROT HIT: Q01702, EVALUE 3.20e+00; NT HIT: gi11426974, EVALUE 1.80e-01
tcaagctgattctgcagagtcgggaaccagcaacccagttttagcagctaggtggggaagtgccactgccaggtgaaccagcagcatccagaggacacgtggccccagtggcaggtagaccggaagcctgggaaagaaaccggaagcaaactgaaaggagcacatttccccatcttccccagccttgcgtgctttctctggtgccc

SEQ ID NO: 17883 - DNA, 161 bp, Homo sapiens
  MAP TO AL136454.3; EXPRESSED IN BONE MARROW, SIGNAL = 1.2; EXPRESSED IN PLACENTA, SIGNAL = 1.7; EXPRESSED IN ADULT LIVER, SIGNAL = 1.8; EXPRESSED IN FETAL LIVER, SIGNAL = 1.2; EST_HUMAN HIT: BF891265.1, EVALUE 5.00e-05; NT HIT: AY029472.1, EVALUE 3.60e-02
cacctccacatcatggtgaacaaagaagatgccatgtggtgtcatgaaacaaaaagctttggattgaggtacaaagcaattagattagcatctgttcattcacctgatgttcttgtacctttaggaccagtaggcttcagcttcctcatctataaaataaa

SEQ ID NO: 17884 - DNA, 231 bp, Homo sapiens
  MAP TO AL121954.3; EXPRESSED IN FETAL LIVER, SIGNAL =   2; EXPRESSED IN BONE MARROW, SIGNAL = 1.4; SWISSPROT HIT: P79384, EVALUE 3.50e+00; NT HIT: gi14750714, EVALUE 1.00e-127; EST_HUMAN HIT: AV747019.1, EVALUE 1.00e-127
catccgtacttcaaacaatagtcaggttaataaactgactctaacaagtgatgaatctacattaatagaagatggtggagctagaagtgatggatcactggaggatggggacgatgttcaccgagctgtagataatgaaagggatggtgtcacttacagttattccttctttcacttcatgcttttcctggcttcactttatatcatgatgacccttaccaactggtacag

SEQ ID NO: 17885 - DNA, 221 bp, Homo sapiens
  MAP TO AL136163.3; EXPRESSED IN LUNG, SIGNAL = 0.74; EXPRESSED IN FETAL LIVER, SIGNAL = 0.55; EXPRESSED IN PLACENTA, SIGNAL = 0.6; EXPRESSED IN ADULT LIVER, SIGNAL = 0.55; EXPRESSED IN BONE MARROW, SIGNAL = 0.61; EST_HUMAN HIT: BG432498.1, EVALUE 2.00e-97; SWISSPROT HIT: P31244, EVALUE 1.40e+00; NT HIT: gi16158242, EVALUE 2.00e-01
caatactataatatctctttagttctgtacgcctgatctcctttaactgattactttttctcttttttttctcatcagtcatatattcctcttccacagcaatgttgcacttgtctggctctaaaactactgtattattatcttccttcccagtatgagtccttgtagctacagctgaggctgtctctgcattttgtttggcttgttttttctttttcagt

SEQ ID NO: 17886 - DNA, 240 bp, Homo sapiens
  MAP TO AC012186.3; EXPRESSED IN BONE MARROW, SIGNAL = 1.7; EXPRESSED IN LUNG, SIGNAL = 2.6; EXPRESSED IN PLACENTA, SIGNAL = 1.7; EXPRESSED IN FETAL LIVER, SIGNAL = 1.7; EXPRESSED IN ADULT LIVER, SIGNAL = 2.3; SWISSPROT HIT: P34110, EVALUE 7.00e-11; NT HIT: gi15318051, EVALUE 0.00e+00; EST_HUMAN HIT: AL520060.1, EVALUE 1.00e-130
gcattttctctgtatgaagatgaaatcagcgattccaaagcacagctagctgccatcaccttgatcattggcacttttgaaaggatgaagtgcttcagtgaagagaatcacgaacctctgaggactcagtgtgcccttgctgcatccaaacttctaaagaaacctgatcagggccgagctgtgagcacctgtgcacatctcttctggtctggcagaaacacggacaaaaatggggaggag

SEQ ID NO: 17887 - DNA, 111 bp, Homo sapiens
  MAP TO AL133328.5; EXPRESSED IN FETAL LIVER, SIGNAL = 4.8; EXPRESSED IN BONE MARROW, SIGNAL = 5.7; EXPRESSED IN LUNG, SIGNAL = 8.5; EXPRESSED IN PLACENTA, SIGNAL = 7.8; EXPRESSED IN ADULT LIVER, SIGNAL = 7.7; SWISSPROT HIT: P07898, EVALUE 9.20e-01; NT HIT: AF029308.1, EVALUE 1.00e-34; EST_HUMAN HIT: BI013264.1, EVALUE 5.00e-38
atggtgtgtccagagtttgttccttcagatgttcagatgtgtctggagtttcttccttctggtgggttcgtggtctccctgacttcagtaatgaagctgcagacctttgtg

SEQ ID NO: 17888 - DNA, 217 bp, Homo sapiens
  MAP TO AF235096.1; EXPRESSED IN FETAL LIVER, SIGNAL = 0.78; EXPRESSED IN HEART, SIGNAL = 2.6; EXPRESSED IN LUNG, SIGNAL = 0.77; EXPRESSED IN ADULT LIVER, SIGNAL = 0.76; EXPRESSED IN BONE MARROW, SIGNAL = 0.7; EST_HUMAN HIT: BG248802.1, EVALUE 1.00e-46; SWISSPROT HIT: P27216, EVALUE 7.00e-12; NT HIT: gi13644926, EVALUE 9.00e-47
ggaccaatgaagcagccatcattgaaatcttatcgggcaggacatcagatgagaggcaacaaatcaagcaaaagtacaaggcaacgtacggcaaggtgattccaggggtggtcagcaagcttgcacccagccatggcctcagccgtctcggcttcctcatgtccccaggccacgcagaatatctttatagctttattgagtcagcccaggaggaaaa

SEQ ID NO: 17889 - DNA, 273 bp, Homo sapiens
  MAP TO AC011985.3; EXPRESSED IN BONE MARROW, SIGNAL = 1.2; EXPRESSED IN HEART, SIGNAL = 1.5; EXPRESSED IN LUNG, SIGNAL = 1.2; EXPRESSED IN FETAL LIVER, SIGNAL = 2.1; EXPRESSED IN PLACENTA, SIGNAL = 2.2; EXPRESSED IN ADULT LIVER, SIGNAL = 1.6; EST_HUMAN HIT: BG105156.1, EVALUE 9.30e-02; NT HIT: D63861.1, EVALUE 4.00e-03; SWISSPROT HIT: P72394, EVALUE 9.90e-01
ctgcttgcgaggtggcccctgactggcatctgggaacctggctcccagcacactccgagtcaacagctagctgatgagctgactccttatgcctagctatgaaaacaatatggtctaggctgaacactgcctttcttctaggggtgtgaaatttggcatgtgctaggcagaggatgcctagataaacagtccccaagaaaaactttgggtgctgagtctccactgggctcccctgggcagaatcctcacacatgtgctgctgcattttcactg

SEQ ID NO: 17890 - DNA, 288 bp, Homo sapiens
  MAP TO AL121909.4; EXPRESSED IN LUNG, SIGNAL = 0.79; EXPRESSED IN PLACENTA, SIGNAL = 0.79; EXPRESSED IN ADULT LIVER, SIGNAL = 0.74; EXPRESSED IN FETAL LIVER, SIGNAL = 0.81; EXPRESSED IN BONE MARROW, SIGNAL = 0.78; SWISSPROT HIT: P37275, EVALUE 3.30e+00; EST_HUMAN HIT: AA835001.1, EVALUE 1.50e+00; NT HIT: AF247818.1, EVALUE 1.00e+00
ttagggaagggcccggctgtgcatttctggcttgagttctttcatgcagttgcagtcaggtggcagctgacgctggaagagcaggcagctggtatggctcagcgtttcttcctcctcacccagtctcatgtggtcttttctatgtggtctctcttcatgggcagctttattctcatagcatggcagcttcagagcagggggacagcctgcctgggcttcagtgtgattattctgtccaaccaggtggaagcagcattgctttatgacttggccttggaagtcatgcat

SEQ ID NO: 17891 - DNA, 117 bp, Homo sapiens
  MAP TO AL160233.1; EXPRESSED IN BONE MARROW, SIGNAL = 0.44; EXPRESSED IN FETAL LIVER, SIGNAL = 0.45; EXPRESSED IN LUNG, SIGNAL = 0.55; EXPRESSED IN ADULT LIVER, SIGNAL = 0.49; NT HIT: X95936.1, EVALUE 3.80e-01; EST_HUMAN HIT: BF810089.1, EVALUE 5.70e-01
tcagtgcaaatccttcatcaccagcgagcagtcaacccaaagtctctccagcaaggctttattggtgttatcagggtggctgatggactgaatgctcaaaaggctttggattgtcat

SEQ ID NO: 17892 - DNA, 231 bp, Homo sapiens
  MAP TO AC012661.4; EXPRESSED IN ADULT LIVER, SIGNAL = 1.3; EXPRESSED IN FETAL LIVER, SIGNAL = 0.78; SWISSPROT HIT: P37821, EVALUE 2.70e+00; EST_HUMAN HIT: AW239351.1, EVALUE 2.00e-85; NT HIT: gi15313171, EVALUE 2.00e-85
atggggcctaaccccctggaccccactgatctgaacggggcgcatttcgacccggaagtttacctagacaagctgcatagagagtgccctctggcccagctgatggacagtgagacagacatggtgcggcagatccaggctctagacagcgacatgcagaccctggtctatgagaactacgacaagttcatcccagccacagaaattgacaaacagcataaaactgtatga

SEQ ID NO: 17893 - DNA, 289 bp, Homo sapiens
  MAP TO AL139152.1; EXPRESSED IN BONE MARROW, SIGNAL = 7.7; EXPRESSED IN FETAL LIVER, SIGNAL =   8; EST_HUMAN HIT: BI061616.1, EVALUE 0.00e+00; NT HIT: gi16159761, EVALUE 3.00e-90; SWISSPROT HIT: P54149, EVALUE 1.90e+00
ccataggtcctgcctgtggcaatgacgtctctcgggtcagtaagggccacttggaacaggaatatcacccctatctggaaggccaggtggaggcttatcaccttcatagtaaggtactcactgtccacgtcaagagccaagccaaggtactgttcctccaatgagtaaacagcacttctgtagggctggcctaagtcaggcagttcaagataacctgaaggagtcgaataacatctatccagtgagtcctgcaagacttcaggctctttctcagccagcagctccctgc

SEQ ID NO: 17894 - DNA, 179 bp, Homo sapiens
  MAP TO AL132765.16; EXPRESSED IN HEART, SIGNAL = 4.5; EXPRESSED IN PLACENTA, SIGNAL = 5.5; EXPRESSED IN LUNG, SIGNAL = 6.1; EXPRESSED IN FETAL LIVER, SIGNAL = 5.4; EXPRESSED IN ADULT LIVER, SIGNAL = 7.1; EXPRESSED IN BONE MARROW, SIGNAL = 4.6; SWISSPROT HIT: Q03427, EVALUE 2.90e-01; EST_HUMAN HIT: BG334202.1, EVALUE 3.00e-96; NT HIT: gi16195013, EVALUE 2.00e-96
ctggacgtcctgggcatcccgcgcctggcccgcctccagcagggcctcaatggaacggattctctctgtgagctgggagttctccgccctggcctcctggagctgcccgtggaggccactcagctcctcgcatttgctgcgcacctccgcctcggaggactgtaacttgctgtgcagct

SEQ ID NO: 17895 - DNA, 237 bp, Homo sapiens
  MAP TO AL132656.3; EXPRESSED IN PLACENTA, SIGNAL = 0.6; EXPRESSED IN LUNG, SIGNAL = 0.63; EXPRESSED IN BONE MARROW, SIGNAL = 0.42; EXPRESSED IN ADULT LIVER, SIGNAL = 0.6; EXPRESSED IN FETAL LIVER, SIGNAL = 0.58; SWISSPROT HIT: P52797, EVALUE 1.30e+00; NT HIT: gi14756633, EVALUE 7.00e-63; EST_HUMAN HIT: BF803836.1, EVALUE 1.00e-105
gcgagtttgccgtcttcctcctccactggctcttccctgagctcttccactaccgcaagctgggcgagcaggacagctgctacggggacggcggcaagcaggagctggacccgcagaggctgcagatcatctgcaacttcacggaggtctacttcccccacatgcaggaggaggaggcctggcggcaagcaggacctggacccgcagaggctgcagatcatctgcaacttcacggag

SEQ ID NO: 17896 - DNA, 197 bp, Homo sapiens
  MAP TO CHR22_121.0; EXPRESSED IN LUNG, SIGNAL = 0.88; EXPRESSED IN ADULT LIVER, SIGNAL = 0.86; EXPRESSED IN FETAL LIVER, SIGNAL = 0.8; EST_HUMAN HIT: BI772059.1, EVALUE 1.00e-105; SWISSPROT HIT: Q9Y3A4, EVALUE 7.00e-20; NT HIT: gi14779305, EVALUE 1.00e-107
gctccatcttgctctctcgatgctgccaggcgtagttgagcagctctttttggctgcgcttccgtctctccctctccagcacccgcaagctggctgcctcagtccgggggagcacaggccgccggccccggcgggtcaccttcacccagccctcctcgtcagggaccccctcctcctccttggccttagcttcttcc

SEQ ID NO: 17897 - DNA, 456 bp, Homo sapiens
  MAP TO AL138478.1; EXPRESSED IN FETAL LIVER, SIGNAL = 2.1; EXPRESSED IN HEART, SIGNAL = 1.7; EXPRESSED IN PLACENTA, SIGNAL = 2.4; EXPRESSED IN LUNG, SIGNAL = 2.9; EXPRESSED IN BONE MARROW, SIGNAL = 2.3; EST_HUMAN HIT: BF115938.1, EVALUE 0.00e+00; NT HIT: gi4885136, EVALUE 0.00e+00; SWISSPROT HIT: O00409, EVALUE 4.00e-59
gaatggcatcaccagctgccggatgcggactgagagtgagccatcttgtggctccccagtggtcagcggagaccccaaggaggatcacaactacagcagtgccaagtcctccaacgcccggagcacctcgcccaccagcgactccatctcctcctcctcctcctcagccgacgaccactatgagtttgccaccaaggggagccaggagggcagcgagggcagcgaggggagcttccggagccacgagagccccagcgacacggaagaggacgacaggaagcacagccagaaggagcccaaggattctctgggggacagcgggtacgcatcccagcacaagaagcgccagcacttcgccaaggccaggaaggtccccagcgacacactgcccctcaaaaagagacgcaccgaaaagccccccgagagcgatgatgaggagatgaaagaagcggcagg

SEQ ID NO: 17898 - DNA, 171 bp, Homo sapiens
  MAP TO AL137008.1; EXPRESSED IN FETAL LIVER, SIGNAL = 0.58; EXPRESSED IN PLACENTA, SIGNAL = 0.71; EXPRESSED IN LUNG, SIGNAL = 1.4; SWISSPROT HIT: O94833, EVALUE 9.00e-28; EST_HUMAN HIT: AV728502.1, EVALUE 1.00e-89; NT HIT: gi14759704, EVALUE 1.00e-91
tttcctttcattgagtttggtttccaccgattcccatttttctttcaagttatttatgtcttggtcaatatttgtctctgcagattttgggcatcttgcaagcatctgctggcctttctgcatcagactcttatatgtttcttctttagcttcaaaggcagcacagacttc

SEQ ID NO: 17899 - DNA, 129 bp, Homo sapiens
  MAP TO AC013613.3; EXPRESSED IN FETAL LIVER, SIGNAL = 0.47; EXPRESSED IN BONE MARROW, SIGNAL = 0.46; EXPRESSED IN PLACENTA, SIGNAL = 0.59; EXPRESSED IN LUNG, SIGNAL = 0.63; EXPRESSED IN ADULT LIVER, SIGNAL = 0.52; EST_HUMAN HIT: W52382.1, EVALUE 6.30e-01; NT HIT: AF128806.1, EVALUE 1.70e+00
ctgtgttcatctccaggactgtgttgcaataactggggtcttgaggttggatcctcctcaactgtctactaccagctgggaagcctttgatgatcactttaccaataaagatatcactttcctcatggg

SEQ ID NO: 17900 - DNA, 169 bp, Homo sapiens
  MAP TO AC020582.3; EXPRESSED IN PLACENTA, SIGNAL = 0.7; EXPRESSED IN FETAL LIVER, SIGNAL = 0.53; EXPRESSED IN LUNG, SIGNAL = 0.53; EXPRESSED IN ADULT LIVER, SIGNAL = 0.57; EST_HUMAN HIT: AI133355.1, EVALUE 2.20e-01
gaaagaagaaatgcaaatttaaagcccttaagagcttttttgttaagaagaaggaaaaagaagccgaagatacccaggaagaagaaatgctagaactgagcttgtccagcagcaacattaacatctcttctctgcagcccgttcgggaaaatcaaccaactaaggccag

SEQ ID NO: 17901 - DNA, 289 bp, Homo sapiens
  MAP TO AC021009.3; EXPRESSED IN BONE MARROW, SIGNAL = 0.54; EXPRESSED IN FETAL LIVER, SIGNAL = 0.46; EXPRESSED IN PLACENTA, SIGNAL = 0.49; EXPRESSED IN LUNG, SIGNAL = 0.54; EXPRESSED IN ADULT LIVER, SIGNAL = 0.6; NT HIT: AF201389.1, EVALUE 1.10e+00; EST_HUMAN HIT: BG014919.1, EVALUE 1.00e-105; SWISSPROT HIT: O60841, EVALUE 3.30e-02
ataaagtatcgccatccaaagacccaggcaagaaaaatgccaggcccagggaaaagctccggggggatggcgacatgatgataatcagcttccagaggatgttctcccagaaggacctggagatcgaggagcgccacaaggggcacaaggagaggatgaagcagatggagaagctgaggcaccagtccagagaccccaacctcaaggagagggcgaagccagcagacgacgggcggaagaagggtctggaaattcctgccaagaaacctccggggctggaccctccctt

SEQ ID NO: 17902 - DNA, 161 bp, Homo sapiens
  MAP TO CHR22_170.0; EXPRESSED IN BONE MARROW, SIGNAL = 0.97; EXPRESSED IN FETAL LIVER, SIGNAL = 1.3; EXPRESSED IN PLACENTA, SIGNAL = 1.3; EXPRESSED IN LUNG, SIGNAL = 0.97; EXPRESSED IN ADULT LIVER, SIGNAL = 0.94; SWISSPROT HIT: P02463, EVALUE 8.70e-01; NT HIT: gi14779730, EVALUE 5.50e-01
cagagcacggtggggcccgcgacaggagcctccaccacagatgcaaggacaatggcctgggtttccatggcttcaggaccagctgccctcgtccgaccaaggcggcaggaatctcccagctgcaggtcagcggcttccctggtccaaagactcatctctaa

SEQ ID NO: 17903 - DNA, 77 bp, Homo sapiens
  MAP TO AC011580.4; EXPRESSED IN FETAL LIVER, SIGNAL = 0.41
ttgtctggataactacaattttcaagataaaattgccagagaatttgtttctgacaactgttataaatcttttgaaa

SEQ ID NO: 17904 - DNA, 161 bp, Homo sapiens
  MAP TO AL159176.2; EXPRESSED IN LUNG, SIGNAL = 6.8; EXPRESSED IN FETAL LIVER, SIGNAL = 4.5; EXPRESSED IN BONE MARROW, SIGNAL = 5.4; EST_HUMAN HIT: BG687097.1, EVALUE 4.00e-83; SWISSPROT HIT: P72079, EVALUE 5.80e+00; NT HIT: gi14750330, EVALUE 6.00e-50
gggtccatgatctcactggcttcaggagtgaagctgcagaccttcatggtgagtgttacagctcataaaggccatgtggacccaaagagtgaacagcagcaagatttattgcaaagagcaaaagaacaaagcttccatggcgtggaaggggacctgagcag

SEQ ID NO: 17905 - DNA, 243 bp, Homo sapiens
  MAP TO AL133266.3; EXPRESSED IN BONE MARROW, SIGNAL = 0.6; EXPRESSED IN ADULT LIVER, SIGNAL = 1.1; EXPRESSED IN FETAL LIVER, SIGNAL = 0.67; EXPRESSED IN PLACENTA, SIGNAL = 1.1; EXPRESSED IN LUNG, SIGNAL =   1; NT HIT: AF033120.1, EVALUE 0.00e+00; EST_HUMAN HIT: BF966247.1, EVALUE 0.00e+00; SWISSPROT HIT: Q9Y6P5, EVALUE 5.00e-45
agaaacattttctgctgagttgaccggcatctcatccacactgtgattgccatttgtaatgtcacagatgcagtagttgctaacagaaggaggtctgaatgtgtggccaccatcacaatgaatttctggactgattccacagccgaatgtgaatgaggcaagagaatgatagtgtgtgagtaaaactactgcatgtaccaattccgcaagggaccagctgtgctcttcagcttttaaaagtcc

SEQ ID NO: 17906 - DNA, 236 bp, Homo sapiens
  MAP TO AC011225.5; EXPRESSED IN FETAL LIVER, SIGNAL = 1.9; EST_HUMAN HIT: AL541354.1, EVALUE 9.00e-85; SWISSPROT HIT: P32790, EVALUE 1.10e-01; NT HIT: L78810.1, EVALUE 4.00e-86
cggggctgcaggtggagctgcctgccagtcccgcgccgtgcactcatactcctcagcccttgggtggtcgatgggactgggcgccatggagcagggggtggtgctagtcggggaggctccggccgcacaggagcccatggagtgggtggaaggctcaggcatggcgggctgcaggtcccgagccctgccctgcgggaaggcagctaaggcccggcgagaaatcgagcacagcgccg

SEQ ID NO: 17907 - DNA, 179 bp, Homo sapiens
  MAP TO AC021619.3; EXPRESSED IN FETAL LIVER, SIGNAL = 0.41; EXPRESSED IN LUNG, SIGNAL = 0.55; EXPRESSED IN ADULT LIVER, SIGNAL = 0.58; EST_HUMAN HIT: BG500600.1, EVALUE 3.00e-96; SWISSPROT HIT: P34576, EVALUE 5.70e+00; NT HIT: gi16157562, EVALUE 2.00e-96
cccaactttaggaaagtccatgtagcctgcaggaacatgctgatggaatgtaccagaaggagttacaattcctgtactatctcgctccattgcttgatgttgtgaaaatactcctgggtcagacatcggtctgtggatcataggatttcccatcccagggttacaccagtctactttgt

SEQ ID NO: 17908 - DNA, 224 bp, Homo sapiens
  MAP TO AC011676.4; EXPRESSED IN FETAL LIVER, SIGNAL = 1.4; EXPRESSED IN HEART, SIGNAL = 1.6; EXPRESSED IN BONE MARROW, SIGNAL = 1.6; EXPRESSED IN ADULT LIVER, SIGNAL = 1.4; EST_HUMAN HIT: AW504680.1, EVALUE 1.00e-120; SWISSPROT HIT: O02626, EVALUE 8.00e-04; NT HIT: gi14747475, EVALUE 1.00e-121
ctaaccttgctgacttcttcgaagtggtcgagatggcagcccatcaggaaggacgtgggggccatgacgaaatccagcatctggtccgacaggatgggcacgaaggggtgctgccactgcagcggatacaggtaggccatgaagcactcagtgaccagcgtcagcagagcccagtccgaggagaagaagacgatccgctgttccgtcaggatgcatgtcaggat

SEQ ID NO: 17909 - DNA, 97 bp, Homo sapiens
  MAP TO AL136103.2; EXPRESSED IN BONE MARROW, SIGNAL = 0.68; EXPRESSED IN PLACENTA, SIGNAL = 0.68; EXPRESSED IN LUNG, SIGNAL = 0.64; EXPRESSED IN ADULT LIVER, SIGNAL = 0.82; EXPRESSED IN FETAL LIVER, SIGNAL = 0.64; EST_HUMAN HIT: BG714339.1, EVALUE 4.50e-01; NT HIT: gi16163726, EVALUE 3.00e-01
atggaagatggcaaaaagagaatcatacctagctgtgctcaatacctgcccttcattctttccatcacatccaccaaacccaacaaggttactccta

SEQ ID NO: 17910 - DNA, 96 bp, Homo sapiens
  MAP TO AL133268.4; EXPRESSED IN BONE MARROW, SIGNAL = 0.8; EXPRESSED IN LUNG, SIGNAL = 1.1; EXPRESSED IN ADULT LIVER, SIGNAL = 0.85; EXPRESSED IN FETAL LIVER, SIGNAL = 0.77; NT HIT: AB007609.1, EVALUE 1.20e+00; SWISSPROT HIT: Q10269, EVALUE 2.70e+00
gtatccccttcatcttctggttgaaaagccagggcttcgatttccctgtactgctgtgcatgttctggaaactgcatatgcttgtggggcaaagtg

SEQ ID NO: 17911 - DNA, 195 bp, Homo sapiens
  MAP TO CHR22_99.0; EXPRESSED IN FETAL LIVER, SIGNAL = 1.3; EXPRESSED IN LUNG, SIGNAL = 2.2; EXPRESSED IN ADULT LIVER, SIGNAL = 2.3; SWISSPROT HIT: P21414, EVALUE 8.00e-06; EST_HUMAN HIT: BI767970.1, EVALUE 2.00e-79; NT HIT: AL163246.2, EVALUE 3.00e-77
ctctcttcgctttcacttggactgaccctgacacccatcaggctcagcaaattacgtgggctgtactgccacaaggcttcacagacagcccccattacttcaatcaagcccaaatttcttcctcatctgttacctatctcggcataattctcatgaaaacccacgtgctctccctgctgatcgtgtctggctaat

SEQ ID NO: 17912 - DNA, 204 bp, Homo sapiens
  MAP TO CHR22_131.0; EXPRESSED IN ADULT LIVER, SIGNAL = 0.61; EXPRESSED IN PLACENTA, SIGNAL = 0.48; EXPRESSED IN LUNG, SIGNAL = 0.58; EXPRESSED IN FETAL LIVER, SIGNAL = 0.55; EXPRESSED IN BONE MARROW, SIGNAL = 0.5; NT HIT: gi14777617, EVALUE 1.00e-111; SWISSPROT HIT: P54198, EVALUE 6.40e-01
caaagtttagagtctgagtttttcgtataataatgtcccacatccacacatcgggcctacagatgctctcccttgaatcgactggaaacatgacaccggttccatgctctggaactgtcacctgtgatgtgctgggctgtgtcccaagcacaggaatcccagcagtttcagctcgatgcagaaccaccatgctccagacacagg

SEQ ID NO: 17913 - DNA, 211 bp, Homo sapiens
  MAP TO AC023123.3; EXPRESSED IN FETAL LIVER, SIGNAL = 0.42; EXPRESSED IN PLACENTA, SIGNAL = 0.37; EXPRESSED IN ADULT LIVER, SIGNAL = 0.63; SWISSPROT HIT: Q31673, EVALUE 3.70e-01; NT HIT: gi14770728, EVALUE 1.00e-115; EST_HUMAN HIT: BG283912.1, EVALUE 1.00e-115
cacagggcatgaagtgctctcctttgtttcgtcctggggctttttatttaactcttgatcacagttattgcatttatcttcttcaggattgaagccattttgaagaatttcagtttgctcttccattttctcatcatgtacagaatttatactatagtcaaaaactgactccatattaacatctgtttcttgaagactgtcatcaccaatg

SEQ ID NO: 17914 - DNA, 157 bp, Homo sapiens
  MAP TO AL034549.16; EXPRESSED IN BONE MARROW, SIGNAL = 3.2; EXPRESSED IN FETAL LIVER, SIGNAL = 1.8; EXPRESSED IN LUNG, SIGNAL =   3; EXPRESSED IN ADULT LIVER, SIGNAL = 1.4; NT HIT: gi16165167, EVALUE 4.00e-57; EST_HUMAN HIT: BE732701.1, EVALUE 6.00e-57; SWISSPROT HIT: P21107, EVALUE 4.00e-20
tgataaacgcaaggaggcagagacccgggctgagtttgccgagagatcggtagccaagctggaagagacaattgatgacttggaagataaactgaaatgcaccaaggaggagcacctctgtacacaaaggatgccagaccagacctgcttaactgaa

SEQ ID NO: 17915 - DNA, 130 bp, Homo sapiens
  MAP TO AL136978.3; EXPRESSED IN FETAL LIVER, SIGNAL = 0.52; EXPRESSED IN BONE MARROW, SIGNAL = 0.49; EXPRESSED IN PLACENTA, SIGNAL = 0.63; EXPRESSED IN ADULT LIVER, SIGNAL = 0.56; EXPRESSED IN LUNG, SIGNAL = 0.54; NT HIT: AJ131016.1, EVALUE 4.30e-01; EST_HUMAN HIT: BG326778.1, EVALUE 1.60e-01
catcgatgtccactctgctgacaaccagggagctacttgacattgcaggatttggaaaactcctagcagtggaaactcttcctgtgtgaacaaatgtgttttctctttggatatcaatcttgcctctcat

SEQ ID NO: 17916 - DNA, 140 bp, Homo sapiens
  MAP TO AL139100.1; EXPRESSED IN FETAL LIVER, SIGNAL = 0.72; EXPRESSED IN PLACENTA, SIGNAL = 0.69; EXPRESSED IN BONE MARROW, SIGNAL = 0.67; EXPRESSED IN LUNG, SIGNAL = 0.73; NT HIT: gi15300131, EVALUE 4.70e-01; SWISSPROT HIT: P40395, EVALUE 3.40e+00; EST_HUMAN HIT: BI461302.1, EVALUE 4.00e-73
ccggatggaggccctgttgcagtagacccgagtgatggctaaccaggtgggcagctccagtacattctgtagaacctcttcatccagctccaggttggtcagctgaccctcccctttcagggtgctcaggttgattttgt

SEQ ID NO: 17917 - DNA, 234 bp, Homo sapiens
  MAP TO AL133330.5; EXPRESSED IN PLACENTA, SIGNAL = 0.76; EXPRESSED IN ADULT LIVER, SIGNAL = 0.83; EXPRESSED IN FETAL LIVER, SIGNAL = 0.54; EXPRESSED IN BONE MARROW, SIGNAL = 0.61; EST_HUMAN HIT: BI824607.1, EVALUE 1.00e-99; NT HIT: gi15306305, EVALUE 1.00e-129; SWISSPROT HIT: P43004, EVALUE 2.00e-28
ctggaagcggtgcccagggcagtgatccaagcttggaaaatgccagcaaaaaaggagaaggggtttttcctggtcactacaaagtaaatcaaggggagaaagatgcccccgtggatgatgaggcctatgatcactgttaccatgtacatccccagttgcctagcaaccacttctaagtccttgattgcaatgatctttccacagatcaggcaggcgatacccaggggagagtac

SEQ ID NO: 17918 - DNA, 202 bp, Homo sapiens
  MAP TO CHR22_166.0; EXPRESSED IN FETAL LIVER, SIGNAL = 0.53; EXPRESSED IN BONE MARROW, SIGNAL = 1.3; EXPRESSED IN PLACENTA, SIGNAL = 0.71; EXPRESSED IN LUNG, SIGNAL = 0.58; NT HIT: U50721.1, EVALUE 2.00e-56; SWISSPROT HIT: P97369, EVALUE 7.00e-11; EST_HUMAN HIT: BI906110.1, EVALUE 2.00e-42
gagacgaatgttggcttcacaacattagtttgctttgcactctacctcatacccggtgggcccacaaaacacatcagggtgataagcaggatctcttttcccctccttcgcacagtgactttgaacagcttccggatgatgttgccatctcggccaacattgctgacatcgaggagaagagaggcttcaccagccactttgt

SEQ ID NO: 17919 - DNA, 448 bp, Homo sapiens
  MAP TO CHR22_175.0; EXPRESSED IN BONE MARROW, SIGNAL = 0.52; EXPRESSED IN PLACENTA, SIGNAL = 0.63; EXPRESSED IN FETAL LIVER, SIGNAL = 0.62; EXPRESSED IN ADULT LIVER, SIGNAL = 0.89; EXPRESSED IN LUNG, SIGNAL = 0.61; SWISSPROT HIT: Q07869, EVALUE 5.00e-83; EST_HUMAN HIT: BE168040.1, EVALUE 0.00e+00; NT HIT: S74349.1, EVALUE 0.00e+00
ccttttgtcatacatgatatggagacactgtgtatggctgagaagacgctggtggccaagctggtggccaatggcatccagaacaaggaggcggaggtccgcatctttcactgctgccagtgcacgtcagtggagaccgtcacggagctcacggaattcgccaaggccatcccaggcttcgcaaacttggacctgaacgatcaagtgacattgctaaaatacggagtttatgaggccatattcgccatgctgtcttctgtgatgaacaaagacgggatgctggtagcgtatggaaatgggtttataactcgtgaattcctaaaaagcctaaggaaaccgttctgtgatatcatggaacccaagtttgattttgccatgaagttcaatgcactggaactggatgacagtgatatctccctttttgtggctgctatcatttgctgtggag

SEQ ID NO: 17920 - DNA, 172 bp, Homo sapiens
  MAP TO CHR22_176.0; EXPRESSED IN BONE MARROW, SIGNAL = 0.94; EXPRESSED IN PLACENTA, SIGNAL = 1.1; EXPRESSED IN ADULT LIVER, SIGNAL = 1.3; EXPRESSED IN LUNG, SIGNAL = 1.1; EXPRESSED IN FETAL LIVER, SIGNAL = 0.98; SWISSPROT HIT: P04275, EVALUE 1.50e+00; EST_HUMAN HIT: BF037201.1, EVALUE 4.00e-92; NT HIT: gi14777945, EVALUE 3.00e-92
tcagagcaagttcaccccgtgcttcagcagcttctgctttgctttgccggagaggctgaaggcgccatcctgagggtttgggaagccggagctccgtgctgcaggtgccagctgctggaaatatgtctcctggatggggttgcaacaggcgtacacagccgtggaggcattt

SEQ ID NO: 17921 - DNA, 355 bp, Homo sapiens
  MAP TO AL136317.2; EXPRESSED IN FETAL LIVER, SIGNAL = 0.52; NT HIT: AL163204.2, EVALUE 1.00e-100; SWISSPROT HIT: Q99439, EVALUE 8.00e-51; EST_HUMAN HIT: BG283519.1, EVALUE 1.00e-101
ctggctggcgcacttgtttgtacccatctggaggctgatggtcgaattgtccatggggggcaggatgcggttcttggggtcgtagagatgcctcctcgtgccatatgcggtcatgcctgactggctggcacatttgttggtaatctgcagccggatgacgcactggctggccttcatggtggtgtcgtcgaagttctgcttctctgagtacttgtcacggatgtccaccccgctccgcagccccttagtcttggccttccctgccagggcgagaagagacacccgcacctgcatattgttcccactctcaaacaggtcgttggcctcaaataggtccacgggatcatgccgtagc

SEQ ID NO: 17922 - DNA, 158 bp, Homo sapiens
  MAP TO AC013341.3; EXPRESSED IN FETAL LIVER, SIGNAL = 0.59; EXPRESSED IN PLACENTA, SIGNAL = 0.47; EXPRESSED IN LUNG, SIGNAL = 0.45; EXPRESSED IN BONE MARROW, SIGNAL = 0.52; NT HIT: AJ243213.1, EVALUE 6.00e-04; SWISSPROT HIT: Q99996, EVALUE 2.60e+00; EST_HUMAN HIT: BE156679.1, EVALUE 9.00e-10
attgattttttctttagctatgtcctgtttgctggtgagctctgtgaaggcattctttatttctgttgctatattttttattactatcatttccttttggttcttccttagaatttccatctctttgcttacaataaccatctgctcttccttggtat

SEQ ID NO: 17923 - DNA, 447 bp, Homo sapiens
  MAP TO AC013614.4; EXPRESSED IN ADULT LIVER, SIGNAL = 0.46; EXPRESSED IN FETAL LIVER, SIGNAL = 0.41; SWISSPROT HIT: P29128, EVALUE 1.50e-01; EST_HUMAN HIT: AI673723.1, EVALUE 9.70e+00; NT HIT: gi11467282, EVALUE 6.60e+00
gcagtgaagggagggcctcgctgtgctgcaccccatgcacactcatccaacactgcacctgcagccacatttgtgcccacagcagagggaagagcaggaagcttcaaggcatcattgccttcctgtgccctgaatgcaggctttggactcagaagaaaagcatgggctccttccctaaagggcgagatgacatccccaaagagagaagggcagattcctggaattccagtcagtgaggctttggttttagccagactccctccgacacaaagagcaaaattcaggactgccaataagttcctaagaaccactggcccatgggatggactcttcaggactcccagatcaaaggattcagagggaaaggtcacctctgtgggatcctctttctgcacaagaagctgtccttctattctccagccagaggttggcagaacctttacggca

SEQ ID NO: 17924 - DNA, 137 bp, Homo sapiens
  MAP TO AC013613.3; EXPRESSED IN PLACENTA, SIGNAL = 0.44; EXPRESSED IN ADULT LIVER, SIGNAL = 0.45; EXPRESSED IN FETAL LIVER, SIGNAL = 0.42; SWISSPROT HIT: P11369, EVALUE 2.60e+00; EST_HUMAN HIT: AA576786.1, EVALUE 5.00e-05; NT HIT: AF253322.1, EVALUE 2.00e-03
cctttagaattgttgggattacagatgtgagccactgtgctagtttagattttaaattaaaagtagaaattttcagtgacaacgaagtatatgaaaaggtgctcaacattattgagcatcagaaagatgcaaattaa

SEQ ID NO: 17925 - DNA, 133 bp, Homo sapiens
  MAP TO AC024066.3; EXPRESSED IN FETAL LIVER, SIGNAL = 0.42; EXPRESSED IN PLACENTA, SIGNAL = 0.39; EXPRESSED IN ADULT LIVER, SIGNAL = 0.45; NT HIT: AL163201.2, EVALUE 5.00e-04; EST_HUMAN HIT: R16615.1, EVALUE 1.70e-01
tggtgttgttaaggacacccagatcctggagaagaaagcatgggaaaacagtccccgtgatgatgtctggctgataaaagtgagtgaagtcccactgtgtgagagaagcagaaagcgtccctctgtgactcat

SEQ ID NO: 17926 - DNA, 119 bp, Homo sapiens
  MAP TO AL137784.2; EXPRESSED IN PLACENTA, SIGNAL = 1.1; EXPRESSED IN FETAL LIVER, SIGNAL = 0.89; EXPRESSED IN BONE MARROW, SIGNAL = 0.92; EST_HUMAN HIT: BG200638.1, EVALUE 1.00e-60; SWISSPROT HIT: Q62447, EVALUE 3.00e-17; NT HIT: gi7382485, EVALUE 8.00e-61
ctgtttggaggtggttttggttttggcatcttactaagaatggttgccatctcttttctctcatcgaaattcttccactgctcatatagttttaaaataaccctgattatttccaaaat

SEQ ID NO: 17927 - DNA, 113 bp, Homo sapiens
  MAP TO AL137222.3; EXPRESSED IN PLACENTA, SIGNAL = 0.56; EXPRESSED IN ADULT LIVER, SIGNAL = 0.75; EXPRESSED IN FETAL LIVER, SIGNAL = 0.52; NT HIT: gi7706526, EVALUE 3.00e-57; EST_HUMAN HIT: AW964474.1, EVALUE 4.00e-57
attcttacggagccacggtgattttgacaacttcatgaaggtcaaatgaggtttaaaacttctgctctctcctaccaggatgcctttttcttgaaatgtcctatttgcagtct

SEQ ID NO: 17928 - DNA, 171 bp, Homo sapiens
  MAP TO AC011165.3; EXPRESSED IN BONE MARROW, SIGNAL = 1.3; EXPRESSED IN HEART, SIGNAL = 1.2; EXPRESSED IN FETAL LIVER, SIGNAL = 1.3; NT HIT: AL163207.2, EVALUE 3.80e-02; EST_HUMAN HIT: BF816305.1, EVALUE 4.00e-09; SWISSPROT HIT: P47638, EVALUE 9.80e+00
caatcgcatcattccaacctctgcttctgtcatcacctctccttccctgactctgaccttcctgcctccttcttctgaggacccctgggatttcattcagcccacacacataattcaagctaatcttatctcagcattcttaactcacctctgcaaagttctctttgccag

SEQ ID NO: 17929 - DNA, 135 bp, Homo sapiens
  MAP TO AC011950.4; EXPRESSED IN FETAL LIVER, SIGNAL = 0.54; EXPRESSED IN BONE MARROW, SIGNAL = 0.49; EXPRESSED IN PLACENTA, SIGNAL = 0.46; EXPRESSED IN ADULT LIVER, SIGNAL = 0.55; SWISSPROT HIT: Q94225, EVALUE 2.60e+00; NT HIT: AF106072.1, EVALUE 2.90e-02; EST_HUMAN HIT: AW389604.1, EVALUE 6.70e-01
aacccttatgttggcattcaggacaataaacacagtattaaaaacgatgtctctcttatttttcatagctctgatcattgcctgatggtactgggtatctgtgtcactctgtggcagtccatgagtacagagcca

SEQ ID NO: 17930 - DNA, 251 bp, Homo sapiens
  MAP TO AC018691.5; EXPRESSED IN FETAL LIVER, SIGNAL = 0.39; EST_HUMAN HIT: BI831861.1, EVALUE 0.00e+00; NT HIT: gi14778790, EVALUE 2.30e-01; SWISSPROT HIT: P09836, EVALUE 5.50e+00
cgtatgatattgaactcggttatgtgagccacctgctcctggagaaccattgttagagcctctcggcacagatcaagctccccctccagaatgccgccaaaatccagcactatggtgacgcactgttccaagatgacaccaaaaatctgccggctcttgctggtgagccagtccattcgctgcttgtagctctccacagcttgtgttaaatgttccacaaactgataaatcagttctgatttagctgtcag

SEQ ID NO: 17931 - DNA, 345 bp, Homo sapiens
  MAP TO AC021975.3; EXPRESSED IN FETAL LIVER, SIGNAL =  13; EXPRESSED IN BONE MARROW, SIGNAL = 9.1; NT HIT: gi14781853, EVALUE 1.00e-113; SWISSPROT HIT: P04374, EVALUE 9.00e-18; EST_HUMAN HIT: BE790654.1, EVALUE 1.00e-118
tttggcatggaagggaataaggaaaacatggaactggaaggaaataaggaaaacatggaacccaaagggaatgagagcacaaagattatagaatactgcaagcaaatggggtggaggggtgctctcctgaactacagaaggaatggtctggtggttaaggtaaaacacaagtccaacttactggaattgtccacagtcagcaatggtgatattcttgctggtcttgacattcctggacccaaagcactccatggcgtccacaatattcatgccttctttcaccttgccaagaccacatgcttgccatccaaccactcagtcttggcagtgcagatgaaaaactga

SEQ ID NO: 17932 - DNA, 210 bp, Homo sapiens
  MAP TO AL138832.2; EXPRESSED IN BONE MARROW, SIGNAL = 0.72; EXPRESSED IN PLACENTA, SIGNAL = 0.72; EXPRESSED IN ADULT LIVER, SIGNAL = 0.82; EXPRESSED IN FETAL LIVER, SIGNAL = 0.6; EST_HUMAN HIT: BF905660.1, EVALUE 1.00e-112; SWISSPROT HIT: Q9XD50, EVALUE 1.90e+00
ctggaaatttagtatttgctgaagtctttctttcatctgatgacatcgttgattcactactgagtctagcaaggataacctgcccaaaagacaacccaaagtatcttcaataacatctcgattatcaccattctctggaaaagcttgggaaaacaagtttttgttcttatccatttcttcagacatttccttaatgtctttggcaagaat

SEQ ID NO: 17933 - DNA, 95 bp, Homo sapiens
  MAP TO AC021009.3; EXPRESSED IN FETAL LIVER, SIGNAL = 0.43; EXPRESSED IN ADULT LIVER, SIGNAL = 0.46; NT HIT: gi9630966, EVALUE 3.00e-01
atgtatattgtacaagtgtacctggtcaagttcattagcaggtttataaggaaatgtcctggtcactctattccacctcctatagcagagaaggg

SEQ ID NO: 17934 - DNA, 295 bp, Homo sapiens
  MAP TO AL133406.3; EXPRESSED IN FETAL LIVER, SIGNAL = 0.75; EXPRESSED IN BONE MARROW, SIGNAL = 0.83; EST_HUMAN HIT: BF526845.1, EVALUE 0.00e+00; SWISSPROT HIT: P48147, EVALUE 2.00e-52; NT HIT: gi14759496, EVALUE 0.00e+00
ttatggaatccagtcgacgttcaggcaccgcgcgatgaacgcaaacatgtctgagacttcctctatcactttggctgtgggcttccccgccccgtggcccgccttggtgtccacgtggataagcagggggttgctttgcttcctgctgcggcccacgatgtactgaagggtggcaatgaacttcagggagtgaagcgggaccacgcggtcatcatggtcagcagtgaggagcagcatggacgggtactggatgtcatctgcttctggtaacttcacattatgcaatggagagtat

SEQ ID NO: 17935 - DNA, 278 bp, Homo sapiens
  MAP TO AL096771.11; EXPRESSED IN PLACENTA, SIGNAL = 0.59; EXPRESSED IN BONE MARROW, SIGNAL = 0.46; EXPRESSED IN LUNG, SIGNAL = 0.59; EXPRESSED IN FETAL LIVER, SIGNAL = 0.6; EST_HUMAN HIT: BG979833.1, EVALUE 3.00e-88; SWISSPROT HIT: Q99715, EVALUE 1.00e-48; NT HIT: gi14757166, EVALUE 0.00e+00
aacgtggttctcctcaagatttagttactaaagacatcactgacacatcaattggggcttattggacatctgctccaggaatggttcgcggttacagggtctcatggaaatcactttatgatgatgttgacactggagagaaaaatctgcctgaagatgcaattcatacgatgatagaaaatctgcagccagagaccaaatacagaatttcagtatttgccacttacagcagtggagaaggagaacctttgactggagatgccacaactgaatgtagg

SEQ ID NO: 17936 - DNA, 183 bp, Homo sapiens
  MAP TO CHR22_168.0; EXPRESSED IN FETAL LIVER, SIGNAL = 0.79; EXPRESSED IN BONE MARROW, SIGNAL = 0.75; EXPRESSED IN PLACENTA, SIGNAL = 0.65; EST_HUMAN HIT: BF434653.1, EVALUE 5.00e-98; SWISSPROT HIT: P46196, EVALUE 1.00e-29; NT HIT: gi16167524, EVALUE 3.00e-98
tctgcttatgataatgtcaacaaagttcgagtagctatcaagaaaatcagcccctttgagcaccagacctactgccagagaaccctgagggagataaaaatcttactgcgcttcagacatgagaacatcattggaatcaatgacattattcgagcaccaaccatcgagcaaatgaaagatgtg

SEQ ID NO: 17937 - DNA, 119 bp, Homo sapiens
  MAP TO CHR22_49.0; EXPRESSED IN LUNG, SIGNAL = 0.59; EXPRESSED IN FETAL LIVER, SIGNAL = 0.5; EXPRESSED IN PLACENTA, SIGNAL = 0.66; EXPRESSED IN ADULT LIVER, SIGNAL = 0.7; NT HIT: gi16164062, EVALUE 1.50e+00; SWISSPROT HIT: O42661, EVALUE 2.00e+00; EST_HUMAN HIT: BG741722.1, EVALUE 1.00e-42
acgtactgtgtaccagacgctgtgccaagtgaccaacagacattaccgaattcatctttgccgcaacccaacaagggaactgagggtcagagaaggggtccagccaggggccgccaagg

SEQ ID NO: 17938 - DNA, 188 bp, Homo sapiens
  MAP TO AL136379.2; EXPRESSED IN FETAL LIVER, SIGNAL = 1.8; EXPRESSED IN BONE MARROW, SIGNAL = 1.4; EXPRESSED IN PLACENTA, SIGNAL = 1.7; EXPRESSED IN LUNG, SIGNAL = 5.4; EXPRESSED IN ADULT LIVER, SIGNAL = 4.9; NT HIT: M84332.1, EVALUE 1.00e-102; SWISSPROT HIT: P51643, EVALUE 3.00e-16; EST_HUMAN HIT: BI521394.1, EVALUE 1.00e-101
gcctgatcttcgtggtggacagcaatgacagagagcgtgtgaacgaggcccgtgaggagctcatgaggatgctggccgaggacgagctccgggatgctgtcctcctggtgttcgccaacaagcaggtaggcgcccgggccagcctggggaatgtgaggagccagtgtgggttccgcctggtggtaggg

SEQ ID NO: 17939 - DNA, 286 bp, Homo sapiens
  MAP TO AC021685.3; EXPRESSED IN FETAL LIVER, SIGNAL = 1.6; EXPRESSED IN BONE MARROW, SIGNAL = 3.1; EXPRESSED IN ADULT LIVER, SIGNAL = 0.85; NT HIT: gi14739982, EVALUE 0.00e+00; EST_HUMAN HIT: AA314804.1, EVALUE 0.00e+00; SWISSPROT HIT: P52881, EVALUE 4.20e+00
cttctgtctctgtggctcctctctatggccatcagggtacacatgcttataaaaaccgttccctccaaacgggcagctcccatgtccttcatcaaaatacctgcacgccttgttgctcattgcctccttgtatttcagaatgagtttctgcttctcttctttctcctccacacagtactcacttggaacgacaaagttagatgtgatccgacattctgggcaggactttatgatcttgctctcaaactgcttagcactcctccacttgcgaatgcacttaagacag

SEQ ID NO: 17940 - DNA, 376 bp, Homo sapiens
  MAP TO AC012360.2; EXPRESSED IN FETAL LIVER, SIGNAL = 0.65; EXPRESSED IN PLACENTA, SIGNAL = 0.89; EXPRESSED IN BONE MARROW, SIGNAL = 0.54; NT HIT: gi13637102, EVALUE 0.00e+00; EST_HUMAN HIT: BF970054.1, EVALUE 0.00e+00; SWISSPROT HIT: Q24432, EVALUE 5.90e-01
gagtagcactgtagatgggttaaggaaaagacccctcatcgtatttgatggaagttcaacaagtacaagcataaaagtgaaaaagacagagaatggagataatgatcgactgaagcctcccccgcaggcaagctttaccagtaatgcctttagaaaattatcaaattcctcttcgagtgtttcacccctaattttgtcttccaatttgcctgtgaacaataaaacggaacacaataataatgacgctaaacagaaccatgacttaacgcataggaaaagtccttcaggccctgtgaagtcgccaccattgtcccctgttggaactactccagtgaagttaaagagagctgctcctaaagaagaggcagaggccatg

SEQ ID NO: 17941 - DNA, 184 bp, Homo sapiens
  MAP TO AC020550.2; EXPRESSED IN FETAL LIVER, SIGNAL = 0.5; SWISSPROT HIT: Q14699, EVALUE 9.80e-02; NT HIT: Z21610.1, EVALUE 2.50e+00; EST_HUMAN HIT: BI823032.1, EVALUE 1.00e-92
cttcatcaaacccagaagtcatcaagataaattcaattctggatatagtaacaaaagtggaaaactattatcttaaaggatatattgtcggggctattcatcctgttatacaacctgtggggcagcgaaaacacctacctgcaagttacctatacagagtggtgctattgcgcttgaaattaag

SEQ ID NO: 17942 - DNA, 134 bp, Homo sapiens
  MAP TO CHR21_44.0; EXPRESSED IN LUNG, SIGNAL = 0.48; EXPRESSED IN FETAL LIVER, SIGNAL = 0.41; NT HIT: AF218899.1, EVALUE 1.00e-29; EST_HUMAN HIT: AI765941.1, EVALUE 2.00e-29; SWISSPROT HIT: Q99743, EVALUE 2.00e+00
ttttagatcatgaaaagagagttcgtgatcatgaaaatataaatgggttaacccatttatacctagtgttccattattggaacactaagcctgtgggagttatttatatcctactgctcaaggtcatcaccaag

SEQ ID NO: 17943 - DNA, 167 bp, Homo sapiens
  MAP TO CHR21_53.0; EXPRESSED IN FETAL LIVER, SIGNAL = 0.45; NT HIT: D50926.1, EVALUE 3.00e-89; EST_HUMAN HIT: H79433.1, EVALUE 3.00e-87; SWISSPROT HIT: Q14149, EVALUE 2.00e-26
attaatgctgaactgttgtttcggccaactgctctttcaactccaagcttttcttctcctaaggaaagtgttccaagaagacatctttcagaaggaacaaattcttatgcgacaagacttctaaataatcatcaagttccacctcagtctgaacctgagagcaacag

SEQ ID NO: 17944 - DNA, 106 bp, Homo sapiens
  MAP TO AC021619.3; EXPRESSED IN FETAL LIVER, SIGNAL = 0.4; EXPRESSED IN PLACENTA, SIGNAL = 0.49; NT HIT: AJ312685.1, EVALUE 8.60e-02; EST_HUMAN HIT: AI478415.1, EVALUE 1.30e-01
gagagttcagccttggactcagttacccctgggcactttcttcactatgatgtcacagctgttagggaagttcctaataccctgcttgctgttgtccttgctcctg

SEQ ID NO: 17945 - DNA, 151 bp, Homo sapiens
  MAP TO AL137843.1; EXPRESSED IN FETAL LIVER, SIGNAL = 3.5; EXPRESSED IN ADULT LIVER, SIGNAL = 8.2; SWISSPROT HIT: P54929, EVALUE 8.80e-01; NT HIT: U60822.1, EVALUE 7.00e-31; EST_HUMAN HIT: AU122272.1, EVALUE 3.00e-28
ctcttgctttctgtgcacctgcaggctcagcaccacatggaagccatcaaggcttggggcttgcaccctctgaagcaatgatccaagctgtaccttggccccttttagccatggctggagctggagttgctgggacacaggatgccacgtc

SEQ ID NO: 17946 - DNA, 289 bp, Homo sapiens
  MAP TO AL137798.1; EXPRESSED IN LUNG, SIGNAL = 3.3; EXPRESSED IN ADULT LIVER, SIGNAL =   5; EXPRESSED IN FETAL LIVER, SIGNAL = 1.2; SWISSPROT HIT: P13654, EVALUE 4.30e-02; NT HIT: AB051480.1, EVALUE 1.00e-117; EST_HUMAN HIT: BF895752.1, EVALUE 1.00e-102
gcaatataaagtcctggttcactctcaggaacgagagctgacccagttaagggagaagttacgggaagggagagatgcctcccgctcattgaatcagcatctccaggccctcctcactccggataagccagacaagtcccaggggcaggacctccaagaacagctggctgaggggtgtagactggcacagcaacttttccagaagctcagcccaggtaaggtggccataggccctgatgacccaaaaccccaggcttatgagaggctccagacctccatactttcacaa

SEQ ID NO: 17947 - DNA, 78 bp, Homo sapiens
  MAP TO AL121836.9; EXPRESSED IN BONE MARROW, SIGNAL = 0.47; EXPRESSED IN FETAL LIVER, SIGNAL = 0.46; EST_HUMAN HIT: T98426.1, EVALUE 8.60e-02; NT HIT: AF334181.1, EVALUE 3.70e+00
gttgatacgctcataatgatgtacaaaactcactgccagtgtatcctggacaatgcaattaatggaaactttgaagag

SEQ ID NO: 17948 - DNA, 329 bp, Homo sapiens
  MAP TO CHR21_52.0; EXPRESSED IN BONE MARROW, SIGNAL =  12; EXPRESSED IN LUNG, SIGNAL =  16; EXPRESSED IN FETAL LIVER, SIGNAL = 9.7; EST_HUMAN HIT: BG685199.1, EVALUE 0.00e+00; NT HIT: AL163278.2, EVALUE 0.00e+00; SWISSPROT HIT: P29316, EVALUE 9.00e-53
tagatgatcccaattttgttggcaacatccaaagcatcataatcaggagccagtggaacatatgccttcttctctccatcaggccgaatcagggtgttgaccttggccatgtcaatatcatagagcttcttcacagcctgtttgatctggtgcttgttggctttaacatccactatgaacacaagtgtgttgctgtctcctatcttcttcatggccgactcagtggtcagcggaaacttgatgatagcatagtggtcaagcttgtttcttctgggggcactcttccaaggatatttgggctgcctccagagtcgcagtgtcttgggcca

SEQ ID NO: 17949 - DNA, 312 bp, Homo sapiens
  MAP TO AL158832.2; EXPRESSED IN FETAL LIVER, SIGNAL = 1.1; EXPRESSED IN LUNG, SIGNAL = 1.1; EXPRESSED IN PLACENTA, SIGNAL = 1.3; EXPRESSED IN ADULT LIVER, SIGNAL = 0.96; SWISSPROT HIT: P55201, EVALUE 1.70e+00; EST_HUMAN HIT: AA700965.1, EVALUE 1.00e-117
accatgggctgctatatagtaataatgaacaacacaattgtccacatgactctcagagtcttcactgagattctccagtatggaaacagtggcacccacctcgtccactgatgggtaaagggcaaagagctcggcctgcctattggtcctccgggcctcctcgttctgcttctcaaagtcctcggcactcacttgctgcaggaggttttctagccgcttgtcaggctgcaggctgcggaggtcaaagtcacaggcagtgacggggcctttcccagacacgtcgcacagcacgtttaagtggcgggggcctgc

SEQ ID NO: 17950 - DNA, 210 bp, Homo sapiens
  MAP TO AC004845.2; EXPRESSED IN LUNG, SIGNAL = 0.49; EXPRESSED IN ADULT LIVER, SIGNAL = 0.51; EXPRESSED IN FETAL LIVER, SIGNAL = 0.59; SWISSPROT HIT: Q9JLK3, EVALUE 2.00e-09; EST_HUMAN HIT: BE796537.1, EVALUE 7.00e-76; NT HIT: gi13899314, EVALUE 5.00e-76
aaatccgagaggcctttcgggttctggaccgggatgggaacggcttcatctccaagcaggagctgggcatggccatgcgctctttggggtacatgccaagcgaggtggagctggccatcatcatgcagcgcttggacatggacggtaagacccggacaagcagcttctcccctgagacatgccccggtctcatcagtgagaccttcggtt

SEQ ID NO: 17951 - DNA, 206 bp, Homo sapiens
  MAP TO CHR22_36.0; EXPRESSED IN FETAL LIVER, SIGNAL =  14; EXPRESSED IN BONE MARROW, SIGNAL =  14; NT HIT: gi15718688, EVALUE 2.00e-78; SWISSPROT HIT: P97351, EVALUE 2.00e-27; EST_HUMAN HIT: BF908569.1, EVALUE 1.00e-80
tacatgagttttcccaattcaaacttgggcttctttatttttactttcctaatgaagacaccatggagaggataaacagataggcaagccttttctatgtcttttccagtgctgtctggaatcaatttattgaccacttctttcaagtcatttgtctgcacctcttgggtcatgatttccatcatcttcttctggatttggcagac

SEQ ID NO: 17952 - DNA, 194 bp, Homo sapiens
  MAP TO AL133330.5; EXPRESSED IN FETAL LIVER, SIGNAL = 0.64; EXPRESSED IN PLACENTA, SIGNAL = 0.87; EXPRESSED IN ADULT LIVER, SIGNAL = 0.66; NT HIT: U01824.1, EVALUE 1.00e-105; SWISSPROT HIT: P43004, EVALUE 2.00e-32; EST_HUMAN HIT: AV719930.1, EVALUE 1.00e-105
tatgacagagttgtgtgcagcatagacacattgattagagttgctttccctgtggttcttcatgtcatcataaatggattgagtcttggtcatttcaatatcttcatgcactcgatgctgggagtcaatggtatccagctcagacttggagaggtgatagactatcccagccccaaaagagtcacccacaacat

SEQ ID NO: 17953 - DNA, 157 bp, Homo sapiens
  MAP TO AL133553.2; EXPRESSED IN LUNG, SIGNAL = 0.66; EXPRESSED IN PLACENTA, SIGNAL = 0.57; EXPRESSED IN FETAL LIVER, SIGNAL = 0.78; SWISSPROT HIT: P29788, EVALUE 4.00e-06; NT HIT: gi5031924, EVALUE 2.00e-83; EST_HUMAN HIT: AL555058.1, EVALUE 4.00e-83
gattctcagtactggcgttttaccaatgatataaaagatgcagggtaccccaaaccaattttcaaaggatttggaggactaactggacaaatagtggcagcgctttcaacagctaaatataagaactggcctgaatctgtgtattttttcaagagag

SEQ ID NO: 17954 - DNA, 254 bp, Homo sapiens
  MAP TO AL132656.3; EXPRESSED IN FETAL LIVER, SIGNAL = 0.53; EXPRESSED IN PLACENTA, SIGNAL = 0.56; EST_HUMAN HIT: BF037950.1, EVALUE 6.00e-40; SWISSPROT HIT: Q69014, EVALUE 4.30e+00; NT HIT: AB046773.1, EVALUE 1.00e-52
ctgctgtccgacaaggaggtgtgcaagatcgtgcagcagagcctctccgtgggcaactttgccgcggggctcctccaccgccgagaacctccagctgcagtacaacaattttcgggcttgcaacaagaagcagctggaccctacgcagctgcggctcatctgccactaggtggaagccgtctaccccgtggagaaggtggaggaggtgtggcactgcgaatgtatccccagcaacgacgagcagtgccactgcc

SEQ ID NO: 17955 - DNA, 90 bp, Homo sapiens
  MAP TO AL118512.8; EXPRESSED IN FETAL LIVER, SIGNAL = 0.39; EXPRESSED IN PLACENTA, SIGNAL = 0.51; EXPRESSED IN ADULT LIVER, SIGNAL = 0.36; NT HIT: AF156100.1, EVALUE 1.00e-43
cgccccttgtcatttctccgtgcattctttaaatgtaagacttgtcctctgtctagaagttcaacattaggatcgcccaaaaataaaggc

SEQ ID NO: 17956 - DNA, 141 bp, Homo sapiens
  MAP TO CHR21_54.0; EXPRESSED IN FETAL LIVER, SIGNAL = 2.1; EXPRESSED IN BONE MARROW, SIGNAL = 1.7; SWISSPROT HIT: P55036, EVALUE 6.00e-19; EST_HUMAN HIT: AI909702.1, EVALUE 1.00e-54; NT HIT: gi13646647, EVALUE 7.00e-74
ctgggaggttctccaggacactctgaaggaactcaggatcctgcatcacgtcgtaatcatcctcctccttggctggctggcaagtgtccatggctgagctggcatcaatgtctactgattccgcctggccaaactctgctc

SEQ ID NO: 17957 - DNA, 83 bp, Homo sapiens
  MAP TO AC015896.4; EXPRESSED IN FETAL LIVER, SIGNAL = 0.41
cctgtaatgtgatgcttcctctgataaagattaaacaaaccatctttttcttcgaagagactgtcctgtatgtttataaacat

SEQ ID NO: 17958 - DNA, 80 bp, Homo sapiens
  MAP TO AC011803.4; EXPRESSED IN FETAL LIVER, SIGNAL = 0.5; EST_HUMAN HIT: BE542516.1, EVALUE 3.50e-01; NT HIT: AF210698.1, EVALUE 2.40e-01
gttattcctgacttagacaaccaaggcaaagcattgtctgttgatgaccatgtcaccaaaagcgggatgaggatactgag

SEQ ID NO: 17959 - DNA, 95 bp, Homo sapiens
  MAP TO AL133408.3; EXPRESSED IN FETAL LIVER, SIGNAL = 0.52; EXPRESSED IN BONE MARROW, SIGNAL = 0.51; EST_HUMAN HIT: BG003753.1, EVALUE 1.70e+00
tttaaaagcctcgtaactgcttaaggcctttattataatagtgtcacatgctttagagggactcagtgtagatgaagaaatagacgttacctcct

SEQ ID NO: 17960 - DNA, 77 bp, Homo sapiens
  MAP TO AC011980.3; EXPRESSED IN FETAL LIVER, SIGNAL = 0.48; EXPRESSED IN BONE MARROW, SIGNAL = 0.55; EST_HUMAN HIT: AA507417.1, EVALUE 5.00e-03; NT HIT: AF222979.1, EVALUE 2.00e-05
atggagcatgaacacattctctccccgagcctcagttttctcttctggaagatagagataacaatagctaacattag

SEQ ID NO: 17961 - DNA, 396 bp, Homo sapiens
  MAP TO AC020582.3; EXPRESSED IN LUNG, SIGNAL = 9.1; EXPRESSED IN ADULT LIVER, SIGNAL = 7.5; EXPRESSED IN BONE MARROW, SIGNAL =   5; EST_HUMAN HIT: BI467234.1, EVALUE 5.50e-01; NT HIT: AB005814.1, EVALUE 3.70e-01
agatctgccagagacaccatccataatggtgtggttgagagatatgttattgaaatgtgcgtaataaacaacactctcctacatttttgcttacggccatccctccagctcacccccttcaaaccacaagatagaaattatttcccctgcctaggatttcagtggaataaagcagttgaatccctcatcattcatcccactaaggccatgacaagatggactgagaggtccccagcccaggaactcccagctagagaagtttctgtgcaccaccacgacacaggggtaaataacaacaacaacaacagcagcagcagcagcagcagcagcagcagcagcagcagcagcagcaaattatgtatttacagcttcctatataacaggcaaagtactttt

SEQ ID NO: 17962 - DNA, 292 bp, Homo sapiens
  MAP TO AC019325.3; EXPRESSED IN BONE MARROW, SIGNAL = 0.48; EXPRESSED IN PLACENTA, SIGNAL = 0.52; EXPRESSED IN LUNG, SIGNAL = 0.53; EXPRESSED IN ADULT LIVER, SIGNAL = 0.48; NT HIT: gi11994090, EVALUE 4.20e+00; SWISSPROT HIT: Q58954, EVALUE 5.80e-02
tagggagtcgctttcacaaacatagaggatctcttttggtttgcagtgaaacaagtccttaattttctccatgatctttatggctagggctgtcttcctgactcctggaaagcagtagatgaataattcacgtgtcttctgaagactctcagaaagcaactggctctgctccattatgagcaagttgaaaaattcacagcccatctggtcactcagaagagatctggaggacagggagaccaccaccagagcctgcagcaagtcttccatttcctcctcatcagcaagcctg

SEQ ID NO: 17963 - DNA, 256 bp, Homo sapiens
  MAP TO Z98044.13; EXPRESSED IN PLACENTA, SIGNAL = 1.9; EXPRESSED IN LUNG, SIGNAL = 2.1; EXPRESSED IN BONE MARROW, SIGNAL = 1.3; NT HIT: gi14726996, EVALUE 0.00e+00; EST_HUMAN HIT: AI741976.1, EVALUE 0.00e+00; SWISSPROT HIT: O95479, EVALUE 2.00e-45
ctcggccgtcttcagttggcggtactggctcagctgcaggaactgatccttgtgctctgcacagtgactgggtgccatgtccttggggcaggagagggattccagggccttggccatgagctcttgaccctgcttgggggctgtcagagcagctccatggaagctaaaactgtgacccctccccgcttcatccaggtacagctggaacagtccctgccataagtacttcttagccaggtccccagttgctcccagc

SEQ ID NO: 17964 - DNA, 161 bp, Homo sapiens
  MAP TO CHR21_23.0; EXPRESSED IN LUNG, SIGNAL = 3.2; EXPRESSED IN ADULT LIVER, SIGNAL = 1.8; EXPRESSED IN BONE MARROW, SIGNAL = 1.6; SWISSPROT HIT: O15394, EVALUE 3.00e-25; NT HIT: gi4758763, EVALUE 1.00e-85; EST_HUMAN HIT: AL044830.1, EVALUE 1.00e-85
gaatggcaagctcattgaagaaaatgagaagtacatattgaaagggagcaatacagaactcactgtcaggaacataatcaatagtgatggtggtccttatgtctgcagggccacaaataaggcaggagaagatgaaaagcaagctttcctccaagtctttg

SEQ ID NO: 17965 - DNA, 407 bp, Homo sapiens
  MAP TO CHR22_11.0; EXPRESSED IN LUNG, SIGNAL = 0.78; EXPRESSED IN HEART, SIGNAL = 1.9; EXPRESSED IN PLACENTA, SIGNAL = 0.93; EXPRESSED IN BONE MARROW, SIGNAL = 2.1; EXPRESSED IN ADULT LIVER, SIGNAL = 0.73; EST_HUMAN HIT: BG024058.1, EVALUE 0.00e+00; NT HIT: gi14779031, EVALUE 3.00e-66; SWISSPROT HIT: Q95107, EVALUE 3.00e-01
cgtagtcttttaattcataggcttcaatgcacttagcaatgacacactgggtttgatattctttgatgcttctctccccactagggccgtagtccacgaggaccaggacggtggcgtgttctgtcaccttcgtatgtccagggccccgctccgcgcctggcacacagtaggtctagcaataccgggcgaacgcttcaagccctgcctcaagcgccacctcctctggggcgcaggtcccagcaccggaggcagcactttcagccccttcccgaacttacccagtgccgacttgggcacctttcccttggccgagttccgcagtttctgggcctgaattgccttcgtcttccggggccgtttcaccggagcccctctcggcttggcctgacctggagggtcccgggggg

SEQ ID NO: 17966 - DNA, 167 bp, Homo sapiens
  MAP TO AC011802.4; EXPRESSED IN BONE MARROW, SIGNAL = 2.6; EXPRESSED IN PLACENTA, SIGNAL = 2.3; EXPRESSED IN LUNG, SIGNAL = 2.6; SWISSPROT HIT: P48681, EVALUE 1.10e+00
ctaatcaataaagctgtcagccagggaaatagtcatgggacggttcactgggagtggagaatctggtccaggctcttttgtatcgttattgccaagcctcctcattggctggagatctgagttccacaccacagggaccatggacctctccataggctgctcatgac

SEQ ID NO: 17967 - DNA, 144 bp, Homo sapiens
  MAP TO AL035633.18; EXPRESSED IN BONE MARROW, SIGNAL = 0.41; EXPRESSED IN PLACENTA, SIGNAL = 0.5; EST_HUMAN HIT: BF744774.1, EVALUE 1.00e-08
ttatgcattttaattattcatgccattgtgttaattcacatttccatgtctaactataaatttgctgatttctttcttttgtttccatcattatgtgcatttaattcattgaagaacaagaaaaatataactcttccacaaaag

SEQ ID NO: 17968 - DNA, 496 bp, Homo sapiens
  MAP TO AC018608.4; EXPRESSED IN LUNG, SIGNAL = 0.55; EXPRESSED IN ADULT LIVER, SIGNAL = 0.52; EXPRESSED IN BONE MARROW, SIGNAL = 0.48; NT HIT: gi7657288, EVALUE 0.00e+00; SWISSPROT HIT: Q92953, EVALUE 5.00e-17; EST_HUMAN HIT: U69191.1, EVALUE 0.00e+00
cctgtggaatgtctgcccagctttagcatgcgcagagccctgagcagcctcaacacctggacaatgcgccccacgttctccagctcctgcgtggtctggctcccacttaggctctctaccagaagagtgatgtagaagggcaagatggcaaggaggtctatgatgtttggcacctttcttaggaagcgacacctgtcccgcacacacaggaagcggaggacaaactccccggtgaaccagctaatgcacacatactccaggatttccagcagctgcaggtccagccagcttaactcagctgacatcagggccatgttaatgatggacaccaccacgaagataatggagatgacgccaaagatacgggcagctgtggaagatccaggtttctccaggatattccagagcttctggcgaacagtgggacaaggtccttgggagaagtcctgttcactctcatgttgactttcctggtcttctgtgtccttcttgaagt

SEQ ID NO: 17969 - DNA, 110 bp, Homo sapiens
  MAP TO CHR22_120.0; EXPRESSED IN BONE MARROW, SIGNAL = 0.68; EXPRESSED IN LUNG, SIGNAL = 0.64; EXPRESSED IN PLACENTA, SIGNAL = 0.6; NT HIT: AL163302.2, EVALUE 1.40e+00; EST_HUMAN HIT: AV727686.1, EVALUE 2.10e+00; SWISSPROT HIT: O09141, EVALUE 1.20e+00
tgaccacccccgcagccctgggacccggggcccttgtttggatcctcatggagcaaggcgtgggcccaggttctgccacaggaagtcagcgcatccgcggggccgactga

SEQ ID NO: 17970 - DNA, 236 bp, Homo sapiens
  MAP TO AL138832.2; EXPRESSED IN PLACENTA, SIGNAL = 0.49; EXPRESSED IN LUNG, SIGNAL = 0.71; EXPRESSED IN BONE MARROW, SIGNAL = 0.7; SWISSPROT HIT: P57716, EVALUE 1.30e+00; EST_HUMAN HIT: BF913039.1, EVALUE 1.00e-104
agtgtgccaactttcagctgtgggccagcggctggaaccctcacctgcatgttgagctgcttatcatgcagggctctctgcagctccagcaggctccccttgagccttctcagctttccagccagctgctcggcctcgtccttggtgtgagctttgccctccagcagcaggttctcattgtggactgacagttctgataaagccaccaccttctgctctatttccaccagcatatt

SEQ ID NO: 17971 - DNA, 198 bp, Homo sapiens
  MAP TO CHR22_52.0; EXPRESSED IN LUNG, SIGNAL =  10; EXPRESSED IN PLACENTA, SIGNAL = 4.5; EXPRESSED IN BONE MARROW, SIGNAL = 7.6; NT HIT: gi14782916, EVALUE 1.00e-70; SWISSPROT HIT: P46783, EVALUE 9.00e-26; EST_HUMAN HIT: BI855666.1, EVALUE 6.00e-73
ctccagacctttagactgaggcctgccagtccatggacggctgcggcgtagggtggcaggcacaatctccaggggcagatgaaggtaatcacggagatactggatatcctcattggtaaggtaccagcagacatgactccaggcaaactgttccttcatgtagtagcctcgggacttgaaagactgcatggccttcat

SEQ ID NO: 17972 - DNA, 321 bp, Homo sapiens
  MAP TO AC021260.4; EXPRESSED IN LUNG, SIGNAL = 0.47; EXPRESSED IN BONE MARROW, SIGNAL = 0.61; EST_HUMAN HIT: BE830069.1, EVALUE 1.00e-07; NT HIT: U20894.1, EVALUE 1.00e-03; SWISSPROT HIT: P15924, EVALUE 6.90e-02
agtttcagattgtttctccaacgctcgttctaacttcttatgcttaagcttccactgcctaatggattcttgagctttcagtttcaggtcttccctcctcttctccgcctcctctttcagagcctctgactgctggagctcactgaggtaccgctcagcctgcttggttgcatcctccgcatggcgagtcagctctgagatctgaaggtcagcatgcttacgctcggcctcacatgtgtcaaagtgattctggatctccttaagtcgatccaacatctgcagttgctgtttttccccattctccagttcacgtgttaaatt

SEQ ID NO: 17973 - DNA, 188 bp, Homo sapiens
  MAP TO CHR22_84.0; EXPRESSED IN BONE MARROW, SIGNAL = 0.6; SWISSPROT HIT: Q01844, EVALUE 4.40e-02; NT HIT: X72993.1, EVALUE 1.00e-102; EST_HUMAN HIT: BE296420.1, EVALUE 1.00e-101
gttatactactccaactgccccccaggcatacagccagcctgtccaggggtatggcactggtgcttatgataccaccactgctacagtcaccaccacccaggcctcctatgcagctcagtctgcatatggcactcagcctgcttatccagcctatgggcagcagccagcagccactgcacctacaagg

SEQ ID NO: 17974 - DNA, 180 bp, Homo sapiens
  MAP TO AL135932.1; EXPRESSED IN BONE MARROW, SIGNAL = 0.48; EXPRESSED IN PLACENTA, SIGNAL = 0.44; EXPRESSED IN ADULT LIVER, SIGNAL = 0.57; NT HIT: AB040926.1, EVALUE 5.00e-97; SWISSPROT HIT: Q64282, EVALUE 4.30e+00; EST_HUMAN HIT: AA005095.1, EVALUE 1.00e-03
ctctgaaatagttttgccccaggcataagtgccatcttcaggtctgcctccatttagataaatccacactcgttttgtgttgggctgcttatacaggttgctcggcttgactgctatacgtttggttgcaattggaaaatttattttggattccatttcttggatttcagaaaggtgtgc

SEQ ID NO: 17975 - DNA, 91 bp, Homo sapiens
  MAP TO AL096868.6; EXPRESSED IN PLACENTA, SIGNAL = 0.63; EXPRESSED IN LUNG, SIGNAL = 1.3; EXPRESSED IN ADULT LIVER, SIGNAL = 0.69; EXPRESSED IN BONE MARROW, SIGNAL = 0.69; EST_HUMAN HIT: BE243457.1, EVALUE 1.10e-01
atgaccgagctggtcttggcagaaacctgtaaaggagccaaaaggcaattagaaggagaaaagaactgcaccccaagaattctatatccag

SEQ ID NO: 17976 - DNA, 290 bp, Homo sapiens
  MAP TO AL137067.3; EXPRESSED IN HEART, SIGNAL =   9; EXPRESSED IN LUNG, SIGNAL =  18; EXPRESSED IN BONE MARROW, SIGNAL = 2.1; SWISSPROT HIT: P05787, EVALUE 8.00e-10; NT HIT: gi14757451, EVALUE 1.00e-122; EST_HUMAN HIT: BE392256.1, EVALUE 1.00e-122
agtaccaggagctgatgaacgtcgggcttaccctggacatcgagattgccacctacaggaagctgctggagggcgaggagagccggctggaatctgggatgcagaacgtgagtatccatacgaagaccaccagcagctatgcaggtgggctgagctcggcctatgggggcctcacaagccccggcatcatctaccgcctgggctccagctttggctctgccgcgggctccagctccttcagccgcaccagctccaccagggccgtggttgtgaggaagatcgagacccat

SEQ ID NO: 17977 - DNA, 449 bp, Homo sapiens
  MAP TO AC018432.4; EXPRESSED IN ADULT LIVER, SIGNAL = 0.58; EXPRESSED IN BONE MARROW, SIGNAL = 0.55; EXPRESSED IN PLACENTA, SIGNAL = 0.48; EXPRESSED IN LUNG, SIGNAL = 0.61; SWISSPROT HIT: P14922, EVALUE 1.30e+00; EST_HUMAN HIT: AA405058.1, EVALUE 1.60e-01; NT HIT: AB022159.1, EVALUE 1.70e+00
agatcaagttagacttctggaagaaaatgtgaggaatcaaattccttcaaaacccaaaactaagttagggagcagaactacttatcaatgctcaagatctcaagagtccttgaatcagaatcaaccttctgttggaatggttatttctgtccaagcacaggattcttttccaggacaaaatgcttttcagaatcaaggtctttatgaagtccaatttactagtcaagcccaatatataaatcataaccaagaatcaattaagagccagcctgagagcaaagccagcaactttgcccagcctgaagatgtgatgaagaagccattttctagcagcacacaagactccttccagtcccaagatctggataggaaccaacattttgttgaagttccatcaattgttgaggcaaaatattcagtaaagggcctggagtctgatgaacacttag

SEQ ID NO: 17978 - DNA, 76 bp, Homo sapiens
  MAP TO AL139149.1; EXPRESSED IN LUNG, SIGNAL = 0.57; EXPRESSED IN BONE MARROW, SIGNAL = 0.4; EXPRESSED IN PLACENTA, SIGNAL = 0.55; EST_HUMAN HIT: BF031599.1, EVALUE 2.10e-02; NT HIT: AL161547.2, EVALUE 2.30e-01
tttgtttttgttgttgctttgtttaccagaactattaacactcatttttttaagaacgattttctttatagtcata

SEQ ID NO: 17979 - DNA, 191 bp, Homo sapiens
  MAP TO CHR22_81.0; EXPRESSED IN PLACENTA, SIGNAL = 0.46; EXPRESSED IN BONE MARROW, SIGNAL = 0.49; EXPRESSED IN ADULT LIVER, SIGNAL = 0.86; NT HIT: gi16168503, EVALUE 2.00e-31; EST_HUMAN HIT: BE392547.1, EVALUE 2.00e-32; SWISSPROT HIT: P46060, EVALUE 2.00e-07
caccccagtgttagggtccagaatcttccgtgagggcgtggctgacttctctccctgccctcgctgctgaggctcttcttcctcctcctcctcctcttcttcctcctcttcctcatcttcctcctcctcttcttctgcttcctcttcttcctcttctccttcctcctcctcctcctcgtcctcgtcatcac

SEQ ID NO: 17980 - DNA, 93 bp, Homo sapiens
  MAP TO AC016683.4; EXPRESSED IN PLACENTA, SIGNAL = 0.5; EXPRESSED IN LUNG, SIGNAL = 0.76; EXPRESSED IN BONE MARROW, SIGNAL = 0.49; EST_HUMAN HIT: BG540330.1, EVALUE 4.00e-38
ctactgatcaggagcattctccagctgttcattttctcctaggacagcattcatgatgaggtctgggctcttttttccaggggcaggtctgaa

SEQ ID NO: 17981 - DNA, 209 bp, Homo sapiens
  MAP TO CHR21_51.0; EXPRESSED IN BONE MARROW, SIGNAL = 0.42; SWISSPROT HIT: P14078, EVALUE 9.40e+00; EST_HUMAN HIT: AL599066.1, EVALUE 2.80e-01
gtgggcagagggaggaggaggaagacgtgggagatggctggaaagaagaacaagccaaattcttatgtacttctgggcatgcttgtgctcctgttttaattttttataccttgcaatttagtgaacttggagctccaaaacgtctgttgaatcttgcctcggtgctctggttctcagccttggtggcagcagaaacccttaaacaaaag

SEQ ID NO: 17982 - DNA, 175 bp, Homo sapiens
  MAP TO AC015523.3; EXPRESSED IN BONE MARROW, SIGNAL = 0.46; EXPRESSED IN PLACENTA, SIGNAL = 0.6; EXPRESSED IN LUNG, SIGNAL = 0.51; EXPRESSED IN ADULT LIVER, SIGNAL = 0.49; NT HIT: gi13376845, EVALUE 6.00e-04; EST_HUMAN HIT: AU145741.1, EVALUE 4.00e-06; SWISSPROT HIT: P45413, EVALUE 9.80e+00
ttgcccaaggttacacagcaggtaagtggcagagccaatattgaaactcatatccagctctaaagcttggatgttaactgctgtgacatgttgaaagtagcaacttgttttactacacagttctgcataatcatgagtttctgttgtgtgtaggaaaggatttaagctttctgga

SEQ ID NO: 17983 - DNA, 143 bp, Homo sapiens
  MAP TO CHR22_116.0; EXPRESSED IN PLACENTA, SIGNAL = 4.6; EXPRESSED IN LUNG, SIGNAL =  10; EXPRESSED IN ADULT LIVER, SIGNAL = 9.6; EXPRESSED IN BONE MARROW, SIGNAL = 7.1; SWISSPROT HIT: Q29195, EVALUE 3.00e-15; NT HIT: gi14732985, EVALUE 8.00e-43; EST_HUMAN HIT: AV744952.1, EVALUE 8.00e-44
ggcacaaatagggcagcctccagggctccagaggagagctgctcatattcatctgacaccatgtggccacagagtagaaactcatccacttttgccttcttccaacccaggtcaaagaggcgaatcttggcattagggaaacc

SEQ ID NO: 17984 - DNA, 138 bp, Homo sapiens
  MAP TO AC016672.4; EXPRESSED IN BONE MARROW, SIGNAL = 0.43; EXPRESSED IN LUNG, SIGNAL = 0.48; SWISSPROT HIT: P26639, EVALUE 4.00e-16; EST_HUMAN HIT: BF172505.1, EVALUE 2.00e-69
attgaagaagaaataaaggggtgtttgcagtttttgcaatctgtttactcaacatttggcttctcctttcaattaaacctgtcaacaaggccggaaaacttcctaggagagattgagatgtggaatgaggctgagaag

SEQ ID NO: 17985 - DNA, 93 bp, Homo sapiens
  MAP TO AL137798.1; EXPRESSED IN PLACENTA, SIGNAL = 0.81; EXPRESSED IN LUNG, SIGNAL = 1.2; EXPRESSED IN BONE MARROW, SIGNAL = 0.8; NT HIT: gi16162213, EVALUE 2.00e-45; EST_HUMAN HIT: BE904110.1, EVALUE 3.00e-45
gtgcaaagacctcataaaatctatgctgaggaatgagcgacagttcaaggaggagaagcttgcagagcagctcaagcaagctgaggagctcag

SEQ ID NO: 17986 - DNA, 177 bp, Homo sapiens
  MAP TO CHR22_151.0; EXPRESSED IN BONE MARROW, SIGNAL = 0.91; EXPRESSED IN LUNG, SIGNAL = 1.2; EXPRESSED IN ADULT LIVER, SIGNAL = 1.4; EST_HUMAN HIT: AI223017.1, EVALUE 5.00e-95; NT HIT: gi7705994, EVALUE 1.00e-63
tcagctccgactgtggctggcccagggggaaggcagcatccagttatgaatctgatatttatgaggccgtggctgctgcaacatcagaatccactaccgtagagcctggcaagctggatgtgggagccacggagggccaagacctgcagcacatcagcaaccaaaagatgcccacag

SEQ ID NO: 17987 - DNA, 144 bp, Homo sapiens
  MAP TO AC004846.2; EXPRESSED IN BONE MARROW, SIGNAL = 0.75; EXPRESSED IN LUNG, SIGNAL =   1; EXPRESSED IN PLACENTA, SIGNAL = 1.2; EST_HUMAN HIT: BG614532.1, EVALUE 1.80e-01; NT HIT: AF109907.1, EVALUE 1.00e-75
gaagcctgcagttcatccagccttctcatttcaaagcccttgctcatgttgtccctctcttggaaagctcttcctccatccttcagcgggccgtcccctattaccacttcctcagggaagcaccccttgactttccaggatacg

SEQ ID NO: 17988 - DNA, 394 bp, Homo sapiens
  MAP TO AJ239319.2; EXPRESSED IN BONE MARROW, SIGNAL = 1.3; EXPRESSED IN PLACENTA, SIGNAL = 1.3; EXPRESSED IN LUNG, SIGNAL = 3.5; EXPRESSED IN ADULT LIVER, SIGNAL = 2.9; NT HIT: AF149773.1, EVALUE 0.00e+00; SWISSPROT HIT: P03356, EVALUE 2.00e-14; EST_HUMAN HIT: BE081532.1, EVALUE 4.00e-85
ttatccccacctgcccagttcccttattaggtcgaggcattttaactaaattacctgcttccctgactattcccaggctacagccacacttcattgcagcccttttccccagttcaaagcctccttcgcatcctccccttgtatctcctcaccttaatccacaagtatggaacacctctactccctccttggtgacctatcatgcaccccttaccattccattaaaacctaatcacccttaccccactcaatgccaatatcccatcccacagcatgctttaaaaggattaaagcctgttatcattcgcctgctacagcatggccttctaaagcctataaactctccttacaattcccccattttacctgtccaaaaaccagacaagtcttacag

SEQ ID NO: 17989 - DNA, 135 bp, Homo sapiens
  MAP TO AL121976.2; EXPRESSED IN LUNG, SIGNAL = 0.48; EXPRESSED IN PLACENTA, SIGNAL = 0.49; EXPRESSED IN BONE MARROW, SIGNAL = 0.51; SWISSPROT HIT: P33922, EVALUE 7.80e+00; EST_HUMAN HIT: BF947309.1, EVALUE 6.70e-01; NT HIT: gi9635035, EVALUE 7.10e+00
ctgcagttctctgattcgaggtggcacagatacagaaaggacaagtaggcccctctcatcagaacaggattcctatcactggggtcagtgccatcttccaagcccagcagttgtagggtcattgcatagttgtac

SEQ ID NO: 17990 - DNA, 93 bp, Homo sapiens
  MAP TO AC011803.4; EXPRESSED IN PLACENTA, SIGNAL = 0.52; EXPRESSED IN ADULT LIVER, SIGNAL = 0.36; EXPRESSED IN BONE MARROW, SIGNAL = 0.43; NT HIT: AF057167.1, EVALUE 1.10e+00; EST_HUMAN HIT: BI255491.1, EVALUE 1.70e+00
atgggactctcagaaggaaaaatgagcaggaaactaacacttctgagggcctacatagtgctgggcaccactctaattaccttactaataata

SEQ ID NO: 17991 - DNA, 399 bp, Homo sapiens
  MAP TO AC005629.2; EXPRESSED IN BONE MARROW, SIGNAL = 0.63; EXPRESSED IN PLACENTA, SIGNAL = 0.5; EXPRESSED IN ADULT LIVER, SIGNAL = 0.56; EXPRESSED IN LUNG, SIGNAL = 0.5; EST_HUMAN HIT: AL519106.1, EVALUE 0.00e+00; SWISSPROT HIT: P38604, EVALUE 3.80e-01
gcttatgggggctgcggggctggctggaatccggatttacaggacagatgagaagtcactggatgagtccaaaaatccgccccgcaaactggactcggacctcttggtgggcactgcctcaggctcctggcttatctcctggggctcaatcttggccatcctttgtgccgaggaccacccccactacacctggtacaacctgccctactccatcgtggtgatcgtggagaagtacatccagaacctcttcatctttgaatccattcaccgagagcctaaaaaactctctgaggacatccaaacccttcggatggtcacagtctgcaatggcaacaccatgccccttgcttcctcctgcctcaagagtggaggtgtggccggagacgtggctccctgggg

SEQ ID NO: 17992 - DNA, 137 bp, Homo sapiens
  MAP TO AL159176.2; EXPRESSED IN LUNG, SIGNAL = 0.61; EXPRESSED IN BONE MARROW, SIGNAL = 0.53; EXPRESSED IN PLACENTA, SIGNAL = 0.59; EXPRESSED IN ADULT LIVER, SIGNAL = 0.65; NT HIT: gi14729707, EVALUE 2.00e-71; EST_HUMAN HIT: BI756172.1, EVALUE 3.00e-71; SWISSPROT HIT: P33218, EVALUE 3.40e+00
tttacaattctgatgtaattgataaacagagtgcttccatgacttctgataatgcagatgacaaagctgttattattctagttcctgttagacttggtggagaaagaaccaacaccgactacttagaatttgtgaag

SEQ ID NO: 17993 - DNA, 164 bp, Homo sapiens
  MAP TO CHR22_171.0; EXPRESSED IN PLACENTA, SIGNAL = 1.2; EXPRESSED IN ADULT LIVER, SIGNAL = 1.1; EXPRESSED IN BONE MARROW, SIGNAL = 0.78; EXPRESSED IN LUNG, SIGNAL = 0.96; EXPRESSED IN HEART, SIGNAL = 1.4; EST_HUMAN HIT: AL046500.1, EVALUE 2.00e-87; SWISSPROT HIT: Q92523, EVALUE 5.00e-26
cggaagtgagccagctgcagcgcgatctgcacaaaggcatcagggctggtccggcacttcttgatgaggcctttgccaaagggcaggaactggaagcagtacaactccacgtcgtctgccaacgccttggccacctggtaggaactctcgatgaccgcctggca

SEQ ID NO: 17994 - DNA, 138 bp, Homo sapiens
  MAP TO AC016687.2; EXPRESSED IN BONE MARROW, SIGNAL = 2.7; EXPRESSED IN LUNG, SIGNAL = 5.5; EXPRESSED IN ADULT LIVER, SIGNAL = 4.8; NT HIT: AJ271735.1, EVALUE 5.00e-10; SWISSPROT HIT: P49894, EVALUE 4.50e+00; EST_HUMAN HIT: AI888331.1, EVALUE 7.00e-04
atgctcctggaaaagctgcaggcactcaaacaccaacctgtgaaagcagctgggagagggcccatgccctgcaaagccacagggttggtgtttcccaaggctgtgggagcccacttcttgcatcagcatgacgtggat

SEQ ID NO: 17995 - DNA, 174 bp, Homo sapiens
  MAP TO CHR21_43.0; EXPRESSED IN BONE MARROW, SIGNAL = 0.9; EXPRESSED IN PLACENTA, SIGNAL = 1.2; EXPRESSED IN LUNG, SIGNAL =   2; EXPRESSED IN ADULT LIVER, SIGNAL = 2.2; NT HIT: gi7656876, EVALUE 5.00e-51; SWISSPROT HIT: Q9ZL29, EVALUE 8.60e-01; EST_HUMAN HIT: BF308839.1, EVALUE 7.00e-51
tattcaatcttgcaactgcactcttctggtccgtgtttgttacagcttgagctgagctttcgctcgccttccaccactgctgtttgccgccatcgcagacctgccgtgctgacttccatccctctagatctggcagggtgtccgctgtgctcttgatccagcgaggcgcccatt

SEQ ID NO: 17996 - DNA, 121 bp, Homo sapiens
  MAP TO AC020721.4; EXPRESSED IN BONE MARROW, SIGNAL = 0.52; EXPRESSED IN LUNG, SIGNAL = 0.46; EXPRESSED IN ADULT LIVER, SIGNAL = 0.53; SWISSPROT HIT: P87141, EVALUE 7.90e+00; NT HIT: X55891.1, EVALUE 2.60e-02
ataactgaacatgtacatgcaataacttctcaaatttcaccttccatgcccattctgcacccccaccctttgggaaacaatgctgaaagtgatgatgacaaggacgatgttgatgacgaca

SEQ ID NO: 17997 - DNA, 99 bp, Homo sapiens
  MAP TO AC011799.5; EXPRESSED IN ADULT LIVER, SIGNAL = 0.37; EXPRESSED IN BONE MARROW, SIGNAL = 0.4; EST_HUMAN HIT: BF735844.1, EVALUE 3.00e-02; NT HIT: AE006308.1, EVALUE 3.10e-01
atgtcacccagacactcccggaaaaacgagttcttgtgttatcagttctacattgtcatcaaaaaagatgacaccactgcttgcctaaaagtctcaaag

SEQ ID NO: 17998 - DNA, 150 bp, Homo sapiens
  MAP TO AL160231.1; EXPRESSED IN BONE MARROW, SIGNAL = 4.6; EXPRESSED IN LUNG, SIGNAL =  17; EXPRESSED IN ADULT LIVER, SIGNAL =  16; SWISSPROT HIT: O73813, EVALUE 1.00e-16; NT HIT: gi16160713, EVALUE 2.00e-53; EST_HUMAN HIT: AV737629.1, EVALUE 1.00e-51
atgctggtcaccaggactcaaggaaccaaaattgcatctgatggcctcaagggtcatgtatttgaagtgagtcttgctgatctgcagaatgatgaaggtgcatttagaaaatgcaagctgattactgatgatgttcaggcaaaacctgcc

SEQ ID NO: 17999 - DNA, 111 bp, Homo sapiens
  MAP TO AL121994.3; EXPRESSED IN BONE MARROW, SIGNAL = 5.9; SWISSPROT HIT: Q01628, EVALUE 6.00e-11; EST_HUMAN HIT: C18536.1, EVALUE 8.00e-37; NT HIT: gi11995467, EVALUE 9.00e-36
cgggggccaggcctgtgcctccaccgccaagtgcctgaacgtctgggccctggttctgggcatcctcatgagcattctgctcatcttcatcccagtgttgatctttcaagt

SEQ ID NO: 18000 - DNA, 154 bp, Homo sapiens
  MAP TO AC025745.1; EXPRESSED IN BONE MARROW, SIGNAL = 0.46; EXPRESSED IN ADULT LIVER, SIGNAL = 0.33; SWISSPROT HIT: P21416, EVALUE 8.00e-06; EST_HUMAN HIT: BG010348.1, EVALUE 7.00e-26; NT HIT: X57079.1, EVALUE 1.30e-01
ttgcctcattgcagtccttaacaaagctgcccataaagctgtaaattttgaaaaactcaaagagatttcccagggggcagatgaaaatcccactgaatttctctcccaccttgtagaggctctccaaaaatacacccatgtcgatcctgcttcc

SEQ ID NO: 18001 - DNA, 173 bp, Homo sapiens
  MAP TO AL137008.1; EXPRESSED IN PLACENTA, SIGNAL = 0.82; EXPRESSED IN BONE MARROW, SIGNAL = 0.59; NT HIT: gi14759704, EVALUE 8.00e-93; SWISSPROT HIT: O94833, EVALUE 3.00e-26; EST_HUMAN HIT: AL042709.2, EVALUE 1.00e-92
cgtgtttgctttgatatagaaagtgcacacacggtctcccagcgtgtgcttaattcctgcatctggaccttgacccaggaggagtcatcccgactgccttctatgagttctcgggctgagcgcttcagggcctgcacactgctggtcctcttccccaactctttttggaaggc

SEQ ID NO: 18002 - DNA, 113 bp, Homo sapiens
  MAP TO AL136081.1; EXPRESSED IN PLACENTA, SIGNAL = 0.35; EXPRESSED IN ADULT LIVER, SIGNAL = 0.52; EXPRESSED IN BONE MARROW, SIGNAL = 0.45
ctttgtgtattttcaatttcatttgaggttattctcacatgactgataaagatgatgaaacaaatgagtttcatcatgaatttattctcatataaatgacacttttcaacatc

SEQ ID NO: 18003 - DNA, 499 bp, Homo sapiens
  MAP TO AL137798.1; EXPRESSED IN BONE MARROW, SIGNAL = 1.1; EXPRESSED IN HEART, SIGNAL = 2.7; EXPRESSED IN ADULT LIVER, SIGNAL = 2.8; SWISSPROT HIT: P47813, EVALUE 3.00e-52; EST_HUMAN HIT: BI712630.1, EVALUE 0.00e+00; NT HIT: gi14743847, EVALUE 0.00e+00
cagccgccgcggtcgccgctacccggaaagaagtcagagacgccgcgaggtcgccgccaccgccatgcccaagaataaaggtaaaggaggtaaaaatagacgcaggggtaagaatgagaatgaatctgaaaaaagagaactggtattcaaagaggatggtcaggagtatgctcaggtaatcaaaatgttgggaaatggacggctagaagcaatgtgtttcgatggtgtaaagaggttatgtcacatcagaggaaaattgagaaaaaaggtttggataaatacctcggacattattttggttggtctccgagactaccaggataacaaagctgatgtaattttaaaatacaatgcagacgaagctagaagtctgcaggcatacggcgagcttccagagcatgctaaaatcaatgaaactgatacatttggtcctggagatgatgatgaaattcagtttgatgacattggagatgatgatgaagatattgatgacatctaa

SEQ ID NO: 18004 - DNA, 98 bp, Homo sapiens
  MAP TO AC012348.4; EXPRESSED IN ADULT LIVER, SIGNAL = 0.45; EXPRESSED IN BONE MARROW, SIGNAL = 0.47; NT HIT: gi13994357, EVALUE 2.00e-48; EST_HUMAN HIT: BI461897.1, EVALUE 3.00e-48
cttggaatttttctggaggagcaaggcagcttctgtctggctaaggctgtaagcttcgggcgtgtcatgggcagtgggggcagggtggtcatttcgga

SEQ ID NO: 18005 - DNA, 23 bp, Homo sapiens
  MAP TO CHR22_166.0; EXPRESSED IN PLACENTA, SIGNAL = 0.62; EXPRESSED IN LUNG, SIGNAL = 0.45; EXPRESSED IN BONE MARROW, SIGNAL = 0.47; NT HIT: gi14784897, EVALUE 9.30e-02
gctccagcatctgcagcattctc

SEQ ID NO: 18006 - DNA, 126 bp, Homo sapiens
  MAP TO AC019325.3; EXPRESSED IN BONE MARROW, SIGNAL = 0.5; EXPRESSED IN ADULT LIVER, SIGNAL = 0.4; NT HIT: U91522.1, EVALUE 6.00e-65; SWISSPROT HIT: O00623, EVALUE 1.00e-17; EST_HUMAN HIT: BG762646.1, EVALUE 9.00e-65
atggctgagcacggggctcacttcacagctgcttctgtggccgatgaccagccatccatctttgaggtggtagcacaggacagtttaatgacagcagtgagacccgctcttcagcatgtggtcaag

SEQ ID NO: 18007 - DNA, 116 bp, Homo sapiens
  MAP TO AC018586.3; EXPRESSED IN BONE MARROW, SIGNAL = 0.65; EXPRESSED IN PLACENTA, SIGNAL = 0.66; EXPRESSED IN LUNG, SIGNAL = 0.73; EXPRESSED IN ADULT LIVER, SIGNAL = 0.86; SWISSPROT HIT: Q99665, EVALUE 2.00e+00; EST_HUMAN HIT: AA601759.1, EVALUE 4.00e-11; NT HIT: AB008681.1, EVALUE 3.00e-14
tattccaatcagcagggtccagggacactgtgggttcttgggcagggggtgtttctgctaccgcgtcaatgagcacaactattctgatcagcagggtccagggactcttgcaggtt

SEQ ID NO: 18008 - DNA, 193 bp, Homo sapiens
  MAP TO AL139152.1; EXPRESSED IN LUNG, SIGNAL =  18; EXPRESSED IN BONE MARROW, SIGNAL = 6.4; SWISSPROT HIT: P50505, EVALUE 8.50e-01; EST_HUMAN HIT: AA315005.1, EVALUE 3.00e-90; NT HIT: gi16159761, EVALUE 1.00e-104
cgtcaaagtaaaaaagctattgtccatgtcaagggcaaaggtgatgtgctgttcctcaaatgagtaaaacacacttctgtagtgctggaatgagtcaggtagttcaaagtacattgatggagtcgaataacatctatccagtgagtcctgcaagacttcaggctcttccacttccatcagcacgctgttgagc

SEQ ID NO: 18009 - DNA, 103 bp, Homo sapiens
  MAP TO AL137071.3; EXPRESSED IN BONE MARROW, SIGNAL = 4.5; EXPRESSED IN HEART, SIGNAL = 2.6; EXPRESSED IN LUNG, SIGNAL = 7.9; EXPRESSED IN ADULT LIVER, SIGNAL = 6.6; EXPRESSED IN PLACENTA, SIGNAL =   4; NT HIT: AL163246.2, EVALUE 4.00e-25; EST_HUMAN HIT: AA434554.1, EVALUE 2.00e-34
ccagctgctccagccatggctgaaaggggccaacatagagcttgggctgtggcttcagagggtgcaagccccaggccttggcagcttccatgtggtgttgagc

SEQ ID NO: 18010 - DNA, 249 bp, Homo sapiens
  MAP TO AL137861.1; EXPRESSED IN LUNG, SIGNAL = 0.8; EXPRESSED IN BONE MARROW, SIGNAL = 0.66; SWISSPROT HIT: P10266, EVALUE 2.00e-15; NT HIT: AF015998.1, EVALUE 3.00e-28; EST_HUMAN HIT: BG674607.1, EVALUE 2.00e-95
ctgagcaagactgtgaagggtttgcatttacaattcctgcagtaaacaacctgcagcctgctaagcgttttcgttgtttcacagatgggtctagtaatggtaaagcttcttattctggatcaaaaggtaaagttttccagacaccctatacttcagctcaaaaagcggagcttgtatctgtaaatgaggtattgactgcttttgatatgcctgttaatgtgatttctgattcttcatacatggttcatt

SEQ ID NO: 18011 - DNA, 189 bp, Homo sapiens
  MAP TO AC018691.5; EXPRESSED IN PLACENTA, SIGNAL = 0.53; EXPRESSED IN BONE MARROW, SIGNAL = 0.47; SWISSPROT HIT: P98157, EVALUE 1.10e+00; EST_HUMAN HIT: AA312382.1, EVALUE 9.80e-01
atggtgggtgagctgtgtccccaaggtcaggggctccagtgacattccagtgagcagtgacacacctgctggctccacagcgatctgcctgtattggaatcggctgtcacccacggggatggcccaccaggttatcaaggctgagagctcttgctgggcttccactatctgtaagtttgtcttcttcat

SEQ ID NO: 18012 - DNA, 169 bp, Homo sapiens
  MAP TO AC021619.3; EXPRESSED IN PLACENTA, SIGNAL =   6; EXPRESSED IN BONE MARROW, SIGNAL = 0.81; EST_HUMAN HIT: H01372.1, EVALUE 5.00e-61; NT HIT: AF156963.1, EVALUE 3.00e-61; SWISSPROT HIT: P08682, EVALUE 5.00e-01
aagagccatttgtagctttacagcttcaattctggaagagacaaacttaaaaaggaggttaaagatacagggtccaaagaggagtaacagtattatagtcgctagaggtcctaagaaggggagaatccagggcatccattggctgaggaggtcccagggtctggtgttt

SEQ ID NO: 18013 - DNA, 311 bp, Homo sapiens
  MAP TO AC020588.4; EXPRESSED IN PLACENTA, SIGNAL = 0.99; EXPRESSED IN LUNG, SIGNAL = 1.2; EXPRESSED IN BONE MARROW, SIGNAL =   1; SWISSPROT HIT: P26810, EVALUE 2.00e-16; NT HIT: X57147.1, EVALUE 1.00e-120; EST_HUMAN HIT: AW503208.1, EVALUE 0.00e+00
tttcaagtatggttacatcactaactatggtgtaacctgtcctttgtatcccattctccacaactgaacttccatcggtatataggttaaggtcaggaatagttaaggggacatctaagagatcatctcgggtggcataagtctggactataatttgttggcagtcatgctcgattggttccccatcctctgggagaaaagtggcagggttgagggccacgcacatgcgtatttgaagcaccagtccctcaaggagtagtgcctggtatctaagtaggcagttgtctgatagccataaacttcctttggca

SEQ ID NO: 18014 - DNA, 150 bp, Homo sapiens
  MAP TO AC021011.2; EXPRESSED IN LUNG, SIGNAL = 0.7; EXPRESSED IN ADULT LIVER, SIGNAL = 0.56; EXPRESSED IN BONE MARROW, SIGNAL = 0.71; EST_HUMAN HIT: R99971.1, EVALUE 1.00e-27; NT HIT: AL163248.2, EVALUE 2.00e-31; SWISSPROT HIT: P70213, EVALUE 2.00e-06
tgtaagctctaaagttgtaaggtctaaagtgattaatccactccagcattccaatctccctaagcctttgaatcccttcttcttcattaaatgatcaggcatttccagctcgctcacagtgggccatcttttgatccatatttcagctaa

SEQ ID NO: 18015 - DNA, 215 bp, Homo sapiens
  MAP TO CHR22_175.0; EXPRESSED IN BONE MARROW, SIGNAL = 0.46; EXPRESSED IN ADULT LIVER, SIGNAL = 1.2; SWISSPROT HIT: Q15654, EVALUE 1.10e-01; NT HIT: gi14779626, EVALUE 1.00e-88; EST_HUMAN HIT: BI518449.1, EVALUE 2.00e-88
gagtgtctgtgggccagcggtggcaggatgtcctgcctgtggcccggaagcacagccgagaccacatcctgctgttcaatgacgcacacttcctgatggcatccctgggtgcacacgacccccagaccacacaggagctgctgaccaccctgcgggacgccagcgagtatgcagaggggccttctcggggtgggggtcctcaccctgccgagagg

SEQ ID NO: 18016 - DNA, 86 bp, Homo sapiens
  MAP TO AC013718.3; EXPRESSED IN PLACENTA, SIGNAL = 1.3; EXPRESSED IN BONE MARROW, SIGNAL = 0.75; EXPRESSED IN ADULT LIVER, SIGNAL =   1; EXPRESSED IN LUNG, SIGNAL = 0.9; EST_HUMAN HIT: AW062987.1, EVALUE 4.00e-41; SWISSPROT HIT: Q09328, EVALUE 3.00e-11; NT HIT: D17716.1, EVALUE 3.00e-41
ctgacatcccagcatccttacgctgaagttttcatcgggcggccacatgtgtggactgttgacctcaacaatcaggaggaagtaga

SEQ ID NO: 18017 - DNA, 256 bp, Homo sapiens
  MAP TO AC013341.3; EXPRESSED IN PLACENTA, SIGNAL = 0.45; EXPRESSED IN BONE MARROW, SIGNAL = 0.46; SWISSPROT HIT: Q09857, EVALUE 1.10e+00; EST_HUMAN HIT: AW861379.1, EVALUE 3.40e-01; NT HIT: AL163278.2, EVALUE 6.00e-08
tctgttattagttttggaaaattcctagttatttttacttcaaatatttcttctgttctattgtctctttcttgtccttctgttattccaactacaagtatcttataccttttgacatttcctgacagttcttggatattctggtctctttttctaattcccttttgtctttgcgtttcagtttgagaagtttctattgacttatcttcaatctcaattatttcctcatcgagatccagtctacagatgttcccat

SEQ ID NO: 18018 - DNA, 360 bp, Homo sapiens
  MAP TO AL136081.1; EXPRESSED IN LUNG, SIGNAL =  17; EXPRESSED IN BONE MARROW, SIGNAL = 9.7; EST_HUMAN HIT: W92707.1, EVALUE 1.00e-35; NT HIT: AL163246.2, EVALUE 1.00e-25; SWISSPROT HIT: Q9UJU3, EVALUE 2.50e-01
ttccacagttgcttccacatttttggatatcttttcagcaatgccccaccctactggtaccaatttactttattagtccatttttatgctgctgataaagacatacctgagactgggaagaaaaagagatttaacagacttaacagttccacgtggctgggaggcctcataatcatggcagaaggcaaagaggagcaagtcaagttttacatggatggcagcaggcaaaaagagagcctgtgcagggaaactcccatttttaaagctatcagatctcactatcatgagaagagcatggcaaagacccacttccatggttcaattatctcccaccaggtccctgccacaacatatgggaat

SEQ ID NO: 18019 - DNA, 177 bp, Homo sapiens
  MAP TO CHR22_172.0; EXPRESSED IN BONE MARROW, SIGNAL = 0.54; EXPRESSED IN PLACENTA, SIGNAL = 0.55; EXPRESSED IN LUNG, SIGNAL = 0.59; NT HIT: AF115553.1, EVALUE 3.00e-95; EST_HUMAN HIT: BG751233.1, EVALUE 6.00e-79; SWISSPROT HIT: P53814, EVALUE 4.00e-04
atgacctgcctctcgcacccactgcagctggaggtcacagcagatctggcagagcggcggcgcatccgctcagccatccgggaactgcagcggcaggagctggagcgcgaggaggaggccctggcatccaagcgtttccgtgccgagcggcaggacaacaaggagaactggctgcag

SEQ ID NO: 18020 - DNA, 121 bp, Homo sapiens
  MAP TO AL138843.2; EXPRESSED IN BONE MARROW, SIGNAL = 0.51; EXPRESSED IN PLACENTA, SIGNAL = 0.57; EST_HUMAN HIT: AW299698.1, EVALUE 8.00e-62; NT HIT: gi14733042, EVALUE 5.00e-62; SWISSPROT HIT: Q9QZ81, EVALUE 5.00e-10
ggaggtggttgactcaatggttcagcattttaaagtaactatatttggagaccgtagaccagtttatgatggaaaaagaagtctttacaccgccaatccacttcctgtggcaactacaggg

SEQ ID NO: 18021 - DNA, 193 bp, Homo sapiens
  MAP TO AL138842.2; EXPRESSED IN PLACENTA, SIGNAL = 3.5; EXPRESSED IN LUNG, SIGNAL =  11; EXPRESSED IN ADULT LIVER, SIGNAL =  12; EXPRESSED IN BONE MARROW, SIGNAL = 3.4; EST_HUMAN HIT: BF926160.1, EVALUE 1.00e-104; NT HIT: gi16162208, EVALUE 2.00e-93; SWISSPROT HIT: O35177, EVALUE 1.10e+00
gctcagcagggagctgctggatgagaaagagcctgaagtcttgcaggactcactggatagatgttattcgactccttcaggttatcttgaactgcctgacttaggccagccctacagcagtgctgtttactcattggaggaacagtaccttggcttggctcttgacgtggacagtgagtaccttactgtgaag

SEQ ID NO: 18022 - DNA, 156 bp, Homo sapiens
  MAP TO AL137006.2; EXPRESSED IN ADULT LIVER, SIGNAL = 0.59; EXPRESSED IN BONE MARROW, SIGNAL = 0.48; NT HIT: AE000766.1, EVALUE 1.40e-01; SWISSPROT HIT: Q59938, EVALUE 4.40e+00; EST_HUMAN HIT: BF738651.1, EVALUE 7.90e-01
ttaaagagtttttttaaagatagagacagtaagtttatttctgctatttgtcatgttggcaaaagtataggcttgttgaattttcttctcacaagatttgtaggttttaacctcctgagttttaaaattattgtcactgagaccaaaagtgaaaat

SEQ ID NO: 18023 - DNA, 190 bp, Homo sapiens
  MAP TO AL137859.2; EXPRESSED IN LUNG, SIGNAL = 0.52; EXPRESSED IN ADULT LIVER, SIGNAL = 0.59; EXPRESSED IN BONE MARROW, SIGNAL = 0.58; SWISSPROT HIT: P23179, EVALUE 4.30e+00; NT HIT: X68350.1, EVALUE 4.30e-02; EST_HUMAN HIT: AV733445.1, EVALUE 9.90e-01
aaaggagacttcagccaaaggccaatgagagaaaaggaaataaaggcttcaaggtctctggttggggttcacagctggaaatattatccaacagaagaactctggctggaaagaaggaacagcctctttgctcagatagcattgatgatgatactgttagtaatattatcaagctcctaatatgcatcag

SEQ ID NO: 18024 - DNA, 101 bp, Homo sapiens
  MAP TO AL109611.7; EXPRESSED IN BONE MARROW, SIGNAL = 0.47; EXPRESSED IN ADULT LIVER, SIGNAL = 0.44; EST_HUMAN HIT: BE465817.1, EVALUE 4.70e-01; NT HIT: AE008684.1, EVALUE 1.30e+00
tctctgtataacttcttcttccctatttcccataactgttgcctaagagaagaaaacatcaagtatcccatcaagttctggccttccctccctgtggttgc

SEQ ID NO: 18025 - DNA, 211 bp, Homo sapiens
  MAP TO AL159176.2; EXPRESSED IN BONE MARROW, SIGNAL = 1.3; NT HIT: AJ278581.1, EVALUE 5.00e-85; EST_HUMAN HIT: BE168410.1, EVALUE 2.00e-73; SWISSPROT HIT: P21414, EVALUE 8.00e-16
caaacaggtgagggctatccctaagcccttggggcaagactgtccacataagttgggacgtgtggtctgtgggatcctcaaaggcaaagagaaactgggagtcagagtgcaggggaatacagaagacatccttgaggtccagaacagtgaaccattctgcttcctctggtatttgagagagcagggtataggggttgagtacaactggata

SEQ ID NO: 18026 - DNA, 120 bp, Homo sapiens
  MAP TO AL136362.1; EXPRESSED IN BONE MARROW, SIGNAL = 0.45; EST_HUMAN HIT: T59559.1, EVALUE 9.00e-03; SWISSPROT HIT: Q63470, EVALUE 3.50e+00; NT HIT: AJ271735.1, EVALUE 6.00e-03
atgagtggttcaagcaagatagcagaacagaagcccatgtcattcatcattcccattggaacactaattttaacaaagatctgcacacagaaaaccaccatcattagaatcaaaatccag

SEQ ID NO: 18027 - DNA, 208 bp, Homo sapiens
  MAP TO AL133553.2; EXPRESSED IN BONE MARROW, SIGNAL = 0.46; EST_HUMAN HIT: BF350634.1, EVALUE 9.00e-63; SWISSPROT HIT: P74853, EVALUE 4.90e-01; NT HIT: AJ306906.1, EVALUE 1.00e-113
ccagtgtctcttctatctggttatagtcagattccacagaggatgcatgaagtgtttcaaccaagaaaggcattcttccctgtgcctgatcatagaaaacggtgtggttccatgtgtatgggatgctgatgccatcaatggtgaacagccgggttgagtaggcgtacagctgcccaggacctgtttgaatgtagtcctctgtgtaatc

SEQ ID NO: 18028 - DNA, 141 bp, Homo sapiens
  MAP TO CHR19.1; EXPRESSED IN HEART, SIGNAL = 2.5; EXPRESSED IN BONE MARROW, SIGNAL = 1.9; EXPRESSED IN ADULT LIVER, SIGNAL = 0.96; EXPRESSED IN PLACENTA, SIGNAL =   5; EXPRESSED IN FETAL LIVER, SIGNAL = 1.4; EXPRESSED IN LUNG, SIGNAL =   6; EST_HUMAN HIT: BG685448.1, EVALUE 2.00e-69; SWISSPROT HIT: P02561, EVALUE 3.00e-07; NT HIT: AF186110.1, EVALUE 3.00e-70
tacctctcactctcatctgcagctttttctgcctcctccagcttctgcagggccgtggccagtcgttcctgagccctgtccaactcctcctcaacgagctggatgcgtcggttgagggcggccacatcaccttcagcctgg

SEQ ID NO: 18029 - DNA, 218 bp, Homo sapiens
  MAP TO CHR7.1; EXPRESSED IN PLACENTA, SIGNAL = 1.9; EXPRESSED IN LUNG, SIGNAL = 1.4; EXPRESSED IN BONE MARROW, SIGNAL = 0.84; SWISSPROT HIT: P07942, EVALUE 2.00e-37; NT HIT: M61926.1, EVALUE 1.00e-107; EST_HUMAN HIT: BG986593.1, EVALUE 1.00e-89
tacgttcacagaaattaggatctcggatgtccctctctgggtgctggtagtaaaacggcttgcactgctcacagttgcgccccatggtgttgtgctgacagtcatcacacacgcctccgctgacgttccccgtggccaggtaaacagccatgtcaaagtgacaagagatggaatgttcattgcagttacattctgcgtgacaagagcaacgtcaagaa

SEQ ID NO: 18030 - DNA, 143 bp, Homo sapiens
  MAP TO CHR5.1; EXPRESSED IN HEART, SIGNAL = 1.1; EXPRESSED IN BONE MARROW, SIGNAL = 3.6; EXPRESSED IN ADULT LIVER, SIGNAL = 1.8; EXPRESSED IN FETAL LIVER, SIGNAL = 4.2; EXPRESSED IN LUNG, SIGNAL = 4.5; SWISSPROT HIT: Q10453, EVALUE 1.00e-15; NT HIT: M11354.1, EVALUE 1.00e-53; EST_HUMAN HIT: BG340764.1, EVALUE 9.00e-56
cggcatgctagctggatgtcttttggcataattgttacacgtttggcatggatagcacacaggtgggtgtcttcaaaaaggccaaccagttaggccttaattgcctcctgtaaagcaccaatagctgcactctggaagcacag

SEQ ID NO: 18031 - DNA, 266 bp, Homo sapiens
  MAP TO CHR3.1; EXPRESSED IN BONE MARROW, SIGNAL =   9; EXPRESSED IN HEART, SIGNAL =   4; EXPRESSED IN ADULT LIVER, SIGNAL =  10; EXPRESSED IN PLACENTA, SIGNAL =  23; EXPRESSED IN FETAL LIVER, SIGNAL =  16; EXPRESSED IN LUNG, SIGNAL =  19; SWISSPROT HIT: P47914, EVALUE 3.00e-39; NT HIT: gi14725776, EVALUE 0.00e+00; EST_HUMAN HIT: BG028565.1, EVALUE 0.00e+00
ggtgcttcgggagccgcggcttaaggtgtagacatggcgaagtccaagaaccacaccacacacaaccagtcccgaaaatggcacagaaatggtatcaagaaaccccgatcacaaagatacgaatctcttaagggggtggaccccaagttcctgaggaacatgcactttgccaagaagcacaacaagaagggcctaaagaagatgcaggccaacaatgccaaggccatgagtgcacgtgccgaggctatcaaggccctcgtaaagcc

SEQ ID NO: 18032 - DNA, 238 bp, Homo sapiens
  MAP TO CHR17.1; EXPRESSED IN HEART, SIGNAL = 0.98; EXPRESSED IN BONE MARROW, SIGNAL = 0.84; EXPRESSED IN ADULT LIVER, SIGNAL = 0.92; EXPRESSED IN FETAL LIVER, SIGNAL = 1.3; EXPRESSED IN LUNG, SIGNAL = 0.79; SWISSPROT HIT: O43791, EVALUE 8.00e-30; NT HIT: gi14773193, EVALUE 7.00e-97; EST_HUMAN HIT: AL526970.1, EVALUE 1.00e-96
tcatgaataaataccaacctgctaagatagccttgtgagcctggaattcctggccggcaacacacaagcagcagtctgtgaaccgggaattctcccacagtcctcctaactcatctgccagccggcactcaggaacctttaccatgttcatggtattctggccagaaatgttgacagaatcttgcacaacactcacctgtgaaagacaaggaaacacaagccaagcttttgttaccag

SEQ ID NO: 18033 - DNA, 231 bp, Homo sapiens
  MAP TO CHR16.1; EXPRESSED IN FETAL LIVER, SIGNAL = 1.6; EXPRESSED IN LUNG, SIGNAL = 0.84; EXPRESSED IN HEART, SIGNAL = 1.2; EXPRESSED IN BONE MARROW, SIGNAL = 0.93; EXPRESSED IN ADULT LIVER, SIGNAL = 1.3; EST_HUMAN HIT: BG394802.1, EVALUE 1.00e-122; SWISSPROT HIT: P28478, EVALUE 1.80e-01; NT HIT: gi14779912, EVALUE 1.00e-122
gctcaccctcgttccggcgcgagtgccgtggcgcgtagctgaactgcaggtcgatgtggcggttctggcgtgcctcggcgcggctgcgactgtggcaggccgtcctgtgggccttgaggtcgatctcggtgcggaaggcgtgggtgaactgctccgtgctgcagcggccttcctcacacagaaagtgcttctcccggaagtgctcacgcaggtaggcatagtcgctggcag

SEQ ID NO: 18034 - DNA, 191 bp, Homo sapiens
  MAP TO CHR9.1; EXPRESSED IN BONE MARROW, SIGNAL = 1.2; EXPRESSED IN PLACENTA, SIGNAL = 1.2; EXPRESSED IN FETAL LIVER, SIGNAL = 1.4; EXPRESSED IN LUNG, SIGNAL = 1.1; EXPRESSED IN HEART, SIGNAL = 1.4; NT HIT: gi14739857, EVALUE 2.00e-99; EST_HUMAN HIT: BE312721.1, EVALUE 3.00e-99; SWISSPROT HIT: Q9H4G0, EVALUE 5.60e+00
ctcacctacctgctgagcattgagatggagagctgaggcttgggctaaagcagaggagtggggctgggagtcctcaccccctgagaatagctcagccatcacttccccgatattcccaaatgggatgggcaggcccagcagcagggccagcgtgggcacaaggctaacttgaggaatcacctctggctcct

SEQ ID NO: 18035 - DNA, 170 bp, Homo sapiens
  MAP TO CHR22.1; EXPRESSED IN BONE MARROW, SIGNAL = 1.1; EXPRESSED IN ADULT LIVER, SIGNAL = 1.5; EXPRESSED IN FETAL LIVER, SIGNAL = 1.9; EXPRESSED IN LUNG, SIGNAL = 1.7; EXPRESSED IN HEART, SIGNAL = 1.4; SWISSPROT HIT: Q14166, EVALUE 4.00e-27; NT HIT: gi14779414, EVALUE 1.00e-85; EST_HUMAN HIT: BI757261.1, EVALUE 1.00e-83
gacttaccgccagtgtccaggtccctcaggggccacagcagcgtgtaggccacctgctgcggcatgtagaagaagggtgccgtggcgaagctgggcacgtccgcgtgctggatccgcgaaccgaactcgtccatgatataccacaccggcatcttctcctcagctgtctg

SEQ ID NO: 18036 - DNA, 413 bp, Homo sapiens
  MAP TO CHR5.1; EXPRESSED IN BONE MARROW, SIGNAL = 0.75; EXPRESSED IN FETAL LIVER, SIGNAL = 0.7; EXPRESSED IN LUNG, SIGNAL = 0.61; EXPRESSED IN HEART, SIGNAL = 0.86; EST_HUMAN HIT: BG719192.1, EVALUE 9.00e-77; SWISSPROT HIT: Q9Y5H8, EVALUE 8.00e-74; NT HIT: gi14727897, EVALUE 0.00e+00
gcgttgtcgttctcgtccagcacgaacacctgcagcgtcacgttgctgcccagaggcggcacgcccgcatcgcgcgcactcacctggaactgcagcagctctagctcctcgtggtccagcggctgcagcgcgtacaccttgccgctctccgcgtgtaccgacacgtagctcgacagcgcgcgctcccccacccgccgttccaccagcgagtaggacaccagggcgttctcctgcgcgtccgcgtcccgcgcagacaccgtgaagatgtggcagcccggcgggttgttctccttcacgaacaccgtgtactcggactgcgagaatgccggcgcattgtcgttcacgtcggccacctccacggacacgctggccgtggcccacagtgaaggcgagcccccgtcccgagcagtcac

SEQ ID NO: 18037 - DNA, 172 bp, Homo sapiens
  MAP TO CHR5.1; EXPRESSED IN LUNG, SIGNAL = 0.66; EXPRESSED IN HEART, SIGNAL = 0.99; EXPRESSED IN BONE MARROW, SIGNAL = 0.65; EXPRESSED IN ADULT LIVER, SIGNAL = 0.75; SWISSPROT HIT: Q9UKP5, EVALUE 2.00e-02; NT HIT: AE008672.1, EVALUE 1.50e-01
ttaattggcattggaaaatttaccttgttataagtatagctgcatccactgaagtcatgtcttccccccagtttgttgacatctctaaatgtatatcattctttttgccaaattcttcatgttgccacttacaaaaactctctagcattttttctccatgatgcccaatata

SEQ ID NO: 18038 - DNA, 435 bp, Homo sapiens
  MAP TO CHR19.1; EXPRESSED IN BONE MARROW, SIGNAL = 1.1; EXPRESSED IN HEART, SIGNAL = 0.92; EXPRESSED IN PLACENTA, SIGNAL = 1.6; EXPRESSED IN FETAL LIVER, SIGNAL = 0.84; EXPRESSED IN LUNG, SIGNAL = 0.74; SWISSPROT HIT: O75298, EVALUE 2.00e-52; NT HIT: gi14761420, EVALUE 0.00e+00; EST_HUMAN HIT: AL525835.1, EVALUE 0.00e+00
ttccagcggggtggagctgctggtggaagagtcctccccggatcccgttccccgggccacccagcccagatggtccaaccgaagcctcaggtcttccagagggcgctcggatggaggcgcggtgtcaggatcaccccgtcgtccaggctccggggattggctcaggctggggatgctctccaagctgtcgcccaggctgggctgagggtgctggtctcgtggttccgagactgagcggccctgggggcgggggcggcgggcagttgaatccctgcggcccccggagcccactacaccatcaaaggcgatgtaggagaaggtcagctcccggggggtgccccagtcctgcgacgtggtctcctcctcgtcctcctctgagaattcccgggctgtgtgcagctctcgaaaatcagagtcgtcgttccctcctgcagt

SEQ ID NO: 18039 - DNA, 203 bp, Homo sapiens
  MAP TO CHR11.1; EXPRESSED IN HEART, SIGNAL = 1.1; EXPRESSED IN BONE MARROW, SIGNAL = 0.56; EXPRESSED IN ADULT LIVER, SIGNAL = 1.3; EST_HUMAN HIT: BI857424.1, EVALUE 1.00e-110; NT HIT: gi16164431, EVALUE 1.00e-110; SWISSPROT HIT: P25193, EVALUE 1.90e+00
gtccccgactacgtggcacaccccgagcgctggaccaagtacagcctggaagatgtgaccgaggtcagcgagcagagcaatcaggccaccgccctggccttcctgggctcccagagcctggctgcccccactgactgcgtgtcctccttcaaccaggatccctccagctgtggggaggggagggtcatcttcaccaaaccagt

SEQ ID NO: 18040 - DNA, 184 bp, Homo sapiens
  MAP TO CHR12.1; EXPRESSED IN LUNG, SIGNAL = 0.74; EXPRESSED IN BONE MARROW, SIGNAL = 0.51; EXPRESSED IN FETAL LIVER, SIGNAL = 0.63; SWISSPROT HIT: Q9Y2J0, EVALUE 4.00e-24; EST_HUMAN HIT: BF310620.1, EVALUE 4.00e-83; NT HIT: gi13652750, EVALUE 3.00e-83
cccacactgccttttcccccaatgcagcaggtggagcgtgttggtgacatcgaggagcgtggcaagatcctggtctccctcatgtacagcacacagcagggaggcctcattgtgggcatcatacgctgcgtgcacctggctgccatggacgctaatggctactcagacccattcgtcaagctgt

SEQ ID NO: 18041 - DNA, 161 bp, Homo sapiens
  MAP TO CHR12.1; EXPRESSED IN BONE MARROW, SIGNAL = 1.9; EXPRESSED IN HEART, SIGNAL = 1.5; EXPRESSED IN ADULT LIVER, SIGNAL = 2.7; EXPRESSED IN PLACENTA, SIGNAL = 2.3; EXPRESSED IN FETAL LIVER, SIGNAL = 2.6; EXPRESSED IN LUNG, SIGNAL = 1.2; SWISSPROT HIT: Q10107, EVALUE 7.00e-15; EST_HUMAN HIT: BI838878.1, EVALUE 1.00e-85; NT HIT: gi16187901, EVALUE 4.00e-76
ctcagagtttgctgatgctgatggatagtcccctgaaccgagctggcttgctacaggtttatatccatacacagaagaatgttctgattgaagtgaatccccagacccgaattcccagaacctttgaccgcttttgtggcctcatgggtaagaagccttag

SEQ ID NO: 18042 - DNA, 200 bp, Homo sapiens
  MAP TO CHR12.1; EXPRESSED IN BONE MARROW, SIGNAL = 0.53; SWISSPROT HIT: P76350, EVALUE 2.80e-01; EST_HUMAN HIT: BE693635.1, EVALUE 1.00e+00; NT HIT: X16639.1, EVALUE 7.10e-01
ccccagccctgttttaggaagaacacatggtcctaattaccccaggagcgcatggctaatccgcggcaattcccagccccatcctaacactaaagcaccttctgtcaccaaactgcttaatggaattaacccagttccaaccatgtgctccctggtgcggcttccttcgaatacctgctccataattgctttcaggccct

SEQ ID NO: 18043 - DNA, 235 bp, Homo sapiens
  MAP TO CHR19.1; EXPRESSED IN BONE MARROW, SIGNAL = 0.5; EXPRESSED IN FETAL LIVER, SIGNAL = 0.4; EXPRESSED IN LUNG, SIGNAL = 0.56; EST_HUMAN HIT: AI367102.1, EVALUE 3.10e-01; NT HIT: AY029352.1, EVALUE 2.10e-01
attttcacttttattgttccagctgttttactgttaattgatacaacctatttattcataaataaatgtattcacagcaaaaatgtggataatcaaacctgatataaccatctgcctaaagatttaaatttcttcaaccttagaaaattcttaaatgcaatgattattcagtggctggaaaggactcttcttaacttatagtactttctgcagtttggtgaagataagatttctt

SEQ ID NO: 18044 - DNA, 205 bp, Homo sapiens
  MAP TO CHR7.1; EXPRESSED IN BONE MARROW, SIGNAL = 0.69; EXPRESSED IN FETAL LIVER, SIGNAL = 0.59; EXPRESSED IN LUNG, SIGNAL = 0.85; SWISSPROT HIT: O84252, EVALUE 1.10e+00; NT HIT: AF091847.1, EVALUE 7.30e-01; EST_HUMAN HIT: BE888763.1, EVALUE 2.00e-48
ttactggtgattttcacaccaacaatttctccatggggtttgtccttgactccaaaatggatggtgccattggtgcgtgaattcatacaagctgatgcaaatcggaagacttcattgctgaatttcatcttaatgtccacttccgtggctgtttctgtgtttgtgagagctttgaactcatgtattggatcaatgagattgagtg

SEQ ID NO: 18045 - DNA, 111 bp, Homo sapiens
  MAP TO CHR17.1; EXPRESSED IN HEART, SIGNAL = 1.2; EXPRESSED IN BONE MARROW, SIGNAL = 0.64; EXPRESSED IN LUNG, SIGNAL = 1.2; EXPRESSED IN FETAL LIVER, SIGNAL = 1.2; SWISSPROT HIT: P49748, EVALUE 2.00e-12; NT HIT: L46590.1, EVALUE 5.00e-56; EST_HUMAN HIT: AA777457.1, EVALUE 3.00e-52
tctctccccaacaggggagactgtggccgctttctgtctaaccgagccctcaagcgggtcagatgcagcctccatccgaacctctgctgtgcccagcccctgtggaaaata

SEQ ID NO: 18046 - DNA, 264 bp, Homo sapiens
  MAP TO CHR22.1; EXPRESSED IN HEART, SIGNAL = 0.86; EXPRESSED IN BONE MARROW, SIGNAL = 0.55; EXPRESSED IN FETAL LIVER, SIGNAL = 0.8; EXPRESSED IN LUNG, SIGNAL = 0.74; SWISSPROT HIT: P02452, EVALUE 2.80e-02; NT HIT: gi14778779, EVALUE 2.00e-72; EST_HUMAN HIT: BG338289.1, EVALUE 9.00e-02
aatgggcaggggaggctgtagccaggggtgcccccatcctgccaaagggacctggggccaacactggaccctgtttgacaggcagacaagaggccagcagagggcaaggctgggagcccgctcaagggccgactggtgacctcatggcggatgcccggggaccggcccacgctgttcaatccgttcctgctgtctctgggggtcctcaggtggcgaagggtaggctggctccagtggggactggaggggtgagggtggatagag

SEQ ID NO: 18047 - DNA, 224 bp, Homo sapiens
  MAP TO CHR9.1; EXPRESSED IN ADULT LIVER, SIGNAL = 0.71; EXPRESSED IN BONE MARROW, SIGNAL = 0.73; NT HIT: AF084377.1, EVALUE 1.00e-123; SWISSPROT HIT: Q9KNH3, EVALUE 1.30e-01; EST_HUMAN HIT: BG575022.1, EVALUE 1.00e-116
tacacaccccttgattatgctttgcttggtgagcgccatgaagtgatccagttcatgttggagcacggtgccctgtccatcgcagccatacaagacatcgccgccttcaaaatccaagctgtctacaaagggtacaaggtcagaaaagccttccgagacaggaaaaatctcctcatgaagcatgaacagttgagaaaagatgctgctgccaagtaagtatgagc

SEQ ID NO: 18048 - DNA, 260 bp, Homo sapiens
  MAP TO CHR15.1; EXPRESSED IN BONE MARROW, SIGNAL = 0.85; EXPRESSED IN FETAL LIVER, SIGNAL = 0.79; EXPRESSED IN HEART, SIGNAL = 0.97; EST_HUMAN HIT: F18176.2, EVALUE 3.50e-01; SWISSPROT HIT: P26805, EVALUE 2.70e+00; NT HIT: AE006252.1, EVALUE 2.40e-01
gccttctgtttgtcttgattaaagtcagcctccaccttcccccgagcccagttgcccttctcaggacacaggctgcattcaccatgggtctctctgcccaagctctttgcagattttatgaaaggcgttttcacttggattaaacaggcgctgtgtttgtgtgtggtgtgtgtgaaggagaaaatgaatcacttcaactttgggcaaggattttaggtgtagtgtttgtcccatgcaattacataaacacaccagaactc

SEQ ID NO: 18049 - DNA, 130 bp, Homo sapiens
  MAP TO CHR17.1; EXPRESSED IN HEART, SIGNAL = 0.6; EXPRESSED IN ADULT LIVER, SIGNAL = 0.47; EXPRESSED IN BONE MARROW, SIGNAL = 0.5; SWISSPROT HIT: Q49092, EVALUE 2.00e+00; EST_HUMAN HIT: BF356337.1, EVALUE 6.40e-01; NT HIT: AL161581.2, EVALUE 6.80e+00
tccattcatggaaaatcctaaaacttccttcatcccttcagtcagaatcttttcctcttttggtttggaagaaacccagaggtgttaaaactgaacatcttgaccgaatttcctccgggcaagctttccc

SEQ ID NO: 18050 - DNA, 340 bp, Homo sapiens
  MAP TO CHR2.1; EXPRESSED IN HEART, SIGNAL = 1.3; EXPRESSED IN BONE MARROW, SIGNAL = 0.72; EXPRESSED IN FETAL LIVER, SIGNAL = 0.58; NT HIT: X92412.1, EVALUE 0.00e+00; SWISSPROT HIT: Q02173, EVALUE 5.00e-11; EST_HUMAN HIT: AA192188.1, EVALUE 1.00e-53
aactctcagatattcattcatatctgttttgcctactgacagctccacccaaagccgaactggatgcccgattacacggtgatctggttaccatcagagcaggttctgatcttgttctggatgctgcagttggtggcaaacctgaacccaaaattatctggaccaaaggagacaaggagctagatctctgtgaaaaagtctctttgcagtatactggcaaacgagcaactgctgtgatcaagttctgtgacagaagtgacagtggaaaatacactttaacagtgaaaaatgccagcgggaccaaggccgtgtctgtcatggtcaaagtgcttggtaagca

SEQ ID NO: 18051 - DNA, 175 bp, Homo sapiens
  MAP TO CHR8.1; EXPRESSED IN BONE MARROW, SIGNAL = 0.54; EXPRESSED IN ADULT LIVER, SIGNAL = 0.42; EXPRESSED IN LUNG, SIGNAL = 0.63; EXPRESSED IN FETAL LIVER, SIGNAL = 0.52; EXPRESSED IN HEART, SIGNAL = 0.64; SWISSPROT HIT: P32945, EVALUE 3.30e+00; EST_HUMAN HIT: BI464939.1, EVALUE 5.80e-02; NT HIT: U62858.1, EVALUE 3.90e-02
aacttacctcttagcagtaaaatttttttccagttcctcattgtgaaccagttttgtatccccaaactgccataacgactgcagatcacagtttacatcaagcctgcactggttaagagtatcatgtataaaactatactctctactattggtgtaacaaggtgacaagtaaact

SEQ ID NO: 18052 - DNA, 105 bp, Homo sapiens
  MAP TO CHR15.1; EXPRESSED IN LUNG, SIGNAL = 0.92; EXPRESSED IN PLACENTA, SIGNAL = 1.8; EXPRESSED IN HEART, SIGNAL = 1.5; EXPRESSED IN BONE MARROW, SIGNAL = 0.66; SWISSPROT HIT: P35670, EVALUE 4.70e+00; EST_HUMAN HIT: H78405.1, EVALUE 5.00e-01; NT HIT: X81359.1, EVALUE 1.30e+00
aaaggagtggatgcaaacccggttgagacatacgacagtggggatgaatgggacattggagtagggaatctcatcattgacctggacgccgatctggaaaaggac

SEQ ID NO: 18053 - DNA, 220 bp, Homo sapiens
  MAP TO CHRX.1; EXPRESSED IN BONE MARROW, SIGNAL = 0.56; EXPRESSED IN HEART, SIGNAL = 0.68; EST_HUMAN HIT: BE304862.1, EVALUE 1.00e-06; SWISSPROT HIT: O14627, EVALUE 5.00e-34; NT HIT: AF029879.1, EVALUE 1.00e-121
ttgtgtttcaggtgaaaatctggtttcagaatcgcagagccaaggagagaaagatgatcaaaaagaaaatctcccagtttgagaatagtggaggctcggtgcaaagtgactctgactccatcagccctggggaactacctaacacttttttcaccacaccatctgctgttcgtggatttcaacctattgagatacagcaggttatagtctccgaatgaaa

SEQ ID NO: 18054 - DNA, 254 bp, Homo sapiens
  MAP TO CHR5.1; EXPRESSED IN HEART, SIGNAL =   1; EXPRESSED IN BONE MARROW, SIGNAL = 0.67; EXPRESSED IN FETAL LIVER, SIGNAL = 0.8; EXPRESSED IN LUNG, SIGNAL = 1.3; EST_HUMAN HIT: AW262883.1, EVALUE 3.40e-01; SWISSPROT HIT: P25502, EVALUE 4.30e+00; NT HIT: gi6755045, EVALUE 5.90e-02
caaatgaaatatcgattcaggttggagaatattttgatgttttagttttgttacagttcagttgttttagaaaatatgtaggtttggatttagttcagagtggttcactgggttttttgtttttaatggatttgatttatagttctgtaaaaagtttaatattgggtttaggtcagagaggacacattcagcaaaatagttgtttgtttccaattttggttcatggatcattacaaggccttggtgttgtagtt

SEQ ID NO: 18055 - DNA, 270 bp, Homo sapiens
  MAP TO CHR5.1; EXPRESSED IN FETAL LIVER, SIGNAL = 1.3; EXPRESSED IN LUNG, SIGNAL = 1.3; EXPRESSED IN BONE MARROW, SIGNAL = 0.95; EST_HUMAN HIT: BF826012.1, EVALUE 1.00e-110; SWISSPROT HIT: O96008, EVALUE 2.00e-29; NT HIT: AF043250.1, EVALUE 1.00e-110
caggagggttcagctgatggtgaggccaaagccactccgtaacttgttcttgcggtgattcaggaaggccccaagggccagtgtcaaaggcaggggcgggagcttcttctccagcgtggcacccacaatccagttgctgtccacagagcctttgaagaggaggttggccttgggcaggtccagctggtacccaaaggagacattggtgtcctgcatccttgtactggcctcaaactccacatccacctgcagttggtcactgggtttgtg

SEQ ID NO: 18056 - DNA, 214 bp, Homo sapiens
  MAP TO CHR5.1; EXPRESSED IN BONE MARROW, SIGNAL = 0.4; EST_HUMAN HIT: BE748681.1, EVALUE 5.00e-03; NT HIT: AF078541.1, EVALUE 1.20e-02
gccctgccagtcagtgccataagtgctttctgatacatttcctgcaagaaattaacccctatccaatggctttctgataacagaaagggaatgtatctaaattttattcagaaataaatttcagtggctgctgctctttacatgtagcagctgaacagcattaaatatttggatggccttctgatcgtatttagaataatgatgaaagccatga

SEQ ID NO: 18057 - DNA, 295 bp, Homo sapiens
  MAP TO CHR5.1; EXPRESSED IN FETAL LIVER, SIGNAL = 0.72; EXPRESSED IN HEART, SIGNAL = 0.69; EXPRESSED IN BONE MARROW, SIGNAL = 0.68; SWISSPROT HIT: Q9UN72, EVALUE 2.00e-51; EST_HUMAN HIT: BI547581.1, EVALUE 1.00e-108; NT HIT: gi14861872, EVALUE 0.00e+00
tggaaaacctgcagcggcctttccacgatcacctccaggtggatgctgcactccgcgctccgcccgcacagctcctcgcggtcgatccgagaattcacaaacaaaatgccattctgcagatttacctccagaagatccccacggaatttgcacaccgcccggaacaggcgcggcaccagctccgccagctccagccccaggtcctgcgcgatgcggcccacgaagttgccatgtttagcctcctcggggaccgagtagtggagctggcctctccctgcctcccaagctgctagaa

SEQ ID NO: 18058 - DNA, 224 bp, Homo sapiens
  MAP TO CHR12.1; EXPRESSED IN FETAL LIVER, SIGNAL = 1.1; EXPRESSED IN LUNG, SIGNAL = 1.7; EXPRESSED IN BONE MARROW, SIGNAL =   1; SWISSPROT HIT: O52027, EVALUE 1.10e+00; NT HIT: AF320229.1, EVALUE 1.00e-95; EST_HUMAN HIT: BE887675.1, EVALUE 1.00e-92
tgggctgcttgctctctttacatcatttttaacttaattctcacatccctagcgtccaatgcgaatttttgtgaatgatgaccgccatgtgatggcaaagcattcttccgtttatccaacacaagaggagctggaggcagtccagaacatggtgtcccacacggagcgggcgctcaaagctgtgtccgactggatagacgagcaggaaaagggtagcagcgagc

SEQ ID NO: 18059 - DNA, 327 bp, Homo sapiens
  MAP TO CHR12.1; EXPRESSED IN BONE MARROW, SIGNAL =  11; EXPRESSED IN FETAL LIVER, SIGNAL =  12; NT HIT: gi13648348, EVALUE 0.00e+00; SWISSPROT HIT: P47914, EVALUE 4.00e-44; EST_HUMAN HIT: BI760462.1, EVALUE 0.00e+00
gcttcccaagcttggggtgggcaatgtaggcaagtcaatcgagcttgtggctgacaccctttgggatcttgggcttaacctccttgggctttacgagggccttgatagcctcggcacgtgcactcatggccttggcattgttggcctgcatcttctttaggcccttcttgttgtgcttcttggcaaagcgcatgttcctcaggaacttggggtccacccccttaagagattcgtatctttgtgatcggggtttcttgataccatttctgtgccattttcaggactggttgtgtgtggtgtggttcttggacttggccatgtctgcac

SEQ ID NO: 18060 - DNA, 185 bp, Homo sapiens
  MAP TO AC023171.2; EXPRESSED IN ADULT LIVER, SIGNAL = 2.3; EXPRESSED IN PLACENTA, SIGNAL = 1.7; EXPRESSED IN FETAL LIVER, SIGNAL =   2; EXPRESSED IN LUNG, SIGNAL = 1.3; EXPRESSED IN BONE MARROW, SIGNAL =   2; EXPRESSED IN HEART, SIGNAL = 1.6; EST_HUMAN HIT: BE867986.1, EVALUE 2.00e-82; NT HIT: gi12731110, EVALUE 1.00e-82; SWISSPROT HIT: Q60716, EVALUE 1.00e-21
ttttcctctggttccacagctgggccaacaaaatggaagccttgactagcaagtcagctgctgatgctgagggctacctggctcaccctgtgaatgcctacaaactggtgaagcggctaaacacagactggcctgcgctggaggaccttgtcctgcaggactcagctgcaggtgagggacggtga

SEQ ID NO: 18061 - DNA, 189 bp, Homo sapiens
  MAP TO CHR17.1; EXPRESSED IN HEART, SIGNAL = 0.55; EXPRESSED IN BONE MARROW, SIGNAL = 0.39; NT HIT: gi14773925, EVALUE 6.00e-72; EST_HUMAN HIT: AA769268.1, EVALUE 1.00e-71
tctccatgcctcaaacatgcatgtcttccagatgaggaggaggaggaggagaacctagatgatcaggatgagcaaggcaacttgaaaggctttatcaatgacgatgatgatgaagatgaaggggaggaggatgagggcagtgactctggtgattcagaagatgatgttggccacaagaagagaaaacgc

SEQ ID NO: 18062 - DNA, 261 bp, Homo sapiens
  MAP TO CHR5.1; EXPRESSED IN FETAL LIVER, SIGNAL = 0.79; EXPRESSED IN LUNG, SIGNAL = 0.62; EXPRESSED IN HEART, SIGNAL = 0.72; EXPRESSED IN BONE MARROW, SIGNAL = 0.95; EXPRESSED IN ADULT LIVER, SIGNAL =   1; NT HIT: AJ131016.1, EVALUE 3.70e+00; SWISSPROT HIT: P33485, EVALUE 2.00e+00
atggctcatggccaactggctgccagcctgagcagaaagaaggggtctctttctgtgaacccccatcttagacagaggccctgaccccctccacctcatcttggcagcctgagattggagagagtgtctgccgccctggccttggcagagcgcgtgctcagcccagcccctgcagctgccagaacaggagctgaatgcccagtgtgtctgccagagcttgctaacttctttcttctttctctgagctatgaaaacagaggc

SEQ ID NO: 18063 - DNA, 119 bp, Homo sapiens
  MAP TO CHR7.1; EXPRESSED IN ADULT LIVER, SIGNAL = 0.93; EXPRESSED IN BONE MARROW, SIGNAL = 0.43; EXPRESSED IN HEART, SIGNAL = 0.92; EXPRESSED IN LUNG, SIGNAL = 0.62; SWISSPROT HIT: P07942, EVALUE 5.00e-20; EST_HUMAN HIT: AW390187.1, EVALUE 7.00e-56; NT HIT: gi14752238, EVALUE 5.00e-56
ttacttaccaggcactggtcacaatgctgtcctgtcaccagacgcttgcagtagcagtgacctgtctcggaatcacaaggattccctccaggaattgttcccagaggattgcaagcaca

SEQ ID NO: 18064 - DNA, 442 bp, Homo sapiens
  MAP TO CHR19.1; EXPRESSED IN ADULT LIVER, SIGNAL = 1.1; EXPRESSED IN FETAL LIVER, SIGNAL = 2.1; EXPRESSED IN LUNG, SIGNAL = 3.3; EXPRESSED IN HEART, SIGNAL = 3.1; EXPRESSED IN BONE MARROW, SIGNAL = 1.3; NT HIT: gi14787027, EVALUE 0.00e+00; SWISSPROT HIT: Q9Y6R0, EVALUE 2.00e-62; EST_HUMAN HIT: AA675899.1, EVALUE 0.00e+00
gggctacagttcaagtctcgaatgtcttttgcaggtcgccagaaaaggggttggagggtttctctacagtggctttgccttctaatgccgcccactgggcctcaaaggggtccaactctggagctggggcaggcgctggctcagggggccagggggccccattggggcgagggcgggcctggctcccaggggcactgggtatggcagggggcgggaaggccccagctttcccaagcagagtggcaggctgaggctggagctgggcggctgagcagaaggcgtttgccaccatctgtgagggtgtgatgcccaccacgggcacccggggcatcggtgggtagcccaagcccgggtaggcgggcacaaaagggggctgcatgtgtgggggtggcaggaacacggccacttgggcaggtgcagcgtcaaagggccccacgggggc

SEQ ID NO: 18065 - DNA, 207 bp, Homo sapiens
  MAP TO CHR5.1; EXPRESSED IN FETAL LIVER, SIGNAL = 1.9; EXPRESSED IN PLACENTA, SIGNAL = 1.4; EXPRESSED IN LUNG, SIGNAL = 1.3; EXPRESSED IN ADULT LIVER, SIGNAL = 2.6; EXPRESSED IN HEART, SIGNAL = 1.5; EXPRESSED IN BONE MARROW, SIGNAL = 1.5; SWISSPROT HIT: O95704, EVALUE 2.00e-35; EST_HUMAN HIT: BI833827.1, EVALUE 1.00e-107; NT HIT: AB024745.1, EVALUE 1.00e-113
tgtgggcaggcagaggccagtacagaggaggagccattgtggcagtgccctgtgcgccttgtgacatttattggtgttggccgcgacccacacacctttggcctcatcgctgacctgggccgtcagagcttccagtgcgcagccttctggtgccagccccatgcagggggactctctgaagctgtgcaggctgcctgtatggtgagt

SEQ ID NO: 18066 - DNA, 161 bp, Homo sapiens
  MAP TO CHR2.1; EXPRESSED IN LUNG, SIGNAL = 0.98; EXPRESSED IN HEART, SIGNAL = 1.2; EXPRESSED IN BONE MARROW, SIGNAL =   1; NT HIT: gi5031570, EVALUE 1.00e-72; SWISSPROT HIT: O15142, EVALUE 7.00e-13; EST_HUMAN HIT: BG684547.1, EVALUE 2.00e-72
tgcaggtttattgactggtgtagtggtagactctggagatggtgtgactcacatttgcccagtatatgaaggcttttctctccctcatcttaccaggagactggatattgctgggagggatataactagatatcttatcaaggtaagtgaaaggaaaatat

SEQ ID NO: 18067 - DNA, 251 bp, Homo sapiens
  MAP TO CHR19.1; EXPRESSED IN FETAL LIVER, SIGNAL = 2.3; EXPRESSED IN LUNG, SIGNAL = 1.1; EXPRESSED IN HEART, SIGNAL = 1.3; EXPRESSED IN BONE MARROW, SIGNAL = 1.5; EXPRESSED IN ADULT LIVER, SIGNAL = 2.6; EXPRESSED IN PLACENTA, SIGNAL = 2.8; SWISSPROT HIT: P19747, EVALUE 4.20e+00; EST_HUMAN HIT: AL535061.1, EVALUE 0.00e+00; NT HIT: AF037338.1, EVALUE 0.00e+00
caccttcaccgagtcctgctcctcatctgactgctcgtacaactcatcacccaggaagttccagggcgacttggtgctctgggcagcatagagctgccagcgccaaagcgagagtgggcagaaggagacgcggagcggcaggctggccaggctctcgttgatggggtagtagtccttctgcaggttccagtagtcattgaagtagatgatgggatagtagtcaccgctcacggcgtcgaacttcacatctg

SEQ ID NO: 18068 - DNA, 258 bp, Homo sapiens
  MAP TO CHR17.1; EXPRESSED IN PLACENTA, SIGNAL = 3.5; EXPRESSED IN LUNG, SIGNAL = 1.5; EXPRESSED IN ADULT LIVER, SIGNAL = 9.1; EXPRESSED IN BONE MARROW, SIGNAL = 2.7; SWISSPROT HIT: Q9Y252, EVALUE 7.10e-02; EST_HUMAN HIT: AI523551.1, EVALUE 0.00e+00; NT HIT: gi16164904, EVALUE 0.00e+00
cacagccgctgcgtggacccctggctcactcagacccggaagacctgccccatttgcaagcagcctgttcatcggggtcctggggacgaagaccaagaggaagaaactcaagggcaagaggagggtgatgaaggggagccaagggaccaccctgcctcagaaaggaccccacttttgggttctagccccactcttcccacctcctttggttccttagccccagctccccttgtttttcctgggccttcaacagatccc

SEQ ID NO: 18069 - DNA, 130 bp, Homo sapiens
  MAP TO CHR6.1; EXPRESSED IN BONE MARROW, SIGNAL = 2.4; EXPRESSED IN HEART, SIGNAL = 2.2; EXPRESSED IN ADULT LIVER, SIGNAL = 2.2; EXPRESSED IN PLACENTA, SIGNAL = 2.8; EXPRESSED IN FETAL LIVER, SIGNAL = 2.6; EXPRESSED IN LUNG, SIGNAL = 3.3; SWISSPROT HIT: P46695, EVALUE 2.00e-18; NT HIT: gi14782081, EVALUE 3.00e-67; EST_HUMAN HIT: AL532672.1, EVALUE 4.00e-67
tcctctggaggcaggggcgccggcacaccctcttcagccatcaggatctggcagaagacgatggtgagcagcagaaagagaagccttttggctgggttcggttcctcgactggcagctggcgccggacct

SEQ ID NO: 18070 - DNA, 191 bp, Homo sapiens
  MAP TO CHR17.1; EXPRESSED IN HEART, SIGNAL = 1.8; EXPRESSED IN BONE MARROW, SIGNAL = 1.6; EXPRESSED IN ADULT LIVER, SIGNAL = 2.1; EXPRESSED IN PLACENTA, SIGNAL = 1.7; EXPRESSED IN LUNG, SIGNAL = 1.6; EXPRESSED IN FETAL LIVER, SIGNAL = 1.3; SWISSPROT HIT: Q9P286, EVALUE 1.10e-02; NT HIT: gi13878214, EVALUE 3.00e-46
acctttccaacatgtactccaggttggtcagcctcgcttcacctggggagatgatatggacagcataggagctgagggagcggtggataaacccctggaaatgcaggtatctcagggcatcagatatctggagcagcaggtgcacaatcacctccatgtgcagcactgggaactgggaccgctgcaagcaa

SEQ ID NO: 18071 - DNA, 319 bp, Homo sapiens
  MAP TO CHR17.1; EXPRESSED IN FETAL LIVER, SIGNAL = 0.63; EXPRESSED IN LUNG, SIGNAL = 1.4; EXPRESSED IN BONE MARROW, SIGNAL = 0.7; EXPRESSED IN ADULT LIVER, SIGNAL = 1.2; SWISSPROT HIT: Q9UKX3, EVALUE 5.00e-51; NT HIT: gi13632178, EVALUE 0.00e+00; EST_HUMAN HIT: BF825974.1, EVALUE 3.00e-17
gtgctcaccttgagctggccctggaccgtgcgcagatgcttctgggtctctgccatctggcggttggagtggcccagctgaatctccatctcattaaggtctccctccatcttcttctttagcctcagggcgtcgttccggctgcggatttcagcatccagcacgctctgcagggcctctgctgcccgctggctgtttctttttagctgctcgatttcttcatccttctcaatgaccttgcggtctagctcggatttcacctggctcagctctagctgcacgcgcaagatcttgctctcctcgtgttccaaggaaccct

SEQ ID NO: 18072 - DNA, 147 bp, Homo sapiens
  MAP TO CHR11.1; EXPRESSED IN HEART, SIGNAL = 0.66; EXPRESSED IN ADULT LIVER, SIGNAL = 0.67; EXPRESSED IN BONE MARROW, SIGNAL = 0.89; EXPRESSED IN FETAL LIVER, SIGNAL = 1.1; EST_HUMAN HIT: AU130245.1, EVALUE 5.00e-76; SWISSPROT HIT: Q99733, EVALUE 9.00e-22; NT HIT: gi14774414, EVALUE 2.00e-74
accttgtcaaagagaggctggtatagcgctgcatactttctttccaagtcatgtacctcttcatagaacttggcttctatgtgagcacatctcacctgaagttgtttcaatgcattaattcttctttttactgctttaggtaaacta

SEQ ID NO: 18073 - DNA, 245 bp, Homo sapiens
  MAP TO CHR14.1; EXPRESSED IN HEART, SIGNAL = 0.87; EXPRESSED IN BONE MARROW, SIGNAL = 0.67; EXPRESSED IN FETAL LIVER, SIGNAL = 0.59; EXPRESSED IN LUNG, SIGNAL = 0.89; SWISSPROT HIT: P79802, EVALUE 4.00e-37; NT HIT: AF109907.1, EVALUE 0.00e+00; EST_HUMAN HIT: AW376925.1, EVALUE 1.00e-122
ttttcagggaagtgtttaaaacctataacgttgctgtggactacattactgttgcactcctgatctggaattttggtgtggtgggaatgatttccattcactggaaaggtccacttcgactccagcaggcatatctcattatgattagtgccctcatggccctggtgtttatcaagtacctccctgaatggactgcgtggctcatcttggctgtgatttcagtatatggtaaaacccaagactga

SEQ ID NO: 18074 - DNA, 193 bp, Homo sapiens
  MAP TO CHR22.1; EXPRESSED IN HEART, SIGNAL = 0.56; EXPRESSED IN ADULT LIVER, SIGNAL =   1; EXPRESSED IN BONE MARROW, SIGNAL = 0.77; EXPRESSED IN LUNG, SIGNAL = 0.61; NT HIT: AB049213.1, EVALUE 1.00e-94; EST_HUMAN HIT: BG721951.1, EVALUE 2.00e-94; SWISSPROT HIT: Q64739, EVALUE 1.10e-02
ccttgactctggcccagctgctgggactcctgggcagcctgttcttcctgggccaggccctcatggccatgctggtgtacgtgtggagccgccgcagccctcgggtgagggtcaacttcttcggcctgctcactttccaggcaccgttcctgccttgggcgctcatgggcttctcgctgctgctgggcaactc

SEQ ID NO: 18075 - DNA, 222 bp, Homo sapiens
  MAP TO CHR14.1; EXPRESSED IN BONE MARROW, SIGNAL = 0.68; EXPRESSED IN LUNG, SIGNAL = 0.76; EXPRESSED IN FETAL LIVER, SIGNAL = 0.52; EXPRESSED IN HEART, SIGNAL = 0.76; SWISSPROT HIT: P04436, EVALUE 1.00e-07; NT HIT: Z46644.1, EVALUE 9.00e-87; EST_HUMAN HIT: AI765523.1, EVALUE 1.00e-122
ggcagatgattctcgttattcgccaagaagcttataagcaacagaatgcaacagagaatcgtttctctgtgaacttccagaaagcagccaaatccttcagtctcaagatctcagactcacagctgggggatgccgcgatgtatttctgtgcttataggagcgcacagtgagacaagcaacagggagaggcttacagaaacctcagacctcagcatctgtgca

SEQ ID NO: 18076 - DNA, 119 bp, Homo sapiens
  MAP TO CHR7.1; EXPRESSED IN BONE MARROW, SIGNAL = 0.46; EXPRESSED IN LUNG, SIGNAL = 0.57; EST_HUMAN HIT: BF752989.1, EVALUE 2.30e+00
ttcataaactgtaatattcctgtagaaagcgataacagccatgttagatgctgtgatttttttaataaaagcgatacagcatctttccttagcagaaatctcaaaccaaaaattaaaat

SEQ ID NO: 18077 - DNA, 201 bp, Homo sapiens
  MAP TO CHR18.1; EXPRESSED IN HEART, SIGNAL = 1.6; EXPRESSED IN BONE MARROW, SIGNAL = 1.8; EXPRESSED IN ADULT LIVER, SIGNAL = 1.9; EXPRESSED IN FETAL LIVER, SIGNAL = 1.8; EXPRESSED IN LUNG, SIGNAL = 1.1; SWISSPROT HIT: P13641, EVALUE 1.00e-30; NT HIT: gi14764579, EVALUE 1.00e-105; EST_HUMAN HIT: AA485205.1, EVALUE 1.00e-105
ctttaggtgtggatgtcagcatgaatacacatcttaaagctgtgaaaatgaccctgaagaacagagaacctgtacagctggaaacgctgagtattcgaggaaataacattcggtattttattctaccagacagtttacctctggatacactacttgtggatgttgaacctaaggtgaaatctaagaaaagggaagctggta

SEQ ID NO: 18078 - DNA, 140 bp, Homo sapiens
  MAP TO CHR12.1; EXPRESSED IN PLACENTA, SIGNAL = 1.8; EXPRESSED IN FETAL LIVER, SIGNAL = 1.5; EXPRESSED IN LUNG, SIGNAL = 0.89; EXPRESSED IN HEART, SIGNAL =   1; EXPRESSED IN ADULT LIVER, SIGNAL = 1.7; EXPRESSED IN BONE MARROW, SIGNAL = 1.7; EST_HUMAN HIT: BF526767.1, EVALUE 7.00e-04; NT HIT: AF224263.1, EVALUE 1.00e-04
tgcagcagtctgggtgggcgggggcgccatgacaaagtgaaggtcaagttagcatcgtaccttataaggaaggcgccggtcctccatttcagccttttctctgccaggacgcggccgtggcatttctggtcttgtaaaca

SEQ ID NO: 18079 - DNA, 234 bp, Homo sapiens
  MAP TO CHR1.1; EXPRESSED IN LUNG, SIGNAL = 9.3; EXPRESSED IN HEART, SIGNAL = 4.8; EXPRESSED IN BONE MARROW, SIGNAL = 3.5; EXPRESSED IN ADULT LIVER, SIGNAL = 1.8; SWISSPROT HIT: P47914, EVALUE 5.00e-30; NT HIT: AF116627.1, EVALUE 3.00e-96; EST_HUMAN HIT: AA534252.1, EVALUE 7.00e-98
gggttacagtgcagacatggccaagtccaagaaccacaccacacacaactggtcccgaatatggcacagaaattgcctcaagaaaccccaatcacaaagatacgaatctcttaaggggtggaccccaagttcctgaggaacatgcgctttgccaagaagcacaacaagaagggcctaaagaagatgcaggccaacaatgccaaggccatgagtgcacgtgcaaaggctatcaag

SEQ ID NO: 18080 - DNA, 222 bp, Homo sapiens
  MAP TO CHR17.1; EXPRESSED IN HEART, SIGNAL = 1.1; EXPRESSED IN BONE MARROW, SIGNAL = 1.5; EST_HUMAN HIT: BE258972.1, EVALUE 1.20e+00; SWISSPROT HIT: O51155, EVALUE 3.60e-01; NT HIT: AB033617.1, EVALUE 3.00e-03
gacactgaccttggccatgctgttggggtaattggactttcaggatggactctccgaacaatcttgccactgtggctggcacaaacaggcttttctttaacagcagacgttcatgtcttcttgctccaacttttttttcttgaacaaacatatgtattgtggccaatgcaaggaaaatcccactcaccattttgatctgagttgcttctgtcctggaacaat

SEQ ID NO: 18081 - DNA, 329 bp, Homo sapiens
  MAP TO CHR20.1; EXPRESSED IN LUNG, SIGNAL = 0.79; EXPRESSED IN HEART, SIGNAL = 0.53; EXPRESSED IN BONE MARROW, SIGNAL = 0.61; EST_HUMAN HIT: BG506569.1, EVALUE 0.00e+00; NT HIT: gi9055315, EVALUE 0.00e+00; SWISSPROT HIT: P52741, EVALUE 2.00e-09
tcttgtgttcctcttagagaacgccagatcaagtgtcccaagtgtgataagctgttcttgagaacaaatcacttaaagaagcatctcaattctcatgaaggaaaacgggattatgtctgtgaaaaatgtacaaaggcttatctaaccaaataccatctcacccgccacctgaaaacctgcaaagggcccacctccagttcgtcagcaccagaggaggaagaagaggatgactcagaagaggaagatctagcagactctgtggggacagaagactgtaggattaacagtgctgtgtattcagcggatgagtctctttctgcacataaata

SEQ ID NO: 18082 - DNA, 131 bp, Homo sapiens
  MAP TO CHR5.1; EXPRESSED IN ADULT LIVER, SIGNAL = 1.4; EXPRESSED IN BONE MARROW, SIGNAL = 1.1; EXPRESSED IN FETAL LIVER, SIGNAL = 0.72; EXPRESSED IN HEART, SIGNAL = 0.57; EST_HUMAN HIT: H01771.1, EVALUE 1.60e-01
agctatttttagttgcatgagacacaaagactatataatcatcataaagatgtcagctggccccagcctttcccaggcacctgctggaatgattcatttgactaatgacacagtatctgcatatggagacc

SEQ ID NO: 18083 - DNA, 133 bp, Homo sapiens
  MAP TO CHR19.1; EXPRESSED IN HEART, SIGNAL = 2.1; EXPRESSED IN BONE MARROW, SIGNAL = 2.8; EXPRESSED IN ADULT LIVER, SIGNAL = 2.9; NT HIT: AF084941.1, EVALUE 7.00e+00; EST_HUMAN HIT: AW732958.1, EVALUE 3.00e-52; SWISSPROT HIT: P49959, EVALUE 1.20e+00
tggggaggggaacaggatgatcgagatgcctatgaggagatcgtgaggctgcggcaggagaggggccgcctcctgcagaagatccggggcctggaacagcacaaggaacggaggcagcaggaggttaggaggc

SEQ ID NO: 18084 - DNA, 299 bp, Homo sapiens
  MAP TO CHR8.1; EXPRESSED IN ADULT LIVER, SIGNAL = 1.2; EXPRESSED IN BONE MARROW, SIGNAL = 0.83; EXPRESSED IN FETAL LIVER, SIGNAL = 0.73; EXPRESSED IN LUNG, SIGNAL = 0.66; EXPRESSED IN HEART, SIGNAL = 0.88; EST_HUMAN HIT: AI027207.1, EVALUE 0.00e+00; SWISSPROT HIT: P80299, EVALUE 4.60e+00
ggacagcgccgggcagtcaggcgtatgcggctgtcctccgcagggctccagggccgggcgtagccggcgtggggcagcagcagctggtcctgtgtgccgtcggggctgacaagacgctggacagccatcaggtagtcccggtggggtgccagcatcgggcaggggcagtggcctggcgcccacacgtactcgcgtgcccgcagtggcgagcggttcttgtagacgagctggatgcgcacctcatagcgggtctcctgggcctggtggtggtggcccagcactcgggcctggaacactgt

SEQ ID NO: 18085 - DNA, 214 bp, Homo sapiens
  MAP TO CHR2.1; EXPRESSED IN BONE MARROW, SIGNAL = 0.64; EXPRESSED IN FETAL LIVER, SIGNAL = 0.6; SWISSPROT HIT: P19447, EVALUE 1.00e-35; NT HIT: gi14728080, EVALUE 1.00e-114; EST_HUMAN HIT: BI917632.1, EVALUE 1.00e-114
aggaaatgattgaggaactccagaaacgttgcatccacctggagtaccctctgttggcagaatatgacttccggaatgattctgtcaaccctgatatcaacattgacctaaagcccacagctgtcctcagaccctatcaggagaagagcttgcgaaagatgtttggaaacgggcgtgcacgttcgggggtcattgttcttccctgcggtaagtg

SEQ ID NO: 18086 - DNA, 339 bp, Homo sapiens
  MAP TO CHR1.1; EXPRESSED IN PLACENTA, SIGNAL = 3.1; EXPRESSED IN FETAL LIVER, SIGNAL = 0.87; EXPRESSED IN LUNG, SIGNAL = 1.4; EXPRESSED IN HEART, SIGNAL = 1.4; EXPRESSED IN BONE MARROW, SIGNAL = 0.89; EST_HUMAN HIT: BF031423.1, EVALUE 1.00e-120; SWISSPROT HIT: P15121, EVALUE 3.00e-45; NT HIT: gi14745038, EVALUE 1.00e-120
ctcaacaatggcaccaagatgcccatcctggggctaggcacctggaattcccctccaggccaggtaactgaggctgtgaaggtggccattaatgttgggtactgccacatcgactgtgcccacgtgtaccagaatgagaatgacgtgggggtggccattcgggagaagctcagggagcaggtggtgaagtgtgaggagctcttcatcaccagcaagctgtggtgagcgtaccatgagaagggcctggtgaaaggagcctgccagaagatgctcattgacctgaagctggactacctggacctctaccttattcgctggccaaccagcttcaagcctggg

SEQ ID NO: 18087 - DNA, 220 bp, Homo sapiens
  MAP TO CHR15.1; EXPRESSED IN FETAL LIVER, SIGNAL = 1.5; EXPRESSED IN ADULT LIVER, SIGNAL = 1.6; EXPRESSED IN BONE MARROW, SIGNAL =   1; NT HIT: gi14752313, EVALUE 1.00e-118; EST_HUMAN HIT: AL532047.1, EVALUE 1.00e-114; SWISSPROT HIT: P51448, EVALUE 1.00e-26
tttcatgtttgtacttcagacattctagaagtgcttaggtgataacatttacccatcaatttgcattgctggctcaaattctgaagtgaacaactccttgtataatggaggaaaatgaagtcgcacaatgtctgggtatattgctttaaatgccattagcttttctgtatgtcgtccacataaggctcttaaggtagacaccttgcatattaactgtaag

SEQ ID NO: 18088 - DNA, 120 bp, Homo sapiens
  MAP TO CHR20.1; EXPRESSED IN BONE MARROW, SIGNAL = 0.63; EXPRESSED IN FETAL LIVER, SIGNAL = 0.69; EXPRESSED IN PLACENTA, SIGNAL = 3.7; NT HIT: gi14770097, EVALUE 2.00e-61; EST_HUMAN HIT: BI818403.1, EVALUE 3.00e-61; SWISSPROT HIT: P35713, EVALUE 6.00e-09
cacgtggcactggccaaactgggcccgcgcgccatgtcctgcccagaggagagcagcctgatctccgcgctgtcggacgccagcagcgcggtctattacagcgcgtgcatctccggctag

SEQ ID NO: 18089 - DNA, 272 bp, Homo sapiens
  MAP TO CHR7.1; EXPRESSED IN HEART, SIGNAL = 4.9; EXPRESSED IN BONE MARROW, SIGNAL = 3.7; EXPRESSED IN ADULT LIVER, SIGNAL = 1.3; EXPRESSED IN FETAL LIVER, SIGNAL = 4.3; EXPRESSED IN LUNG, SIGNAL = 6.9; SWISSPROT HIT: P21333, EVALUE 5.00e-42; NT HIT: AF184120.1, EVALUE 0.00e+00; EST_HUMAN HIT: BI046866.1, EVALUE 5.00e-68
cactggcccactcaccgggggcgcagttgtccaccagggcgcccagagctttgccgtcctgccagtcacggttgaagttggtgatgggcagctggggcaccttgttctggatccagccaagcagccgctgcttgggcgtctgtttgcgggcatcctcatcatcttcatcctcccacatgggcatggagatggagtagtgcaggatcagcgtccagatcaggcccaggatcagcttcaggttcccatccacgatggccttgctgtctgcagag

SEQ ID NO: 18090 - DNA, 287 bp, Homo sapiens
  MAP TO CHR6.1; EXPRESSED IN PLACENTA, SIGNAL = 1.5; EXPRESSED IN FETAL LIVER, SIGNAL = 1.3; EXPRESSED IN LUNG, SIGNAL = 4.8; EXPRESSED IN BONE MARROW, SIGNAL = 0.69; EXPRESSED IN HEART, SIGNAL = 1.1; EST_HUMAN HIT: BF345007.1, EVALUE 3.00e-60; NT HIT: gi4502922, EVALUE 2.00e-60; SWISSPROT HIT: Q15417, EVALUE 7.00e-11
aaatcagtgatagtgattatcacacagaatacccagatgactaacatggcgagtaccaaggtgactgccctagagattaccaatatggcgaccaaggcattgatcactagattcacagaaaagaactcagtatttagtctactgttttcattcagtgagaaccaagctatctttaaataatttttatcttgtcttcctaaaacactattaagcttattgtaccttaaaaaaatgacttatatacattcctttctcctgtatctgcctcttccctaaatagttgcctt

SEQ ID NO: 18091 - DNA, 155 bp, Homo sapiens
  MAP TO CHR14.1; EXPRESSED IN LUNG, SIGNAL = 1.1; EXPRESSED IN BONE MARROW, SIGNAL =   1; EXPRESSED IN HEART, SIGNAL = 1.1; EXPRESSED IN ADULT LIVER, SIGNAL = 1.6; NT HIT: gi16189326, EVALUE 1.00e-81; SWISSPROT HIT: P46959, EVALUE 9.00e-03; EST_HUMAN HIT: AI668655.1, EVALUE 2.00e-81
caggtcgggcggtggcaggctgacagtgcgcacgttgtagacctgtggcagcacctccagggtgctcagctctgagaagccgcgcgctgccagcgcctggcatgtgcgttgcacctgctcgatgcacggtgagaaggagcagaagcgcccgcctg

SEQ ID NO: 18092 - DNA, 247 bp, Homo sapiens
  MAP TO CHR11.1; EXPRESSED IN PLACENTA, SIGNAL =  23; EXPRESSED IN LUNG, SIGNAL =  23; EXPRESSED IN BONE MARROW, SIGNAL = 5.6; EXPRESSED IN HEART, SIGNAL = 3.2; NT HIT: gi14783667, EVALUE 0.00e+00; SWISSPROT HIT: P46405, EVALUE 7.00e-40; EST_HUMAN HIT: BG706335.1, EVALUE 1.00e-127
tttatttcttcatttcttgcatttgaaatactcttcgatgacatccttggcctgagactccttgccatagtccttaactactacacaactgtaaccaaccactttatggggtttcccctctctgtcaattttacagaggcctacccattctcctagtttcttgttggcatcaaccttaattaggttgatttggtgttcagcacaaagggcctccaccaacttgacatacataggctcatcacagttg

SEQ ID NO: 18093 - DNA, 272 bp, Homo sapiens
  MAP TO CHR6.1; EXPRESSED IN HEART, SIGNAL = 1.5; EXPRESSED IN BONE MARROW, SIGNAL = 1.1; EXPRESSED IN ADULT LIVER, SIGNAL = 1.9; EXPRESSED IN PLACENTA, SIGNAL = 3.3; EXPRESSED IN FETAL LIVER, SIGNAL = 1.5; EXPRESSED IN LUNG, SIGNAL = 2.3; SWISSPROT HIT: O35984, EVALUE 1.00e-31; EST_HUMAN HIT: AL576644.1, EVALUE 0.00e+00; NT HIT: X80700.1, EVALUE 0.00e+00
gcctgcatgctaggcctcagcattcggagctcccaggaggaggagccggtggacccacagctgatgcgcttggacaacatgcttctggcagagggtgtggctgggcccgagaaagggggcggctcagcagcagcagctgcagccgctgcagcctctggtggtggtgtgtcccctgacaactccatcgaacactcggactatcgcagcaaacttgcccagatccgtcacatataccactcggagctggagaagtatgagcaggtaaggagagg

SEQ ID NO: 18094 - DNA, 199 bp, Homo sapiens
  MAP TO CHR17.1; EXPRESSED IN HEART, SIGNAL = 1.4; EXPRESSED IN BONE MARROW, SIGNAL = 0.73; EXPRESSED IN FETAL LIVER, SIGNAL = 1.2; EXPRESSED IN LUNG, SIGNAL = 0.96; NT HIT: gi11426182, EVALUE 1.00e-106; SWISSPROT HIT: Q92830, EVALUE 6.00e-33; EST_HUMAN HIT: BE790845.1, EVALUE 1.00e-105
ctacttgtcaatgaggcctccctccttgagcttgaagtagaagaacttctccagggcgctggcacagcggcagtactcgctgtccggggggttgtactcgcgacagttggcgatgacccgctgcaggtcggccacaaagagcttccgggtcacgtagtagcggcttcgcagccgctcagtcatggtcttcaggtctggg

SEQ ID NO: 18095 - DNA, 203 bp, Homo sapiens
  MAP TO CHR6.1; EXPRESSED IN FETAL LIVER, SIGNAL = 1.9; EXPRESSED IN LUNG, SIGNAL = 2.5; EXPRESSED IN BONE MARROW, SIGNAL = 1.4; EXPRESSED IN HEART, SIGNAL = 1.3; EST_HUMAN HIT: BG291455.1, EVALUE 1.00e-100; SWISSPROT HIT: O75955, EVALUE 5.00e-09; NT HIT: gi14761443, EVALUE 1.00e-100
tcagggaggggacatttacttctctgcctcggctaggcgctccagcttgtagcgctccgcttccgctggcttccgcacccgggcctccagctccttctcccgccgggcgatctcctgctcctgcactgccacctgctgggcccgctccaccacctgcacctgcacccgctgctcctcaatctgctgcttagtcttggccacct

SEQ ID NO: 18096 - DNA, 245 bp, Homo sapiens
  MAP TO CHR19.1; EXPRESSED IN ADULT LIVER, SIGNAL = 1.9; EXPRESSED IN BONE MARROW, SIGNAL = 1.2; EXPRESSED IN FETAL LIVER, SIGNAL = 1.9; EXPRESSED IN LUNG, SIGNAL = 1.1; EST_HUMAN HIT: BI493124.1, EVALUE 0.00e+00; NT HIT: gi16163172, EVALUE 0.00e+00
ataatagagaacggagaccaacctgggctgaagaaagaagattaaatgctgaaacatttggaatcccacttcgtccaaaccgtggccgtgggggatacagaggcagaggaggtcttggtttccgtggtggcagagggcgtggtggtggcagaggtggtaccttcactgcccctcgaggatttcgcggtggattcagaggaggtcgtgggggccgggagtttgcggattttgaatatagggtaagt

SEQ ID NO: 18097 - DNA, 350 bp, Homo sapiens
  MAP TO CHR17.1; EXPRESSED IN LUNG, SIGNAL = 0.61; EXPRESSED IN HEART, SIGNAL = 0.76; EXPRESSED IN ADULT LIVER, SIGNAL = 0.71; EXPRESSED IN BONE MARROW, SIGNAL = 0.55; EXPRESSED IN FETAL LIVER, SIGNAL = 0.49; SWISSPROT HIT: Q09415, EVALUE 4.00e-04; NT HIT: gi16164950, EVALUE 0.00e+00; EST_HUMAN HIT: BE079546.1, EVALUE 0.00e+00
aaaagagtcaacctcagggcaatgtggcaaaagacacccagtgtgagaagcagccctcccagaggacattctgtcctgtggtagagctcccaggcctgctgcaaacactcctggctgcaatacttggcataactgcatccgtcacacggaactgtggccaaagtgtgcttcaaacatcggtgacaatagaggtccccattggtgactctggtgtcccatttgctgtctaggccgtgatgcggtggtggcagttctcctgggttgagaacactcacaaaagcatcctcctgcaccaggagctctcctgggagaatatcttttgtggcaacgagacagcgaccttttaaagg

SEQ ID NO: 18098 - DNA, 261 bp, Homo sapiens
  MAP TO CHR10.1; EXPRESSED IN BONE MARROW, SIGNAL = 0.78; EXPRESSED IN ADULT LIVER, SIGNAL = 1.6; EXPRESSED IN FETAL LIVER, SIGNAL = 0.85; EXPRESSED IN LUNG, SIGNAL = 0.77; SWISSPROT HIT: O08586, EVALUE 2.00e-44; NT HIT: AF143314.1, EVALUE 0.00e+00; EST_HUMAN HIT: AW188300.1, EVALUE 0.00e+00
ttatctttttaccacagttgcacaatatccttttgaagaccataacccaccacagctagaacttatcaaacccttttgtgaagatcttgaccaatggctaagtgaagatgacaatcatgttgcagcaattcactgtaaagctggaaagggacgaactggtgtaatgatatgtgcatatttattacatcggggcaaatttttaaaggcacaagaggccctagatttctatggggaagtaaggaccagagacaaaaaggtaag

SEQ ID NO: 18099 - DNA, 246 bp, Homo sapiens
  MAP TO CHR19.1; EXPRESSED IN FETAL LIVER, SIGNAL = 2.1; EXPRESSED IN LUNG, SIGNAL = 0.67; EXPRESSED IN HEART, SIGNAL = 0.52; EXPRESSED IN BONE MARROW, SIGNAL = 1.2; EXPRESSED IN ADULT LIVER, SIGNAL = 0.91; SWISSPROT HIT: P17426, EVALUE 1.00e-37; NT HIT: AF289221.1, EVALUE 0.00e+00; EST_HUMAN HIT: BG767415.1, EVALUE 1.00e-130
cacagccccccagtgcagttctccctgctccactccaagttccatctgtgcagcgtggccacgcgggcgctgctgctgtccacctacatcaagttcatcaacctcttccccgagaccaaggccaccatccagggcgtcctgcgggccggctcccagctgcgcaatgctgacgtggagctgcagcagcgagccgtggagtacctcaccctcagctcagtggccagcaccgacgtcctggtcagagcc

SEQ ID NO: 18100 - DNA, 125 bp, Homo sapiens
  MAP TO CHR16.1; EXPRESSED IN FETAL LIVER, SIGNAL = 0.51; EXPRESSED IN LUNG, SIGNAL = 0.88; EXPRESSED IN HEART, SIGNAL = 0.76; EXPRESSED IN BONE MARROW, SIGNAL = 0.41; EXPRESSED IN ADULT LIVER, SIGNAL = 0.63; SWISSPROT HIT: P25611, EVALUE 3.50e+00; NT HIT: AF026954.1, EVALUE 9.00e-27; EST_HUMAN HIT: BE078405.1, EVALUE 3.00e-52
tcctcaggaacatgcatggcccccaccaggtcgtgcacgttgaggagatggtgaagctcggccactttcttgggggagatgatctcagaagggatacctataacactgccacagaacacaaggga

SEQ ID NO: 18101 - DNA, 209 bp, Homo sapiens
  MAP TO CHR22.1; EXPRESSED IN PLACENTA, SIGNAL = 1.7; EXPRESSED IN FETAL LIVER, SIGNAL =   2; EXPRESSED IN LUNG, SIGNAL = 1.3; EXPRESSED IN HEART, SIGNAL = 1.9; EXPRESSED IN BONE MARROW, SIGNAL = 1.4; EST_HUMAN HIT: BG910693.1, EVALUE 1.00e-114; SWISSPROT HIT: P53708, EVALUE 2.40e+00; NT HIT: U66538.1, EVALUE 2.90e+00
ctgtgggattcctgatgctgtgtgggtctctggctccccctgctgtagaaggggagtactgcccctgggacacagaactgcaaggccagtggcgccaggtacctcccacaggaagaagatttgaggacatttaaaggtacccactttaccccgtgcccaccttctaccccagctccctggcagccatccaaaatttgcctccaagagca

SEQ ID NO: 18102 - DNA, 134 bp, Homo sapiens
  MAP TO CHRX.1; EXPRESSED IN FETAL LIVER, SIGNAL = 0.64; EXPRESSED IN BONE MARROW, SIGNAL = 0.95; EXPRESSED IN ADULT LIVER, SIGNAL =   1; EXPRESSED IN LUNG, SIGNAL = 0.6; NT HIT: gi14766450, EVALUE 4.50e-01; EST_HUMAN HIT: BG679211.1, EVALUE 6.60e-01
caaatagaatttcatgtgatagcctctgggtacttctcctgggaggaagtctttatctgatccagttttatgcacttagatctgaatctcaacaaagagaaacatttgccattttactcatcaatacttcaatg

SEQ ID NO: 18103 - DNA, 236 bp, Homo sapiens
  MAP TO CHR14.1; EXPRESSED IN ADULT LIVER, SIGNAL = 1.4; EXPRESSED IN BONE MARROW, SIGNAL = 0.94; EXPRESSED IN LUNG, SIGNAL = 0.88; EXPRESSED IN FETAL LIVER, SIGNAL =   1; EXPRESSED IN HEART, SIGNAL = 0.67; SWISSPROT HIT: Q9HFR4, EVALUE 9.00e-04; NT HIT: gi14747074, EVALUE 1.00e-129; EST_HUMAN HIT: BI438251.1, EVALUE 1.00e-129
gcagggaatcacagacacggctcagaccatttatgaaactgcggctcgagaacacgagagcagaggggtgactggtgccgtgggcgaggttctgcgccagattcctccggcagtggtgaaacctctgattgttgccacagaagcaacgtcaaacgtgctgggtggcatgagaaaccaaattaggccagatgtccggcaagacgagtcacagaaatggcgccacggggatgactgat

SEQ ID NO: 18104 - DNA, 258 bp, Homo sapiens
  MAP TO CHR7.1; EXPRESSED IN HEART, SIGNAL = 0.89; EXPRESSED IN BONE MARROW, SIGNAL = 0.91; EXPRESSED IN FETAL LIVER, SIGNAL = 1.2; EXPRESSED IN LUNG, SIGNAL = 0.84; NT HIT: AF156673.1, EVALUE 0.00e+00; SWISSPROT HIT: P21500, EVALUE 1.50e-02; EST_HUMAN HIT: AL041539.1, EVALUE 1.00e-80
tttaccgctgggcgctgggggtgagagccgctccgctttggggacaagcaggggcctggaaggggccaatgtggccgggcctggaggtggccggggcggtgtaggggccggggtcgggggaaggaatgtgcaggggaattcagggactgtctcctgctggggtggagaagggcggagagtcgggttgaaggccgtgggcacagccccaccgcccagtgcccgagatcttaccggggaccctggggaccggaggagggt

SEQ ID NO: 18105 - DNA, 217 bp, Homo sapiens
  MAP TO CHR3.1; EXPRESSED IN BONE MARROW, SIGNAL = 0.98; EXPRESSED IN ADULT LIVER, SIGNAL = 1.1; EXPRESSED IN FETAL LIVER, SIGNAL = 0.98; EXPRESSED IN LUNG, SIGNAL = 1.3; EXPRESSED IN HEART, SIGNAL = 1.5; EST_HUMAN HIT: BI259077.1, EVALUE 1.00e-112; SWISSPROT HIT: Q92685, EVALUE 3.00e-21; NT HIT: gi14733140, EVALUE 1.00e-112
caggtggtgctggggctgcccttcctgctggagaaccccagcggctacctgtcccgctcctttgaccttggccgccagtttctgttccactggacagtgaactggcgcttcctcccagaggcgctcttcctgcatcgagccttccacctggccctgttgactgcccacctccccctgctcctgctgtttgccctctgcaggtggcacaggtgagaaa

SEQ ID NO: 18106 - DNA, 264 bp, Homo sapiens
  MAP TO CHR5.1; EXPRESSED IN HEART, SIGNAL = 0.47; EXPRESSED IN BONE MARROW, SIGNAL = 1.2; EXPRESSED IN ADULT LIVER, SIGNAL = 0.92; EST_HUMAN HIT: AI768917.1, EVALUE 2.30e-02; SWISSPROT HIT: P51373, EVALUE 8.00e+00
cctgacaccaggaagacaaaagatacttccacacagggccccctgaagaaaccagagatgtacagtgcctctgggatgggactgggcaggaaggccaagcagctccttgagttaccaggtctttgtctacaagcctatccagtgtctgccaggtgccacagctgatgacagaagatgaaacgcctgcagctctcagacattttctttgcagcacagccctgccctcagcagctctagcttcaggcctcctaggcagggcccact

SEQ ID NO: 18107 - DNA, 145 bp, Homo sapiens
  MAP TO CHRX.1; EXPRESSED IN LUNG, SIGNAL = 3.3; EXPRESSED IN HEART, SIGNAL = 2.5; EXPRESSED IN BONE MARROW, SIGNAL = 1.7; NT HIT: L44140.1, EVALUE 1.00e-63; EST_HUMAN HIT: AL565619.1, EVALUE 2.00e-63; SWISSPROT HIT: P11536, EVALUE 3.00e-01
ctgtttgggaagacgtggaggaaaaggtgacttctgcccccaccgctcttacccccactgtagtggcctttggagatgcccccacctcccccccaccaactctcgcgtgttggagagaaggggccctcccagcacaaagttgcat

SEQ ID NO: 18108 - DNA, 216 bp, Homo sapiens
  MAP TO CHR7.1; EXPRESSED IN HEART, SIGNAL = 0.61; EXPRESSED IN BONE MARROW, SIGNAL = 0.51; EXPRESSED IN LUNG, SIGNAL = 0.63; NT HIT: AY051819.1, EVALUE 1.90e-01; EST_HUMAN HIT: BG005033.1, EVALUE 2.90e-01; SWISSPROT HIT: P45727, EVALUE 3.80e+00
ttttccaagtttagacctatttgtgagtgctactgattgggaagtgctaacgacagaccagcccttcatatcaaaataggcatattgcgtagagtggccatttttccctttcacgtggtgctccttgtaagcagcctgccttgatttgagaggagggagttttttcctccacagtttggtgggtgggaagacatggtaacagttacttgttcttgc

SEQ ID NO: 18109 - DNA, 127 bp, Homo sapiens
  MAP TO CHR11.1; EXPRESSED IN HEART, SIGNAL = 0.96; EXPRESSED IN BONE MARROW, SIGNAL = 0.73; EST_HUMAN HIT: AA393496.1, EVALUE 2.00e-62; NT HIT: AF285600.1, EVALUE 1.00e-62
actgtaaacctctgtcgcaggaactctcttttttgtattagaaagttttcaatagcattggcttctttgaagagttcatctatctcatcaatgtaagatgcatctactgctgctctctcactaatag

SEQ ID NO: 18110 - DNA, 227 bp, Homo sapiens
  MAP TO CHR19.1; EXPRESSED IN LUNG, SIGNAL = 0.84; EXPRESSED IN HEART, SIGNAL = 0.76; EXPRESSED IN BONE MARROW, SIGNAL = 0.38; EST_HUMAN HIT: AI700612.1, EVALUE 3.00e-66; SWISSPROT HIT: Q14585, EVALUE 6.00e-32; NT HIT: gi12741684, EVALUE 8.00e-41
aattcatactggtgagaaaccctttgaatgtaaagaatgcggaaaggcctttggtcttctgacacagcttgctcaacatcagatcattcatactggtgagaagccatttaaatgtaaggagtgtgggaaggcctttaatcgtggctcaaaccttgttcaacctcagagtattcatactggtgagaaaccctatgaatgtaaggagtgtgggaaggcttttagacttc

SEQ ID NO: 18111 - DNA, 161 bp, Homo sapiens
  MAP TO CHRX.1; EXPRESSED IN FETAL LIVER, SIGNAL = 0.47; EXPRESSED IN BONE MARROW, SIGNAL = 0.47; EXPRESSED IN HEART, SIGNAL = 0.62; NT HIT: M58372.1, EVALUE 2.00e-81; EST_HUMAN HIT: BF948375.1, EVALUE 3.00e-74; SWISSPROT HIT: P09951, EVALUE 4.00e-22
ccacaggtcaaggttgacaaccagcatgacttccaggacatcgcaagtgtcgtggcactgaccaagacgtatgccactgccgagcccttcatcgatgccaaatatgacgtgcgtgtccagaagattgggcagaactacaaggcctacatgtgagtggagag

SEQ ID NO: 18112 - DNA, 199 bp, Homo sapiens
  MAP TO CHR22.1; EXPRESSED IN BONE MARROW, SIGNAL = 0.58; EXPRESSED IN PLACENTA, SIGNAL = 1.3; EXPRESSED IN FETAL LIVER, SIGNAL = 0.68; EXPRESSED IN LUNG, SIGNAL =   1; EXPRESSED IN HEART, SIGNAL = 0.92; SWISSPROT HIT: Q9Z1Q9, EVALUE 1.10e+00; NT HIT: gi14779725, EVALUE 1.00e-100; EST_HUMAN HIT: BI161465.1, EVALUE 1.00e-100
caggtgccgtactcctacgtggagcccgggacccacgggcgcctctggaccggggcccaccgcctgtttggtgccgtggagcacctacagctggccaactcctacggcctcttccgccgcatgactgggcttggtggacggcctgaggtggtgctggagggcagttacgacggccaccactggacggtgagccctccca

SEQ ID NO: 18113 - DNA, 182 bp, Homo sapiens
  MAP TO CHRX.1; EXPRESSED IN BONE MARROW, SIGNAL = 4.2; EXPRESSED IN HEART, SIGNAL = 3.8; EXPRESSED IN FETAL LIVER, SIGNAL = 3.8; EXPRESSED IN PLACENTA, SIGNAL = 6.5; EXPRESSED IN LUNG, SIGNAL = 2.5; NT HIT: L44140.1, EVALUE 3.00e-98; SWISSPROT HIT: P21333, EVALUE 8.00e-25; EST_HUMAN HIT: BF893178.1, EVALUE 4.00e-80
ccctcacctggcccgtaggcacgggctttcttcgggttcagtttgggccgcaagggagcccctggcttcagcttggccttggggaactgggacaggtaggtcatgacagagtgctcgtccacgttggggtccacaatctcctcgggggtgatcacctgtcacaggcagaaaacaggagccat

SEQ ID NO: 18114 - DNA, 175 bp, Homo sapiens
  MAP TO CHR7.1; EXPRESSED IN ADULT LIVER, SIGNAL = 0.52; EXPRESSED IN BONE MARROW, SIGNAL = 0.36; NT HIT: U78308.1, EVALUE 6.00e-04; SWISSPROT HIT: P33990, EVALUE 1.90e+00; EST_HUMAN HIT: BE182900.1, EVALUE 2.00e-04
ttctgcatcttgcctttatatctgcacccatgtctagtgcactattttgtgccagttagggcgtaagctctgggtaaatatttgttggatgaataaatgaatacccaaaagggcttcttctggaggaaggccaggaaaacattcctttgatgaaaataatttgtaaagaggcagg

SEQ ID NO: 18115 - DNA, 144 bp, Homo sapiens
  MAP TO CHR3.1; EXPRESSED IN FETAL LIVER, SIGNAL = 0.49; EXPRESSED IN HEART, SIGNAL = 0.46; EXPRESSED IN ADULT LIVER, SIGNAL = 0.85; EXPRESSED IN BONE MARROW, SIGNAL = 0.55; SWISSPROT HIT: O26543, EVALUE 8.90e-01; NT HIT: X93084.1, EVALUE 4.90e-01
ggggccctctgggtcaagagtgtccctgtgactgccctctgagcacgtcctcctcttgagtccttgaaacaaacatgttttccattctggcttcagggcagagcccccagccaaaggacacgtgtgcccacacaaggcctggcc

SEQ ID NO: 18116 - DNA, 341 bp, Homo sapiens
  MAP TO CHR11.1; EXPRESSED IN BONE MARROW, SIGNAL = 0.51; EXPRESSED IN HEART, SIGNAL = 0.45; EXPRESSED IN FETAL LIVER, SIGNAL = 0.46; EXPRESSED IN LUNG, SIGNAL = 0.59; SWISSPROT HIT: P03255, EVALUE 1.70e-01; EST_HUMAN HIT: AW387131.1, EVALUE 0.00e+00; NT HIT: gi14767287, EVALUE 0.00e+00
taggaacctgctgactctacggagatggatgataaggcagcagtaggcgtctccaagcccctcccttccgtgcctcccagcattggcaaatcgaacgtggacagacgtcaggcagaaattggagaggggtcagtgcgccggcgaatctatgacaatccatacttcgagccccaatatggctttccccctgaggaagatgaggatgagcagggggaaagttacactccccgattcagccaacatgtcagtggcaatcggtgagagcctgggcatcccttctagatgggtgactgaaggacctcacctcagtggaccctgggcaagggttaatcagaaagtct

SEQ ID NO: 18117 - DNA, 222 bp, Homo sapiens
  MAP TO CHR15.1; EXPRESSED IN FETAL LIVER, SIGNAL = 0.78; EXPRESSED IN HEART, SIGNAL = 0.83; EXPRESSED IN ADULT LIVER, SIGNAL = 1.1; EXPRESSED IN BONE MARROW, SIGNAL = 0.9; SWISSPROT HIT: Q9UPM8, EVALUE 2.00e-32; EST_HUMAN HIT: BE816687.1, EVALUE 5.00e-06; NT HIT: gi11525786, EVALUE 1.00e-104
aaaacatttacctaatgaaatctaatagtgataagtttacagaaaattccagctgagcagaatgagtatccatcatatgataactaataaaaccagtaagatttccttctgtaaaaggtttttctatctgcacactatattgaaagcttttggtgctttctgcttccattacaggcaaacagcatccaggttgctcagtcacctgcaaatagaagtaataaa

SEQ ID NO: 18118 - DNA, 219 bp, Homo sapiens
  MAP TO CHR5.1; EXPRESSED IN FETAL LIVER, SIGNAL = 0.64; EXPRESSED IN LUNG, SIGNAL = 0.71; EXPRESSED IN BONE MARROW, SIGNAL = 0.83; EXPRESSED IN ADULT LIVER, SIGNAL = 0.74; SWISSPROT HIT: Q13591, EVALUE 2.00e-36; EST_HUMAN HIT: AA195334.1, EVALUE 5.00e-77; NT HIT: gi16159220, EVALUE 1.00e-118
cttaccttgatggcctccaccgagtcgtacttgtccagtttgttgatgtggttggttatgctggtattaaggggggcaggtgagacggggtggatgacagtcgcatcgtgggattgctgctggtaccgctggcagtaagtatagacgagcagggtgaggaggcagccgaggatggagctgctcagccccacggcgatcatgtggaacatgttgaactct

SEQ ID NO: 18119 - DNA, 197 bp, Homo sapiens
  MAP TO CHRX.1; EXPRESSED IN ADULT LIVER, SIGNAL = 1.1; EXPRESSED IN FETAL LIVER, SIGNAL = 1.3; EXPRESSED IN LUNG, SIGNAL = 2.7; EXPRESSED IN HEART, SIGNAL = 0.74; EXPRESSED IN BONE MARROW, SIGNAL = 1.2; SWISSPROT HIT: O97555, EVALUE 1.00e-28; EST_HUMAN HIT: AL537792.1, EVALUE 1.00e-103; NT HIT: L44140.1, EVALUE 1.00e-107
cttctggtgccttctcaggtggcccgctgcaagcagctgatctgtgaccccagctacatcccggaccgtgtgcggaaggctggccaggttatccgcatcatctgtatccttagccaccccatcaagaacaccaacgacgccaactcctgccaaataatcatcccccagaaccaggtcaacaggaagtcaggtaggcc

SEQ ID NO: 18120 - DNA, 256 bp, Homo sapiens
  MAP TO CHR2.1; EXPRESSED IN BONE MARROW, SIGNAL = 0.45; EXPRESSED IN HEART, SIGNAL = 0.93; EXPRESSED IN FETAL LIVER, SIGNAL = 0.51; EXPRESSED IN LUNG, SIGNAL = 0.82; SWISSPROT HIT: Q61193, EVALUE 1.10e+00; EST_HUMAN HIT: BI825424.1, EVALUE 1.00e-93; NT HIT: AF285598.1, EVALUE 0.00e+00
gcgcagctgatctgtgcagtttggcaaagccttgcagccactgcaccctgcggttttgtaactgcccctgcctgtgggcaaagcgcacacccaaggccaggctgccccaggtgcaggcctctttgacctcgctgggcacctcgctgtcctccaggatggccctgagcttgtcttccacctcctcccaggataaggatatattctcgaagtagaactcggggcctttcgtgtgcctggccattttctcgatgatgaa

SEQ ID NO: 18121 - DNA, 350 bp, Homo sapiens
  MAP TO CHR14.1; EXPRESSED IN BONE MARROW, SIGNAL = 1.6; EXPRESSED IN HEART, SIGNAL = 2.3; EXPRESSED IN ADULT LIVER, SIGNAL = 2.6; EXPRESSED IN FETAL LIVER, SIGNAL =   2; EXPRESSED IN LUNG, SIGNAL = 1.7; EST_HUMAN HIT: BG675897.1, EVALUE 0.00e+00; NT HIT: AF111170.3, EVALUE 0.00e+00; SWISSPROT HIT: Q9ER30, EVALUE 1.00e-09
gcctcggcccagttcaggacggcctcgaagaccaccgcctctttggtgttgagggcctcccgagtgacaatgatctccagcgtctgccggtctatctcacagaagccttcggaccgtagggccatctcggcctgtgcgtcaatgacctcccagcagcgctgcgtcagctcgggctcctcaaacagccggctctgggacagcaggacgcaggcgttcttggcttccaaacttgtctccagaaagttgacacaggcttttgccaatgctgggacgatgtacttcttagcagcatacagagtggccagcaccgtgtcggcttccagatcgatctcatcactgtacatgtacct

SEQ ID NO: 18122 - DNA, 312 bp, Homo sapiens
  MAP TO CHR7.1; EXPRESSED IN HEART, SIGNAL = 0.56; EXPRESSED IN BONE MARROW, SIGNAL = 0.65; EXPRESSED IN FETAL LIVER, SIGNAL = 0.75; EXPRESSED IN LUNG, SIGNAL = 0.58; EST_HUMAN HIT: AA921311.1, EVALUE 2.70e-02; NT HIT: AF148625.1, EVALUE 2.90e-01; SWISSPROT HIT: P25562, EVALUE 2.20e+00
ccattgggaaacttatttatatcccagtagtcatccccacactaagtttttccgatatggcgtccagattttatttcccctaataattacaccccctgttttcaggctaggcattctccctcctttcttgtgtttacacctttcaaatatttgcagattgttatcctgtcaccctcttagtcaccgcttagctgagctgtacaaatttagcaccttttatcttccctttaaaggcaggtctccacgcccctgagtcattttcccctgctctctttaagtgtgctccagttttctgcatttccatgtggccac

SEQ ID NO: 18123 - DNA, 224 bp, Homo sapiens
  MAP TO CHR3.1; EXPRESSED IN LUNG, SIGNAL = 2.2; EXPRESSED IN HEART, SIGNAL = 1.8; EXPRESSED IN ADULT LIVER, SIGNAL = 2.3; EXPRESSED IN BONE MARROW, SIGNAL = 2.8; NT HIT: AF065478.1, EVALUE 1.00e-118; SWISSPROT HIT: P46976, EVALUE 2.00e-29; EST_HUMAN HIT: BI755855.1, EVALUE 4.00e-96
tcttttctaccctcaaagccacactcaccagagtatctgcatccatgaatacacattttgaatactgtgtaagcgaccagcagtggagctttgtcagcgtgacacccaactctggcctcttcattaaggttagatgagcagaatcgccactgtccaagacatctaccatgatgacttcatcaaagactgtctctaaaacttttctgtcaaaataaaatccagaa

SEQ ID NO: 18124 - DNA, 176 bp, Homo sapiens
  MAP TO CHR1.1; EXPRESSED IN HEART, SIGNAL = 1.3; EXPRESSED IN BONE MARROW, SIGNAL = 0.55; EST_HUMAN HIT: BG911880.1, EVALUE 2.00e-94; SWISSPROT HIT: P12491, EVALUE 1.10e+00; NT HIT: gi14726897, EVALUE 3.00e-83
tctgggcatccaactgtacctccactggcatgtcttgcacacccttggaccaaagtccgagaagagtttttgactggcaagggcgggggacagtcctcactctcgccctgaggggtggctgctcccaggctggcgacagtctcataggtcttgttgctgatgtccagcctcccact

SEQ ID NO: 18125 - DNA, 250 bp, Homo sapiens
  MAP TO CHR17.1; EXPRESSED IN LUNG, SIGNAL = 1.6; EXPRESSED IN HEART, SIGNAL = 2.3; EXPRESSED IN ADULT LIVER, SIGNAL = 9.3; EXPRESSED IN BONE MARROW, SIGNAL =   3; EXPRESSED IN PLACENTA, SIGNAL = 4.4; EXPRESSED IN FETAL LIVER, SIGNAL = 4.9; NT HIT: gi14773957, EVALUE 0.00e+00; EST_HUMAN HIT: AL045391.1, EVALUE 0.00e+00; SWISSPROT HIT: P17473, EVALUE 2.20e-01
caagtccctggagcctgagccagagtcagatcctgtactgcagccactcgaatcgccaaatcatttgcgcctgccaaagatggacttcttgccagggttcttgtcgcccacacttaaaccaatgaggagccgggctttctcctcctcttcctgctgttgcatgttcaggtccgatttagtttctagctttccccggacctcagagcctgttgcagacttcagccttagcttctctttgattacctggcag

SEQ ID NO: 18126 - DNA, 248 bp, Homo sapiens
  MAP TO CHR19.1; EXPRESSED IN PLACENTA, SIGNAL =   2; EXPRESSED IN FETAL LIVER, SIGNAL = 1.3; EXPRESSED IN LUNG, SIGNAL = 0.86; EXPRESSED IN HEART, SIGNAL = 0.64; EXPRESSED IN BONE MARROW, SIGNAL = 2.1; SWISSPROT HIT: P90747, EVALUE 8.00e-10; NT HIT: gi15308568, EVALUE 1.00e-95; EST_HUMAN HIT: BG259924.1, EVALUE 2.00e-95
ggctggggccagctcaccatggagtgcagagtttcgggggcccccttcacggccgcgatgtagcagaggtcggtggagcccagcttctcatacgaggcaagcacggacattcgcttcagggcactggcaaaatgaaagcgctggtgaattttcagcccctgagttttaatacttcgggggaatactttctcatctggaaacaaataagtacgagtcctgaggggctttgctccaaagaggcagccaag

SEQ ID NO: 18127 - DNA, 318 bp, Homo sapiens
  MAP TO CHR6.1; EXPRESSED IN LUNG, SIGNAL = 1.9; EXPRESSED IN ADULT LIVER, SIGNAL =  13; EXPRESSED IN BONE MARROW, SIGNAL = 1.9; EST_HUMAN HIT: BI598836.1, EVALUE 1.00e-129; SWISSPROT HIT: P46439, EVALUE 2.00e-46; NT HIT: gi11428197, EVALUE 1.00e-129
ctggttctccaaaatgtcttcccaaatcttctccccttctgtctccccacacaggttgtgcttgtaggcaatgcagcccaggatggccttgctctgggtgatcttgtgagccccatcaatcaagtagggcagattgggaaagtccaggcccagcttgaatttttcattcagccactggcttctgtcatagtcaggagcgtcccccatcatgtacttcttttcctcatagcttaagtctgtgtattgcaggagcaggcagacggcgtgggccagccctcagatgtcccagtaccccagtgtcacgggcatggtgctggt

SEQ ID NO: 18128 - DNA, 167 bp, Homo sapiens
  MAP TO CHR6.1; EXPRESSED IN PLACENTA, SIGNAL = 1.5; EXPRESSED IN FETAL LIVER, SIGNAL = 1.2; EXPRESSED IN LUNG, SIGNAL = 2.1; EXPRESSED IN HEART, SIGNAL = 3.2; EXPRESSED IN ADULT LIVER, SIGNAL = 3.5; EXPRESSED IN BONE MARROW, SIGNAL = 1.1; SWISSPROT HIT: P34318, EVALUE 2.60e+00; NT HIT: J00319.1, EVALUE 3.00e-89; EST_HUMAN HIT: AU138351.1, EVALUE 1.00e-70
tgcatacttacctggcagtggagataccatgatcacgaaggtggttttcccagggcgaggcttatccatcgcactccggatatgctgacccctgcgattttcccaaatgtgggaaactcgactgcataatttgtggtagtgggggactgtgcttgcgctttcccctg

SEQ ID NO: 18129 - DNA, 257 bp, Homo sapiens
  MAP TO CHR19.1; EXPRESSED IN HEART, SIGNAL = 0.83; EXPRESSED IN BONE MARROW, SIGNAL = 0.46; EXPRESSED IN FETAL LIVER, SIGNAL = 0.47; EXPRESSED IN LUNG, SIGNAL = 0.68; SWISSPROT HIT: Q14258, EVALUE 1.00e-05; NT HIT: gi14763285, EVALUE 0.00e+00; EST_HUMAN HIT: AL565728.1, EVALUE 0.00e+00
caggggacacgctgatcgacggcggggagcattactgggaggtgcgctacgagccggacagcaaggcgttcggcgtgggcgtggcctaccgcagcctgggccgcttcgagcaactgggcaagacggccgcctcctggtgcctgcacgtcaacaattggctgcaggtcagcttcacggccaagcacgccaacaaggtcaaggtgctggacgcccccgtgcccgactgcctgggtgtgcactgtgacttccaccaaggt

SEQ ID NO: 18130 - DNA, 205 bp, Homo sapiens
  MAP TO CHR5.1; EXPRESSED IN HEART, SIGNAL =  18; EXPRESSED IN ADULT LIVER, SIGNAL =  68; EXPRESSED IN PLACENTA, SIGNAL =  47; EXPRESSED IN LUNG, SIGNAL =  19; EXPRESSED IN BONE MARROW, SIGNAL = 6.4; NT HIT: gi14732985, EVALUE 1.00e-112; EST_HUMAN HIT: BE277306.1, EVALUE 1.00e-107; SWISSPROT HIT: P45634, EVALUE 3.00e-32
ttggaaagccccagggcactttggccagggttcacactggccaagttatcatgtccatccgcaccaagctgcagaacaaggagcatgtgattgaggccctgggcagggccaagttcaagtttcctggccgccagaagatccacatctcaaagaagtggggcttcaccaagttcaatgctgatgaatttgaagacatggtggctga

SEQ ID NO: 18131 - DNA, 293 bp, Homo sapiens
  MAP TO CHR14.1; EXPRESSED IN HEART, SIGNAL = 0.75; EXPRESSED IN BONE MARROW, SIGNAL = 0.82; NT HIT: AF296106.1, EVALUE 2.70e-01; EST_HUMAN HIT: BG502226.1, EVALUE 0.00e+00
tgttttagcacaaggctttcactgaagtgtttctagatgattcacatagtcctgcaaattgtcggatatcagtacaagttgccacaccagcattaaacctttctgttcgcttcccaatacctgatcttcgatctgatcaagaaagaggaccatggtttaagaagtcacttcagaaggagatcctttatttagccttcacagatctagaatttaagactgaatttataggaggatcaaccccagaacaaattaaattggaacttacctttagagaactaattggtaagattgaa

SEQ ID NO: 18132 - DNA, 463 bp, Homo sapiens
  MAP TO CHR12.1; EXPRESSED IN LUNG, SIGNAL = 1.2; EXPRESSED IN HEART, SIGNAL = 1.2; EXPRESSED IN BONE MARROW, SIGNAL = 0.8; SWISSPROT HIT: P23074, EVALUE 1.00e-13; NT HIT: AL163246.2, EVALUE 4.00e-94; EST_HUMAN HIT: AA984295.1, EVALUE 1.00e-76
tccaatcagcataatgtcatcaatgtaatggaccagtatgatatcttgtggaagggaaaaacgatcaagatctctgccaaccaaataatgacacaaagccagagagttgatatacccctgaggcaggacagtgaaggtatattgctggccttgccagctgaaggcaaattgcttctcgtgggccttatggacaggaatggagacaaaggcacttgccaaatcaatggctgcataccaggtaccaagagacgtgttaatttgttcaagcaatggaaccacatctggtacaggtacagcagctgtaactggagtcatcacttagttaagcttacagtaatccactgtcattctccaagatccatctgtcttctgcataggccaaataggagagttaaatggggatgtggtgggaatcaccacccccgcatctttcaagtccttgttggtggcactaatctctgca

SEQ ID NO: 18133 - DNA, 134 bp, Homo sapiens
  MAP TO CHR19.1; EXPRESSED IN BONE MARROW, SIGNAL = 1.1; EXPRESSED IN LUNG, SIGNAL = 0.67; EXPRESSED IN HEART, SIGNAL = 0.79; SWISSPROT HIT: O00268, EVALUE 4.00e-01; NT HIT: gi4885106, EVALUE 4.00e-69; EST_HUMAN HIT: AU141738.1, EVALUE 6.00e-69
cagaccctggccggctcctgtgggaagtttgccccctttgaaattaaagagcacatggtcctggcccctcggcgtcggaccgctttccatccagacctctgcagtcagctggaccagctcctccagcagcagag

SEQ ID NO: 18134 - DNA, 157 bp, Homo sapiens
  MAP TO CHR19.1; EXPRESSED IN BONE MARROW, SIGNAL =   4; EXPRESSED IN HEART, SIGNAL = 3.9; EST_HUMAN HIT: AI362793.1, EVALUE 4.00e-83; NT HIT: gi14764309, EVALUE 6.00e-81; SWISSPROT HIT: P14131, EVALUE 2.00e-21
ccagatgtggatgaggcttccaagaaggagatcaaagacatcctcatccagtatgaccggaccctgctggtagctgaccctcgtcgctgcgagtccaaaaagtttggaggccctggtgcccgcgctcgctaccagaaatcctaccgataagcccatc

SEQ ID NO: 18135 - DNA, 143 bp, Homo sapiens
  MAP TO CHR16.1; EXPRESSED IN FETAL LIVER, SIGNAL = 0.41; EXPRESSED IN HEART, SIGNAL = 0.45; EXPRESSED IN ADULT LIVER, SIGNAL = 0.59; EXPRESSED IN BONE MARROW, SIGNAL = 0.54; EXPRESSED IN LUNG, SIGNAL = 0.63; NT HIT: gi14777071, EVALUE 2.00e-74; EST_HUMAN HIT: AL522818.1, EVALUE 3.00e-74; SWISSPROT HIT: P33462, EVALUE 1.50e+00
acctggaacaggatctgcagcaccccgtggatgatgcacgcccgccggccgaggaagaggaagaagggcaccaggagctcgatgaagtggttgctgagcgtctcgaagcgatggaaccaccagggtgagtggtgcaggtagta

SEQ ID NO: 18136 - DNA, 103 bp, Homo sapiens
  MAP TO CHR13.1; EXPRESSED IN BONE MARROW, SIGNAL = 1.7; EXPRESSED IN PLACENTA, SIGNAL = 4.5; EXPRESSED IN LUNG, SIGNAL = 7.1; NT HIT: AJ400878.1, EVALUE 1.00e-34; EST_HUMAN HIT: AA761085.1, EVALUE 1.00e-35
aaatatggaacgcttcacgaatttgcatgtcatccttgcacaggggccatgctaatcttctctgtattgtttcagttttagtatatgtgctgccaaagctagc

SEQ ID NO: 18137 - DNA, 404 bp, Homo sapiens
  MAP TO CHR15.1; EXPRESSED IN HEART, SIGNAL = 0.66; EXPRESSED IN ADULT LIVER, SIGNAL = 0.92; EXPRESSED IN BONE MARROW, SIGNAL = 0.46; NT HIT: U04898.1, EVALUE 0.00e+00; EST_HUMAN HIT: AL532048.1, EVALUE 0.00e+00; SWISSPROT HIT: P35398, EVALUE 1.00e-63
ttacctaattctgccatggacacagttggggaagtctcgccgttggtgaacgaacagtagggaaagaagcctgatgctggtgtgtagtcacatattggttctggtttgattccattgatatcaagacctgactggtctggggaaggctgtatgtccaggtagaagctgctgacggcggagtctgccttactcccctcaggggtgtgcccgtcaatgtagttactgaggtcgtcgtgaagttccgtcagcccgttggccgagatgttgtaggtgggcgtcagcggctcagcctctccaggctgctgctggtggtcgcgctgctgctgctgcatccggtgtttctgtacttctgcatacaagctgtctctctgcttttttgacattcggccaaattttacagctgg

SEQ ID NO: 18138 - DNA, 226 bp, Homo sapiens
  MAP TO CHR6.1; EXPRESSED IN ADULT LIVER, SIGNAL = 1.9; EXPRESSED IN BONE MARROW, SIGNAL = 1.6; EXPRESSED IN HEART, SIGNAL = 1.4; EXPRESSED IN FETAL LIVER, SIGNAL = 1.7; EXPRESSED IN LUNG, SIGNAL = 1.1; NT HIT: gi4758861, EVALUE 1.00e-111; SWISSPROT HIT: Q9ZRI7, EVALUE 1.00e-04; EST_HUMAN HIT: AI672467.1, EVALUE 1.00e-111
agtcacgataccttcaacagtgtgtggatgtcatttttactggagtgcccatctacttgagtgaccctgtattctaaccactgctgaacgattgctttttcttctgcagtactccccagcaaatattctttgttggcttgcttgactagatgagctgctatagtagtcaatcctgttagacttggaccattgtttgtctgaagaactggaatcttaaaaagaaaaa

SEQ ID NO: 18139 - DNA, 229 bp, Homo sapiens
  MAP TO AC055811.4; EXPRESSED IN FETAL LIVER, SIGNAL = 0.74; EXPRESSED IN LUNG, SIGNAL = 1.1; EXPRESSED IN HEART, SIGNAL = 0.88; EXPRESSED IN BONE MARROW, SIGNAL = 0.58; NT HIT: AP002995.2, EVALUE 5.30e-02; SWISSPROT HIT: P31048, EVALUE 9.00e-03; EST_HUMAN HIT: BE888672.1, EVALUE 1.00e-126
gggaaaaaggtatactttgtagggttaaactgttcccagatgcgctcaaattcttccagaaaaagccgcacgtactcgtcgtcctccgtgatgagaacattctccctgttgttctggatggcttgcgtggtccagttgagcgagccagtgatgagcaccctcttgtccacgatggcaaacttgtgatgcatgtagcctgggtcttgatcgtgccggacctggatccctg

SEQ ID NO: 18140 - DNA, 201 bp, Homo sapiens
  MAP TO CHR19.1; EXPRESSED IN BONE MARROW, SIGNAL = 0.75; EXPRESSED IN HEART, SIGNAL = 0.9; EXPRESSED IN PLACENTA, SIGNAL = 1.4; EXPRESSED IN FETAL LIVER, SIGNAL = 0.76; NT HIT: gi6912355, EVALUE 8.00e-50; SWISSPROT HIT: P37954, EVALUE 4.90e-01; EST_HUMAN HIT: BG570475.1, EVALUE 1.00e-49
ggagcctgggtgcctcctcatagcccccctccccctcccccagacggggcgtacctggccgtgggctcccacgacaacttggtgtacgtgtacacggtggaccagggcggccgcaaggtcagccgcctgggcaagtgctcggtgagtgggcagtggcccccagcccgcgccgccaccccgcccagggggtgcaaaattaac

SEQ ID NO: 18141 - DNA, 274 bp, Homo sapiens
  MAP TO CHR6.1; EXPRESSED IN PLACENTA, SIGNAL = 4.1; EXPRESSED IN FETAL LIVER, SIGNAL = 3.4; EXPRESSED IN LUNG, SIGNAL = 9.6; EXPRESSED IN HEART, SIGNAL =   4; EXPRESSED IN ADULT LIVER, SIGNAL = 3.9; EXPRESSED IN BONE MARROW, SIGNAL = 3.3; NT HIT: gi14781579, EVALUE 1.00e-89; SWISSPROT HIT: P10383, EVALUE 1.30e+00; EST_HUMAN HIT: BI766238.1, EVALUE 2.00e-89
gttgtcgtggttgctcggaggcacgtgtgcagtcccggaagcggcgaggggaaactgctccgcgcgcgccgcgggaggaggaaccgcccggtcctttagggtccgggcccggccgggccatggattcaatgcctgagcccgcgtcccgctgtcttctgcttcttcccttgctgctgctgctgctgctgctgctgccggccccggagctgggcccgagccaggccggagctgaggagaacgactgggttcgcctgcccagcaaatgcgaaggtga

SEQ ID NO: 18142 - DNA, 172 bp, Homo sapiens
  MAP TO CHR19.1; EXPRESSED IN ADULT LIVER, SIGNAL = 0.82; EXPRESSED IN BONE MARROW, SIGNAL = 0.95; EXPRESSED IN LUNG, SIGNAL = 1.2; NT HIT: gi15308568, EVALUE 4.00e-73; SWISSPROT HIT: P90747, EVALUE 1.00e-14; EST_HUMAN HIT: BE793372.1, EVALUE 5.00e-73
cactcacagagcttggccagggcgatgagggaggtgttgacggccagggacagctcgatgggcagctcaggaggcacgaccgaggtgaggatcagggtgcactccagaaacagcttgtagcggttccggctggggtccttggtacctgtggagacagggcctgccaacctgg

SEQ ID NO: 18143 - DNA, 318 bp, Homo sapiens
  MAP TO CHR19.1; EXPRESSED IN HEART, SIGNAL =   1; EXPRESSED IN BONE MARROW, SIGNAL = 0.56; EXPRESSED IN ADULT LIVER, SIGNAL = 0.53; EXPRESSED IN LUNG, SIGNAL = 0.66; EST_HUMAN HIT: BI820338.1, EVALUE 0.00e+00; SWISSPROT HIT: P25391, EVALUE 3.00e+00
tcaggcactgaggtcgatctcgtgatgctggtagatctgtgtggggcccttaaagcaagcagcaaagaggaagcgtctgccggccatagtgatgtgggcaaaggcacggggggccaccagggccggaggccccagctcctgcagtggctccaggagccccttgtcaggctcaaggcggaggacctggctgaaggcgaagtcgctgcctaggatggccagctggtccctggcgatgagcagtggctggaagacgtgggcaccgcgcgagggaagttgctgcagcagacgaaacatggagccgtcccagcgcatgacctg

SEQ ID NO: 18144 - DNA, 285 bp, Homo sapiens
  MAP TO CHR12.1; EXPRESSED IN LUNG, SIGNAL = 0.78; EXPRESSED IN HEART, SIGNAL = 0.81; EXPRESSED IN BONE MARROW, SIGNAL = 0.78; NT HIT: M84341.1, EVALUE 4.10e+00; EST_HUMAN HIT: AI267749.1, EVALUE 1.00e-126; SWISSPROT HIT: P31367, EVALUE 3.00e-21
gaaatcttgtttgcttttgcaggtcttgactcaggaaaacttagccacagttctgacaggagttatggttccagcaggggcagttactcaacctcttcttatccccatcagtattgcaggtcaagtggctggtcagcaggggctggccgtgtggacaattcctacagcaactgtggctgccctcccaggactgaccgctgcttctcctacggggggagtgttcaagccacctttagccggtctccaaggtaacggcaactcttcccaggactgcaccaggccccc

SEQ ID NO: 18145 - DNA, 144 bp, Homo sapiens
  MAP TO CHR9.1; EXPRESSED IN BONE MARROW, SIGNAL = 0.57; EXPRESSED IN ADULT LIVER, SIGNAL = 0.65; EXPRESSED IN HEART, SIGNAL = 0.51; NT HIT: gi15298419, EVALUE 1.00e-75; EST_HUMAN HIT: BG163699.1, EVALUE 2.00e-75
tcctcttcactgccacccatcacatctatcctattgccgacagcaggggagaatgtctccattcggctagtttctgaaagcttggtgaaggctaaacattccaaatcttgcttgcaaattactttcttatttaacaaatctgac

SEQ ID NO: 18146 - DNA, 271 bp, Homo sapiens
  MAP TO CHR19.1; EXPRESSED IN LUNG, SIGNAL = 0.86; EXPRESSED IN HEART, SIGNAL = 1.1; EXPRESSED IN BONE MARROW, SIGNAL = 1.1; EXPRESSED IN PLACENTA, SIGNAL = 1.2; EXPRESSED IN FETAL LIVER, SIGNAL = 1.2; NT HIT: gi13630896, EVALUE 0.00e+00; SWISSPROT HIT: P34995, EVALUE 1.00e-20; EST_HUMAN HIT: AI953039.1, EVALUE 0.00e+00
gctcacaccggcttcccccgcaggtgttggtggcgctggccgtcggcggctggagctctacctccctgcagcggccactgttcctggccgtgcgccttgcctcctggaaccagatcctggacccttgggtgtacatcctactgcgccaggccgtgctgcgccaactgcttcgcctcttgcccccgagggccggagccaagggcggccccgcggggctgggcctaacaccgagcgcctgggaggccagctcgctgcgcagctcccggcacag

SEQ ID NO: 18147 - DNA, 281 bp, Homo sapiens
  MAP TO CHR7.1; EXPRESSED IN BONE MARROW, SIGNAL = 0.56; EXPRESSED IN FETAL LIVER, SIGNAL = 0.37; NT HIT: AJ229041.1, EVALUE 2.60e-01; SWISSPROT HIT: P51521, EVALUE 8.10e-01; EST_HUMAN HIT: AA376346.1, EVALUE 5.90e+00
tgctttccatcagctttgctgaaatcaagttgctggatcagtcccgtgtgttagcagggtaataactttcctcagctggacaaaatggtgcagagagagtgttgctttttctgcttcaaaggcttcagagattcctttaaccacaaacatgagaatagaacgtaatggatatacaagagtcccacgatggcaatctccctgctggaaatgctcatgaattacctgtaatttacctcaaaatgtaccacatgttggactgcaagatgcacttttcctttttt

SEQ ID NO: 18148 - DNA, 239 bp, Homo sapiens
  MAP TO CHR14.1; EXPRESSED IN LUNG, SIGNAL = 1.1; EXPRESSED IN HEART, SIGNAL = 1.2; EXPRESSED IN BONE MARROW, SIGNAL = 0.76; EXPRESSED IN ADULT LIVER, SIGNAL = 0.91; NT HIT: AF267521.1, EVALUE 1.00e-127; SWISSPROT HIT: P46825, EVALUE 1.00e-27; EST_HUMAN HIT: BE780862.1, EVALUE 1.00e-120
gactagcctgtacaccaaggccaggatgttgagcatggtggccacgtccgggtggtcgtgtcctgaagtcttctccaggtcctccagggcctgcttgcagaggggcacagctacctcgtagcgcccctgcgaggcgtactggatcaccaggttgtggagcgtccgcagccgcgcgggggatctcgtagccgccctgctgggcagccgcggctgcactgctgtgctgctgctggactgca

SEQ ID NO: 18149 - DNA, 273 bp, Homo sapiens
  MAP TO CHR7.1; EXPRESSED IN FETAL LIVER, SIGNAL = 0.36; EXPRESSED IN HEART, SIGNAL = 0.57; EXPRESSED IN BONE MARROW, SIGNAL = 0.53; SWISSPROT HIT: P16053, EVALUE 2.00e-03; NT HIT: gi14744071, EVALUE 0.00e+00; EST_HUMAN HIT: BG721582.1, EVALUE 0.00e+00
gatggttcagagctcttcatttccatttctgcacggagggaggcgatctccatctcataatctccccgaatgcgttccatgtcttcaagttcattctgcatccggcagagatcctcctgcagggatgctatgtcactctcatgttcagttgcggaatcctctgctgcttgccgcagactctggatctcagcctgggccaaatgcaattcctgttctatttccttaagttcgctttctttctcatgctctaacagggaaatctcctcccgtaga

SEQ ID NO: 18150 - DNA, 118 bp, Homo sapiens
  MAP TO CHR19.1; EXPRESSED IN HEART, SIGNAL = 0.87; EXPRESSED IN BONE MARROW, SIGNAL = 0.86; EXPRESSED IN ADULT LIVER, SIGNAL = 0.77; EXPRESSED IN FETAL LIVER, SIGNAL = 0.68; EXPRESSED IN LUNG, SIGNAL = 0.79; NT HIT: Y18000.1, EVALUE 6.00e+00
ttgttaatgagaaattttgacctctggtttgtaagttaaacttgtaatcccagctaatgaagtaaatcacttccaactcgagtctgttgttccctctctgctttgcacactgggtctg

SEQ ID NO: 18151 - DNA, 198 bp, Homo sapiens
  MAP TO CHR7.1; EXPRESSED IN HEART, SIGNAL = 0.72; EXPRESSED IN ADULT LIVER, SIGNAL = 1.2; EXPRESSED IN BONE MARROW, SIGNAL = 0.7; SWISSPROT HIT: P21300, EVALUE 1.00e-21; NT HIT: gi14745093, EVALUE 5.00e-91; EST_HUMAN HIT: BE786393.1, EVALUE 8.00e-91
accaaatgcaccattgcaccttgctgacgatgaacaggtcctcccgcttcacagccttctcttggatcttctcttggatggcttcccccacttcatgttcattctgatagacataggcacagtcaatgtgccgatatcctgcatcaatggccaccttcactgcttctttcactttgccaagaggagactgaaaggcaa

SEQ ID NO: 18152 - DNA, 248 bp, Homo sapiens
  MAP TO CHR17.1; EXPRESSED IN LUNG, SIGNAL = 1.5; EXPRESSED IN HEART, SIGNAL = 4.6; EXPRESSED IN BONE MARROW, SIGNAL = 1.7; EXPRESSED IN ADULT LIVER, SIGNAL = 4.5; EXPRESSED IN FETAL LIVER, SIGNAL = 2.4; SWISSPROT HIT: P13929, EVALUE 6.00e-38; NT HIT: X56832.1, EVALUE 0.00e+00; EST_HUMAN HIT: BF671553.1, EVALUE 1.00e-122
caggccttcaatgtgatcaacgggggctcccatgctggaaacaagctggccatgcaggagttcatgattctgcctgtgggagccagctccttcaaggaagccatgcgcattggcgccgaggtctaccaccacctcaagggggtcatcaaggccaagtatgggaaggatgccaccaatgtgggtgatgaaggtggcttcgcacccaacatcctggagaacaatgagggtcagtgctgagcaccctgggg

SEQ ID NO: 18153 - DNA, 361 bp, Homo sapiens
  MAP TO CHR6.1; EXPRESSED IN LUNG, SIGNAL = 0.59; EXPRESSED IN HEART, SIGNAL = 0.54; EXPRESSED IN BONE MARROW, SIGNAL = 0.36; NT HIT: gi14757621, EVALUE 3.00e-35; SWISSPROT HIT: Q06430, EVALUE 3.00e-56; EST_HUMAN HIT: BE005007.1, EVALUE 0.00e+00
caggaggcagcactccgggggtgatatttttccctttaaatcccttcagatactgaactatttccctgttggttttcaggggaaagtcttgcccgcaggtgttgatgacatacttccagggaacttcagaggccacaaggtcttccaggcagttcaggtcagcctggagcctggagatccccccatagacaaccgactccttcttggaagccagaaaagcatttgggaagcagctgagtaactgtttcactgcacctttaaaggcatccgtcgccttctgatccaggtgcacacagtagacattttggggcatataaatcgccctgaagagcctctcaaaagtgccgaagtctttgtggat

SEQ ID NO: 18154 - DNA, 289 bp, Homo sapiens
  MAP TO CHR6.1; EXPRESSED IN BONE MARROW, SIGNAL =   6; EXPRESSED IN PLACENTA, SIGNAL =  12; NT HIT: AF055066.1, EVALUE 0.00e+00; SWISSPROT HIT: P30511, EVALUE 6.00e-53; EST_HUMAN HIT: AV752612.1, EVALUE 0.00e+00
ctcagatcctccaaaggcacacgttgcccaccaccccatctctgaccatgaggccaccctgaggtgctgggccctgggcttctaccctgcggagatcacgctgacctggcagcgggatggggaggaacagacccaggacacagagcttgtggagaccaggcctgcaggggatggaaccttccagaagtgggccgctgtggtggtgcctcctggagaggaacagagatacacatgccatgtgcagcacgaggggctgccccagcccctcatcctgagatggggtaaggag

SEQ ID NO: 18155 - DNA, 129 bp, Homo sapiens
  MAP TO CHR19.1; EXPRESSED IN LUNG, SIGNAL = 0.61; EXPRESSED IN HEART, SIGNAL = 0.58; EXPRESSED IN BONE MARROW, SIGNAL = 0.69; NT HIT: gi6756064, EVALUE 9.00e-24; SWISSPROT HIT: Q14585, EVALUE 1.00e-14; EST_HUMAN HIT: BF672054.1, EVALUE 2.00e-25
caatacacataaaccgtatgaatgtaaggaatgtgggaaatactttagtcgtagtgcaaatcttattcagcatcagagtattcatactggagagaaaccctttgaatgtaaggagtgtgggaaagcctt

SEQ ID NO: 18156 - DNA, 249 bp, Homo sapiens
  MAP TO CHR19.1; EXPRESSED IN HEART, SIGNAL = 3.3; EXPRESSED IN BONE MARROW, SIGNAL = 3.3; EXPRESSED IN ADULT LIVER, SIGNAL =   5; EXPRESSED IN LUNG, SIGNAL = 3.8; SWISSPROT HIT: P20908, EVALUE 4.00e-18; EST_HUMAN HIT: AI653710.1, EVALUE 0.00e+00; NT HIT: gi15302121, EVALUE 0.00e+00
tcttacccggcagccatcctgggggacgctgacagtggctgctgtcgtctggttgaaagacagctcctctccattggtgccaaggaagcgggcggagtggctgtagtcacccgtggcttcgtccagccaggcagctgcattctggcaggagtaggtgaagttctggcgagctgtggcactcagcagtttcaggaagttcagctgcacgacattcactggggacccgtcggcgtccacgtaggagaactg

SEQ ID NO: 18157 - DNA, 143 bp, Homo sapiens
  MAP TO CHR19.1; EXPRESSED IN LUNG, SIGNAL = 5.8; EXPRESSED IN BONE MARROW, SIGNAL = 3.1; NT HIT: gi4508038, EVALUE 5.00e-75; SWISSPROT HIT: Q03923, EVALUE 1.00e-24; EST_HUMAN HIT: BF699661.1, EVALUE 4.00e-70
ataattcatactggagagaaaccatacaaatgtgaagaatgtggcaaagcttttaaccaatcctcaaaacttaccaaacataagaaaattcatactggagagaaaccctacacatgtgaagaatgtggcaaagcctttaacca

SEQ ID NO: 18158 - DNA, 203 bp, Homo sapiens
  MAP TO CHR11.1; EXPRESSED IN LUNG, SIGNAL = 1.2; EXPRESSED IN HEART, SIGNAL = 1.7; EXPRESSED IN BONE MARROW, SIGNAL =   2; EXPRESSED IN PLACENTA, SIGNAL = 3.5; EXPRESSED IN FETAL LIVER, SIGNAL = 2.3; SWISSPROT HIT: Q10496, EVALUE 8.40e-01; EST_HUMAN HIT: BI821778.1, EVALUE 1.00e-108; NT HIT: gi14141181, EVALUE 1.00e-108
caggcgcagctggtcgaggacttccgagccctgcaccaggcagccgaggacatgaagctgtttgatgccagtcccaccttctttgctttcctactgggccacatcctggccatggaggtgctggcctggctccttatctacctcctgggtcctggctgggtgcccagtgccctggccgccttcatcctggccatctctcaggt

SEQ ID NO: 18159 - DNA, 174 bp, Homo sapiens
  MAP TO CHR5.1; EXPRESSED IN PLACENTA, SIGNAL = 1.1; EXPRESSED IN LUNG, SIGNAL = 1.3; EXPRESSED IN BONE MARROW, SIGNAL = 0.84; SWISSPROT HIT: O88573, EVALUE 2.00e-10; NT HIT: gi7656878, EVALUE 1.00e-66; EST_HUMAN HIT: AI335947.1, EVALUE 2.00e-66
ttttatttctgtgatacaaagattgtgtttcttttcatagcaacatgaaccgtgaagaccggaatgtgctgcgtatgaaagaacgggaaaggcggaatcaggaaattcagcagggcgaagacgccttcccacctagctctcctctctttgcagagccatacaaagttgtaagtt

SEQ ID NO: 18160 - DNA, 228 bp, Homo sapiens
  MAP TO CHR12.1; EXPRESSED IN BONE MARROW, SIGNAL = 0.55; EXPRESSED IN LUNG, SIGNAL = 2.3; SWISSPROT HIT: P18165, EVALUE 1.30e+00; NT HIT: Y13537.1, EVALUE 1.00e-107
ctgggtaatcatttctctgaagctcccccgaaaaagcccttgccccttgcctccgcagctctctcctccgtccttccacccaccttccacccacagtgcgctggctgccctggtttccttgatatttttgtcctttgggtccaccccaccccacactcagctgcacttcagcacttgtccttggccctccggctgcagcagatgcgcacatatgctcgcgcgcacgtg

SEQ ID NO: 18161 - DNA, 132 bp, Homo sapiens
  MAP TO CHR16.1; EXPRESSED IN LUNG, SIGNAL = 0.67; EXPRESSED IN HEART, SIGNAL = 0.71; EXPRESSED IN BONE MARROW, SIGNAL = 0.67; EST_HUMAN HIT: AL522081.1, EVALUE 2.00e-68; SWISSPROT HIT: P55194, EVALUE 3.50e+00; NT HIT: gi16164754, EVALUE 2.00e-68
acctgagtgacgtttgtgaatatctgctcagacattctctcgcacagaacagccatcagctgcaggacaagcagcttccgctcttggccttccacaagaagagtctgatgttgctctaattccaagaggctc

SEQ ID NO: 18162 - DNA, 213 bp, Homo sapiens
  MAP TO CHR5.1; EXPRESSED IN BONE MARROW, SIGNAL = 0.45; EXPRESSED IN ADULT LIVER, SIGNAL = 0.51; EXPRESSED IN FETAL LIVER, SIGNAL = 0.32; NT HIT: AF057300.1, EVALUE 1.00e-101; EST_HUMAN HIT: BG034369.1, EVALUE 1.00e-100; SWISSPROT HIT: P12753, EVALUE 2.00e-14
cttgattttcattttctgtaggcatggtgaaaaggtcagtctgagctctaagtgtgcagaaattgaccgagaaatgatcagttctcttggggtttccaaggctgtgctaaataatgtcattttctgtcatcaagaagattctaattggcctttaagtgaaggaaaggctttgaagcaaaagtttgatgagattttttcagcaacaaggtttgt

SEQ ID NO: 18163 - DNA, 262 bp, Homo sapiens
  MAP TO CHR22.1; EXPRESSED IN LUNG, SIGNAL = 2.3; EXPRESSED IN BONE MARROW, SIGNAL = 3.1; EXPRESSED IN PLACENTA, SIGNAL = 4.6; SWISSPROT HIT: Q07050, EVALUE 2.00e+00; NT HIT: X73003.1, EVALUE 0.00e+00; EST_HUMAN HIT: BE897260.1, EVALUE 0.00e+00
tacttatccatttttccaggtcctccacgtcctcctcttcttcctcccatctgttccatcaaaggtccagggggccccccagggccacctcgtcttcctccaccaaagccacctcggtccatgccccggccaccacggaagccacctctgtctccaccacggccacctctgaacattccaccgggaccaccacgatccatgaggccacctcttcctccccgcatgccaccagggccacctctgccacgatcaccacctaagg

SEQ ID NO: 18164 - DNA, 207 bp, Homo sapiens
  MAP TO CHR20.1; EXPRESSED IN BONE MARROW, SIGNAL = 0.89; EXPRESSED IN LUNG, SIGNAL = 1.8; EXPRESSED IN HEART, SIGNAL = 1.5; SWISSPROT HIT: P17858, EVALUE 5.00e-32; NT HIT: gi16166417, EVALUE 1.00e-102; EST_HUMAN HIT: BI463088.1, EVALUE 1.00e-104
gcacagacccaccttccgccaccagctcctccagcaggctgccccactcgctgcggaagatgttggcacctgtgaggctgccatccccgccgatgacgcacaggttggtgatgccgtgctggaccaggttgtaggccgctgcccggcgcccctccctggtggtaaaggccttgcagcgagcgctgccaatgatagtgccgccctgca

SEQ ID NO: 18165 - DNA, 285 bp, Homo sapiens
  MAP TO CHR22.1; EXPRESSED IN LUNG, SIGNAL = 0.87; EXPRESSED IN ADULT LIVER, SIGNAL = 1.1; EXPRESSED IN BONE MARROW, SIGNAL = 0.72; EXPRESSED IN FETAL LIVER, SIGNAL = 0.85; SWISSPROT HIT: P51912, EVALUE 4.80e-01; NT HIT: gi14778494, EVALUE 0.00e+00; EST_HUMAN HIT: BG385767.1, EVALUE 0.00e+00
ggctgctgcccacactcggagctgttgcctgccacgatgccagcccgaaggttctcgctgtctccagtgccctcctccatggagtaggtcttggagtggttgcctcggcgatgggatggggctcggccctgggccaggctgagctgcctgcggagggcgcggttctcctcctccacctcgcgcatgcgcacctccaggctctcgcgctcccgctggctggaggccgtgtacctggggctgtgtgcctgggactccagcggtgacagagacacgggctttccatct

SEQ ID NO: 18166 - DNA, 270 bp, Homo sapiens
  MAP TO CHR22.1; EXPRESSED IN BONE MARROW, SIGNAL = 0.72; EXPRESSED IN HEART, SIGNAL = 0.84; EXPRESSED IN ADULT LIVER, SIGNAL = 0.81; EXPRESSED IN PLACENTA, SIGNAL = 1.7; EST_HUMAN HIT: BF309456.1, EVALUE 0.00e+00; NT HIT: gi14778715, EVALUE 0.00e+00; SWISSPROT HIT: Q00587, EVALUE 5.00e-42
ggcatggactagcagctgtgagcagccagagctgatgcccggcccccaggggggcagaggcgccgccaccatgagcctgggcaagctctcgcctgtgggctgggtgtccagttcacagggaaagaggcggctgactgcagacatgatcagccacccactcggggacttccgccacaccatgcatgtgggccgtggcggggatgtcttcggggacacgtccttcctcagcaaccacggtggcagctccgggagcacccatcgctcaccccg

SEQ ID NO: 18167 - DNA, 326 bp, Homo sapiens
  MAP TO CHR7.1; EXPRESSED IN LUNG, SIGNAL = 0.72; EXPRESSED IN ADULT LIVER, SIGNAL = 0.43; EXPRESSED IN BONE MARROW, SIGNAL = 1.3; EST_HUMAN HIT: AI769814.1, EVALUE 0.00e+00; NT HIT: gi15300625, EVALUE 0.00e+00; SWISSPROT HIT: O14924, EVALUE 6.10e-01
aaccagcccatagacttaatatataagcatatacaagaaaaagtctctccccactctgtacaaaagttgctgtctttgtgtgcattctattgcattttataagttttttgggggaggggagtcatatttgagtttcctgtaccttgtccttggtatgggtctgaattatataaggttcagagatagtggtgactgtggggtgcagagagttccccaggctgttttctgtccagtgggccccatgtgctggtttgtaggtgttgtagttaatatggtcatgaattgtgggcagcactactgccccctcacctgatacaccggacgga

SEQ ID NO: 18168 - DNA, 484 bp, Homo sapiens
  MAP TO CHR2.1; EXPRESSED IN LUNG, SIGNAL = 1.5; EXPRESSED IN BONE MARROW, SIGNAL = 0.65; EXPRESSED IN HEART, SIGNAL = 1.3; SWISSPROT HIT: P07202, EVALUE 2.00e-35; EST_HUMAN HIT: AU131275.1, EVALUE 0.00e+00; NT HIT: AF200348.1, EVALUE 0.00e+00
caggttaccactacaacgacctggtgtctccacagtacctgaacctcatcgcaaacctgtcgggctgtaccgcccaccggcgcgtgaacaactgctcggacatgtgcttccaccagaagtaccggacgcacgacggcacctgtaacaacctgcagcaccccatgtggggcgcctcgctgaccgccttcgagcgcctgctgaaatccgtgtacgagaatggcttcaacacccctcggggcatcaacccccaccgactgtacaacgggcacgcccttcccatgccgcgcctggtgtccaccaccctgatcgggacggagaccgtcacacccgacgagcagttcacccacatgctgatgcagtggggccagttcctggaccacgacctcgactccacggtggtggccctgagccaggcacgcttctccgacggacagcactgcagcaacgtgtgcagcaacgaccccccctgcttctctgtcatgat

SEQ ID NO: 18169 - DNA, 309 bp, Homo sapiens
  MAP TO CHR2.1; EXPRESSED IN FETAL LIVER, SIGNAL = 0.41; EXPRESSED IN BONE MARROW, SIGNAL = 0.5; EST_HUMAN HIT: AI276476.1, EVALUE 1.00e-101; SWISSPROT HIT: Q90688, EVALUE 2.00e-14; NT HIT: gi16157781, EVALUE 0.00e+00
attccatcaccacccggcatacctgaagaagttgggactggcaaagagcatatcatcattcagtggacaaaacctgaatctgatggtggcaatgaaatcagcaactacctagtagacaaacgtgagaagaagagcctgcgctggacacgtgtcaacaaagactatgtggtgtatgataccaggctgaaggtgaccagcctgatggagggttgtgattaccagttccgggtgaccgcagtgaatgcagctggtaacagtgagcccagcgaagcttccaacttcatctcatgcagagaaccatcatgtgag

SEQ ID NO: 18170 - DNA, 191 bp, Homo sapiens
  MAP TO CHR5.1; EXPRESSED IN BONE MARROW, SIGNAL = 0.33; EXPRESSED IN FETAL LIVER, SIGNAL = 0.55; EST_HUMAN HIT: BE817680.1, EVALUE 5.00e-95; SWISSPROT HIT: O95486, EVALUE 5.00e-28; NT HIT: gi16171855, EVALUE 3.00e-95
ttacctttgctggatgtatacaagagtgctgactgaaaagaaaccaactgagtgtcagtaagactctcttccactgacatctgtactgcatacccagcgtctgggttgacgttaggcaaagacagtaagtcggttgacctaacaaagaagtttccatggaaagtatgaatggaaagacctagaagagaaaa

SEQ ID NO: 18171 - DNA, 246 bp, Homo sapiens
  MAP TO CHR13.1; EXPRESSED IN FETAL LIVER, SIGNAL = 0.7; EXPRESSED IN LUNG, SIGNAL = 0.61; EXPRESSED IN HEART, SIGNAL = 0.75; EXPRESSED IN BONE MARROW, SIGNAL = 0.62; EXPRESSED IN ADULT LIVER, SIGNAL = 0.59; EST_HUMAN HIT: AU136520.1, EVALUE 9.00e-45; SWISSPROT HIT: P07271, EVALUE 2.10e-01; NT HIT: gi16188347, EVALUE 6.00e-45
tgttgtttttcagatacatcctcaaagataattctcaaaagcatattgaagtttgggatccttctccagaagaaattatttcaaatgaagtacacaacttaaatcctgtgtctgcaaaatctctacctaatgagaattttcagtcactttataataaggaattgcctgtgcatatctgtaatgtaatatctcctgagaagatttatgttcagtggttgttaactgaaaacttacttaataggtata

SEQ ID NO: 18172 - DNA, 436 bp, Homo sapiens
  MAP TO CHR7.1; EXPRESSED IN BONE MARROW, SIGNAL =  18; EXPRESSED IN PLACENTA, SIGNAL =  21; EXPRESSED IN LUNG, SIGNAL = 9.8; SWISSPROT HIT: Q02877, EVALUE 1.00e-60; NT HIT: gi4506620, EVALUE 0.00e+00; EST_HUMAN HIT: BG111259.1, EVALUE 0.00e+00
cgccaaaatgaagttcaatccctttgcgacttccaaccgaaacaagaaccacaaaaggcatttcaatgcaccttcccacatttacaggaagactatgtcttcccctctttccaaagagctgagacagaagtacaacgtgtgatccatgcccatccaaaaggatgatgaagttcaggttgtacgaggacactataaaggttagccaattggcagagtagtccaggtttacaggaagaaatatgtcctctacatcgaacgggtgcagtgggaaaaggctaatggcacaactgtccatgtaggcattcaccccagcaaggtggttatcactaggctaaaactggacatagaccgcaaaaagattcttgaacagaaagccaaatctcgccaagtaggaaaagggcaaatacaaggaagaaacaattgagaagatgcagga

SEQ ID NO: 18173 - DNA, 240 bp, Homo sapiens
  MAP TO CHR7.1; EXPRESSED IN BONE MARROW, SIGNAL =  12; EXPRESSED IN PLACENTA, SIGNAL =  24; EXPRESSED IN LUNG, SIGNAL = 9.3; SWISSPROT HIT: Q02878, EVALUE 2.00e-39; NT HIT: gi14744842, EVALUE 0.00e+00; EST_HUMAN HIT: BG574189.1, EVALUE 1.00e-125
cagaaatttgtcattgccacctcaaccaaaatcgatatcagcaatgtaaaaatcccaaaacatcttactgatgcttacttcaagaagaagaagctgcggaagcccagacaccaggaaggtgagatcttcgacacagaaaaagagaaatatgagattacggagcagtgcaagattgagcagaaagctgtggactcacaaattttaccaaaaatcaaagctattcctcagctccagggctac

SEQ ID NO: 18174 - DNA, 258 bp, Homo sapiens
  MAP TO CHR15.1; EXPRESSED IN PLACENTA, SIGNAL =  22; EXPRESSED IN LUNG, SIGNAL =  11; EXPRESSED IN BONE MARROW, SIGNAL =  21; EST_HUMAN HIT: BI603232.1, EVALUE 1.00e-118; SWISSPROT HIT: P12970, EVALUE 8.00e-31; NT HIT: gi13650616, EVALUE 0.00e+00
tcgtgaagaagcaggaggctaagaaagtggtgaatcccgtttgagcaaaggcctaagaattttggcattggacaggacatccagcccaaaagagacctcacccgctttgtgaaatggccccactatatcaggttgcagcggcagagagctatactctataagcggctgaaagtgcctcctgcgattaaccagttcacccaggccctggaccgccaaacagcgagctgcataagctggcccacaagtacagaccagaga

SEQ ID NO: 18175 - DNA, 181 bp, Homo sapiens
  MAP TO CHR7.1; EXPRESSED IN ADULT LIVER, SIGNAL =   1; EXPRESSED IN BONE MARROW, SIGNAL = 0.96; EXPRESSED IN FETAL LIVER, SIGNAL = 0.96; EST_HUMAN HIT: AA620569.1, EVALUE 6.00e-76; SWISSPROT HIT: Q99996, EVALUE 8.00e-23; NT HIT: AJ010770.1, EVALUE 1.00e-97
agttacaagaatttgaagctgccattaaacaaagagatggcattataacccagctcactgctaatttacaacaagcaagaagagaaaaggatgagacaatgagagaatttttagagttgacagaacagagtcaaaaattacagattcaatttcagcaagtaagtattactaatgcaacaaa

SEQ ID NO: 18176 - DNA, 228 bp, Homo sapiens
  MAP TO CHR22.1; EXPRESSED IN HEART, SIGNAL = 0.55; EXPRESSED IN BONE MARROW, SIGNAL = 0.57; SWISSPROT HIT: Q9Y5X1, EVALUE 5.10e-01; NT HIT: gi13899208, EVALUE 1.00e-100; EST_HUMAN HIT: BF697707.1, EVALUE 6.00e-98
tacctttagaagatcgaagacatcgtctgcatccagccggtaatcacagagtcggtgcaggatctccacccgtgtgcgaagaggcaggtcctggaaactggcttccctcagagggttgggcttcccttcttcgagctcccagcggtagttgatgatgtcctctaggtagctgtggaatgtctgaggcctagaccagggccccaaacacaaaaatacattaatataaaa

SEQ ID NO: 18177 - DNA, 259 bp, Homo sapiens
  MAP TO CHR7.1; EXPRESSED IN BONE MARROW, SIGNAL = 0.38; EXPRESSED IN HEART, SIGNAL = 0.57; SWISSPROT HIT: P45457, EVALUE 5.10e-01; EST_HUMAN HIT: AU144177.1, EVALUE 0.00e+00
ttcttgacccgaggaatcaactgagctcccagtgctggctaccttgggcaaataaaatctgtggttgagagagttctctttgctgtgccacagtccctgtgatgtgccaaatggcaccagcatttgcagcaaagctcgttaaatctttttggaatgggcaaatattttttcaacttgagccctgctgagccaaaccaaatacttgctggcagaataaagttcaaactggcaactgttttggagaccaaagtaatgccat

SEQ ID NO: 18178 - DNA, 229 bp, Homo sapiens
  MAP TO CHR5.1; EXPRESSED IN HEART, SIGNAL = 0.56; EXPRESSED IN BONE MARROW, SIGNAL = 0.36; EST_HUMAN HIT: BE546219.1, EVALUE 5.00e-71; NT HIT: AB016625.1, EVALUE 1.00e-126; SWISSPROT HIT: O76082, EVALUE 1.00e-31
tgcttttccagctttcttctgcactctgtttcaggatgaccatatcagtgggctattttgggctttcgcttgatactcctaacttgcatggggacatctttgtgaactgcttcctttcagcgatggttgaagtcccagcatatgtgttggcctggctgctgctgcaatatttgccccggcgctattccatggccactgccctcttcctgggtggcagtgtccttctctt

SEQ ID NO: 18179 - DNA, 255 bp, Homo sapiens
  MAP TO CHR10.1; EXPRESSED IN LUNG, SIGNAL = 0.87; EXPRESSED IN BONE MARROW, SIGNAL = 1.2; EXPRESSED IN HEART, SIGNAL = 1.1; EST_HUMAN HIT: AL515242.1, EVALUE 0.00e+00; SWISSPROT HIT: P13674, EVALUE 1.00e-33; NT HIT: U14611.1, EVALUE 0.00e+00
aggagtgaaacacaaatcttttctaacggctgaggactgctttgagttgggcaaagtggcctatacagaagcagattattaccatacggaactgtggatggaacaagccctaaggcaactggatgaaggcgagatttctaccatagataaagtctctgttctagattatttgagctatgcggtatatcagcagggagacctggataaggcacttttgctcacaaagaagcttcttgaactaggtatgttatctgg

SEQ ID NO: 18180 - DNA, 209 bp, Homo sapiens
  MAP TO CHR7.1; EXPRESSED IN BONE MARROW, SIGNAL = 0.63; EST_HUMAN HIT: BF950055.1, EVALUE 1.10e+00; NT HIT: AF049874.1, EVALUE 7.40e-01
cttatgttcaaagaagcaaatccttgaaaacgctagctttgggtgctatgtttattccttgtcaatgtcttccatatgaaatctgttctgcttataatatctaccacagttggagccttgaaaaaaatctgtttcatatctgccctttgtacttagcttattttgttttatgcttcccccaagttatacgtctgtaagctgtctttctt

SEQ ID NO: 18181 - DNA, 453 bp, Homo sapiens
  MAP TO CHR5.1; EXPRESSED IN FETAL LIVER, SIGNAL = 0.53; EXPRESSED IN BONE MARROW, SIGNAL = 0.44; EST_HUMAN HIT: BG819161.1, EVALUE 0.00e+00; NT HIT: gi14727748, EVALUE 0.00e+00; SWISSPROT HIT: Q9UN67, EVALUE 3.00e-84
gttggggctgatcgtgtagttttggataccgttaagtcctccatctggatcctgtgctctttctagtctaaatgctgtcccttcagctgtattttctgatatttttaagactgtttctttgtcctgaaatactggcgcgtgatcatttatatccctgactctcagctcagcccggtaaatctgaaagggatcatccattaaaatttggaaatacagcatacagggctctttagggccacacagcttctctcggtccagtttctcatttgtgagcaaattcccggtatgtgaatccaggagcaggtattgtttgttatcatcggaaaccaccctggttccccttgcagccagctccccctctgctagtcccagatcctttgccagattgaccacaaaggatcctttctctgtttcctcagtcaccgaataacgtccaaacccagaacctgccaa

SEQ ID NO: 18182 - DNA, 121 bp, Homo sapiens
  MAP TO CHR22.1; EXPRESSED IN FETAL LIVER, SIGNAL = 0.43; EXPRESSED IN BONE MARROW, SIGNAL = 0.53; EST_HUMAN HIT: AI127990.1, EVALUE 2.30e+00; NT HIT: M16409.1, EVALUE 1.60e+00
ggcttcagggaggaatggagggagagagtgcaagaagaaggggtgggacttggggacaggggcggtgtcacgggggaggagggtgcaggtggtgacttgtttatctgctcagctgttttgt

SEQ ID NO: 18183 - DNA, 330 bp, Homo sapiens
  MAP TO CHR13.1; EXPRESSED IN BONE MARROW, SIGNAL = 0.34; SWISSPROT HIT: P51587, EVALUE 8.00e-56; NT HIT: X95168.1, EVALUE 0.00e+00; EST_HUMAN HIT: BG614511.1, EVALUE 0.00e+00
ggaaattgatagaagcagaagatcggctataaaaaagataatggaaagggatgacacagctgcaaaaacacttgttctctgtgtttctgacataatttcattgagcgcaaatatatctgaaacttctagcaataaaactagtagtgcagatacccaaaaagtggccattattgaacttacagatgggtggtatgctgttaaggcccagttagatcctcccctcttagctgtcttaaagaatggcagactgacagttggtcagaagattattcttcatggagcagaactggtgggctctcctgatgcctgtacacctcttgaagccccaga

SEQ ID NO: 18184 - DNA, 164 bp, Homo sapiens
  MAP TO CHR7.1; EXPRESSED IN PLACENTA, SIGNAL = 1.6; EXPRESSED IN FETAL LIVER, SIGNAL = 1.9; EXPRESSED IN LUNG, SIGNAL = 0.59; EXPRESSED IN HEART, SIGNAL = 2.4; SWISSPROT HIT: Q14563, EVALUE 4.00e-29; EST_HUMAN HIT: BF667677.1, EVALUE 9.00e-81; NT HIT: gi16162409, EVALUE 1.00e-85
tacctctttgcagtgggaaaatagcgagaacatgcagaaccatcccaagcacagtaagggtctcgggcgaggcaacactcagcacacgctttcccgtaaatatcacaccggtgtaaagggagctgggcaaccccagccgttgaaccaatatatagttgttgctg

SEQ ID NO: 18185 - DNA, 150 bp, Homo sapiens
  MAP TO CHR1.1; EXPRESSED IN FETAL LIVER, SIGNAL = 3.1; EXPRESSED IN LUNG, SIGNAL =  29; EXPRESSED IN ADULT LIVER, SIGNAL = 1.2; EXPRESSED IN PLACENTA, SIGNAL =  14; SWISSPROT HIT: P06703, EVALUE 2.00e-11; EST_HUMAN HIT: BG255168.1, EVALUE 2.00e-75; NT HIT: J02763.1, EVALUE 3.00e-79
tcagccatggcatgccccctggatcaggccattggcctcctcgtggccatcttccacaagtactccggcagggagggtgacaagcacaccctgagcaagaaggagctgaaggagctgatccagaaggagctcaccattggctcggtgagt

SEQ ID NO: 18186 - DNA, 315 bp, Homo sapiens
  MAP TO CHR12.1; EXPRESSED IN ADULT LIVER, SIGNAL = 4.7; EXPRESSED IN PLACENTA, SIGNAL = 1.7; EXPRESSED IN FETAL LIVER, SIGNAL = 2.5; EXPRESSED IN LUNG, SIGNAL = 1.6; EXPRESSED IN HEART, SIGNAL = 1.8; NT HIT: gi14763467, EVALUE 0.00e+00; SWISSPROT HIT: P78560, EVALUE 2.00e-54; EST_HUMAN HIT: BF969862.1, EVALUE 0.00e+00
ttttcctcctcaggtgacagattgactgggatcccctcgcacatcctcaacagctccccatcagaccggcagattaaccagctggcccagaggctgggccctgagtgggagcccatggtgctgtctctgggactgtcccagacggatatctaccgctgtaaggccaaccacccccacaacgtgcagtcgcaggtggtggaggccttcatccgttggcggcagcgcttcgggaagcaggccaccttccagagcctgcacaacgggctgcgggctgtggaggtggacccctcgctgctcctgcacatgttggagtga

SEQ ID NO: 18187 - DNA, 204 bp, Homo sapiens
  MAP TO CHR8.1; EXPRESSED IN HEART, SIGNAL = 4.9; EXPRESSED IN PLACENTA, SIGNAL =  31; EXPRESSED IN FETAL LIVER, SIGNAL =  20; EXPRESSED IN LUNG, SIGNAL =  14; EST_HUMAN HIT: AA676880.1, EVALUE 5.00e-89; NT HIT: L07393.1, EVALUE 8.00e-87; SWISSPROT HIT: P15880, EVALUE 3.00e-31
cttatgttgtagccacagctggagcctgggtcctctgcacgtagactctggcgtgggtcttgacaaggtggtcagtgaattcctgatagggagacttggtgaatacagtctccttccagaggtcgggggtcaggtagctgtaggtcttggagatggcatcaaaggtggccttggcgaagttgcccagggtggcattgcagctcc

SEQ ID NO: 18188 - DNA, 236 bp, Homo sapiens
  MAP TO CHR6.1; EXPRESSED IN HEART, SIGNAL = 8.7; EXPRESSED IN PLACENTA, SIGNAL =  48; EXPRESSED IN FETAL LIVER, SIGNAL =  11; EXPRESSED IN LUNG, SIGNAL =  57; EST_HUMAN HIT: AL571284.1, EVALUE 1.00e-115; SWISSPROT HIT: P30507, EVALUE 1.00e-36; NT HIT: X12432.1, EVALUE 1.00e-125
ccctccttaccccatctcagggtgaggggctcgggcagaccctcatgctgcacatggcaggtgtatctctgctcctctccagaaggcaccaccacagccgcccacttctggaaggttccatcccctgcaggcctggtctccacgagctccgtgtgtgggtctggtcctccccatcccgctgccaggtcagtgtgatctccgcagggtagaagcccagggcccagcacctcagggtg

SEQ ID NO: 18189 - DNA, 415 bp, Homo sapiens
  MAP TO CHR9.1; EXPRESSED IN PLACENTA, SIGNAL =   2; EXPRESSED IN LUNG, SIGNAL = 1.4; EXPRESSED IN ADULT LIVER, SIGNAL = 2.5; EXPRESSED IN HEART, SIGNAL = 1.8; SWISSPROT HIT: Q64686, EVALUE 2.00e-25; NT HIT: gi14740809, EVALUE 0.00e+00; EST_HUMAN HIT: BI837969.1, EVALUE 0.00e+00
ggtgccaccagtgtgtgattgtcagcagctccagccacctgctgggcaccaagctgggccctgagatcgagcgggctgagtgtacaatccgcatgaatgatgcacccaccactggctactcagctgatgtgggcaacaagaccacctaccgcgtcgtggcccattccagtgtgttccgcgtgctgaggaggccccaggagtttgtcaaccggacccctgaaaccgtgttcatcttctgggggcccccgagcaagatgcagaagccccagggcagcctcgtgcgtgtgatccagcgagcgggcctggtgttccccaacatggaagcatatgccgtctctcccggccgcatgcggcaatttgacgacctcttccggggtgagacgggcaaggacaggtaccagcctcctgcctgccc

SEQ ID NO: 18190 - DNA, 173 bp, Homo sapiens
  MAP TO CHR5.1; EXPRESSED IN HEART, SIGNAL = 0.75; EXPRESSED IN ADULT LIVER, SIGNAL =   1; EXPRESSED IN PLACENTA, SIGNAL = 1.3; EXPRESSED IN LUNG, SIGNAL = 1.5; SWISSPROT HIT: Q13123, EVALUE 5.00e-27; NT HIT: gi14728196, EVALUE 1.00e-88; EST_HUMAN HIT: BI856055.1, EVALUE 2.00e-88
actcacctccatggtggggcaatcagccttgctgcggataagagtggtggggatatctgtgtcagcatactcatcatccaggtctaccacataggccatgcggcccggcaggaacaactcattccgctcatatgctttgctcttaaaaagcattcggtaaacattgcggccta

SEQ ID NO: 18191 - DNA, 283 bp, Homo sapiens
  MAP TO CHR8.1; EXPRESSED IN ADULT LIVER, SIGNAL =   2; EXPRESSED IN PLACENTA, SIGNAL = 2.7; EXPRESSED IN FETAL LIVER, SIGNAL = 1.2; EXPRESSED IN LUNG, SIGNAL = 1.1; SWISSPROT HIT: P97432, EVALUE 3.00e-36; NT HIT: gi14110377, EVALUE 0.00e+00; EST_HUMAN HIT: BE791659.1, EVALUE 0.00e+00
acctctgggattaggggcactgtttccagagtctgtgaggtcgtgaggatgtcacttatgctgtgctcctgtggctggttctcccctccagggagtctttcccagcctcagctggttcctgcccagcctcaaccccaggcttgccttcagcacctcgctccaggcctggctgtgagagcgcagagctgtacatagaatcccccagggggcggctggtatcaaagcactcaggcaggatgatgatgtaatcctctgaggaagcagaggactgactttgaacttc

SEQ ID NO: 18192 - DNA, 169 bp, Homo sapiens
  MAP TO CHR22.1; EXPRESSED IN PLACENTA, SIGNAL =  16; EXPRESSED IN FETAL LIVER, SIGNAL =  21; EXPRESSED IN LUNG, SIGNAL =  14; EXPRESSED IN HEART, SIGNAL = 2.7; EST_HUMAN HIT: AI951546.1, EVALUE 1.00e-86; NT HIT: AJ238852.1, EVALUE 2.00e-90; SWISSPROT HIT: P39023, EVALUE 4.00e-28
accttcttgttgatctcagtgcggtgatggtagcctttctgcccagcgcgtgccacagagaaggctacacgagcaggatgccatgccccaatacaggccaccttgcgcaggcctcggtgggtcttgcggggcagcttcttggtgtgccaacgactggtgacccctggaa

SEQ ID NO: 18193 - DNA, 187 bp, Homo sapiens
  MAP TO CHR19.1; EXPRESSED IN FETAL LIVER, SIGNAL = 3.5; EXPRESSED IN PLACENTA, SIGNAL = 3.7; EXPRESSED IN LUNG, SIGNAL = 2.3; EXPRESSED IN ADULT LIVER, SIGNAL = 4.4; EXPRESSED IN HEART, SIGNAL = 2.7; EST_HUMAN HIT: BF971861.1, EVALUE 8.00e-97; NT HIT: gi14758196, EVALUE 6.00e-97; SWISSPROT HIT: P47194, EVALUE 2.50e+00
ttctgcaccctgaacacccacaaagtggacatggacaagctcctggggggccagatcgggctggaggacttcatcttcgcccacgtgaaggggcagcgcaaggaggtggaggtgttcaagtcggaggatgcactcgggctcaccatcacggacaacggggctggctacgccttcatcaaggtgcctg

SEQ ID NO: 18194 - DNA, 161 bp, Homo sapiens
  MAP TO CHR5.1; EXPRESSED IN PLACENTA, SIGNAL =  10; EXPRESSED IN FETAL LIVER, SIGNAL = 4.4; EXPRESSED IN LUNG, SIGNAL =  11; EST_HUMAN HIT: BE568338.1, EVALUE 1.00e-85; NT HIT: gi16160498, EVALUE 1.00e-85; SWISSPROT HIT: P39028, EVALUE 1.00e-26
actttttccagcacgattccttttgcatgagaagcacctccaaaagggttggcctttagggctgtgcccaaatgagctttcttatactgtttatcatgccacttctggtctcgtcggtgactacggagcttcctagcagtacgaagtccacgacacttgcc

SEQ ID NO: 18195 - DNA, 214 bp, Homo sapiens
  MAP TO CHR19.1; EXPRESSED IN PLACENTA, SIGNAL = 1.7; EXPRESSED IN FETAL LIVER, SIGNAL =   1; EXPRESSED IN LUNG, SIGNAL =   1; EXPRESSED IN HEART, SIGNAL = 1.8; EXPRESSED IN ADULT LIVER, SIGNAL =   1; NT HIT: gi15302121, EVALUE 4.00e-86; SWISSPROT HIT: P12107, EVALUE 1.00e-05; EST_HUMAN HIT: BG564972.1, EVALUE 7.10e-02
gacaaaacatcccaccctctgcctcagtttcccccatcactgaactcctacctcgaaagtcttttccccaaggtcctgggtccccagcacagtgagtccagctatgctgatgaagcgggggccatggcccaaaacagggggctgagcttcacagtcagctaccagggtcaccatctcaccatctatgctgacggccacacggtgccacctgcaa

SEQ ID NO: 18196 - DNA, 155 bp, Homo sapiens
  MAP TO CHR6.1; EXPRESSED IN HEART, SIGNAL =  16; EXPRESSED IN PLACENTA, SIGNAL =  25; EXPRESSED IN LUNG, SIGNAL =  11; EST_HUMAN HIT: AI040404.1, EVALUE 5.00e-70; SWISSPROT HIT: P04406, EVALUE 1.00e-19; NT HIT: X01111.1, EVALUE 8.00e-68
cccactcttccaccttcaatgctggggctggcactgccctcaacgaccactttgtcaagctcatttcctggtatgacaatgaatttggctacaacaacagggtggtggacctcatggcccacatggcctccaaggagtaagacccctggaccacc

SEQ ID NO: 18197 - DNA, 194 bp, Homo sapiens
  MAP TO CHR2.1; EXPRESSED IN PLACENTA, SIGNAL =   5; EXPRESSED IN FETAL LIVER, SIGNAL = 5.8; EXPRESSED IN LUNG, SIGNAL = 2.8; EXPRESSED IN HEART, SIGNAL = 3.6; EXPRESSED IN ADULT LIVER, SIGNAL = 6.1; NT HIT: gi14724681, EVALUE 1.00e-101; SWISSPROT HIT: Q9Y7R3, EVALUE 4.90e-01; EST_HUMAN HIT: BG286551.1, EVALUE 1.00e-101
tacttaccttttaaatctgtcatttctacacaacctaactctggcaactcgagaggttctcccgtggagagagtctggacatcagagggaaacagcagttcacttctgtagtcctggcagtggagagtggacagaaacacccctgctgtgctgcactcatcaaatgaggctgctgtcttctgaaacatgggatc

SEQ ID NO: 18198 - DNA, 175 bp, Homo sapiens
  MAP TO CHR10.1; EXPRESSED IN HEART, SIGNAL = 1.2; EXPRESSED IN ADULT LIVER, SIGNAL = 1.2; EXPRESSED IN FETAL LIVER, SIGNAL = 1.8; EXPRESSED IN PLACENTA, SIGNAL = 1.7; EXPRESSED IN LUNG, SIGNAL = 1.6; EST_HUMAN HIT: BG435830.1, EVALUE 7.00e-94; SWISSPROT HIT: Q06730, EVALUE 1.00e-31; NT HIT: gi15299300, EVALUE 5.00e-94
ggtttctcccccgtgtgtgttctataatgttgagagagggttgacttatggctaaagaatttcccacattcaggacatgcaaagggtttctcccctgtgtgcgttctctgatgtattgtgaggtctgacttcaagcagaaggttttcccacattcataacattcataaggtttca

SEQ ID NO: 18199 - DNA, 303 bp, Homo sapiens
  MAP TO CHR1.1; EXPRESSED IN PLACENTA, SIGNAL =  18; EXPRESSED IN HEART, SIGNAL = 2.8; EST_HUMAN HIT: BG755550.1, EVALUE 0.00e+00; SWISSPROT HIT: P24049, EVALUE 6.00e-55; NT HIT: gi14724560, EVALUE 0.00e+00
caggccaagcagtggggctggacacaaggtcggtggcccaaaaagagtgctgaatttttgctgcacatgcttaaaaacacagagagtaatgctgaacttaagggtttagatgtagattctctggtcattgagcatatccaagtgaacaaagcacctaagatgcgccgccggacctacagagctcatggtcggattaacccatacatgagctctccctgccacattgagatgatccttacggaaaaggaacagattgttcctaaaccagaagaggaggttgcccagaagaaaaagatatcccag

SEQ ID NO: 18200 - DNA, 559 bp, Homo sapiens
  MAP TO AL022312.7; EXPRESSED IN HELA, SIGNAL = 7.5; EXPRESSED IN ADULT LIVER, SIGNAL = 8.2; SWISSPROT HIT: P18848, EVALUE 5.00e-66; EST_HUMAN HIT: AW959371.1, EVALUE 0.00e+00; NT HIT: M86842.1, EVALUE 0.00e+00
cgacaaggctaaggcgggctcctccgaatggctggctgtggatgggttggtcagtccctccaacaacagcaagggtgagtgggccaccaccacatcgtcctggtgggatctagggttaggggcctcctacctttgtatctgactcacttggccccatcactcaaatgttttgcagaggatgccttctccgggacagattggatgttggagaaaatggatttgaaggagttcgacttggatgccctgttgggtatagatgacctggaaaccatgccagatgaccttctgaccacgttggatgacacttgtgatctctttgcccccctagtccaggagactaataagcagcccccccagacggtgaacccaattggccatctcccagaaagtttaacaaaacccgaccaggttgcccccttcaccttcttacaacctcttcccctttccccaggggtcctgtcctccactccagatcattcctttagtttagagctgggcagtgaagtggatatcactgaaggagataggaagccagactacactgcttacgttgccatga

SEQ ID NO: 18201 - DNA, 588 bp, Homo sapiens
  MAP TO AL035682.16; EXPRESSED IN HEART, SIGNAL = 1.9; EXPRESSED IN LUNG, SIGNAL = 1.3; EXPRESSED IN ADULT LIVER, SIGNAL = 1.3; EXPRESSED IN PLACENTA, SIGNAL = 1.9; EXPRESSED IN HELA, SIGNAL = 0.68; EXPRESSED IN BONE MARROW, SIGNAL = 1.3; NT HIT: AJ272327.1, EVALUE 1.50e+00; EST_HUMAN HIT: BE888280.1, EVALUE 5.60e-01; NT HIT: AF312032.1, EVALUE 5.60e-01; SWISSPROT HIT: Q29029, EVALUE 3.00e+00
gccttgtcctctgcttaagtgattttgactttcgattcaggagaagtggtgtaaggttttcagaaagtgagttaaagcaaaacagttggccgcagcggcagcaatcatcttagtggggcacagttgcctcttaggtgtagccctgggcagatattttttgtggggctcctgtctgcatgtgcaatttgagccattcctaaatcagcaccattctggtgattcagtctcacaccatcccacaaaaatcacaatgaaaatactgcaccagccatcaggagcaatctgctcaccagggtgctcttctggaagctggcctggaccctgtaggtgcaggttctagagctctttggggcatctgaaggggagaaatgggagccagctagtcccagccaccagagggagactaaggctatttcaagatagacacttccagcagccaggacccatgcaggtccctgtctgagcttgggacccctgcccatttggtagtgctggttacacgcactggaatggggggctagaaaattcccaggaagacattccaagtgcagggctatggtggggtgaagtgggtccctaaaacacagg

SEQ ID NO: 18202 - DNA, 577 bp, Homo sapiens
  MAP TO AC007567.1; EXPRESSED IN LUNG, SIGNAL = 1.8; EXPRESSED IN HEART, SIGNAL = 2.3; EXPRESSED IN ADULT LIVER, SIGNAL = 1.9; EXPRESSED IN BRAIN, SIGNAL = 2.1; EXPRESSED IN HELA, SIGNAL = 3.7; EXPRESSED IN BONE MARROW, SIGNAL = 2.1; EXPRESSED IN FETAL LIVER, SIGNAL = 1.7; SWISSPROT HIT: P44312, EVALUE 1.70e+00; NT HIT: AF109906.1, EVALUE 8.60e+00; NT HIT: U57045.1, EVALUE 2.30e-02; EST_HUMAN HIT: BE696769.1, EVALUE 1.00e-04
tgcagaatgttttgagcagcttcccaaaaatgtgaggaatgcctcaaggctggctacacaaagcgctctccttggtcctgagacctgtctttggttgagctcagactctgttccccagccagtgaactgaacccctccaccttagccctgccctgctttatttactctgcctaaacccgcctcctctccacccccatactctgtgcacatcccaatcactgcactcaccatgttctaggagggtatatttatacattcatctgtcccacaggatggagctccttgaggctagaacagcattctgtattcatctttgtgccccaaatacgcaggtaagaagtaggcactcaaaaaatgaataaatgtctacgtaatacatgtaactgtgctactttgtgatgtgtcgtatctcctttgctgggcagggaataaatttgagaaaaagatagatttaagatgtgattttcttgtgggtagagatgtgcatgcatgtgtgtgtgagtgagtgaatatatgtgtgggagacacagtgataaatttcagaggaggggcagagccagggcaaagacccagagta

SEQ ID NO: 18203 - DNA, 648 bp, Homo sapiens
  MAP TO AP000345.1; EXPRESSED IN ADULT LIVER, SIGNAL = 1.7; EXPRESSED IN HELA, SIGNAL = 2.9; EXPRESSED IN BONE MARROW, SIGNAL =   2; EXPRESSED IN LUNG, SIGNAL = 1.9; EST_HUMAN HIT: AW003247.1, EVALUE 0.00e+00; NT HIT: AB016195.1, EVALUE 0.00e+00; SWISSPROT HIT: P10266, EVALUE 1.00e-105
acaagattttaatcagtctattaacattgtatcagattctgcatatgtagtacaggctacaaaggatattgagagagccctaatcaaatacattatggatgatcagttaaacccgctgtttaatttgttacaacaaaatgtaagaaaaagaaatttcccattttatattactcatattcgagcacacactaatttaccagggcctttaactaaagcaaatgaacaagctgacttgctagtatcatctgcattcatggaagcacaagaacttcatgccttgactcatgtaaatgcaataggattaaaaaataaatttgatatcacatggaaacagacaaaaaatattgtacaacattgcacccagtgtcagattctacacctggccactcaggaggcaagagttaatcccagaggtctatgtcctaatgtgttatggcaaatggatgtcatgcacgtaccttcatttggaaaattgtcatttgtccatgtgacagttgatacttattcacatttcatatgggcaacctgccagacaggagaaagtacttcccatgttaaaagacatttattatcttgttttcctgtcatgggagttccagaaaaagttaaaacagacaatgggccaggttactgtagtaaagcagttca

SEQ ID NO: 18204 - DNA, 576 bp, Homo sapiens
  MAP TO AL021707.2; EXPRESSED IN ADULT LIVER, SIGNAL = 1.9; EXPRESSED IN PLACENTA, SIGNAL = 1.9; EXPRESSED IN BRAIN, SIGNAL = 1.2; EXPRESSED IN HELA, SIGNAL = 1.7; EXPRESSED IN BONE MARROW, SIGNAL = 2.1; EXPRESSED IN LUNG, SIGNAL = 1.2; EXPRESSED IN HEART, SIGNAL =   2; NT HIT: gi5802973, EVALUE 0.00e+00; SWISSPROT HIT: P30048, EVALUE 1.00e-49; EST_HUMAN HIT: AU117868.1, EVALUE 0.00e+00; EST_HUMAN HIT: BG534367.1, EVALUE 0.00e+00; NT HIT: gi16156807, EVALUE 0.00e+00
tccaggcaagatgactaaagtgggaatccactgagaccacaacttcacagttcacatcatgaaattccttagctttgtcactaaaagcaacagtttctgtaggaccacgaaggtgaaatccaaaggatagaagaaaagcaccaaattatttccccttaaagtcatcaaggcttaggtctttgaactctccattgacaatggctgtacccttaaaatagggtgcatgctgggcgacagcaggtgcatggtatgaggagctggtgctaaagaattttgcttgactggaaccagaccataatatgtttgtcaagctcgttcttccagaagcagcaagcttgagggctgcagtggcagaaatgccccaaggaatggcactcacatgtcgggcagccgatgctcagagtagccttcccacagcagctaccatcttcagtgcacgcgggcgaaacttcctttgtcttgtacttaggtcttggcctgaatttccatcagcccagaatcttctgctacttcctcccctatttagttcttggtctgaacacagcctagaattatcctcttccttgttccttctgg

SEQ ID NO: 18205 - DNA, 545 bp, Homo sapiens
  MAP TO AC007567.1; EXPRESSED IN ADULT LIVER, SIGNAL = 8.2; EXPRESSED IN BRAIN, SIGNAL = 8.2; EXPRESSED IN HELA, SIGNAL =  14; EXPRESSED IN LUNG, SIGNAL = 8.8; EXPRESSED IN HEART, SIGNAL = 7.6; EXPRESSED IN BONE MARROW, SIGNAL =   9; EXPRESSED IN FETAL LIVER, SIGNAL = 8.7; NT HIT: AL163303.2, EVALUE 1.00e-19; EST_HUMAN HIT: H37903.1, EVALUE 3.00e-39; SWISSPROT HIT: P14180, EVALUE 9.20e-01; NT HIT: gi14741205, EVALUE 4.00e-23
ctgctcatagtgacttccttccaaagagtacagtatggaaggattgggtagtctctttacagtgcagaaacctgataaatactacctcagccaggtgatcaaggccaacatcaacagtgatgtcatgttgatagtatatatttttgatatgatatgatgtgatgaaaatagcactctacctctgtggccttagccctagtcttatcatgagaaagacctctggcaaatcacaatagagggatatcttacaaaaaatatctgatcaattcacctcaaaactgtcaaggtcatcaaaaacaaggaaagtctgagaaactgtcacagccaagaggatcctagggagacataacaaataaaatgtaatatggtatcctagataggatcctgggacagaagaaaaaaacaagattagtaaaaatctaaggaaatatgaataagtatacagttaataataatgtattcatattgattcattaattataacaaatataccagccaaatgcaagacgttaataataggggaaactgggtgtggtatttacggg

SEQ ID NO: 18206 - DNA, 940 bp, Homo sapiens
  MAP TO Z97055.1; EXPRESSED IN ADULT LIVER, SIGNAL = 2.2; EXPRESSED IN BONE MARROW, SIGNAL =   2; EXPRESSED IN FETAL LIVER, SIGNAL = 2.2; EXPRESSED IN LUNG, SIGNAL =   2; EXPRESSED IN HEART, SIGNAL = 2.1; NT HIT: gi11528489, EVALUE 2.40e+00; EST_HUMAN HIT: BF038939.1, EVALUE 3.60e+00; SWISSPROT HIT: Q00130, EVALUE 8.00e-29
ggttgctgggtggagagccttcccaccggaatgcctgagaggaggcgaggacgccgggcccctccacgcttttccctgggctccacgctgctctgtgaaagggaagggaatcatccatctggaatatgaaggaagaataacaaaacctcactgtccaccccagagaagacacggtcacagaggctgcatgccacactgcgggtgccacagggagcctgtctacacagcgtcctcacactgcaggtgccacagggaccctgtctacacagcgtcctccgactgcaggtgccacagggaccctgtccacacagcgtcctccaactgcaggtgccacagggagcctgtctacacagcgtcctccaactgcaggtgccacagggaccctgtctacacagcgtcctcacactgcaggtgccacagggaccctgtctacacagcgtcctccaactgcaggtgccacagggaccctgtctacacagcgtcctcacactgcaggtgccacagggaccctgtctacacagcgtcctcacactgcaggtgccacagggatcctgtctacacagcgtcctccaactgcaggtgccacagggagcctgcctacacagcgtcctcacactgcaggtgccacagggatcctgtctacacagcgtcctccaactgcaggtgccacagggaccctgtctacacagcgtcctcacactgcaggtgccacagggatcctgtctacacagcgtcctccaactgcaggtgccacagggagcctgtctacacatcaaactgaaggctccacagggacccagtctacacagcatcctcacactgcaggtgccacagggaccctgtctacacagcgtcctcacactgcaggtgccacagggacccagtctacacagcgtcctcacactgcaggtgccacagggacccagcctacacagcgtcc

SEQ ID NO: 18207 - DNA, 460 bp, Homo sapiens
  MAP TO AC006992.2; EXPRESSED IN FETAL LIVER, SIGNAL = 2.2; EXPRESSED IN ADULT LIVER, SIGNAL = 1.7; EXPRESSED IN PLACENTA, SIGNAL =   2; EXPRESSED IN BRAIN, SIGNAL =   2; EXPRESSED IN HELA, SIGNAL = 3.4; EXPRESSED IN LUNG, SIGNAL = 1.8; EXPRESSED IN HEART, SIGNAL = 2.1; EXPRESSED IN BONE MARROW, SIGNAL = 2.2; NT HIT: V00202.1, EVALUE 2.90e-01; EST_HUMAN HIT: BE967917.1, EVALUE 4.30e-01; SWISSPROT HIT: Q10268, EVALUE 9.10e+00; SWISSPROT HIT: P34158, EVALUE 8.20e+00
aaagtgagctgcctttgcttaaaatgcttttctataattctctttttaaatggccttaagtttatggttcttattttatgcttcacagtgtacaggtcaaaaaaaaaatctcatttcctccttgcagttgggtcttagtctataatggcattccttatcatgatcagccaccttattcagctgactttgatacaaataactttgggagggatccccaaatcaaatcttccctcaacgatgaagatttttatccagcacacagcatataataaatatgtgatgacagaatgattgaatctgacacttgggagtatagacaaaatttggcactactggctcaaaaaatggagtttaaaaattgccacaagcaatggcactattgcctcattgtcttatattattatcttatttaattttgacacatactatatatttattgtgtgaagaatttgtatcttct

SEQ ID NO: 18208 - DNA, 562 bp, Homo sapiens
  MAP TO Z98884.11; EXPRESSED IN LUNG, SIGNAL = 1.8; EXPRESSED IN ADULT LIVER, SIGNAL = 1.6; EXPRESSED IN BRAIN, SIGNAL = 1.6; EXPRESSED IN HELA, SIGNAL = 2.3; EXPRESSED IN PLACENTA, SIGNAL = 1.6; EXPRESSED IN HEART, SIGNAL = 1.8; EXPRESSED IN BONE MARROW, SIGNAL = 1.9; NT HIT: gi9257252, EVALUE 3.00e-32; NT HIT: AF263546.1, EVALUE 1.00e-23; EST_HUMAN HIT: AW664999.1, EVALUE 0.00e+00; SWISSPROT HIT: Q15836, EVALUE 1.00e-06
cgtgggatcagatacttcagggatacaaagtaggtcctattaaagcttaacatttgtccctttagtaggtgggacagtcttggaaattatagagaaattagaagaaatgcaattaaaactttcgttcattgcttcaggaagaatttctttttctgttttagttctaatgtaagagattgttaacagtgagagtcccggagtaacatctttatacttaagaaaatgtatttggaatcgtaatgtactcatgctcatgcctttacatgttccaggtctacaggtccaactgctgccactggcagtaatcgaagacttcagcagacacaaaatcaagtagatgaggtattgctctgaaatgttggaaatatgaattttaaacaaatatgagtactctggaaatctgtttagaaaaagtatcatcaaagtgtgaatgtaaagcaaattctgactgtatcataattgtaacgaaactttgctccctgctgtgctggaagatctaatctaagcaaaagtcagactttctaggtttcacgcttgttttcctgtgatagaaacctgctca

SEQ ID NO: 18209 - DNA, 572 bp, Homo sapiens
  MAP TO AC007564.9; EXPRESSED IN HELA, SIGNAL = 1.2; EXPRESSED IN ADULT LIVER, SIGNAL = 2.6; EXPRESSED IN FETAL LIVER, SIGNAL = 2.4; EXPRESSED IN LUNG, SIGNAL = 2.7; NT HIT: gi12084808, EVALUE 2.20e+00; EST_HUMAN HIT: BI760641.1, EVALUE 3.00e-03; NT HIT: gi11465934, EVALUE 1.00e-03; EST_HUMAN HIT: BE146537.1, EVALUE 3.50e-02
gctgaggcaaattcaaaagagaatcttccaaaatgtcttgttcagtaacatccctgctaggatagatgtacagcctcccaaagtgaatacctttacaaggctcctgtttttatttattcttttattttttaaaaaaaaaattcttttattcttttaaaaaatgagtcagttgataatcttatctgatgccaaaaacaaagttaaattatcataagggagaagaaattctgcctttcttatgtgtggcttgtaggaaatgcatacatcttaatacatatgtttagttagtttagcggtacaccagcagcgcagtatctggggagcttagggtctctgaatgctgcagcttcccctgtcaagcagagaaaagcttaggttcagttccccttctgggagtaggggtacatgggtccctgatcccagctagcttggtatccaggtatcctagaataaatacccagggtcatttgtgggcaatcctgctccttgtgtcagtatttttgtcctttgctcaacctctaaatgtctgtattccctgtggttctgcctttagccctctggattttcatgct

SEQ ID NO: 18210 - DNA, 568 bp, Homo sapiens
  MAP TO AC008283.3; EXPRESSED IN PLACENTA, SIGNAL = 1.8; EXPRESSED IN HELA, SIGNAL = 4.3; EXPRESSED IN BONE MARROW, SIGNAL = 1.8; EXPRESSED IN LUNG, SIGNAL = 1.7; EXPRESSED IN HEART, SIGNAL = 1.6; EXPRESSED IN FETAL LIVER, SIGNAL = 1.2; EXPRESSED IN ADULT LIVER, SIGNAL = 1.8; NT HIT: AJ251387.1, EVALUE 1.40e+00; NT HIT: AY011368.1, EVALUE 2.10e+00; EST_HUMAN HIT: BE782738.1, EVALUE 1.40e-01; EST_HUMAN HIT: AI860902.1, EVALUE 2.00e-01; SWISSPROT HIT: P22147, EVALUE 9.60e-01
ccatggctccaataaccaagttcagggtagatgactgtcattagaagaatgtggattatacccacacaaaggtgccaaaaaatctaggaaagcaaatagctggccttttcagattttgagttatctgctcccgaataaaacttttaacctgggaaatacttgacatacaggaacaagattctatgttacccatggtggcacaaatgccttaatgaaaaatctgaaatcttttgtatcttagtatagtaaagtacttctaactcaaataacaggctaagttgcgcagggtgtggagagtggtagtgcatggatagattctgctccaggcagttatgcagtcttaaagctgggagatcttttgcctccttcagcacttggattccaagggcatccaggacattgggcttgcagctgctagatggagggaggaagtgtggagaaagcagtctcaagtcctaaaagtctcaggctggaagtgacacatattactttcactcattctctattggtatgaacttgtcatatggtcctacagagacaaaaaggtgggagaaatgtagtccctggc

SEQ ID NO: 18211 - DNA, 559 bp, Homo sapiens
  MAP TO AC008283.3; EXPRESSED IN PLACENTA, SIGNAL = 2.4; EXPRESSED IN HELA, SIGNAL = 3.8; EXPRESSED IN ADULT LIVER, SIGNAL = 2.9; EXPRESSED IN BONE MARROW, SIGNAL = 3.4; EXPRESSED IN HEART, SIGNAL = 3.3; EXPRESSED IN LUNG, SIGNAL = 3.2; EST_HUMAN HIT: AA417756.1, EVALUE 4.00e-05; SWISSPROT HIT: Q60688, EVALUE 1.20e+00; NT HIT: U53930.1, EVALUE 4.00e-04
tctgactctccaagatagggtcttagtaatacctaaaattttatagaaattgtatcctactttcagtaccatgctatgctgataatacatttcctgccactcaactccaaatgcatccttctaccttgccctatgaaaatggatctgggccctttcaatacttttcctttatcagatggcacaatttcaaggtttgcctgcaaatgatgcaagacagacactgaatgagaaaaaggatttttcttccttgttctggtttgtttgctcacaggctcttgcagcatgtgctgctgtctggtgtctgtctcctgcactgtctgtatattctccagagctcagctcctacagtgttgcagtttccccagattgcccacttccagcaacatggccagcttcaccaggctcaggctctaattttgtcacctgtacccctccagccccgccccctgccccagatatttttgtagaggagagcttacaaggaaagacctggaacctcagagggtaaatttccagcaaatcctatcagtgtggcataacagtgacttctccaccttgg

SEQ ID NO: 18212 - DNA, 564 bp, Homo sapiens
  MAP TO AL049649.4; EXPRESSED IN ADULT LIVER, SIGNAL = 3.2; EXPRESSED IN PLACENTA, SIGNAL = 2.8; EXPRESSED IN HELA, SIGNAL = 3.4; EXPRESSED IN LUNG, SIGNAL = 3.7; EXPRESSED IN BONE MARROW, SIGNAL = 3.4; EXPRESSED IN FETAL LIVER, SIGNAL = 3.3; SWISSPROT HIT: P26676, EVALUE 8.30e+00; EST_HUMAN HIT: BI831451.1, EVALUE 0.00e+00; NT HIT: AL163218.2, EVALUE 4.00e-16; NT HIT: AF029081.1, EVALUE 2.00e-13; EST_HUMAN HIT: AI419936.1, EVALUE 3.00e-30
cctctccttttcctgctgacatttcttccatgagcagtacccagacagccgacagaaagagcccaggaggtaactggggacatgagatgaaaactcaagatgcaagggtatcccatcttttggcttccttgggccacattggaagaagaagaattatcttgggccatgcaggaaatacactaacaataactgatgagctaaaaaaaatcaccaaaaaatctgataatgttttaagaaagtttacaaatttgtgttaggccacattcaaagcaatcctgggctgcctgtggcctatgggccacgggctggacacgcttgcaagggagaggacagataaagatacgtatgagagcatcctccttagagaaaggtcagtgttgaagtcatagggtaagggaactctttcaaaagaaagtaaaaaaaaaaaaaaaagatagcgaagtaaatcatgtgaagtctctacagagtaagggccaaagggaggacacagtagcttaaaatcacaatattgtttttgttcctatttttgtttttctcataaagctacaggtcagctggacagct

SEQ ID NO: 18213 - DNA, 559 bp, Homo sapiens
  MAP TO AL022238.1; EXPRESSED IN ADULT LIVER, SIGNAL = 1.7; EXPRESSED IN LUNG, SIGNAL = 1.8; EXPRESSED IN HEART, SIGNAL =   2; EXPRESSED IN PLACENTA, SIGNAL = 1.6; EXPRESSED IN HELA, SIGNAL = 1.7; EST_HUMAN HIT: BE940132.1, EVALUE 4.00e-94; NT HIT: AJ297257.1, EVALUE 4.00e-48; SWISSPROT HIT: Q07092, EVALUE 2.80e+00; NT HIT: L14618.1, EVALUE 1.40e+00
ggtgcaattccaaagtaaaggaaaattcagtggcaccctttacacctaatttaaaccaggtttgaccctttaaacacagtttgtttcactgaacttgatcaattagttatcttaactatttagtgattgagctctaaacttggaaagtcatgagaaagaagagagtggaaaataaaacgcatcatccttgttttatgttagatgcttcccatggcatactcggtgaacacagccatgtcctaaaagcaatctaccaaatgctgagagagagaggcacttacgcggcatgatcccttggctcaccagttcttcccgggtccggcgctgctggagtttcaactgtagcactgcagggcagcagagagagaggagagatgaggggtcagttgggtattccacctcaaaaaacacattttcaaacgcaaaaaaagtctaaaaacagaaggatgtagtgtgaaagaagggtccccttgaagtgcaactgtctgtaattgcagaagtggcctgatacagcagagtttccgtattctgctgtgggcggtgagaggaagttgcgaag

SEQ ID NO: 18214 - DNA, 564 bp, Homo sapiens
  MAP TO AC005300.10; EXPRESSED IN LUNG, SIGNAL = 9.5; EXPRESSED IN BONE MARROW, SIGNAL =  11; EXPRESSED IN FETAL LIVER, SIGNAL = 8.3; EXPRESSED IN ADULT LIVER, SIGNAL = 8.9; EXPRESSED IN PLACENTA, SIGNAL = 4.6; EXPRESSED IN BRAIN, SIGNAL = 8.1; EXPRESSED IN HELA, SIGNAL =  16; NT HIT: AL163210.2, EVALUE 6.00e-12; EST_HUMAN HIT: AW877214.1, EVALUE 3.00e-15; SWISSPROT HIT: P29364, EVALUE 9.50e-01; SWISSPROT HIT: P76189, EVALUE 3.10e+00
ttgcaagcaatgaaacttgcaattggatgtttggcttaggaaatctctaaacaaagtattgaaggagttacctagctccttctgactgcttccaataaaattcaagagagacataaatgacttaaagacagaactgttaagcaaaaagtaataagaacttgaaattctgaaaaatgatcagcccatccatatagaaaagaacgagaacccagtttggagagaacactaacggtgttgctctgttgccaagctcctttagtaagagtagtatggatcagccattgcaacagaagctaggagctgttctccaagataatggaagaaggaccctgaaggcaattcagagatcatgagagttggcactcccatcaccagcccagagtgcaaggacccacagtgcagagcagattcaaaggctggccacctctctggtccaggccaaccaaggagcaggaattaggccctcaccagacaccaaatctgctgatgccttgatcttggactgtccagtctccaaaagtatgagaaataaatttctgttttcacaggacacccagtctatgg

SEQ ID NO: 18215 - DNA, 574 bp, Homo sapiens
  MAP TO AP000356.1; EXPRESSED IN HELA, SIGNAL =   2; EXPRESSED IN ADULT LIVER, SIGNAL = 1.8; EXPRESSED IN PLACENTA, SIGNAL = 1.7; EXPRESSED IN BRAIN, SIGNAL = 1.8; EXPRESSED IN LUNG, SIGNAL = 1.8; EXPRESSED IN FETAL LIVER, SIGNAL = 1.8; NT HIT: L81136.1, EVALUE 9.20e-02; EST_HUMAN HIT: AL048911.1, EVALUE 0.00e+00; SWISSPROT HIT: Q61575, EVALUE 8.30e-01; SWISSPROT HIT: P08121, EVALUE 1.30e+00
gctcacacgacaaaggctgcccgtggccagtgaggtggctgagcccagccaggacctttctcggactcccgggatgtggctctgctcgtgagctgcctggtcagctctctcggggtgagaggggcttgtcacacgggcccctgcctgcagtgtgacccttctcagcttctctcagcagccctgcctgcagagtgtcaccaccaccatgatcatttccctgacactgcgagggtcgggggacgtcctgggtagagacagggcccgtggcagcagcaggctcaggggcgccctacactggtgggctggggacctggtggagaccacgccaagggctggacaaggggacgagcctccaccctggcctctccgcaggcctcagcagcccctcccacaggcagaagggttgacactgggttctgccctcactgcaagagctgcaagtgccacgtgctgttctgcccaatctggtgtctgcaggtgaggaaaggactgccgctggcccgtttctgagtgttcagcacctaagggtgacagcactgtctgtccctaccctccgggtcctgtttgaagatca

SEQ ID NO: 18216 - DNA, 521 bp, Homo sapiens
  MAP TO AL022312.7; EXPRESSED IN LUNG, SIGNAL = 0.98; EXPRESSED IN HELA, SIGNAL = 1.6; EXPRESSED IN ADULT LIVER, SIGNAL = 1.2; EXPRESSED IN BRAIN, SIGNAL = 1.1; EXPRESSED IN BONE MARROW, SIGNAL = 1.2; EST_HUMAN HIT: AA748143.1, EVALUE 7.30e-01; NT HIT: L34170.1, EVALUE 2.10e-02; EST_HUMAN HIT: BF359919.1, EVALUE 4.90e-01; SWISSPROT HIT: Q00839, EVALUE 1.90e+00; NT HIT: AF294032.1, EVALUE 3.20e-02
aggaaaacaaaattttagagactgtcagaaatgtgatggagctgtcaggagaacatgaaacagccacgtaccctgggaaacggaagtcacagctctgtttgttctgtgacagtgtgaaaactcacaaccttttcatcgagatgggtaacgaaaacatgagaaaactggaagtgctttggtttggctcagctgaggacattactccaagcccgcccaggctctcccctccggcctggattcgtttctgtgtcaacactcgcccagccttgcacagccgggcacacgggcgtctccctctgcagtggttccccgacttgtcggccatcttcgctggtggtgttttccttggtcactgtggttatttgaaagcgatgtcaaagcaaacactgctctctctccctgaaaacccctggcaggagctgcctttctcaccgtccctgtccttcgtctcctcctgtcccttccttcctgccgcagcctcttccctcaatcctactgaactccttcctgggagaggttag

SEQ ID NO: 18217 - DNA, 461 bp, Homo sapiens
  MAP TO AL035682.16; EXPRESSED IN FETAL LIVER, SIGNAL = 1.6; EXPRESSED IN LUNG, SIGNAL = 1.1; EXPRESSED IN ADULT LIVER, SIGNAL = 1.3; EXPRESSED IN HELA, SIGNAL = 1.8; EXPRESSED IN PLACENTA, SIGNAL = 2.6; EXPRESSED IN BRAIN, SIGNAL = 1.1; NT HIT: AJ310932.1, EVALUE 1.70e+00; NT HIT: AF051651.1, EVALUE 7.30e-02; EST_HUMAN HIT: AW590082.1, EVALUE 0.00e+00; SWISSPROT HIT: O43896, EVALUE 8.40e-02
ataccgtggaagcttcactgtggccctcaaggccctgcacaacctggctcctaccctcattcctgcctctccaggcactattcttacccctgagtcttatgagcgctcactacatgcctggcatcactctaagcacctcgtatacatgggcttgtctcatctgtacagcacccataggaggcaggtctcctcaccccatcctacaggggaggacaccaggcacagagaggcaagagcacaggccaaggtcacacagccagaccctgtggggaagccggattggaacccaggcagcctggcctcagagtcagcactccttatgcagtttcagatccctgtgccttgcagctcctccatctagttcctctcctctgagttccagccacagcaaccagcccttcctcgggacgccccaaagtgaggcggtgagccgccacatcccacagcctccccagagcctg

SEQ ID NO: 18218 - DNA, 1450 bp, Homo sapiens
  MAP TO AP000356.1; EXPRESSED IN HELA, SIGNAL = 2.3; EXPRESSED IN LUNG, SIGNAL = 2.6; EXPRESSED IN HEART, SIGNAL = 1.5; EXPRESSED IN FETAL LIVER, SIGNAL = 1.5; EXPRESSED IN ADULT LIVER, SIGNAL = 2.2; EXPRESSED IN BRAIN, SIGNAL = 1.8; NT HIT: gi16167673, EVALUE 0.00e+00; EST_HUMAN HIT: BI907981.1, EVALUE 0.00e+00; NT HIT: L20493.1, EVALUE 0.00e+00; EST_HUMAN HIT: AI690779.1, EVALUE 0.00e+00; SWISSPROT HIT: P19440, EVALUE 2.00e-46
gtggatagggaccaggctgggccaggcaaggtcgggcactgtctgacctggctgggcggtagctttggctccaaggtccgctccccggtcagcgggatcctgttcaataatgaaatggacgacttcagctctcccagcatcaccaacgagtttggggtacccccctcacctgccaatttcatccagccaggtatggggtggaggtccgggggtgggggactggggtggagaggggcgggtgtcctgggcaggcagctgacgggcatccctgtcttctcccatcggccgcagggaagcagccgctctcgtccatgtgcccgacgatcatggtgggccaggacggccaggtccggatggtggtgggagctgctgggggcacacagatcaccacggccactgcactggtatgtgtcacaccttttctccctggccgtgcccaccctgcacagcccccaagccatgctgatcacactcccatgccccaggccatcatctacaacctctggttcggctatgacgtgaagcgggccgtggaggagccccggctgcacaaccagcttctgcccaacgtcacgacagtggagagaaacattgaccaggtgggccgggggttggagaaactgagtcaaggtgtggggccccagggcatcctgggctggaggcctggatcatcacagagtggacaatggttggtgtcctctctctagtgcctgggccatctggagcccctgtgccatgagggccaagccccctgctccagtgagacccagcaggccccaacctgctcttcctgatgacctggcccgaaatggcaccacctgggctgaggcctgtgaccacacagatgtggttcaggtggcatctggagccctgctcaggcttcccctctcctcccacccccaggcagtgactgcagccctggagacccggcaccatcacacccagatcgcgtccaccttcatcgctgtggtgcaagccatcgtccgcacggctggtggctgggcagctgcctcggactccaggaaaggcggggagcctgccggctactgagtgctccaggaggacaaggctgacaagcaatccagggacaagatactcaccaggaccaggaaggggactctgggggaccggcttcccctgtgagcagcagagcagcacaataaatgaggccactgtgccaggctccaggtggcctccctggcctgtctccccactctctgggcctcagtgtattgtgtgtgaaatggagccatctggctggggaggaacagagaggtgggattcggagatcttcacaatgcgggcactggaactagcctcagcatcttcagcatggggagagccaggcacatggctgggggccaggggaaggttcacaccaagctctgccccttcccaccctgatccctcggactttggggccaggccctcccttactggggctgggcag

SEQ ID NO: 18219 - DNA, 571 bp, Homo sapiens
  MAP TO AC007463.3; EXPRESSED IN LUNG, SIGNAL = 2.2; EXPRESSED IN HELA, SIGNAL = 1.2; EXPRESSED IN ADULT LIVER, SIGNAL =   2; EXPRESSED IN HEART, SIGNAL = 2.1; EXPRESSED IN BONE MARROW, SIGNAL = 2.4; NT HIT: AY042839.1, EVALUE 8.50e+00; NT HIT: AJ008649.1, EVALUE 3.60e-01; EST_HUMAN HIT: AI246045.1, EVALUE 1.40e-01; SWISSPROT HIT: P05489, EVALUE 6.40e+00
tttaatatgcatgtccggggttcaaacgggtgctggctttctggcttagacaccctaaattctccttactccacctagaaaggaggctgttgtctggctaagatatgtttttgagcttggtaaaacacactttcttgaaaaaaaaggaaaggaaataaaaaccgaaggccgtccagtttggggtgctggatagttctctttctgcagagtgtggacaggggcacggtaggaacagccatatttgttgctgtggtctacacgtcttcttcaccatatcatagaaatgtaactgaactatcagggatgtccatgcaagccttcacagtgctcatctcaaagccagttcttcccaggtaaagctgtctctgctttcattttcttggctctctctacctctttgcattttaataattgctgagcacaaaagcattgctctaataccaacactgatgtttctggctccctggccgaataagttgatgaaaggctttttaaggtccaggagaaagatcctgactgggtgtggacatcagacagctcagacagctcactcactgtctacaccatggca

SEQ ID NO: 18220 - DNA, 555 bp, Homo sapiens
  MAP TO AC008009.4; EXPRESSED IN LUNG, SIGNAL = 0.93; EXPRESSED IN HEART, SIGNAL = 1.3; EXPRESSED IN BRAIN, SIGNAL = 1.1; EXPRESSED IN ADULT LIVER, SIGNAL = 1.4; SWISSPROT HIT: Q61026, EVALUE 1.40e+00; NT HIT: gi13385831, EVALUE 2.00e-25; NT HIT: X92985.1, EVALUE 8.90e-02; EST_HUMAN HIT: BE439792.1, EVALUE 0.00e+00
gatgatgctgaaggtgatggtatgtgaaaaagtgaaacttgggtctagtggggtactagaattgtcaaaaccccatccaactctgtcacatataacatctgatgtttcagggtagcaccatcacaaagttcagaacttctatactctccttgcaggaagcaggagaatgggtccaaagcaatcacttagaacttcatggatatttggaaatttacccttccctaagtgtggctctaggtttcaaatagaagcagcaaagaattaacaaagtcttacagattttggtaggctttgaaaaacttgttttacttgaggctccatatgcttcatggcttgcaaaacgtaacggcctaaaaccaaaagcaacagaataagtaaactaaatctccaatctccccgacttcacttccatccccaaaccataaacaaacctgcaaatcctgcagcagcaatggtcagtccaactgctaccactgtactggcctggtaagggggagaagagtaaatatttacttctctaattcccaccctttctcattttgcccattcttccat

SEQ ID NO: 18221 - DNA, 582 bp, Homo sapiens
  MAP TO AC008151.1; EXPRESSED IN HELA, SIGNAL = 0.38; EXPRESSED IN ADULT LIVER, SIGNAL = 2.6; EXPRESSED IN PLACENTA, SIGNAL = 1.6; EXPRESSED IN BRAIN, SIGNAL = 1.9; EXPRESSED IN HEART, SIGNAL = 2.2; EXPRESSED IN LUNG, SIGNAL = 2.2; EXPRESSED IN FETAL LIVER, SIGNAL = 2.1; NT HIT: X91192.1, EVALUE 2.00e-03; EST_HUMAN HIT: AW380519.1, EVALUE 6.00e-04; SWISSPROT HIT: Q05496, EVALUE 3.80e+00; NT HIT: U26425.1, EVALUE 2.00e-03
ggaagccatagaggagggagctgggaggaaagggaaggagaaaaatcaccagagactcaagacatgaatgggagaggcgaggggaccccaaggagagaggagtggaatgtctgttgaatgaattaactgaatgctgaaatgtcctcattctaaaagcaagactaaggctcaaggggaataaagagatctctcatctaacatcccaaagctagtaagggctggaggaggactagaccccacatctctccagtatctactccaaagggtgctggtttcactttcttgatagttggtgttcgagctcctcaagacctggatctggtttcttcagatctgcccaggaaacaggtgaggcctaaggccttacttagagacttccactactggcttttgcccaaccccactccctcatcatgtgtccttcataagaaccctggcacaggaaacgtcagctgtgcctctgacttgctgtgtgacctggtgcaagtgccttcccctctcggggccctagaaccctctctgtaagttgttaccaggggccacaggtgttcggtaaatattgaataaccagtgtcttggcca

SEQ ID NO: 18222 - DNA, 570 bp, Homo sapiens
  MAP TO AL008723.8; EXPRESSED IN PLACENTA, SIGNAL = 2.8; EXPRESSED IN ADULT LIVER, SIGNAL = 1.7; EXPRESSED IN BRAIN, SIGNAL = 1.7; EXPRESSED IN BONE MARROW, SIGNAL = 1.7; EXPRESSED IN LUNG, SIGNAL = 1.7; EXPRESSED IN HEART, SIGNAL = 2.3; NT HIT: Z00015.1, EVALUE 1.00e-40; EST_HUMAN HIT: AI565496.1, EVALUE 5.00e-29; SWISSPROT HIT: P31636, EVALUE 1.70e-02; EST_HUMAN HIT: AL569891.1, EVALUE 2.00e-38
tctaacccaccaccagcttcctgttgaccgacttctcttccttatccccacccctaattcctgttttcccacacatggttacatatcttccctgttatataaacccctaattttagtccatcaggaagatggatttgagactgagctcccatctcctctgctgtggcacctaaataaagccttttttcctggcaatactcattgtctcagtgattgatcttctgtgcagtgagcagcagtgcctagaactgaactctggcattttggtaacagatactcacccccgacttgatgtagatagggacaaagatccacccaagaatcagcaacattactgaggactacaaggaaccaaaataagagacagtgagacattaaagaggcttggcttgtggaccttctccttctatgacctctgagtctggaaattaaaaaaaaaagttggctcaatcctgtcccattcaaacaactataatcccaagacaattgtgagttcctttttttctgtttctatgactcaggggccaccattttctgaggattaaattgtggtgaaaaagggaaagaaga

SEQ ID NO: 18223 - DNA, 572 bp, Homo sapiens
  MAP TO AL022312.7; EXPRESSED IN ADULT LIVER, SIGNAL = 2.3; EXPRESSED IN PLACENTA, SIGNAL = 5.3; EXPRESSED IN HELA, SIGNAL = 1.4; EXPRESSED IN FETAL LIVER, SIGNAL =   4; EXPRESSED IN HEART, SIGNAL = 2.8; EXPRESSED IN LUNG, SIGNAL = 2.5; SWISSPROT HIT: P54487, EVALUE 5.70e-01; NT HIT: gi9506896, EVALUE 2.20e+00; NT HIT: AJ251793.1, EVALUE 3.60e-01; EST_HUMAN HIT: BG820603.1, EVALUE 0.00e+00; EST_HUMAN HIT: AI204914.1, EVALUE 0.00e+00
tgctgtcttgtggactgtgcactcagtccttgcaaggccaagagtccagttgtaggtgtggccttgagggggaagtggggaggagaagactgacatgagtcctctgcacggatccgtctctccctccccatcaccccttccttctgacacccagtcccagctgtccactgtcccaggtgcagtcactgttgtgcccttccttggggcaggctggctgggggccagaaaggggccatgaggctgtcttgggcccaaaaagggacaataaggccagttgtatgcttcctgttcctcatagcttgccttggtggggatgtctttgttggagttgattctgagctgctgtgattaggagaccctgaaatacagtggtttaagcaagatggaagcttgtttctaattagtctagattgagatggcccagagctggtagggcagctctgcgtttcttcatacgcaccttccaattctgggtacacagcggctgctccagcgcccaccctcctgtgtgcatccaagcctgggggaagcagaaatagacaagagggcacacccactttttgctaaaggca

SEQ ID NO: 18224 - DNA, 582 bp, Homo sapiens
  MAP TO AL035682.16; EXPRESSED IN HELA, SIGNAL =   1; EXPRESSED IN ADULT LIVER, SIGNAL = 1.5; EXPRESSED IN BRAIN, SIGNAL = 1.3; EXPRESSED IN BONE MARROW, SIGNAL = 1.5; EXPRESSED IN FETAL LIVER, SIGNAL = 1.2; EXPRESSED IN LUNG, SIGNAL = 1.3; EXPRESSED IN HEART, SIGNAL = 1.7; SWISSPROT HIT: P12276, EVALUE 2.60e-01; NT HIT: AB044947.1, EVALUE 4.00e-05; NT HIT: AF100956.1, EVALUE 9.30e-02; EST_HUMAN HIT: AU150281.1, EVALUE 2.20e+00
ctcctcactatcccctgctgcgctgatgctctccttccccccatatcccttagatgatgccttggtgcatgggaagtactcaataacatttatttatgaacagaacacagaagcttagaaagggattgggaaacttcaggtcacagtcaggattgtcctccccaagtcggcctctgaggtttgggtgctgaaccactctcctgtattattgccatcaacattttattcctccaataatctaccctaggccagcaactgtacctctcctcctacctgttcccaaatggggccacgtgcagtgttctgcctcttcctggaagccgccccacattcctgccatggtgccctcactcgctccaaaagcaagtactaaatttccaagtagccccactcgtgcatggcaccatgcacacagcaggtgcttaatgcctgcattagcccaccccaaagaccctgcaccatcagtctaggtcccttggtttaaggaagctgattttcatgcgattgacaaatgggttgctgatctgttacttgtttggagtctttctctctatgaaagaatacgagccattcacatttcct

SEQ ID NO: 18225 - DNA, 581 bp, Homo sapiens
  MAP TO Z83844.5; EXPRESSED IN PLACENTA, SIGNAL =   3; EXPRESSED IN ADULT LIVER, SIGNAL = 1.8; EXPRESSED IN BRAIN, SIGNAL = 1.7; EXPRESSED IN HEART, SIGNAL = 1.8; EXPRESSED IN BONE MARROW, SIGNAL = 1.9; EXPRESSED IN FETAL LIVER, SIGNAL = 1.5; NT HIT: gi15920163, EVALUE 3.60e-02; EST_HUMAN HIT: BI195282.1, EVALUE 1.00e-101; NT HIT: AF118569.1, EVALUE 9.30e-02; EST_HUMAN HIT: BE382519.1, EVALUE 3.00e-98; SWISSPROT HIT: P20631, EVALUE 5.10e-02
tctctgcaggcaaccagacaccttggcctggtgaggcctcgatgtaggggctgataggtaggctcagagccatggcaaccggtggccacctcctccctgccggcgccaggagcggagactgcagagggaccgggacttagatgagagaggtctccccagcaggaagggagggtctggtggttggcacccactagatgagcatggtcagaaaaatatcaggatgagcaacttctttatctaggcctgggtgggggtgcctggcacaggtctccatgggacatgctgcagctggtagcccccagaccccggggctgtgcccccctgggcggcacccagaaggtagggcttgccaggactgacccttcccaaagagatctaggcggggaccagagggtttctgaccccagcctgtgactggctccacctcccatagtctcctggagccgaggaaaggacaggactggcgggcccatgggagggtccgtggggcacttggtcctcgtcagagggaggaactggacagttcgcgcagtgctgctggtctggactgccctctgagctctcagggggtctctatgcag

SEQ ID NO: 18226 - DNA, 563 bp, Homo sapiens
  MAP TO Z97055.1; EXPRESSED IN LUNG, SIGNAL = 1.6; EXPRESSED IN HEART, SIGNAL = 1.3; EXPRESSED IN BONE MARROW, SIGNAL = 1.4; EXPRESSED IN FETAL LIVER, SIGNAL = 1.5; EXPRESSED IN PLACENTA, SIGNAL = 1.8; EXPRESSED IN ADULT LIVER, SIGNAL = 1.6; EXPRESSED IN HELA, SIGNAL = 0.81; NT HIT: X74805.1, EVALUE 9.00e-03; EST_HUMAN HIT: AA017374.1, EVALUE 2.00e-01; NT HIT: X74807.1, EVALUE 6.00e-03; EST_HUMAN HIT: AA017656.1, EVALUE 1.30e-01; SWISSPROT HIT: P45439, EVALUE 6.30e+00
tctctaagcacgtggggaacatccactgttactgcattccttgttgcagtgattgctgatgcacagaaccgttctctttattttatccataaattcacttcctaataacaataaggcatgccagggctttggcctcatgccttattacaccacctgaggagtaagataatcacccggaaatgcactgcctgttgtgcattttattacttgaatacaaagtgattcaattcaagaaacacttagttgaagacagcatgaaaaaaaaataatcatatgaaaagtaattcctcctaatgccacagagtacactgcagggagtactcttccagagggagaatggtctggatgacctgttgggtctcctctagttctaatttctaccaactgcgggatcataaaagctagtgagacttcaattacaatatgaagattccaaagggccagatctggatcgttctgaaaatggagcctattgggtgttctacctaaacattcttggtataagcattttctaagcaaccattctctcaaccatccattattcagcaaacactgtaggccac

SEQ ID NO: 18227 - DNA, 576 bp, Homo sapiens
  MAP TO AC008151.1; EXPRESSED IN ADULT LIVER, SIGNAL = 1.5; EXPRESSED IN LUNG, SIGNAL =   1; EST_HUMAN HIT: BF971469.1, EVALUE 1.00e-15; NT HIT: AL163285.2, EVALUE 3.00e-14; EST_HUMAN HIT: BE064410.1, EVALUE 6.00e-13; SWISSPROT HIT: P14350, EVALUE 3.30e-01
tcatggaaggggcagcgttttgttcttggtggaatagacatttactctggttatgggtttgccttccttgcacacaacacttttgctgaaactaccacccatggaattacagaatgcttatccactgtcatggtattctacatagcatttgcttctgtccaaggaactcacttcacagcaaaagaagtacagcactgggcctgcgttcatggaatttactgaagttaccatattccccaccatcctaaagcaggtggcatatgtagaacagtgtgatggccttttgcagactaatttacagcatcagctacgttgcaataccttatagggtgggggcaaggttctccagaagcctgtatagctctgagtctgcatccagcatatggtgctctttctcccatagctaggattcaaggatccagaaaccaagaggtggaaatgggggtggcaccactcactattacccttagcaatccactagcaaaggttttacttcctgtacctgtgactttatactctactctcctagaagttttagtttcagagggagaatgcttccaccaggaatcacaacaa

SEQ ID NO: 18228 - DNA, 511 bp, Homo sapiens
  MAP TO AC006427.13; EXPRESSED IN HEART, SIGNAL =   3; EXPRESSED IN BONE MARROW, SIGNAL = 2.4; EXPRESSED IN FETAL LIVER, SIGNAL = 2.6; EXPRESSED IN LUNG, SIGNAL = 2.3; EXPRESSED IN ADULT LIVER, SIGNAL = 2.6; EXPRESSED IN HELA, SIGNAL = 2.1; NT HIT: AL163268.2, EVALUE 1.00e-12; EST_HUMAN HIT: AI073378.1, EVALUE 1.00e-10; NT HIT: AJ312278.1, EVALUE 3.00e-11; SWISSPROT HIT: Q91836, EVALUE 1.90e+00; EST_HUMAN HIT: AL519606.1, EVALUE 5.00e-11
gaaaagtttgcaacagccactgtgaagaactggaaactaagttcaccaccaaagagccgtactgacactgcccagtgccaggttgatcagaagccttcagtttctgatggcaccagtcagtctccaggcaaaattgtctcttctgagagtcttgggactgttctttttttcacaagcaggcatttgagcattttgaaaatgcagaagtatatatatatatatcactacacatctctgggtagtgagactatggaggtgttactttgtattactattaggttggtcaaaagtaattgtggttttcatcgttactttcaatggcgaaaactgcaattatttttgcaccaacctaatataaatgtccctaagtcttctcctttccagcttaacatctcaacctacaatcattcctcaaaaagcaatcattttgccatcttggcagttttctcttggaaaaagataaattacaacaaaaagttaataattcttcacattactttatgtgatggtt

SEQ ID NO: 18229 - DNA, 580 bp, Homo sapiens
  MAP TO AC008151.1; EXPRESSED IN BRAIN, SIGNAL = 1.7; EXPRESSED IN ADULT LIVER, SIGNAL = 1.7; EXPRESSED IN PLACENTA, SIGNAL = 1.5; EXPRESSED IN HELA, SIGNAL = 0.33; EXPRESSED IN BONE MARROW, SIGNAL = 1.6; EXPRESSED IN LUNG, SIGNAL = 1.4; EXPRESSED IN HEART, SIGNAL = 1.5; EST_HUMAN HIT: BG182901.1, EVALUE 8.20e-01; NT HIT: S58644.1, EVALUE 2.40e-02; EST_HUMAN HIT: BE061695.1, EVALUE 5.50e-01; SWISSPROT HIT: P09078, EVALUE 3.80e+00
ccaggtgggaagaaaaccagcagaatgagatagtgtgagagcatgggaggagaatgctttccatggggacagagagagtggtcggttgagtctcctttgtggctctttctcaagatggaaggttctagagcatgtttgaatattcttaggatgctccagcagagtggggtgactgcaggagagaaggccttgaggaggaagggaacaggacccagaactcaggtgaggggtggcctctgataggagcaagactaggcgggcaggcacagagcacaggcacagatgcaggtggattggataggggaggggacagtttctgtctggatcagctctattttctcagtgaagaacaaggtgagttcatctgctggccagtagccagcgtggagggggatgtgttagggaggcttgaggtgagagtaggagacataaagtgatatgaaaaagctctctgtgggtgagaaaccaaactgatcagcacatagcttctccccttctcttatcttcatgtaataatttccaacaggtaaaatgattgagtcgtgggtcctggccacatcaattcctcatttgtccctca

SEQ ID NO: 18230 - DNA, 571 bp, Homo sapiens
  MAP TO AP000353.1; EXPRESSED IN ADULT LIVER, SIGNAL = 1.3; EXPRESSED IN PLACENTA, SIGNAL = 1.5; EXPRESSED IN HELA, SIGNAL = 1.9; EXPRESSED IN BONE MARROW, SIGNAL = 1.2; EXPRESSED IN FETAL LIVER, SIGNAL = 1.2; NT HIT: AJ012008.1, EVALUE 1.40e+00; EST_HUMAN HIT: BF351141.1, EVALUE 9.00e-03; SWISSPROT HIT: P11675, EVALUE 1.30e+00
ttggtatgaaaccttgggttgacttttagtatttgaaatcagggtcattttaaataggctgtgccaaccctttcagacacacaagatctgaaaggagcagaaaatgggccttgggccttgagtcccttttggtggctctcatttgaagagataacacatccctggactccttcctgtggtgctgcccccttggtagtgggcgggaaccttggcaagcacctcccccacctgcttgcttcacaggccagttgggcatctcatctctgtgtacatagcccctgcctctccagctctgccacagcagcccaccccagcatcatgacctgcaggtggcacccaagactgtggtgagccccattagcagagccttcctcagggccacttaggtaccttgattaccccttaaacaagggtttgtctagaatcaccacaatgccccccagggccagtaccaatctctgctctctggttttttagatggttggcagttccagattctcacatctgtgtctgagaggctcaggaagggcctggcaaagtgtagtcagcagccttttgtccctgccaggtc

SEQ ID NO: 18231 - DNA, 182 bp, Homo sapiens
  MAP TO AC010202.6; EXPRESSED IN BONE MARROW, SIGNAL = 0.96; EXPRESSED IN ADULT LIVER, SIGNAL = 1.9; EXPRESSED IN PLACENTA, SIGNAL = 1.3; SWISSPROT HIT: P01343, EVALUE 5.00e-31; EST_HUMAN HIT: AI248089.1, EVALUE 5.00e-98; NT HIT: gi14758733, EVALUE 3.00e-98
acaagcccacagggtatggctccagcagtcggagggcgcctcagacaggcatcgtggatgagtgctgcttccggagctgtgatctaaggaggctggagatgtattgcgcacccctcaagcctgccaagtcagctcgctctgtccgtgcccagcgccacaccgacatgcccaagacccagaag

SEQ ID NO: 18232 - DNA, 143 bp, Homo sapiens
  MAP TO AC008996.5; EXPRESSED IN ADULT LIVER, SIGNAL = 0.8; EXPRESSED IN BRAIN, SIGNAL = 0.72; EXPRESSED IN FETAL LIVER, SIGNAL =   1; EXPRESSED IN BONE MARROW, SIGNAL = 0.58; NT HIT: X92887.1, EVALUE 5.00e-75; SWISSPROT HIT: P10267, EVALUE 5.00e-23; EST_HUMAN HIT: AW812041.1, EVALUE 7.00e-75
gatctcttgtttctaaagtttgatttccagaccaaattctaatgtggtgtgaggccacagtaagcctccataattctggatgttcaggaccagaaacaggacttattatttttggtcttggggtagagattcctttttctccc

SEQ ID NO: 18233 - DNA, 141 bp, Homo sapiens
  MAP TO AC004107.1; EXPRESSED IN PLACENTA, SIGNAL = 0.81; EXPRESSED IN ADULT LIVER, SIGNAL = 0.67; EXPRESSED IN FETAL LIVER, SIGNAL = 0.45; NT HIT: Y17671.1, EVALUE 5.00e-10; SWISSPROT HIT: Q12263, EVALUE 4.50e+00; EST_HUMAN HIT: BG232083.1, EVALUE 8.00e-16
aagagagaaagagctgctgtcctttctctttcttttgcccactgaacctctgctcctgaacttgctcctcatgtgtgtccgtgtctttaatcttcttggcatgagatgatgaacccgggtatttaccccagacaacgatgc

SEQ ID NO: 18234 - DNA, 204 bp, Homo sapiens
  MAP TO AF230666.1; EXPRESSED IN BRAIN, SIGNAL = 1.8; EXPRESSED IN PLACENTA, SIGNAL = 1.9; EXPRESSED IN BONE MARROW, SIGNAL = 1.6; EXPRESSED IN HEART, SIGNAL = 2.3; EXPRESSED IN ADULT LIVER, SIGNAL = 1.3; EST_HUMAN HIT: AU141143.1, EVALUE 1.00e-111; NT HIT: gi14748739, EVALUE 1.00e-111; SWISSPROT HIT: P01266, EVALUE 5.00e-24
gtctgtcattttgtcagctacagaaacagcagatcttactgagtggctacattaacagcacagacacctcctacctccctcagtgtcaggattcaggggactacgcgcctgttcagtgtgatgtgcagcaggtccagtgctggtgtgtggacgcagaggggatggaggtgtatgggacccgccagctggggaggccaaagcgat

SEQ ID NO: 18235 - DNA, 133 bp, Homo sapiens
  MAP TO AL022343.6; EXPRESSED IN PLACENTA, SIGNAL = 1.4; EXPRESSED IN BONE MARROW, SIGNAL = 1.1; EXPRESSED IN HEART, SIGNAL = 2.2; EXPRESSED IN ADULT LIVER, SIGNAL = 0.95; EXPRESSED IN LUNG, SIGNAL = 2.1; EXPRESSED IN BRAIN, SIGNAL = 1.4; EST_HUMAN HIT: BG681450.1, EVALUE 6.00e-69; NT HIT: gi15305376, EVALUE 4.00e-69; SWISSPROT HIT: P79386, EVALUE 4.50e+00
ctggtggatagcgaggtggtcatgctttctgcgcactgggagaagaaaaagacaagcctcgtggagctgcaagagcagctccagcagctcccagctttaatcgcagacttagaatccatgacagcaaatctga

SEQ ID NO: 18236 - DNA, 220 bp, Homo sapiens
  MAP TO AC016597.4; EXPRESSED IN HEART, SIGNAL = 6.1; EXPRESSED IN FETAL LIVER, SIGNAL = 4.2; EXPRESSED IN BONE MARROW, SIGNAL = 3.6; EXPRESSED IN PLACENTA, SIGNAL = 3.9; EXPRESSED IN ADULT LIVER, SIGNAL = 3.8; EST_HUMAN HIT: AW451984.1, EVALUE 1.00e-118; NT HIT: AB011128.2, EVALUE 1.00e-119; SWISSPROT HIT: Q51698, EVALUE 4.00e+00
tcacagctaagttcctgttgacgaggcggcccagctccccaggcgtggctgtgttccggatatccacatcgtggggcgacacataaagctttgtgtcattcaagtcaaagaactcgacttctgtgagacccacccaccacgagttgccccagttggacaggatctccatggtcacgtagatggcatctttgatctcgtctgccctcattctctgtttgtc

SEQ ID NO: 18237 - DNA, 228 bp, Homo sapiens
  MAP TO AC003107.1; EXPRESSED IN ADULT LIVER, SIGNAL = 0.6; EXPRESSED IN PLACENTA, SIGNAL = 0.75; SWISSPROT HIT: P49747, EVALUE 7.00e-35; EST_HUMAN HIT: AI750257.1, EVALUE 1.00e-107; NT HIT: gi14766986, EVALUE 1.00e-107
cgcagaggtcaggcacggacggccctggcaccttgagttggatgccaggctcggccacagcacggaaggggttcgcctgccaatacgtttgctccatctgcttccacatgaccacgtagaagctggagctgtcctggtagccaaagatgaagcccgcatagtcgtcatccgtgaccgtgttcacatggaacgtgccctcgaagtccacgccattgaaggcagtgtaac

SEQ ID NO: 18238 - DNA, 148 bp, Homo sapiens
  MAP TO AL109839.11; EXPRESSED IN BRAIN, SIGNAL = 0.43; EXPRESSED IN BONE MARROW, SIGNAL = 0.53; EXPRESSED IN ADULT LIVER, SIGNAL = 0.57; SWISSPROT HIT: P53043, EVALUE 5.00e-04; EST_HUMAN HIT: BG171144.1, EVALUE 8.00e-78; NT HIT: gi14771042, EVALUE 5.00e-78
tgccttctgctggggatgtggagaaagccagagttctgaaggaagaaggcaatgagcttgtaaagaagggaaaccataagaaagctattgagaagtacagtgaaagcctcttgtgtagtaacctggaatctgccacgtacagcaacag

SEQ ID NO: 18239 - DNA, 184 bp, Homo sapiens
  MAP TO AC012156.14; EXPRESSED IN PLACENTA, SIGNAL = 2.6; EXPRESSED IN ADULT LIVER, SIGNAL = 2.2; EXPRESSED IN HEART, SIGNAL = 2.7; EXPRESSED IN BRAIN, SIGNAL = 2.2; EXPRESSED IN LUNG, SIGNAL = 1.5; EXPRESSED IN FETAL LIVER, SIGNAL = 1.7; SWISSPROT HIT: P20740, EVALUE 4.00e-10; EST_HUMAN HIT: BG709485.1, EVALUE 3.80e+00
ctcaaagctgatgcatttgaagaaattttctccagtaacattttcttcaaatattttggtctggacctcaccatagttgagggagaccgtcaaaacaacagattcagtgagattaaaaagctgggcacaagctttatccaaagagccttcttgtagaacagaaggaatcagcagaacatactgc

SEQ ID NO: 18240 - DNA, 148 bp, Homo sapiens
  MAP TO AL109981.1; EXPRESSED IN ADULT LIVER, SIGNAL = 3.4; EXPRESSED IN HEART, SIGNAL = 3.4; EXPRESSED IN HELA, SIGNAL = 2.5; EXPRESSED IN BRAIN, SIGNAL = 3.6; EXPRESSED IN BONE MARROW, SIGNAL = 3.8; EXPRESSED IN FETAL LIVER, SIGNAL = 3.5; NT HIT: X69465.1, EVALUE 7.90e+00; EST_HUMAN HIT: BG311161.1, EVALUE 2.00e-56; SWISSPROT HIT: P21552, EVALUE 5.20e-01
gcatacttccgacagggtgttgccctccagtaccttggacgtcatgccgatgccctggcagcctttgcatctggactggctcaagaccccaagagtctccagcttctggtggggatggtggaagccgccatgaaatctcccatgagag

SEQ ID NO: 18241 - DNA, 104 bp, Homo sapiens
  MAP TO AC035149.2; EXPRESSED IN PLACENTA, SIGNAL =  18; EXPRESSED IN ADULT LIVER, SIGNAL =   3; EXPRESSED IN HEART, SIGNAL = 3.7; EXPRESSED IN FETAL LIVER, SIGNAL = 3.8; NT HIT: AF200465.1, EVALUE 3.30e-01; EST_HUMAN HIT: AW439963.1, EVALUE 8.00e-03
tttcctcttgatctgcccaagtacttcagtcttcttttccccttttatgcttttcatctgtccaagctcttcagctgagctttcctcactgatgacagcactat

SEQ ID NO: 18242 - DNA, 247 bp, Homo sapiens
  MAP TO AL109910.27; EXPRESSED IN FETAL LIVER, SIGNAL = 1.7; EXPRESSED IN BRAIN, SIGNAL = 1.9; EXPRESSED IN PLACENTA, SIGNAL =   2; EXPRESSED IN ADULT LIVER, SIGNAL = 2.3; NT HIT: gi15295251, EVALUE 8.90e-01; SWISSPROT HIT: P70289, EVALUE 7.00e+00; EST_HUMAN HIT: AW378694.1, EVALUE 3.30e-01
caacacccaccattttgcccagttttaaaagtctcacaaaaccaacaaagcccacacggagacctcctactgggaataccacatctccaggggccacgcctccagcttccacgcctccagtggccatcactgcctgctgccttgtcccagaaaccatggcaagagtgcccaggcttgagcccacacgggtgtcagtggggtgggtgacacacatctcttcaaaaagcagcatccttgttccctgcat

SEQ ID NO: 18243 - DNA, 168 bp, Homo sapiens
  MAP TO AC010205.5; EXPRESSED IN BONE MARROW, SIGNAL = 1.1; EXPRESSED IN PLACENTA, SIGNAL =   3; EXPRESSED IN ADULT LIVER, SIGNAL =   2; EXPRESSED IN HEART, SIGNAL = 2.8; EST_HUMAN HIT: BE695877.1, EVALUE 1.00e-89; NT HIT: gi14766978, EVALUE 7.00e-90; SWISSPROT HIT: P55631, EVALUE 4.40e+00
gaagtttgtttgcctgaatgacaacattgaccacaatcataaagatgctcagacagtgaaggctgttctcagggacttctatgaatccatgttccccataccttcccaatttgaactgccaagagagtatcgaaaccgtttccttcatatgcatgagctgcaggaatg

SEQ ID NO: 18244 - DNA, 286 bp, Homo sapiens
  MAP TO AC008509.5; EXPRESSED IN BRAIN, SIGNAL = 0.94; EXPRESSED IN BONE MARROW, SIGNAL = 0.69; EXPRESSED IN PLACENTA, SIGNAL =   1; EXPRESSED IN HEART, SIGNAL = 1.2; EXPRESSED IN ADULT LIVER, SIGNAL = 0.88; SWISSPROT HIT: P47090, EVALUE 9.40e+00; EST_HUMAN HIT: AW950418.1, EVALUE 0.00e+00; NT HIT: gi14734562, EVALUE 0.00e+00
cttgttcactggattctcttatgtagggcttaaggtgggacattttgataggtcttttcagtctaaccccagtgttgtctctcaggacagcacatccactttctgtaatatagtctatgacacaaggaccaacccattcagactgaaaacgaccatccttccaccaatttttcctttgtcttaaaacttcatgacccacttttaaatgaaatggatttaattgtttgggtttctttttaacaatgatcttgcttttatttagttcatccaaattgttgttctccat

SEQ ID NO: 18245 - DNA, 145 bp, Homo sapiens
  MAP TO AC007379.2; EXPRESSED IN LUNG, SIGNAL = 3.5; EXPRESSED IN BRAIN, SIGNAL = 3.2; EXPRESSED IN BONE MARROW, SIGNAL = 2.3; EXPRESSED IN PLACENTA, SIGNAL = 3.6; EXPRESSED IN HEART, SIGNAL = 2.9; EXPRESSED IN ADULT LIVER, SIGNAL = 3.7; SWISSPROT HIT: P94210, EVALUE 1.20e+00; EST_HUMAN HIT: BI520404.1, EVALUE 6.00e-17; NT HIT: gi14737906, EVALUE 7.00e-28
gtgcactaagatacggaagctagaagcagacatgggggacatgcctgcaactctagaaagctgtatgaaaacagacacacaacactctctgtcagataaccacaacaaagagacacagaggcagtccaaccctctgataagcact

SEQ ID NO: 18246 - DNA, 199 bp, Homo sapiens
  MAP TO AC010609.5; EXPRESSED IN FETAL LIVER, SIGNAL = 0.8; EXPRESSED IN HELA, SIGNAL = 0.98; EXPRESSED IN BRAIN, SIGNAL = 0.88; EXPRESSED IN BONE MARROW, SIGNAL = 0.66; EXPRESSED IN PLACENTA, SIGNAL = 0.84; EXPRESSED IN ADULT LIVER, SIGNAL = 0.94; SWISSPROT HIT: Q9UKJ3, EVALUE 4.90e-01; EST_HUMAN HIT: BG193841.1, EVALUE 6.60e-02; NT HIT: AL163249.2, EVALUE 7.00e-04
ccactgcttcaaccttggaaacttttcatgggagttggaatcaaatccaaactccttgccatgatccacaagggcctgcagagtttggcttctgcccctcgtcttgtgcccctctcttgaactctgcatgttcaaatctctgttcctcacgcaagccaagctttttccttcctcagggtctttgtacttgccgttccct

SEQ ID NO: 18247 - DNA, 97 bp, Homo sapiens
  MAP TO AC005685.1; EXPRESSED IN HEART, SIGNAL = 0.96; EXPRESSED IN BRAIN, SIGNAL = 1.3; EXPRESSED IN HELA, SIGNAL = 1.6; EXPRESSED IN ADULT LIVER, SIGNAL = 1.1; NT HIT: AE008683.1, EVALUE 3.00e-01; SWISSPROT HIT: P54190, EVALUE 8.10e+00; EST_HUMAN HIT: AV705495.1, EVALUE 4.50e-01
atggagggcataaacaagaaaatagtaggctgcacctgcaagaaacttgtagaagcctgtgcagaacctgtccctgtagaggtagctgcaatgagag

SEQ ID NO: 18248 - DNA, 156 bp, Homo sapiens
  MAP TO AC021092.1; EXPRESSED IN BONE MARROW, SIGNAL = 1.5; EXPRESSED IN PLACENTA, SIGNAL = 1.9; EXPRESSED IN ADULT LIVER, SIGNAL = 1.8; EXPRESSED IN HEART, SIGNAL =   2; EXPRESSED IN BRAIN, SIGNAL =   2; NT HIT: AB017499.1, EVALUE 1.40e-01; SWISSPROT HIT: O18326, EVALUE 2.00e+00; EST_HUMAN HIT: AA305027.1, EVALUE 1.00e-18
tcagcgatataggattcgttccccatgggcagtgcgggaatcgtaggcaaggagcaccgcggagtcccatcgcttttccctgaagggtgagattctgaacgtttttccctcagcattctgagtgtaatccaaacgctcagtggagtcgtggtccat

SEQ ID NO: 18249 - DNA, 213 bp, Homo sapiens
  MAP TO AF067846.1; EXPRESSED IN FETAL LIVER, SIGNAL = 1.3; EXPRESSED IN HELA, SIGNAL = 1.2; EXPRESSED IN PLACENTA, SIGNAL = 5.5; EXPRESSED IN ADULT LIVER, SIGNAL = 1.1; EXPRESSED IN HEART, SIGNAL = 1.8; NT HIT: U93163.1, EVALUE 3.00e-49; SWISSPROT HIT: Q9ZCN6, EVALUE 2.90e-02; EST_HUMAN HIT: AW971754.1, EVALUE 5.00e-40
agtatactttttctacttataaaaaaatacaagttaaatgtaaaacagtctcaggcagttccttctggaggtattccagaagaaggcactgttatcacaggagatgacagctccctgcgtgttattgcccctgaagacctcccagtgggacaagatgtggaggaggaagacagtgatattgatgatcctgacttctgtgtaggcctaggctaa

SEQ ID NO: 18250 - DNA, 276 bp, Homo sapiens
  MAP TO AC012310.4; EXPRESSED IN ADULT LIVER, SIGNAL = 1.1; EXPRESSED IN HEART, SIGNAL = 1.3; EXPRESSED IN BRAIN, SIGNAL = 1.1; EXPRESSED IN PLACENTA, SIGNAL = 1.1; EST_HUMAN HIT: BI459025.1, EVALUE 1.00e-53; NT HIT: AF228058.1, EVALUE 2.50e-01; SWISSPROT HIT: P50533, EVALUE 1.70e+00
caaccctgccaccaggtctccttggctggtcgaaagcaaacaagctaggcagcgggaagaaaaaggcggtgcctgcccggtgattagccagctgactcctctcttgattggccaaggtgggttcttgatgaccttcgcgatggaggggaaatactgctgcacctgcgtgtttctgcccagatgccccaattgtctttcttcacccaggactaaacagggtctgctgattaggagacggtccacaccccgtttatgatgttggagctcatggggcat

SEQ ID NO: 18251 - DNA, 122 bp, Homo sapiens
  MAP TO AC006942.1; EXPRESSED IN PLACENTA, SIGNAL =   1; EXPRESSED IN ADULT LIVER, SIGNAL = 1.6; EXPRESSED IN HELA, SIGNAL =   1; EXPRESSED IN BRAIN, SIGNAL = 2.1; EXPRESSED IN FETAL LIVER, SIGNAL = 0.87; EXPRESSED IN BONE MARROW, SIGNAL = 2.1; EST_HUMAN HIT: BI821050.1, EVALUE 2.00e-62; NT HIT: gi14786905, EVALUE 1.00e-62; SWISSPROT HIT: Q92622, EVALUE 7.90e+00
ctgtcatggaagcttttccacaccacagtcgtgttctcggtcctcgcagagctcagctgcacctccagattctgcccaaacatgtggactccattgagggaaccgatgacagagaacgggag

SEQ ID NO: 18252 - DNA, 197 bp, Homo sapiens
  MAP TO AL117187.3; EXPRESSED IN ADULT LIVER, SIGNAL = 5.1; EXPRESSED IN HEART, SIGNAL = 5.1; EXPRESSED IN LUNG, SIGNAL = 5.9; EXPRESSED IN FETAL LIVER, SIGNAL = 6.4; EXPRESSED IN BONE MARROW, SIGNAL = 4.9; EXPRESSED IN PLACENTA, SIGNAL = 5.3; EST_HUMAN HIT: BI857057.1, EVALUE 1.00e-52; NT HIT: gi14748136, EVALUE 8.00e-53; SWISSPROT HIT: P02851, EVALUE 1.90e+00
tcccaggaatccccaaacctggaaaacatagcaaaccccctagaagaaaatgtaacgaaagaatcaatcagtagtaaaaaaaaggaaaaaaggaaacatgtggaccacgtagaaagttcactatttgtagcaccaggaagtgttcaatcctcagatgacctagaagaagacagtagcgactacagcattccttccag

SEQ ID NO: 18253 - DNA, 206 bp, Homo sapiens
  MAP TO AC037199.1; EXPRESSED IN ADULT LIVER, SIGNAL = 2.7; EXPRESSED IN HEART, SIGNAL = 3.8; EXPRESSED IN FETAL LIVER, SIGNAL = 4.2; EXPRESSED IN BRAIN, SIGNAL = 2.3; EXPRESSED IN LUNG, SIGNAL = 2.3; EXPRESSED IN PLACENTA, SIGNAL = 3.9; SWISSPROT HIT: Q9Y5K2, EVALUE 3.00e-04; EST_HUMAN HIT: AA336074.1, EVALUE 1.10e+00; NT HIT: gi16175937, EVALUE 1.20e-02
ttctggaggcagtgtgcagccgacagcacccactgtggatgctctaagatgccccagcgtcttaaagttttccactgacggtgctggctgcctgccagggctgcaagtgcagactgtattcctgttgccaccaatgaggactttgctggcactggagaaagtgcttgggaatggagtctgggatccttcagggggaatcacagctc

SEQ ID NO: 18254 - DNA, 221 bp, Homo sapiens
  MAP TO AC044786.2; EXPRESSED IN LUNG, SIGNAL = 2.9; EXPRESSED IN HELA, SIGNAL = 2.2; EXPRESSED IN FETAL LIVER, SIGNAL = 1.7; EXPRESSED IN BONE MARROW, SIGNAL = 2.1; EXPRESSED IN PLACENTA, SIGNAL = 1.7; EXPRESSED IN HEART, SIGNAL = 2.2; EXPRESSED IN ADULT LIVER, SIGNAL =   2; SWISSPROT HIT: Q09344, EVALUE 3.20e+00; EST_HUMAN HIT: BG952859.1, EVALUE 2.90e-01; NT HIT: AE006768.1, EVALUE 2.00e-01
tcaataggaattcatgatcatgtggatacagggattaagatactcagagatatcaggacaactgtctggattaaatttgaacaacagtgcgagtgtggaaaagttgacagttactaagaagggaagattagggaggtaagaggagttttgcacatgtcgcttttgagatgtcattgaggtatcccagtggacataaccaggaggtctttggaggtacaagg

SEQ ID NO: 18255 - DNA, 168 bp, Homo sapiens
  MAP TO AC018557.5; EXPRESSED IN PLACENTA, SIGNAL = 0.75; EXPRESSED IN HEART, SIGNAL = 0.94; EXPRESSED IN ADULT LIVER, SIGNAL = 0.87; EXPRESSED IN BRAIN, SIGNAL = 0.95; SWISSPROT HIT: P52430, EVALUE 3.30e+00; EST_HUMAN HIT: AI275631.1, EVALUE 3.40e+00
tcatgcatatacaagcgcataatggtagatgaagcagtgggtttctctatgttggattctcagatccaccattctgtggctccttgtaaaacagtcccattttcctttaggaagattgttatctttaggagttgtcttcctgatcaaggacttggagtcaaataaatt

SEQ ID NO: 18256 - DNA, 132 bp, Homo sapiens
  MAP TO AJ132410.1; EXPRESSED IN ADULT LIVER, SIGNAL = 0.71; EXPRESSED IN PLACENTA, SIGNAL = 1.9; EXPRESSED IN LUNG, SIGNAL = 1.7; EXPRESSED IN BRAIN, SIGNAL = 0.89; EST_HUMAN HIT: BF841120.1, EVALUE 1.00e-29; NT HIT: AJ297357.1, EVALUE 2.00e-68; SWISSPROT HIT: Q15654, EVALUE 6.00e-04
atcaagcccgacagcccccctaacaggcctctcctatgtgttcttgcttttctctggtcccagggctcagatgagaccatccgtgtcgtgtccatggacagagactaccacgtggagtgttaccactgcgag

SEQ ID NO: 18257 - DNA, 325 bp, Homo sapiens
  MAP TO AF235098.1; EXPRESSED IN LUNG, SIGNAL = 0.53; EXPRESSED IN FETAL LIVER, SIGNAL = 1.4; EXPRESSED IN HELA, SIGNAL = 0.82; EXPRESSED IN PLACENTA, SIGNAL = 0.73; EXPRESSED IN ADULT LIVER, SIGNAL = 1.2; EST_HUMAN HIT: AU131453.1, EVALUE 4.00e-57; NT HIT: AJ010104.1, EVALUE 0.00e+00; SWISSPROT HIT: P39770, EVALUE 2.00e-08
tgtcttgggagtcgtctgcagacttgggcatatcagggaatctgccctcaggacagtcttccattttttcactggagaagttgtctaggtcatcaaaatttttcccatagaaggagcctatgtcagactccatggactcagagtaactgctggggactggagtgttggagacctggcctcccatatgcattcgagtgtgctgctgcgggatgacagcatcgtctgtcaacttccagcagatggggcaggaatgctgggctctgagcaggggcacagcatgatggacactgtagtgggttttaagattcctttctgtgatgaaaac

SEQ ID NO: 18258 - DNA, 209 bp, Homo sapiens
  MAP TO AL121768.2; EXPRESSED IN ADULT LIVER, SIGNAL = 0.93; EXPRESSED IN BRAIN, SIGNAL = 1.1; EXPRESSED IN HELA, SIGNAL = 0.7; EXPRESSED IN BONE MARROW, SIGNAL = 1.1; EST_HUMAN HIT: BI712955.1, EVALUE 1.00e-114; NT HIT: AJ009889.1, EVALUE 2.90e+00; SWISSPROT HIT: Q9VU68, EVALUE 4.80e-01
tgcaccaaatgcaatagcgagcatggtctgcatccgggcatcttccagtgtgctcagtagcccttttttgctaagaagagctcttcctgccagggtccagaacttcacatgttttactcccactgagacaaactgggtatctgaatctggtcggaattctgccacaaaaatacgttgattgtgaccagctctgctggcaattttggcac

SEQ ID NO: 18259 - DNA, 140 bp, Homo sapiens
  MAP TO AC007565.1; EXPRESSED IN PLACENTA, SIGNAL = 1.2; EXPRESSED IN ADULT LIVER, SIGNAL = 1.6; SWISSPROT HIT: P48869, EVALUE 7.70e+00; EST_HUMAN HIT: BI910523.1, EVALUE 2.00e-66; NT HIT: AF247453.1, EVALUE 7.40e+00
atgccagaagaagacccggccaccttggatgatcactcaggcaccactgccacccccagcaactccaggacccggaagaggcccacttccacgtcctcctcgcctgagacccccgaattcagcactttccgggcctgcca

SEQ ID NO: 18260 - DNA, 477 bp, Homo sapiens
  MAP TO AC005614.1; EXPRESSED IN ADULT LIVER, SIGNAL = 1.2; EXPRESSED IN LUNG, SIGNAL = 1.7; EXPRESSED IN HELA, SIGNAL = 1.3; EXPRESSED IN FETAL LIVER, SIGNAL = 1.7; EXPRESSED IN BRAIN, SIGNAL = 1.8; SWISSPROT HIT: Q14585, EVALUE 5.00e-35; NT HIT: gi4507974, EVALUE 6.00e-28; EST_HUMAN HIT: AI700612.1, EVALUE 0.00e+00
atgaaagttcttcacacattcttttatgttcacaagatttctcatcaatatgagctctctggtgttgagtaaatttttcgtacacagtgaaggcttgtccacactccttattgtcacaaaatttctaactattctgaattttctgatgttgagacagctgatcatccacagcaaatgctttcccatattccttacattatagcgtttctcaccagtatgaattttaacatgttgaacaatgtttgagctacaactaaaggtcttcccacattctgtacattcacagggtttcataccagtatgaattctttgatgtgcagtcaggaccaaactaaatctgaaagttttcccacactccttacattcatagagtttctcaccagtatgaatactctgatgttgaacaaggtttgagccactattgaaggccttcccacatttctcaaattcaaatggcttctcgccagtatgaatgac

SEQ ID NO: 18261 - DNA, 297 bp, Homo sapiens
  MAP TO AL023753.1; EXPRESSED IN HEART, SIGNAL = 1.8; EXPRESSED IN ADULT LIVER, SIGNAL = 1.4; EXPRESSED IN LUNG, SIGNAL = 1.6; EXPRESSED IN FETAL LIVER, SIGNAL = 2.4; EXPRESSED IN BRAIN, SIGNAL = 1.6; EXPRESSED IN PLACENTA, SIGNAL =   2; EXPRESSED IN BONE MARROW, SIGNAL = 1.7; SWISSPROT HIT: O95522, EVALUE 7.00e-37; NT HIT: gi13636190, EVALUE 1.00e-43; EST_HUMAN HIT: AW182053.1, EVALUE 5.00e-16
ctggggcgaaccttctgggcaagcagtgcatcaagcccctccagcacagctcgaaagatctctagattacatgacttcatcagggaccctagaggaaggcaggtgaagggccaggcctgcaccatagttgtcagggtctcgcagcatctcctggtaaaggcctccatgaacagtgggggaaagagctccctgggcagctcctccagggtggggatggccaaggcccggtctctcagcagactctgctcagccagctccaggagtctaggtggggcctggaggctcatcctgatgaat

SEQ ID NO: 18262 - DNA, 111 bp, Homo sapiens
  MAP TO AF196972.1; EXPRESSED IN LUNG, SIGNAL = 1.3; EXPRESSED IN PLACENTA, SIGNAL = 0.87; EXPRESSED IN ADULT LIVER, SIGNAL = 0.78; EXPRESSED IN HEART, SIGNAL = 0.94; NT HIT: gi14759567, EVALUE 5.00e-56; EST_HUMAN HIT: BF688949.1, EVALUE 7.00e-56; SWISSPROT HIT: P24275, EVALUE 4.60e+00
ggcctgggggtgcgagccttaaacttgctctttggagctctggccatcttccacctggcctacctgggctccctgtttgatgtcgatgtggatgacaccacagaggagcag

SEQ ID NO: 18263 - DNA, 122 bp, Homo sapiens
  MAP TO AF036938.1; EXPRESSED IN ADULT LIVER, SIGNAL = 1.3; EXPRESSED IN HEART, SIGNAL = 0.99; EXPRESSED IN HELA, SIGNAL = 1.3; EXPRESSED IN FETAL LIVER, SIGNAL = 1.2; EXPRESSED IN BRAIN, SIGNAL = 0.96; NT HIT: AF165902.1, EVALUE 1.00e-62; EST_HUMAN HIT: BI546888.1, EVALUE 2.00e-62; SWISSPROT HIT: P34903, EVALUE 4.00e-18
gctgtctcctaagcatgccccagatattcctgatgacagcactgacaacatcactatcttcaccagaatcttggatcgtcttctggacggctatgacaaccggctgcgacctgggcttggag

SEQ ID NO: 18264 - DNA, 196 bp, Homo sapiens
  MAP TO AC012315.4; EXPRESSED IN ADULT LIVER, SIGNAL = 1.3; EXPRESSED IN HEART, SIGNAL = 1.2; EXPRESSED IN BRAIN, SIGNAL = 1.4; EXPRESSED IN FETAL LIVER, SIGNAL = 0.96; EXPRESSED IN LUNG, SIGNAL =   1; EXPRESSED IN HELA, SIGNAL = 1.4; EXPRESSED IN PLACENTA, SIGNAL = 1.3; EST_HUMAN HIT: AW901816.1, EVALUE 5.00e-24; NT HIT: gi14249319, EVALUE 2.00e-13; SWISSPROT HIT: P15330, EVALUE 2.50e+00
ttatcttgcattaggactgctggtctcaagacctcttgcaactctgctgctaagggacttgtactcagcgtactctgttgcttcaagtaggtgccccactttgctaaagtggatgtctgcactgtcccagtccggggggttgttatcaatgaacacatccatcctgctatcaggtaactcgtctacacgacaactg

SEQ ID NO: 18265 - DNA, 111 bp, Homo sapiens
  MAP TO AC006993.2; EXPRESSED IN ADULT LIVER, SIGNAL = 2.6; EXPRESSED IN HELA, SIGNAL = 2.4; EXPRESSED IN BRAIN, SIGNAL = 2.6; EXPRESSED IN FETAL LIVER, SIGNAL = 2.6; EXPRESSED IN BONE MARROW, SIGNAL = 1.3; EXPRESSED IN PLACENTA, SIGNAL = 3.3; EST_HUMAN HIT: N66546.1, EVALUE 5.30e-01; NT HIT: D50453.1, EVALUE 3.60e-01
atgggagaacagttccagggctttccacttgtccccttctaccacaatatccttcattccatggttcagaaagccaatatggacattctgcaagctacagaggatatctag

SEQ ID NO: 18266 - DNA, 184 bp, Homo sapiens
  MAP TO AC022149.3; EXPRESSED IN BRAIN, SIGNAL = 2.8; EXPRESSED IN BONE MARROW, SIGNAL = 2.3; EXPRESSED IN HEART, SIGNAL = 3.4; EXPRESSED IN ADULT LIVER, SIGNAL = 3.1; EST_HUMAN HIT: AU137239.1, EVALUE 2.40e-01; NT HIT: gi14211882, EVALUE 2.00e-99; SWISSPROT HIT: Q14246, EVALUE 1.90e+00
ctacactatcgttttggattttcaggactttttgttctggatctttcaaggcagtttctagaactttcgattccacatcccggagaatagtggtagctgtggatgagatttcttgtctcccttctgttctccataaagtctgattggtgagaagtgactcaaatttgtccacaatcttttgcag

SEQ ID NO: 18267 - DNA, 138 bp, Homo sapiens
  MAP TO AF241731.1; EXPRESSED IN PLACENTA, SIGNAL = 0.7; EXPRESSED IN ADULT LIVER, SIGNAL = 0.79; EXPRESSED IN HELA, SIGNAL = 0.45; EST_HUMAN HIT: AW748999.1, EVALUE 6.90e-01; NT HIT: AJ236883.1, EVALUE 1.20e-01; SWISSPROT HIT: P23977, EVALUE 4.50e+00
cttcagttgcagcttgattcagctgcccaacagcatctccaagatctatctgggtgagctccagtctcaggtttcctgtgttctctggctttgtatgttgctcctcaggagcttcaagtttaaataatctcggaactc

SEQ ID NO: 18268 - DNA, 198 bp, Homo sapiens
  MAP TO AC025432.3; EXPRESSED IN BRAIN, SIGNAL =   2; EXPRESSED IN HELA, SIGNAL = 3.1; EXPRESSED IN ADULT LIVER, SIGNAL = 1.8; EXPRESSED IN PLACENTA, SIGNAL = 1.9; SWISSPROT HIT: P27425, EVALUE 1.90e+00; EST_HUMAN HIT: BG570482.1, EVALUE 1.00e-107; NT HIT: AF145714.1, EVALUE 1.00e-107
aagatcagcgacgggagactttttcctgttctgtttctccacttctacttgcattttggccattggtttggccatggcaagggccattttggcttcagcttgcaatttcttttgccttgtaaggaagtccatgtcatccaaggattcagactcctcttcagtagtgtctctatcagaataggaagaactctgtttgct

SEQ ID NO: 18269 - DNA, 168 bp, Homo sapiens
  MAP TO AC008282.2; EXPRESSED IN BONE MARROW, SIGNAL = 5.1; EXPRESSED IN PLACENTA, SIGNAL = 6.7; EXPRESSED IN ADULT LIVER, SIGNAL = 4.8; EXPRESSED IN HEART, SIGNAL = 6.4; EXPRESSED IN LUNG, SIGNAL = 4.3; EXPRESSED IN FETAL LIVER, SIGNAL = 5.8; SWISSPROT HIT: P31316, EVALUE 5.00e-01; NT HIT: gi15297201, EVALUE 7.00e-90; EST_HUMAN HIT: BF082285.1, EVALUE 1.00e-89
ctgaaggggtcgaaggtaagttaaagacttcttccaccactgcccatcactgacggcctgcagcaccgctttggtggtggttgtggtgttggaaaggactttcatggtggtagcagtggtccagcgcaataggtcagctgaattgctacctggaacacctacttcatc

SEQ ID NO: 18270 - DNA, 196 bp, Homo sapiens
  MAP TO AC016620.5; EXPRESSED IN PLACENTA, SIGNAL = 2.9; EXPRESSED IN ADULT LIVER, SIGNAL = 3.7; EXPRESSED IN HEART, SIGNAL =  10; EXPRESSED IN FETAL LIVER, SIGNAL = 2.7; NT HIT: gi15295679, EVALUE 1.00e-106; EST_HUMAN HIT: BG027629.1, EVALUE 1.00e-106; SWISSPROT HIT: P16473, EVALUE 1.10e+00
ctttcctcttcttggccagtgttgcctccacaggtaaaggtccaacccagcgctcttcgttctcctcatcgttctcctgggacaccgccactgctactgccagctctctttcgctgagttctgttttttccggttcctccgggtcccggcgccttctacgtctctgctgaaaatcgctaccactttccgccgccat

SEQ ID NO: 18271 - DNA, 96 bp, Homo sapiens
  MAP TO AF015722.1; EXPRESSED IN PLACENTA, SIGNAL = 1.3; EXPRESSED IN ADULT LIVER, SIGNAL = 1.2; EXPRESSED IN HEART, SIGNAL = 1.4; EXPRESSED IN BRAIN, SIGNAL = 1.3; EXPRESSED IN LUNG, SIGNAL = 1.8; NT HIT: AJ229041.1, EVALUE 3.00e-47; EST_HUMAN HIT: AW007712.1, EVALUE 1.80e+00; SWISSPROT HIT: P12269, EVALUE 8.10e+00
ttaagtggagttgaagttgttttcacttgtgatgtcagaattcggataatgcccaaattgatgcttagtgatatttatcttaaagacctcatttcc

SEQ ID NO: 18272 - DNA, 88 bp, Homo sapiens
  MAP TO AC012331.9; EXPRESSED IN PLACENTA, SIGNAL = 1.3; EXPRESSED IN HEART, SIGNAL = 1.2; EXPRESSED IN ADULT LIVER, SIGNAL = 1.3; NT HIT: X71966.1, EVALUE 3.00e-16; EST_HUMAN HIT: BG703148.1, EVALUE 7.00e-09
cccgtgatgccaatcagcagagtcaggggctgctgctggaggagctttgtggtttccagaaggactcagccccaagggacccaaagag

SEQ ID NO: 18273 - DNA, 437 bp, Homo sapiens
  MAP TO AL121768.2; EXPRESSED IN HEART, SIGNAL = 2.7; EXPRESSED IN ADULT LIVER, SIGNAL = 1.7; EXPRESSED IN FETAL LIVER, SIGNAL =   2; EXPRESSED IN BRAIN, SIGNAL = 1.7; EXPRESSED IN BONE MARROW, SIGNAL = 1.7; EXPRESSED IN PLACENTA, SIGNAL = 1.7; NT HIT: AL163284.2, EVALUE 3.00e-97; EST_HUMAN HIT: BG111003.1, EVALUE 2.00e-74; SWISSPROT HIT: P03157, EVALUE 2.80e+00
atggacaataaggtccaccctgaggtggtctcagatggagaagagaaacttgttgggaactggagtaaagatcaatcttactatgcaaagagactggcagcattttgcccctgccctagagatctgtggaactttgaacttaagagagatgatttagggtatctggtggaagaaatttctaagcgacaaagaattcaagaggaagcagagcatgaaagtttggaaatttttcagcctgatgatgcagtagaaaagaaaaacccattttctggggagaaattcaagcctgctacagaaatctacataagaacgaggagccaaaggctaatcacaaagacaaagaggaaaacgtctccaggccatgtcagagacttttgcggcacccctcccatcacaggctcggaggcctcagaggaaaaactggtttcctgtgccag

SEQ ID NO: 18274 - DNA, 131 bp, Homo sapiens
  MAP TO AF006501.4; EXPRESSED IN PLACENTA, SIGNAL = 2.5; EXPRESSED IN ADULT LIVER, SIGNAL = 2.4; EXPRESSED IN FETAL LIVER, SIGNAL = 2.5; EXPRESSED IN HELA, SIGNAL = 2.8; EXPRESSED IN BRAIN, SIGNAL = 1.6; EST_HUMAN HIT: AA311307.1, EVALUE 9.00e-68; SWISSPROT HIT: O88828, EVALUE 1.00e-18; NT HIT: gi15318622, EVALUE 6.00e-68
gaaggccaggagaatgtcgagatcctcccctctggggagcgaccgcaggccaaccagaagcgaatcaccacaccatacatgaccaagtacgagcgagcccgcgtgctgggcacccgagcgctccagattgc

SEQ ID NO: 18275 - DNA, 77 bp, Homo sapiens
  MAP TO AL121821.5; EXPRESSED IN ADULT LIVER, SIGNAL = 0.63; EXPRESSED IN BRAIN, SIGNAL = 0.51; EXPRESSED IN LUNG, SIGNAL = 1.7; EXPRESSED IN HELA, SIGNAL = 0.51; EXPRESSED IN BONE MARROW, SIGNAL = 0.84; EST_HUMAN HIT: BF665439.1, EVALUE 5.20e+00; NT HIT: AJ132142.1, EVALUE 5.80e-02
ttgactaagtatcctggtagaatgagtcttttggttatcagcattatccatagtcttgaatgttgtctttaggcatc

SEQ ID NO: 18276 - DNA, 237 bp, Homo sapiens
  MAP TO AC026736.3; EXPRESSED IN FETAL LIVER, SIGNAL = 6.3; EXPRESSED IN PLACENTA, SIGNAL = 5.4; EXPRESSED IN BONE MARROW, SIGNAL = 2.2; EXPRESSED IN ADULT LIVER, SIGNAL = 4.4; NT HIT: AF069333.2, EVALUE 2.20e-01; SWISSPROT HIT: P40602, EVALUE 1.50e-01; EST_HUMAN HIT: BF857913.1, EVALUE 1.20e+00
ttaaaggacctgaattagggcagcagccatggggacagacaggacgaggcacagctgagaaatgttggtatgaggcttctcaggattgatgatgacggagtggagggagagcaggaagtggctgaacgtgaatgaaggcgcatggggttgctgatgatgctggctgtggggctggcctgcactgtggaatgagtgagtcatccagtatggcttgatctccagagggacattaagtgt

SEQ ID NO: 18277 - DNA, 206 bp, Homo sapiens
  MAP TO AC016396.5; EXPRESSED IN PLACENTA, SIGNAL = 0.54; EXPRESSED IN ADULT LIVER, SIGNAL = 0.75; EXPRESSED IN FETAL LIVER, SIGNAL = 0.61; SWISSPROT HIT: O53307, EVALUE 3.70e-01; NT HIT: gi14747027, EVALUE 1.00e-112; EST_HUMAN HIT: BG532511.1, EVALUE 1.00e-112
ttgaatggatcgcagcagttaccattgctgctgggacagctgcaattggttatctagcttacaaaagattttatgttaaagatcatcgaaataaagctatgataaaccttcacatccagaaagacaaccccaagatagtacatgcttttgacatggaggatttgggagataaagctgtgtactgccgttgttggaggtccaaaaag

SEQ ID NO: 18278 - DNA, 76 bp, Homo sapiens
  MAP TO AC007075.3; EXPRESSED IN ADULT LIVER, SIGNAL = 2.1; EXPRESSED IN BRAIN, SIGNAL = 2.3; EXPRESSED IN LUNG, SIGNAL = 2.7; EXPRESSED IN FETAL LIVER, SIGNAL = 2.8; EXPRESSED IN PLACENTA, SIGNAL = 3.2; EST_HUMAN HIT: AL546225.1, EVALUE 3.30e-01
ctggtccctgttgttgccgcagcttcagaagtggaagtccagtgttatgttcttgaaaatcaaatacgatgttcat

SEQ ID NO: 18279 - DNA, 376 bp, Homo sapiens
  MAP TO AC035144.2; EXPRESSED IN BRAIN, SIGNAL = 1.1; EXPRESSED IN BONE MARROW, SIGNAL = 1.1; EXPRESSED IN PLACENTA, SIGNAL = 1.8; EXPRESSED IN ADULT LIVER, SIGNAL = 1.3; EXPRESSED IN HEART, SIGNAL = 1.2; EXPRESSED IN LUNG, SIGNAL = 1.3; EXPRESSED IN HELA, SIGNAL = 1.1; SWISSPROT HIT: P10272, EVALUE 7.00e-19; NT HIT: X57147.1, EVALUE 3.00e-72; EST_HUMAN HIT: AW503208.1, EVALUE 5.00e-72
ctttcccagttctaaggcttgggtaagtgccactagttctgctaactgggctctggtccctgggggaagaggcttactttcaagtactgttactatggcgtaacctgtccttcgtatcccattctccacaaatgaactttcattgctgtataggttaaggtcaggaataactaaggggacttcttgggtggcataagtctggactataattagttggcagtcatgctcgattggttccccatcctctgggagaaaagtggcagggttgagggtcacacacaagcatatttgaagcactggtccctcaaggagtagcacctggtatctaaggaggcagttgtctgatagccataaacttcctttggcacccagtatg

SEQ ID NO: 18280 - DNA, 157 bp, Homo sapiens
  MAP TO AC005933.1; EXPRESSED IN ADULT LIVER, SIGNAL = 3.7; EXPRESSED IN HEART, SIGNAL = 3.2; EXPRESSED IN FETAL LIVER, SIGNAL = 2.4; EXPRESSED IN HELA, SIGNAL = 2.4; EXPRESSED IN BRAIN, SIGNAL = 3.1; EXPRESSED IN BONE MARROW, SIGNAL = 2.9; EXPRESSED IN PLACENTA, SIGNAL = 3.1; SWISSPROT HIT: P21817, EVALUE 4.00e-14; NT HIT: gi14761690, EVALUE 2.00e-83; EST_HUMAN HIT: BF088553.1, EVALUE 9.00e-81
tgttacctgtttcacatgtacgtgggtgtccgggctggcggaggcattggggacgagatcgaggaccccgcgggtgacgaatacgagctctacagggtggtcttcgacatcaccttcttcttcttcgtcatcgtcatcctgttggccatcatccagg

SEQ ID NO: 18281 - DNA, 254 bp, Homo sapiens
  MAP TO AF061032.1; EXPRESSED IN LUNG, SIGNAL = 1.6; EXPRESSED IN FETAL LIVER, SIGNAL = 1.8; EXPRESSED IN BRAIN, SIGNAL = 1.2; EXPRESSED IN HELA, SIGNAL = 1.4; EXPRESSED IN PLACENTA, SIGNAL =   2; EXPRESSED IN ADULT LIVER, SIGNAL = 1.5; SWISSPROT HIT: P07987, EVALUE 1.50e+00; EST_HUMAN HIT: BE962176.2, EVALUE 1.30e+00
tcagaggtatgcactcaggaacagggcatttggtgtccatttgctccttgctaaagacagtttccactggtctgactgagctgtgttatgtgcaatgccctgcctgctctggaacttgctggaatgttccatggaataataggaggcatgcagagggccacactgttcagtcctggcagaccagtttgcccagtatagaggatcctgctcccttagcctagagctgtgggcagagcttgcctctgcctgggcat

SEQ ID NO: 18282 - DNA, 290 bp, Homo sapiens
  MAP TO AC008747.4; EXPRESSED IN HELA, SIGNAL = 0.8; EXPRESSED IN FETAL LIVER, SIGNAL = 0.35; EXPRESSED IN PLACENTA, SIGNAL = 0.73; EXPRESSED IN ADULT LIVER, SIGNAL = 0.66; NT HIT: gi14766700, EVALUE 2.00e-51; SWISSPROT HIT: P47172, EVALUE 5.00e-01; EST_HUMAN HIT: AW450464.1, EVALUE 7.00e-83
gttgggaatcaagatgggaaaacaaggaattatcaacaaagaaggatatttataaggaagattcactccaaacagtaacaatagaaaaagttttaaaacaaagttatgaattttcaaattctaccaagaatttggaacacatagaaaagttggaagggaagcctggaattcatgtagaacatttcagaccagcaactctcacctctagagaaagccccactggggacagttacaaatatgacacatttagaatcacctttcattcaaagtctactctttctgaaccataa

SEQ ID NO: 18283 - DNA, 265 bp, Homo sapiens
  MAP TO AF020801.1; EXPRESSED IN ADULT LIVER, SIGNAL = 0.9; EXPRESSED IN HEART, SIGNAL = 1.2; EXPRESSED IN BRAIN, SIGNAL = 0.79; EXPRESSED IN FETAL LIVER, SIGNAL = 0.84; NT HIT: AJ229041.1, EVALUE 0.00e+00
agtttatgtattgaagaacctgggccgtttgacccacggagtggttctcaatctggatttggctgattgggcactcatgttgcaggttaacatgctcctcggttttctgacctcctagaagttggcagctggatccagaagcttcaacagcctcaggttcagcctcctgggctggcggattgtaggtgagtctgtgttctttcacatgcctgttggctccttgtttttgatgttggcagatgtgatgcacattgcctagatccat

SEQ ID NO: 18284 - DNA, 83 bp, Homo sapiens
  MAP TO AC006272.1; EXPRESSED IN BRAIN, SIGNAL =   1; EXPRESSED IN PLACENTA, SIGNAL = 0.92; EXPRESSED IN BONE MARROW, SIGNAL = 0.68; EXPRESSED IN ADULT LIVER, SIGNAL = 0.85; EXPRESSED IN HEART, SIGNAL = 1.1; EST_HUMAN HIT: BE962940.2, EVALUE 1.50e+00; NT HIT: D86601.1, EVALUE 2.50e-01
tcttccgacctgaccaatcagaacacaccgaaacagaaaatggctgcgcccacgctgcctcgttcttctaaaccacacgaaag

SEQ ID NO: 18285 - DNA, 150 bp, Homo sapiens
  MAP TO AC004211.1; EXPRESSED IN ADULT LIVER, SIGNAL = 2.6; EXPRESSED IN BRAIN, SIGNAL = 1.4; EXPRESSED IN LUNG, SIGNAL =  12; EXPRESSED IN FETAL LIVER, SIGNAL =   3; EXPRESSED IN BONE MARROW, SIGNAL = 4.5; NT HIT: gi14782099, EVALUE 3.00e-79; EST_HUMAN HIT: BE744806.1, EVALUE 5.00e-79; SWISSPROT HIT: Q08345, EVALUE 1.00e-24
ctgccggccctggtcccggaagaactcccccgcgttctcgatgacctgctcgtcggtgagctgcccaaagggctgggccctacagagcatcagcacctcccacagggtcacaccaaaggcccacacgtcactcgcagtcgtgaacttccc

SEQ ID NO: 18286 - DNA, 231 bp, Homo sapiens
  MAP TO AC026796.2; EXPRESSED IN HEART, SIGNAL = 1.7; EXPRESSED IN BRAIN, SIGNAL = 1.1; EXPRESSED IN FETAL LIVER, SIGNAL = 1.9; EXPRESSED IN BONE MARROW, SIGNAL = 1.2; EXPRESSED IN PLACENTA, SIGNAL = 1.8; EXPRESSED IN ADULT LIVER, SIGNAL = 1.4; SWISSPROT HIT: O33845, EVALUE 6.00e+00; NT HIT: AF325707.1, EVALUE 8.30e-01; EST_HUMAN HIT: H26466.1, EVALUE 3.10e-01
atcaaagggtacctcctctgcgaagacttccctggtctgacaccaaaaatgctgatattggagttgtcagccgaaagaaagggaccagaatattctcaaggagcaatttttaaagcttcccctcccctactccttgctaccttccaactcatgttactgaatgtgcttccagaaagcatctctgaaggttttatgcatgaagagtttgtgctgggtcttttgccttttgaa

SEQ ID NO: 18287 - DNA, 110 bp, Homo sapiens
  MAP TO AC007013.1; EXPRESSED IN ADULT LIVER, SIGNAL = 4.7; EXPRESSED IN HEART, SIGNAL = 5.1; EXPRESSED IN LUNG, SIGNAL = 6.9; EXPRESSED IN BRAIN, SIGNAL = 4.7; EXPRESSED IN PLACENTA, SIGNAL = 3.8; EST_HUMAN HIT: H22319.1, EVALUE 1.30e-01
ctaaaattttccattctcctggtacgatgtaggattgtacttcactccccccttgcagttaggggtacacaggtagcactcgtcagccaagggaatgtctatgatctctt

SEQ ID NO: 18288 - DNA, 403 bp, Homo sapiens
  MAP TO AF241733.1; EXPRESSED IN HEART, SIGNAL = 1.3; EXPRESSED IN ADULT LIVER, SIGNAL = 1.1; EXPRESSED IN LUNG, SIGNAL = 1.5; EXPRESSED IN BRAIN, SIGNAL = 1.6; EXPRESSED IN PLACENTA, SIGNAL = 1.3; SWISSPROT HIT: P50830, EVALUE 1.90e+00; NT HIT: M61846.1, EVALUE 5.90e+00; EST_HUMAN HIT: AW859466.1, EVALUE 8.70e+00
tctccctggaagccagtgagggaggagggaagcaggatagacaaaggggagaagccaagcaagggttgatttcaggccacgtcctcacagcctcagctgatgcagaagtggagctctgggtttttcttcttttgtaccagtcagtcattgataagggcccccttggaagacataaattcccaggcacttctgactccccgtggcagcaagcaaagaagctccaggaacccctgggcaatctccagagtctttactgtgtgtcatcagaaacaagagcccatataagccaggaaggggctagtaaaaaagatcataggtctagagggagtaccgagagcacacaagatgggtacaaaaaatacactggaatgatatttaacaaatttgtgattttcattgagag

SEQ ID NO: 18289 - DNA, 207 bp, Homo sapiens
  MAP TO AC010280.5; EXPRESSED IN ADULT LIVER, SIGNAL = 2.1; EXPRESSED IN HEART, SIGNAL =   3; EXPRESSED IN LUNG, SIGNAL = 1.4; EXPRESSED IN BONE MARROW, SIGNAL = 2.4; EXPRESSED IN PLACENTA, SIGNAL = 2.3; SWISSPROT HIT: P07598, EVALUE 1.10e+00
atggtactgcacagaaggagcagttttactgagacaataggagctttgggtacctgtgtgaatgtggtcacaccaagttactgcttcaaagaacaagaaacgaatgctgtgagaactgcagagaccacagcctatagtggtattccccaaatgggcctgatcagaagactcatttgggggcagttgtttaataatttagattcccag

SEQ ID NO: 18290 - DNA, 155 bp, Homo sapiens
  MAP TO AC000953.1; EXPRESSED IN ADULT LIVER, SIGNAL = 0.67; EXPRESSED IN BRAIN, SIGNAL = 0.88; EXPRESSED IN BONE MARROW, SIGNAL = 0.5; EXPRESSED IN PLACENTA, SIGNAL = 0.86; NT HIT: gi14781268, EVALUE 4.00e-82; SWISSPROT HIT: Q9Z0E8, EVALUE 6.00e-19; EST_HUMAN HIT: AL557809.1, EVALUE 5.00e-82
gtttggcaggaagaacgttctcttcgcaaccatggctgtacagactggcttcagcttcctgcagattttctccatcagctgggagatgttcactgtgttatttgtcatcgtgggcatgggccagatctccaactatgtggtagccttcatactag

SEQ ID NO: 18291 - DNA, 498 bp, Homo sapiens
  MAP TO AL021366.1; EXPRESSED IN LUNG, SIGNAL =  62; EXPRESSED IN FETAL LIVER, SIGNAL =  41; EXPRESSED IN HELA, SIGNAL =  76; EXPRESSED IN BRAIN, SIGNAL = 8.5; EXPRESSED IN ADULT LIVER, SIGNAL =  24; NT HIT: gi14782850, EVALUE 0.00e+00; SWISSPROT HIT: P23358, EVALUE 2.00e-80; EST_HUMAN HIT: BI597638.1, EVALUE 0.00e+00
ttaactagctgggcattccacagcaccactgttgatgtcatctatgatgtcatgagggtggtggccatcaacattacagcccatagactgggcagtccccggaatctctttaatggttccagagagttctctggctaaggatcggtgccgcatctgtcgagcaatgttgacgatctcatcaaaagtgatattcccattgtgtttaatgtttttctgtttctttctgtctcttggtggtttcttgagggctttgatgatcggggcagaggcagaaggcaccacctcaatctgggcctgtctgttctcaatggtcagtttcactgtaatcctcaggcccttccagtcacccgttgccttggcaatgtcatcaccaaccttttttggagacagacccagggggccgatcttgggggccagggcagaagtggcaccgacttcacctctggtgcacctcaggtatacgaccttgatctcgttggggtcgaacttcggtggcat

SEQ ID NO: 18292 - DNA, 96 bp, Homo sapiens
  MAP TO AC008554.6; EXPRESSED IN ADULT LIVER, SIGNAL = 5.9; EXPRESSED IN BRAIN, SIGNAL = 5.2; EXPRESSED IN PLACENTA, SIGNAL = 7.3; EST_HUMAN HIT: BG426448.1, EVALUE 5.00e-47; NT HIT: gi14769113, EVALUE 6.00e-15; SWISSPROT HIT: Q03924, EVALUE 1.00e-04
gtattgttgtctctaacccagacctgatcacctggctacagcaaggaaaagaaactttgaccatgaagagacaggtgatgattgccaaacacacag

SEQ ID NO: 18293 - DNA, 251 bp, Homo sapiens
  MAP TO AC016398.5; EXPRESSED IN FETAL LIVER, SIGNAL = 1.9; EXPRESSED IN BONE MARROW, SIGNAL = 0.76; EXPRESSED IN ADULT LIVER, SIGNAL = 1.4; EXPRESSED IN LUNG, SIGNAL = 1.2; EXPRESSED IN BRAIN, SIGNAL = 1.1; SWISSPROT HIT: P47955, EVALUE 5.00e-20; EST_HUMAN HIT: BG528330.1, EVALUE 1.00e-28; NT HIT: gi4506668, EVALUE 2.00e-26
ctgaggcagcagtggtggaagtggcaggacctcctgcttgtgcggtgcaggctgctggagccatctaccaacccctgcattgcaaaggaggctgccgatattgacactggccagggcttttgcaaagaagctaggccaaaagggctcgacagttacagcagctgctttaatgaggttattgaatttatcctccgtgatggtcacctcattgctttgcagaatgagggcccagtagatgcagacaatcttgg

SEQ ID NO: 18294 - DNA, 119 bp, Homo sapiens
  MAP TO AF022794.1; EXPRESSED IN BONE MARROW, SIGNAL = 2.9; EXPRESSED IN ADULT LIVER, SIGNAL = 1.7; EXPRESSED IN LUNG, SIGNAL = 2.7; EXPRESSED IN HELA, SIGNAL =   7; EXPRESSED IN FETAL LIVER, SIGNAL = 3.9; EXPRESSED IN BRAIN, SIGNAL = 2.4; EXPRESSED IN PLACENTA, SIGNAL = 2.6; SWISSPROT HIT: P09866, EVALUE 7.90e+00; EST_HUMAN HIT: BI488743.1, EVALUE 2.00e-03; NT HIT: AL163267.2, EVALUE 8.00e-61
cttggccaggtgatcaagattgacaacatcagtgataagccgtgttgataccatgtgccccagatatggtgtgatgagaagggcacttcctctctgtgacattctttcccaagacccat

SEQ ID NO: 18295 - DNA, 195 bp, Homo sapiens
  MAP TO AC007162.1; EXPRESSED IN BRAIN, SIGNAL = 6.7; EXPRESSED IN BONE MARROW, SIGNAL =   3; EXPRESSED IN PLACENTA, SIGNAL = 6.1; EXPRESSED IN ADULT LIVER, SIGNAL = 6.2; NT HIT: X97187.1, EVALUE 1.00e-106; SWISSPROT HIT: Q99758, EVALUE 7.00e-32; EST_HUMAN HIT: AU140108.1, EVALUE 1.00e-105
gtgtacgagcagcgggtgcccctcctggccgtggacaggctctccctcgcggtgcagaaaggggagtgcttcggcctgctgggcttcaatggagccgggaagaccacgactttcaaaatgctgaccggggaggagagcctcacttctggggatgcctttgtcgggggtcacagaatcagctctgatgtcggaaag

SEQ ID NO: 18296 - DNA, 317 bp, Homo sapiens
  MAP TO AL109802.6; EXPRESSED IN ADULT LIVER, SIGNAL = 0.81; EXPRESSED IN FETAL LIVER, SIGNAL = 0.67; EXPRESSED IN BONE MARROW, SIGNAL = 1.3; EXPRESSED IN PLACENTA, SIGNAL = 0.83; NT HIT: gi14778388, EVALUE 5.00e-86; SWISSPROT HIT: P27738, EVALUE 1.30e+00; EST_HUMAN HIT: BG769287.1, EVALUE 5.00e-47
agatggctgagcgattccatcatgtcactgtgctccagatatacttctgtgactggcagcaggcctgggagcggagggagagcttgtacgctcaccatgcccaggtggagaaactggccaggaagatggccctgcggcgcgcctttactcactggaaacactgtatcctttcagatactcaggctgtccattgcctcagccaggacagcatgagctcagcagcatgtgaaacgaaagtcatgagatacatgggaaacaattgccaaacgattcaaaacagccttatctctgttgacagtcttaaaatttttgtttaa

SEQ ID NO: 18297 - DNA, 195 bp, Homo sapiens
  MAP TO AF260011.1; EXPRESSED IN ADULT LIVER, SIGNAL = 1.1; EXPRESSED IN FETAL LIVER, SIGNAL = 1.1; EXPRESSED IN PLACENTA, SIGNAL = 1.4; NT HIT: AL163248.2, EVALUE 1.00e-106; SWISSPROT HIT: O94822, EVALUE 1.00e-31; EST_HUMAN HIT: BI871013.1, EVALUE 1.00e-105
ctgatgggtgaggtaagtgcttaactgcagcatccagttccgccactgctgaacagctactcctactcttttcccactttctactattattgaacccagtggataatttgaaggcagttgtattataagttcaataactatgtcctcaatagtataagtagccattacctctcgagtagtagctcgagctttaac

SEQ ID NO: 18298 - DNA, 153 bp, Homo sapiens
  MAP TO AC008427.5; EXPRESSED IN ADULT LIVER, SIGNAL = 6.9; EXPRESSED IN HEART, SIGNAL = 8.4; EXPRESSED IN LUNG, SIGNAL = 5.6; EXPRESSED IN FETAL LIVER, SIGNAL = 8.6; EXPRESSED IN BRAIN, SIGNAL = 6.1; EXPRESSED IN BONE MARROW, SIGNAL = 6.4; EXPRESSED IN PLACENTA, SIGNAL = 8.1; NT HIT: gi4585863, EVALUE 6.00e-81; SWISSPROT HIT: P16499, EVALUE 2.00e-24
gatgagcatttctgtgactttgtggacatcctcacagagtacaagaccaagaacatcttggcttcccccataatgaatgggaaggatgtggtggccataatcatggctgtgaataaagtggatggatcccacttcaccaagagagatgaagag

SEQ ID NO: 18299 - DNA, 166 bp, Homo sapiens
  MAP TO AC005597.1; EXPRESSED IN ADULT LIVER, SIGNAL = 0.55; EXPRESSED IN HELA, SIGNAL = 0.63; NT HIT: AJ311550.1, EVALUE 2.30e+00; SWISSPROT HIT: P26292, EVALUE 4.40e+00
acacacagtacgattgcacttcctaccccctggaagtgaagcacggccacccgacttgctttggccaaagaaggtaaacattatggcttctgagtggaagtatttagttactggcacaagacttcccaatgctctccctgccactgtcaccgtgatggtccagaag

SEQ ID NO: 18300 - DNA, 215 bp, Homo sapiens
  MAP TO AC068885.2; EXPRESSED IN BONE MARROW, SIGNAL = 3.2; EXPRESSED IN PLACENTA, SIGNAL = 5.2; EXPRESSED IN HEART, SIGNAL = 5.4; EXPRESSED IN ADULT LIVER, SIGNAL = 4.3; EXPRESSED IN BRAIN, SIGNAL = 5.2; EXPRESSED IN FETAL LIVER, SIGNAL = 6.8
cttgtggctacaagtcatggctgatacttggtagaccatgagataggccaggttttccctccactggcctctgtcttgcattcctaaggatgtgaagagggccacgcagtggtgaagtgcagatgtgtgcagccaagcactgccattgtccagttctttgaccctaatcaagtttttcaactcccaagttattccattttcccatttgtaaaacc

SEQ ID NO: 18301 - DNA, 121 bp, Homo sapiens
  MAP TO AC005952.1; EXPRESSED IN BONE MARROW, SIGNAL = 2.8; EXPRESSED IN PLACENTA, SIGNAL = 3.4; EXPRESSED IN ADULT LIVER, SIGNAL =   3; EXPRESSED IN HELA, SIGNAL = 3.4; EXPRESSED IN BRAIN, SIGNAL = 3.4; EXPRESSED IN FETAL LIVER, SIGNAL = 2.3; NT HIT: AF343666.1, EVALUE 2.60e-02; SWISSPROT HIT: P97737, EVALUE 3.50e+00
ggtgtggcatttcctggcaggtgctctgggtgtgggagaaccaaaagggggccttggtgcttctctgttccaggccagagttcaggaatccagacaagccaggtcagcccaggaggagcaa

SEQ ID NO: 18302 - DNA, 487 bp, Homo sapiens
  MAP TO AC010328.4; EXPRESSED IN FETAL LIVER, SIGNAL = 1.4; EXPRESSED IN BONE MARROW, SIGNAL = 0.72; EXPRESSED IN ADULT LIVER, SIGNAL = 0.51; SWISSPROT HIT: P03360, EVALUE 6.00e-12; NT HIT: gi14760973, EVALUE 0.00e+00; EST_HUMAN HIT: BI035379.1, EVALUE 1.00e-60
ctagagtaggtacacacgagaactagtaaatacttgttacttctacactttggcatttctgtgaagtccacctggagatcttcaaagggggctgcttcataagcttgtatgccgggcagaatggctgaaccctgcctcgcattgtgctgtcggcaggtaacacaccgctgtgccacggttttggcgagggctgacaattgtgagctgtagaagtaccagcctaacaactgttcaagtgactcctgacctagatgggtggtttcatgcacctccagtacaactgtggctcctagcagctgtggcacaggtactgtcctatttggtgaccggatccttccttcttccatcacctgtcttccctctgcctggagaaagtctttttcttctttagaataagtaggtacaaggtcaggtgcttgagggagcaagggggctgtgactgatgcccagtagggtgtggatgttgcttttcgagcttctgagtcag

SEQ ID NO: 18303 - DNA, 312 bp, Homo sapiens
  MAP TO AL031393.1; EXPRESSED IN BONE MARROW, SIGNAL = 0.74; EXPRESSED IN PLACENTA, SIGNAL = 1.4; EXPRESSED IN ADULT LIVER, SIGNAL = 1.2; EXPRESSED IN FETAL LIVER, SIGNAL = 1.3; SWISSPROT HIT: P51523, EVALUE 3.00e-24; NT HIT: gi4507998, EVALUE 1.00e-03; EST_HUMAN HIT: BE693383.1, EVALUE 1.00e-38
actttcctctgaagcttttcccacatttactacactcataaatgttctcttttgtatgagttctccaatgtttagtgggactgggcttctcatcagaggctttcccatgttcactgcactgaggtttctcacttgtgtgaattctttgatatataaggctggacgtagtacatttaatacctttataaaatgcttgtctaatgtgtgttttttcatgtctaataagatgatatgaactcttaaaggcttttggacatttgtcacatacaaatggtttctctcctgtatgagttcgttgatgtttaatcagag

SEQ ID NO: 18304 - DNA, 197 bp, Homo sapiens
  MAP TO AF172277.1; EXPRESSED IN HELA, SIGNAL = 1.6; EXPRESSED IN FETAL LIVER, SIGNAL = 1.5; EXPRESSED IN PLACENTA, SIGNAL = 1.5; EXPRESSED IN ADULT LIVER, SIGNAL = 1.1; SWISSPROT HIT: P35331, EVALUE 2.00e-27; NT HIT: U55258.1, EVALUE 1.00e-107; EST_HUMAN HIT: BE257386.1, EVALUE 1.00e-107
cttttcctggacccgtaatgggactcattttgacatcgataaagaccctctggtcaccatgaagcctggcacaggaacgctcataattaacatcatgagcgaagggaaagctgagacctatgaaggagtctatcagtgtacagcaaggaacgaacgcggagctgcagtttctaataacattgttgtccgcccatcca

SEQ ID NO: 18305 - DNA, 294 bp, Homo sapiens
  MAP TO AC006293.1; EXPRESSED IN BRAIN, SIGNAL =   3; EXPRESSED IN FETAL LIVER, SIGNAL = 1.7; EXPRESSED IN BONE MARROW, SIGNAL = 3.6; EXPRESSED IN PLACENTA, SIGNAL = 2.4; EXPRESSED IN ADULT LIVER, SIGNAL = 2.9; EXPRESSED IN HEART, SIGNAL = 2.4; SWISSPROT HIT: P43632, EVALUE 2.00e-39; NT HIT: gi14762113, EVALUE 0.00e+00; EST_HUMAN HIT: BI911888.1, EVALUE 2.00e-67
gtctatatgggaaaccttctctctcagcccagccgggccccacggttcaggcaggagagaatgtgaccttgtcctgcagctcccggagcttgtttgacatttaccatctatccagggaggcagaggccggtgaacttaggctcactgcggtgctgagggtcaatggaacattccaggccaacttccctctgggccctgtgacccacggagggaactacagatgcttcggctctttccgtgccctgccccacgcgtggtcagacccgagtgacccactgcccgtttctgtcacag

SEQ ID NO: 18306 - DNA, 99 bp, Homo sapiens
  MAP TO AC010649.5; EXPRESSED IN ADULT LIVER, SIGNAL = 0.92; EXPRESSED IN FETAL LIVER, SIGNAL = 1.1; EXPRESSED IN PLACENTA, SIGNAL = 0.68; NT HIT: gi14765151, EVALUE 5.00e-03; SWISSPROT HIT: P08547, EVALUE 8.00e+00; EST_HUMAN HIT: BG390562.1, EVALUE 1.00e-10
acactgcgtggcctttcgtgtctggcttctctcactgagcacgaggtcctcacagttcatccacgctgtggcctgggtcagaggctccttccttttcat

SEQ ID NO: 18307 - DNA, 230 bp, Homo sapiens
  MAP TO AL118556.2; EXPRESSED IN LUNG, SIGNAL =  11; EXPRESSED IN HELA, SIGNAL = 8.1; EXPRESSED IN FETAL LIVER, SIGNAL =   9; EXPRESSED IN BONE MARROW, SIGNAL = 7.4; EXPRESSED IN ADULT LIVER, SIGNAL = 6.7; EXPRESSED IN HEART, SIGNAL = 9.8; NT HIT: AL163246.2, EVALUE 7.00e-29; SWISSPROT HIT: P22004, EVALUE 1.80e-01; EST_HUMAN HIT: W23062.1, EVALUE 4.00e-53
tcagaggtcttcatggcagaccttcccatcacaggccaggagacctaggaggaaaaagtggtttcgttggctaggcccagggtccctgtgctgtgtgcagcctagagacttggtgccctgctttccagctgctccagctgcagctgaaaggggccaacatagagctggggccgtggcttcagagggtgcaagcctccagccttggcagcttccacgtggtgttgagcctt

SEQ ID NO: 18308 - DNA, 210 bp, Homo sapiens
  MAP TO AL121877.13; EXPRESSED IN FETAL LIVER, SIGNAL = 1.4; EXPRESSED IN BONE MARROW, SIGNAL = 1.2; EXPRESSED IN PLACENTA, SIGNAL = 1.1; EXPRESSED IN HEART, SIGNAL = 1.3; EXPRESSED IN ADULT LIVER, SIGNAL = 1.1; NT HIT: AF022789.1, EVALUE 1.00e-106; SWISSPROT HIT: O75317, EVALUE 1.00e-32; EST_HUMAN HIT: BF984548.1, EVALUE 1.00e-101
cagactcagagttctttgagtatctgatgtcaacccgtagaattcttcaatagcttgtgtatctattttttctacaatgtcgtcatcaaacaacaaccaaaaatcatgactcttaactatcgcaatataatggcctcgattgggaccacttccacagtgaaccacaacagcaacaaggtcgtacattctgtctggattggtggcatcacc

SEQ ID NO: 18309 - DNA, 127 bp, Homo sapiens
  MAP TO AC010972.2; EXPRESSED IN ADULT LIVER, SIGNAL = 1.2; EXPRESSED IN HEART, SIGNAL = 2.4; EXPRESSED IN BRAIN, SIGNAL = 1.7; EXPRESSED IN FETAL LIVER, SIGNAL =   2; EXPRESSED IN PLACENTA, SIGNAL = 1.4; NT HIT: X57147.1, EVALUE 7.00e-43; SWISSPROT HIT: Q07243, EVALUE 3.50e+00; EST_HUMAN HIT: AA527594.1, EVALUE 1.00e-36
ttttccttttggtcctgttcctcttggtccctattatagaacaccgaggttgccaggtttaataatgcctctagattttgttcatggtccaggactttcttttggagctttcttctgatatctgtgg

SEQ ID NO: 18310 - DNA, 382 bp, Homo sapiens
  MAP TO AC008427.5; EXPRESSED IN PLACENTA, SIGNAL = 6.5; EXPRESSED IN HEART, SIGNAL = 6.6; EXPRESSED IN LUNG, SIGNAL = 9.9; EXPRESSED IN ADULT LIVER, SIGNAL = 6.4; EXPRESSED IN BRAIN, SIGNAL = 6.3; EXPRESSED IN BONE MARROW, SIGNAL =   7; SWISSPROT HIT: P50443, EVALUE 1.00e-59; NT HIT: gi13643619, EVALUE 0.00e+00; EST_HUMAN HIT: AW882393.1, EVALUE 2.00e-53
agtgcggaggatgacacaaaatatagaaaaacaaaccccaacaagtaggcctatttcagtacttagcagtgcagaggacagcatagtaacaaaccagataactgtatccattctactaatactccacattttgggaagatccctaaatttacgaagggctccccgtagatttacaattgtgatcacaccaaggacacttttttgaagggaatagaacaaaggagctattactaggaggaccaacaaaagaaccagggctgttaccacaccagaaagctgagtatggcagcctgttgattctttaaccaatgtctttgcaagagctgcactagtagtaaaacagtggaagaaggaagggatgatattacaaaagccaatggca

SEQ ID NO: 18311 - DNA, 168 bp, Homo sapiens
  MAP TO AC009265.5; EXPRESSED IN BONE MARROW, SIGNAL = 0.58; EXPRESSED IN PLACENTA, SIGNAL = 0.9; EXPRESSED IN ADULT LIVER, SIGNAL = 0.8; EXPRESSED IN HELA, SIGNAL = 0.68; EXPRESSED IN BRAIN, SIGNAL = 0.86; NT HIT: AJ298105.1, EVALUE 2.00e-04
agttcccctaagtcagaagagcaagttttggaggaaccattagaggcagcttctaagtgccccagtccttccagtcccctttgtccagggccccctccagctgcaccatcagctcctccagctccaccatctccaaagctccccactgcccagacttcactcctaccc

SEQ ID NO: 18312 - DNA, 109 bp, Homo sapiens
  MAP TO AF031076.1; EXPRESSED IN ADULT LIVER, SIGNAL = 0.76; EXPRESSED IN FETAL LIVER, SIGNAL = 1.9; EXPRESSED IN PLACENTA, SIGNAL = 0.78; EXPRESSED IN BONE MARROW, SIGNAL = 0.7; EST_HUMAN HIT: AI678356.1, EVALUE 1.00e-54; SWISSPROT HIT: P13398, EVALUE 8.00e+00
ccaggcagggagaacgggactgcacctgggtgggggaggaccaaaagaagcccagctgcttctggaagatcattgggagtctcttctggaagaccaggggctcttggag

SEQ ID NO: 18313 - DNA, 126 bp, Homo sapiens
  MAP TO AL121915.8; EXPRESSED IN BRAIN, SIGNAL = 0.92; EXPRESSED IN BONE MARROW, SIGNAL = 1.4; EXPRESSED IN PLACENTA, SIGNAL =   1; EXPRESSED IN ADULT LIVER, SIGNAL = 1.2; NT HIT: AE003952.1, EVALUE 4.20e-01; EST_HUMAN HIT: BG827339.1, EVALUE 6.20e-01; SWISSPROT HIT: P49907, EVALUE 6.00e+00
tgcctggcactggaaaggcagcaacgaacaagacaaggtttccactctcatggagacaaccaacaagccaaccaatgaacagaccgtttcatgtcatggtgagcgcaaaggaaacgctaacacagg

SEQ ID NO: 18314 - DNA, 207 bp, Homo sapiens
  MAP TO AC008784.5; EXPRESSED IN BONE MARROW, SIGNAL = 0.93; EXPRESSED IN ADULT LIVER, SIGNAL = 0.7; EXPRESSED IN FETAL LIVER, SIGNAL = 0.65; SWISSPROT HIT: P21414, EVALUE 7.00e-05; NT HIT: AJ278581.1, EVALUE 1.00e-17; EST_HUMAN HIT: BF823210.1, EVALUE 1.00e-12
tcagtcgggaatactggggcttaatctgttggagagggttgttctataccaagggtccttccgtaggtatttccgatgggaggttctgcctggcagcaattttggcctcagcatctgcccgatggtttccttctgccttttcttcttcacctttttgatggctttggcagtgtaagactgccagctccttgggtttttgcactgcat

SEQ ID NO: 18315 - DNA, 139 bp, Homo sapiens
  MAP TO AC010219.4; EXPRESSED IN BONE MARROW, SIGNAL = 0.85; EXPRESSED IN PLACENTA, SIGNAL = 1.3; EXPRESSED IN HEART, SIGNAL = 1.3; EXPRESSED IN LUNG, SIGNAL = 1.2; EXPRESSED IN ADULT LIVER, SIGNAL = 1.1; EXPRESSED IN BRAIN, SIGNAL =   1; EXPRESSED IN HELA, SIGNAL = 0.85; SWISSPROT HIT: Q13183, EVALUE 7.70e+00; NT HIT: AF289666.1, EVALUE 4.70e-01; EST_HUMAN HIT: AW269220.1, EVALUE 1.80e-01
ataaaactgtgctcctagggacaaagttgctgatccagggtcacaaccagcaagtgacaaagctgccacccaagactagtcggcatggcctcaagggctgctttattcctctctcctgtgctacctccctcaaggacaa

SEQ ID NO: 18316 - DNA, 175 bp, Homo sapiens
  MAP TO AC025467.3; EXPRESSED IN BONE MARROW, SIGNAL =   1; EXPRESSED IN PLACENTA, SIGNAL = 1.1; EXPRESSED IN ADULT LIVER, SIGNAL = 1.1; EXPRESSED IN HEART, SIGNAL = 2.3; EXPRESSED IN LUNG, SIGNAL = 1.4; EXPRESSED IN FETAL LIVER, SIGNAL = 1.2; EXPRESSED IN BRAIN, SIGNAL = 1.3; SWISSPROT HIT: Q9T1R3, EVALUE 1.10e+00; EST_HUMAN HIT: BI117539.1, EVALUE 1.50e-02
ctgattgtttcagtagctgctccaccagctgcaggcctgaggaagccacccggatacttcccactccagtttgcccatctgtaaaacgggcagacccgacagcccagccaggacaattgaggcgatatctcagaaacatgggcagagtcccacagagagttctgtccagggcttt

SEQ ID NO: 18317 - DNA, 173 bp, Homo sapiens
  MAP TO AL022325.1; EXPRESSED IN LUNG, SIGNAL = 3.3; EXPRESSED IN BONE MARROW, SIGNAL = 1.1; EXPRESSED IN PLACENTA, SIGNAL = 0.75; EXPRESSED IN ADULT LIVER, SIGNAL = 1.1; NT HIT: gi11418320, EVALUE 1.00e-60; SWISSPROT HIT: O75648, EVALUE 3.00e-26; EST_HUMAN HIT: BG741017.1, EVALUE 1.00e-92
ctctttcttctgaagcacatgatgaagtctattctcagcagcgattttctttacaaactctttcgttaatccccccagagggaagatggttctcctcagggcatcctgggaaacctggctgagaaagaaggtctggtctttaaagctgtcagctgcctggaggagttttaccg

SEQ ID NO: 18318 - DNA, 204 bp, Homo sapiens
  MAP TO AD000090.1; EXPRESSED IN HEART, SIGNAL = 4.3; EXPRESSED IN ADULT LIVER, SIGNAL = 3.3; EXPRESSED IN BRAIN, SIGNAL = 2.7; EXPRESSED IN BONE MARROW, SIGNAL = 2.4; EXPRESSED IN PLACENTA, SIGNAL = 3.3; NT HIT: gi9910227, EVALUE 1.80e-01; SWISSPROT HIT: Q28462, EVALUE 8.00e-03; EST_HUMAN HIT: BG984860.1, EVALUE 4.20e+00
cagagcggggattgccagcaggacgcagaagaaggatacgacagcgagcagtaaatagtctctttctggaggacacaagggcatcagggtgactggttgcattggggcgagcagctgcactgggatgaagggctgcatggggatgagtggctgcatcggggtgaccagggacttcaagtccctggggctcattgcagtagccat

SEQ ID NO: 18319 - DNA, 328 bp, Homo sapiens
  MAP TO AC009286.31; EXPRESSED IN LUNG, SIGNAL = 5.1; EXPRESSED IN FETAL LIVER, SIGNAL = 2.4; EXPRESSED IN BRAIN, SIGNAL = 4.6; EXPRESSED IN PLACENTA, SIGNAL = 2.8; EXPRESSED IN HEART, SIGNAL = 3.2; EXPRESSED IN ADULT LIVER, SIGNAL = 3.9; NT HIT: AL163246.2, EVALUE 6.00e-95; SWISSPROT HIT: P08563, EVALUE 2.70e-01; EST_HUMAN HIT: R24918.1, EVALUE 2.00e-43
taactgtcacggggactaggaagaagtatgattggaaaattgatgacaaagaaatttggggaaaagatatgtggatggacctctctgagtggtcaaaaactgtgaaagtatttgtatcccatgtgagcgctcaccaacgggtgacctcagcagaggaggattttaataatcaagaggagagtatgaccagttctgtgaacaccacgcatcctctttccccagccacccctgtcatcgcccaatgggcccatgagggaagtggccatgctggcaggaatggaggttacacatgggctcatcaacatggacttccactctccaaggctga

SEQ ID NO: 18320 - DNA, 217 bp, Homo sapiens
  MAP TO AL031600.4; EXPRESSED IN PLACENTA, SIGNAL = 2.6; EXPRESSED IN ADULT LIVER, SIGNAL = 1.7; EXPRESSED IN HEART, SIGNAL = 2.1; EXPRESSED IN FETAL LIVER, SIGNAL = 2.6; SWISSPROT HIT: O70496, EVALUE 1.00e-04; EST_HUMAN HIT: BE777889.1, EVALUE 9.00e-23; NT HIT: AJ001910.1, EVALUE 1.00e-114
tccccacgtgtactgcccatggaagaatctggaggcccccgggtggccctgggatgagggcaggctccagggagccacagcctccagtcctcgtctctatggccacgtcacagctgagccaggcccgcaggccgtccctgcggtgctgggagaagcccttacccaccacgcccatggcgatgaagaccgggatctcgtggatcgtgtaggccatttt

SEQ ID NO: 18321 - DNA, 362 bp, Homo sapiens
  MAP TO AC005785.1; EXPRESSED IN ADULT LIVER, SIGNAL = 3.3; EXPRESSED IN HEART, SIGNAL = 2.9; EXPRESSED IN FETAL LIVER, SIGNAL = 2.1; EST_HUMAN HIT: AL559959.1, EVALUE 0.00e+00; SWISSPROT HIT: O43823, EVALUE 2.00e-41; NT HIT: gi5031578, EVALUE 0.00e+00
ctctcccggtcctgtatgccctccccaccgccgccgctcccgcccctgcctccttccttggacatcatgtccaaacgctggttgatcttggcaatgagggagtcggaattgtcggtgcatggctctgggccgtaagaggccatgtgcatggcaggggccccggccgccaggccgccatcattggccttggcggcctcccacgaggctgggccgtagctgtaggttgcgcctgtggtgacactggtgttctgggcgccatagtaattgtagttttcataacctgtcacagggggaggagccaagtcagacttcagcagccacgaggcctgtccatggtggacacaaccggggaggggcacccg

SEQ ID NO: 18322 - DNA, 121 bp, Homo sapiens
  MAP TO AF181449.1; EXPRESSED IN HELA, SIGNAL = 1.2; EXPRESSED IN BRAIN, SIGNAL = 1.5; EXPRESSED IN FETAL LIVER, SIGNAL = 1.3; EXPRESSED IN BONE MARROW, SIGNAL = 1.6; EXPRESSED IN PLACENTA, SIGNAL = 1.2; EXPRESSED IN ADULT LIVER, SIGNAL = 1.4; NT HIT: AF223391.1, EVALUE 2.00e-18; EST_HUMAN HIT: BE162737.1, EVALUE 2.00e-34; SWISSPROT HIT: Q9JIB6, EVALUE 1.20e+00
attgtgaacttttgctccaagaactactgcaggaacataccaggaaagctgagagaatccacagaccctttgaaggtactggatcactactgcaggctccctgagatgctgctgaaaaact

SEQ ID NO: 18323 - DNA, 373 bp, Homo sapiens
  MAP TO AC006479.2; EXPRESSED IN BRAIN, SIGNAL = 5.3; EXPRESSED IN LUNG, SIGNAL =   8; EXPRESSED IN FETAL LIVER, SIGNAL = 7.1; EXPRESSED IN BONE MARROW, SIGNAL = 4.4; EXPRESSED IN PLACENTA, SIGNAL = 6.7; EXPRESSED IN ADULT LIVER, SIGNAL = 4.9; EXPRESSED IN HEART, SIGNAL = 7.7; NT HIT: gi11419972, EVALUE 1.00e-130; EST_HUMAN HIT: BI761429.1, EVALUE 1.00e-130; SWISSPROT HIT: P50176, EVALUE 5.10e+00
gacacagtggccatcaggaaggtgaaggaggtttttggggcagggtcatgagacatgtggtcatcctcttcacccacaaaggggacttagggagccaggccctggatgactatgtagcaaacatggacaacctcagcctgaaggacctggtgcaggaatgtgagagaaggtactgtgccttcaacaaccgggctgccggggaggagcagaggcagcagcaggcagagctcctggctgcgatcgagaggctggggagggagcgagagggctccttctacagcaataacctcttcctggatgcccagctgctccagagaggcagggctggggcctgccaagaagactacaggcagtacctggccaaggtggaaca

SEQ ID NO: 18324 - DNA, 245 bp, Homo sapiens
  MAP TO AL109865.36; EXPRESSED IN BRAIN, SIGNAL = 4.6; EXPRESSED IN LUNG, SIGNAL = 6.4; EXPRESSED IN FETAL LIVER, SIGNAL =   5; EXPRESSED IN BONE MARROW, SIGNAL = 5.4; EXPRESSED IN PLACENTA, SIGNAL = 5.2; EXPRESSED IN ADULT LIVER, SIGNAL = 5.1; EXPRESSED IN HEART, SIGNAL = 3.7; NT HIT: gi13569898, EVALUE 0.00e+00; SWISSPROT HIT: Q9P804, EVALUE 5.50e-02
atgaaatcaaaagatctcaaatgcatcagtacattggcatccattttggtcaccttaatattaccaagatttttctctccttcttcaagaatatcatcactcttttccttttccttactgtccaccaccactttcaatttgtttaaatggcagttttcctgaatcagtgtcacagaattttcattcaagtcattgattgtaactttgactgcatttccaagatgttttgcccactgtaatcccat

SEQ ID NO: 18325 - DNA, 200 bp, Homo sapiens
  MAP TO AC007934.7; EXPRESSED IN FETAL LIVER, SIGNAL = 2.9; EXPRESSED IN BRAIN, SIGNAL = 1.2; EXPRESSED IN PLACENTA, SIGNAL = 2.3; EXPRESSED IN ADULT LIVER, SIGNAL = 1.3; NT HIT: AB026898.1, EVALUE 1.00e-14; EST_HUMAN HIT: BI019104.1, EVALUE 2.00e-14; SWISSPROT HIT: P57564, EVALUE 6.40e-01
agaataacgacaagaaaaaagtctatacatgttcagtaaagacaaaactatccagtttttccccgaatattttcagtctacagttgttgaatcaggagcctgtcataattctgacagacaaaattccagacagtgtaatcctgaatgttgaaattctgaaagatcaaaatcctgaaaatataattctggaaaaaataatt

SEQ ID NO: 18326 - DNA, 286 bp, Homo sapiens
  MAP TO AL118558.2; EXPRESSED IN BRAIN, SIGNAL = 7.2; EXPRESSED IN BONE MARROW, SIGNAL = 9.1; EXPRESSED IN PLACENTA, SIGNAL = 6.4; EXPRESSED IN ADULT LIVER, SIGNAL = 7.9; EXPRESSED IN HEART, SIGNAL = 6.8; EXPRESSED IN LUNG, SIGNAL =  11; NT HIT: X15548.1, EVALUE 4.10e+00; EST_HUMAN HIT: AW848047.1, EVALUE 3.90e-01; SWISSPROT HIT: Q14990, EVALUE 3.20e+00
atgccccacttccacctaaaagtggactcgccagccagaagacttcacatcctgcaccgctactcacgtcgatgtttccgcagactagatgctcgcccgctgcggtccttatccctcatcttaaaattggaggaaacctggtgtttagtaacttcctacagcacgagagttcgagaggactcactcacagaggcatgctgcgatttcagcccagctgcatgctgctgctattttggggtagcaagaagcataaaggcaaaactgtactggcttcgtgtctccttcc

SEQ ID NO: 18327 - DNA, 116 bp, Homo sapiens
  MAP TO AC004189.1; EXPRESSED IN ADULT LIVER, SIGNAL = 0.9; EXPRESSED IN BRAIN, SIGNAL = 0.76; EXPRESSED IN PLACENTA, SIGNAL = 0.8; NT HIT: gi14761262, EVALUE 5.00e-59; EST_HUMAN HIT: AI791944.1, EVALUE 7.00e-59; SWISSPROT HIT: P13258, EVALUE 6.00e+00
ctgagaacatcctcatcatctctgggagggtgagtattttcctgtggaaatcacggatcttcttgacaaggtcaggagaaatggcctcaggactcacaaaagtcttcatctcacac

SEQ ID NO: 18328 - DNA, 180 bp, Homo sapiens
  MAP TO AL109827.8; EXPRESSED IN ADULT LIVER, SIGNAL = 2.1; EXPRESSED IN PLACENTA, SIGNAL =   2; EXPRESSED IN HEART, SIGNAL =   1; EXPRESSED IN FETAL LIVER, SIGNAL = 2.3; NT HIT: gi4503012, EVALUE 5.00e-97; EST_HUMAN HIT: AA314558.1, EVALUE 8.00e-97; SWISSPROT HIT: Q99829, EVALUE 3.00e-30
ctgtcctagggaacactcagcaccccctaggaagtcatcatccctcagctctggcgtcttgttgtctatgtcatagattccaaagcgtagcttctggactgtctcaaagcggtactcaagctgtagagtcttggagaactcagggcttgagcagttccgcacccgttcagtccggccaag

SEQ ID NO: 18329 - DNA, 96 bp, Homo sapiens
  MAP TO AC007795.1; EXPRESSED IN HEART, SIGNAL = 1.6; EXPRESSED IN ADULT LIVER, SIGNAL = 1.7; EXPRESSED IN LUNG, SIGNAL = 2.7; EXPRESSED IN BRAIN, SIGNAL = 1.7; EXPRESSED IN PLACENTA, SIGNAL =   1; NT HIT: AF290886.1, EVALUE 2.00e-05; EST_HUMAN HIT: AA460054.1, EVALUE 4.40e-01
cttgtgactctcctcctctggctgtccatctgtgtccatgatgacatcctttataataaaatggtaaacatgcttccgtgagttctgtgagccatc

SEQ ID NO: 18330 - DNA, 198 bp, Homo sapiens
  MAP TO AC010345.4; EXPRESSED IN PLACENTA, SIGNAL = 0.65; EXPRESSED IN ADULT LIVER, SIGNAL = 0.89; EXPRESSED IN BRAIN, SIGNAL = 0.82; EXPRESSED IN FETAL LIVER, SIGNAL = 0.54; SWISSPROT HIT: P26954, EVALUE 8.40e-01; NT HIT: AP001514.1, EVALUE 1.10e-02
ctagctgactgtgagtttcattactactgactgttctgcatccatgggcaccatcctcagggatgtcagcaccatcccagtggtatgcagtgggggtagactatctgccgcctttggcctggactcagtttcactaaaggaaagagtttgaggtggtccaagaaccctaggtgtttgcaggcacaaaagcagcaaggc

SEQ ID NO: 18331 - DNA, 520 bp, Homo sapiens
  MAP TO AC002096.1; EXPRESSED IN PLACENTA, SIGNAL = 1.2; EXPRESSED IN ADULT LIVER, SIGNAL = 0.78; EXPRESSED IN BRAIN, SIGNAL = 1.7; NT HIT: gi14738501, EVALUE 0.00e+00; EST_HUMAN HIT: BE698735.1, EVALUE 0.00e+00; SWISSPROT HIT: Q92574, EVALUE 8.00e-81
ttagctgtgttcatgatgagtctcattgtagtccatgatatgtagctgtccaacactgtccggggtcgggggagacgggtgagggccatctaggttcaggggaatcttggcttccacacccaagtctttgcccagttctgtctttaggctctcagaaaggctactggtcatgccgtcctcatcacactggctctcgctcttattacgaaataactctcgagccttcatacccaggaagctttttgaactgggaagtgagcccacagtggtggggatgctggcagacgcttctcccatagtcgtctcccaccgactgctgaatgggcctgccctctggtgtgggggtttctctggggtagaaagctcgctgctgctgctgctgctgcctccaccacctctgcttccactactgccccgggcgctgctgggcctgggggtcttggtctcaccgttgtggccagatgcctcttcattgtgccctaccatggaatctgagcacccgtcattacaacagtcaagc

SEQ ID NO: 18332 - DNA, 108 bp, Homo sapiens
  MAP TO AC008600.4; EXPRESSED IN LUNG, SIGNAL = 6.8; EXPRESSED IN FETAL LIVER, SIGNAL = 2.6; EXPRESSED IN HELA, SIGNAL =   4; EXPRESSED IN HEART, SIGNAL = 5.2; EXPRESSED IN ADULT LIVER, SIGNAL = 5.2; NT HIT: AJ006345.1, EVALUE 4.00e-16; EST_HUMAN HIT: BI030775.1, EVALUE 6.00e-16
atgtgcctggtaaagcagcaggcactcaatgccagcctgtcaaaggcagccagaagggcagctgtaccctgcaaagccacaggagaagagctacctaagtccatggag

SEQ ID NO: 18333 - DNA, 77 bp, Homo sapiens
  MAP TO AF270510.1; EXPRESSED IN LUNG, SIGNAL = 1.3; EXPRESSED IN BRAIN, SIGNAL = 0.95; EXPRESSED IN BONE MARROW, SIGNAL = 1.1; EXPRESSED IN ADULT LIVER, SIGNAL = 1.1; EST_HUMAN HIT: AU148232.1, EVALUE 3.30e-01; SWISSPROT HIT: P48643, EVALUE 8.20e+00; NT HIT: Z73302.1, EVALUE 3.60e+00
tgtggaaaccaaattggtgccagtctgtttaattgcattgaatgcattatcaaatttaatcttttcatataacaagc

SEQ ID NO: 18334 - DNA, 186 bp, Homo sapiens
  MAP TO AC011358.5; EXPRESSED IN BRAIN, SIGNAL =   1; EXPRESSED IN PLACENTA, SIGNAL = 0.85; EXPRESSED IN ADULT LIVER, SIGNAL = 0.94; EXPRESSED IN HEART, SIGNAL = 0.95; EST_HUMAN HIT: AW583582.1, EVALUE 2.40e-01; SWISSPROT HIT: P56690, EVALUE 6.50e-01; NT HIT: AF242377.1, EVALUE 1.70e-01
ctgctttgacagagagggctttcctcctgggtgcacagctgggtcagccttcctggcctctcctgtgttggtatggcgatgtgagtgagtactctggccactggagagtggggacaagtgatgggtgtacttccaggggtcaccctgcaaggcctcccatgcgtaattccatatcctcttctccat

SEQ ID NO: 18335 - DNA, 430 bp, Homo sapiens
  MAP TO AC008806.4; EXPRESSED IN PLACENTA, SIGNAL = 1.1; EXPRESSED IN HEART, SIGNAL =   1; EXPRESSED IN ADULT LIVER, SIGNAL = 0.83; EXPRESSED IN FETAL LIVER, SIGNAL = 1.4; EXPRESSED IN BRAIN, SIGNAL = 0.86; EST_HUMAN HIT: AF150239.1, EVALUE 3.00e-12; SWISSPROT HIT: P52742, EVALUE 5.00e-61; NT HIT: AB058732.1, EVALUE 0.00e+00
gagtaagggctatgcgtctgctgaaggcttttccacactgattacattcatagggtttctctccagtgtgaatcctctgatgttgattaaggtgagcactctgtctgaaggctttattacattctttacattcatatggtttctcacctgtgtgaattctctgatgttcaacaaggaaggcataacggctaaaggccttcccacattcattgcacgcaaacggtttctctccagtgtggatcctctgatgttgagcaaggtgagcactctgtctgaaagctttgttacattccttacattcataaggtttctccccaatatgagttctttgatgttcactgagaaagaagtcgtggctaaaggcttttccacagtcattgcatgcatatggtttttctccactgtgaattctctgaggttgagtaaagaa

SEQ ID NO: 18336 - DNA, 346 bp, Homo sapiens
  MAP TO AC012082.6; EXPRESSED IN BRAIN, SIGNAL =   1; EXPRESSED IN BONE MARROW, SIGNAL =   1; EXPRESSED IN PLACENTA, SIGNAL = 1.2; EXPRESSED IN ADULT LIVER, SIGNAL = 1.3; EST_HUMAN HIT: BI046658.1, EVALUE 1.90e+00; SWISSPROT HIT: Q10573, EVALUE 2.00e+00; NT HIT: gi14746094, EVALUE 1.30e+00
cctctttgaatatcaccccctacacttatgtggttcaaaatccgcacaaccacatgcagcaactgtgcttcatggcattgaaacttgctgtcctctgtttctggtactattccccctaattctggaatggcctgacttctcacctcaaatgtcatttaataatgatgaaaactgtgatgataataatgataatggtgatgataatgataatgaagctcagtgcctaatgtcctcctcaactcattcaccacccttctgtgtctttctctgtggctcaggatatcatcctccactgaatacatcttctagattcccttatcatgaattccgattggatgttctgata

SEQ ID NO: 18337 - DNA, 261 bp, Homo sapiens
  MAP TO AC009429.3; EXPRESSED IN FETAL LIVER, SIGNAL = 6.7; EXPRESSED IN HELA, SIGNAL =   2; EXPRESSED IN HEART, SIGNAL = 3.4; EXPRESSED IN ADULT LIVER, SIGNAL = 0.5; SWISSPROT HIT: P09279, EVALUE 1.50e+00; NT HIT: AL163285.2, EVALUE 2.40e-01
ctggaaagagtgtatcttttcatatctgtaggcatcagcggacaagactagccccttggagccttgggtgagagaaagcgagccagccattctagagggccctgtcttcaaggccagatgtgaaggggcttcacagctcctcactccaccctgacacttggctctgaggaagccctcaggctgctcagggtcccaggtgtgtgcctccacctggggctcaaccgctgagctctgtgactgcttcgctgtgccactgtgcat

SEQ ID NO: 18338 - DNA, 109 bp, Homo sapiens
  MAP TO AC010345.4; EXPRESSED IN BONE MARROW, SIGNAL = 1.3; EXPRESSED IN PLACENTA, SIGNAL = 1.3; EXPRESSED IN HEART, SIGNAL = 1.1; EXPRESSED IN ADULT LIVER, SIGNAL = 2.1; EXPRESSED IN BRAIN, SIGNAL = 1.6; EXPRESSED IN FETAL LIVER, SIGNAL = 1.1; EST_HUMAN HIT: H38717.1, EVALUE 1.00e-04; NT HIT: AF129756.1, EVALUE 5.50e+00
atggcttccctgggctcaagctggagactgggagggcttaccaggctcttcctgctgctccttctgcttttatatttcatgctgctccccaaatctgttctggctctaa

SEQ ID NO: 18339 - DNA, 345 bp, Homo sapiens
  MAP TO AL049849.1; EXPRESSED IN BONE MARROW, SIGNAL = 1.5; EXPRESSED IN PLACENTA, SIGNAL = 1.3; EXPRESSED IN ADULT LIVER, SIGNAL = 1.2; EXPRESSED IN LUNG, SIGNAL = 1.9; EXPRESSED IN HELA, SIGNAL = 1.7; EXPRESSED IN FETAL LIVER, SIGNAL = 1.5; NT HIT: gi16165974, EVALUE 0.00e+00; EST_HUMAN HIT: BE890756.1, EVALUE 7.00e-65; SWISSPROT HIT: Q13072, EVALUE 2.00e-06
acttgctgctgctgccaccattgcgccgacaccaaaggaatcagcgctgctgtcaccttccatgcacctgcccaccctccaaggatcctaccacttggcctccatgggtaccctcctattgctcctgttgagctgccgtctccatcaccgtggctgccacaaccgcagaagatgaatcacagagctgtgccatcttcaggctccaacctccagctcaccacaggggactcctccttcatcagtctggcttggagcagctgggcagacaatgccagaaaaacctacaataggatgcagaaagtggcagtgttagagcctcaccctgtcatgctgcccactgggtga

SEQ ID NO: 18340 - DNA, 220 bp, Homo sapiens
  MAP TO AC009087.4; EXPRESSED IN BRAIN, SIGNAL = 0.85; EXPRESSED IN BONE MARROW, SIGNAL = 0.5; EXPRESSED IN ADULT LIVER, SIGNAL = 0.99; EXPRESSED IN PLACENTA, SIGNAL = 0.77; SWISSPROT HIT: P49075, EVALUE 1.20e-01; NT HIT: M69197.1, EVALUE 1.00e-118; EST_HUMAN HIT: AL525141.1, EVALUE 2.00e-11
caaaccatcttttggttaaacctgtgaaggggtcatctattccagaattttcagccagctcatttgctagggtggtgaggccttgtagagccttggtagtggttccatcgggagctgtgttatttgggatcaaagtacaacattgggctctgatgattacacaaactctgccgttttctgctaatgtcatgtcaagagctatcctgttttcccaggccat

SEQ ID NO: 18341 - DNA, 237 bp, Homo sapiens
  MAP TO AL096806.1; EXPRESSED IN ADULT LIVER, SIGNAL = 3.8; EXPRESSED IN HEART, SIGNAL = 3.9; EXPRESSED IN LUNG, SIGNAL =   7; EXPRESSED IN BONE MARROW, SIGNAL = 5.1; EXPRESSED IN BRAIN, SIGNAL = 4.4; EXPRESSED IN PLACENTA, SIGNAL = 3.3; EST_HUMAN HIT: BG750178.1, EVALUE 8.00e-02; SWISSPROT HIT: P07625, EVALUE 7.40e-01; NT HIT: AL096806.1, EVALUE 0.00e+00
cttcagtgccagaaccagggagacctgggaggacccaacactcgctgtgatgtgcaacctaggcaggaggaggctagcaccccaacggcggcgtgaccagtgctgctcgctgctgcctccagtggacacatgtgagagccacgctgacccctccggacctcagggagctttgggcctgtgcgggtgcctgcagtgtgttcccggggactgtcagaaaccaacggatgacaaaaacag

SEQ ID NO: 18342 - DNA, 140 bp, Homo sapiens
  MAP TO AF192304.2; EXPRESSED IN FETAL LIVER, SIGNAL = 1.7; EXPRESSED IN PLACENTA, SIGNAL = 1.7; EXPRESSED IN HEART, SIGNAL = 1.7; EXPRESSED IN ADULT LIVER, SIGNAL = 1.1; EXPRESSED IN BRAIN, SIGNAL = 1.3; SWISSPROT HIT: Q09463, EVALUE 2.00e+00; NT HIT: AF342999.1, EVALUE 4.70e-01
cacgtataggcatagtgcaagcttcagcctcacagttagccctaacagaaggttggtgatgcagacgcacagacacacaggcacacgcatgcgcgtgaacacacatacacaccccacggtgcaggactctcggctgcctg

SEQ ID NO: 18343 - DNA, 130 bp, Homo sapiens
  MAP TO AC006522.5; EXPRESSED IN BRAIN, SIGNAL = 1.7; EXPRESSED IN FETAL LIVER, SIGNAL = 1.8; EXPRESSED IN BONE MARROW, SIGNAL = 1.8; EXPRESSED IN PLACENTA, SIGNAL = 2.3; EXPRESSED IN ADULT LIVER, SIGNAL = 1.3; EST_HUMAN HIT: BF243553.1, EVALUE 6.40e-01; SWISSPROT HIT: P52450, EVALUE 4.60e+00; NT HIT: AL161555.2, EVALUE 1.10e-01
agtccacctggacttgattgtcttgggaaatggcaccacctcctcagaggtagtggagcaaatacaagaatacaagagggagaaaacaatggaggacaggaatttggccagagatattctctgctcctga

SEQ ID NO: 18344 - DNA, 182 bp, Homo sapiens
  MAP TO AC011311.11; EXPRESSED IN ADULT LIVER, SIGNAL = 0.69; EXPRESSED IN FETAL LIVER, SIGNAL = 0.99; EXPRESSED IN PLACENTA, SIGNAL = 0.88; EST_HUMAN HIT: BI464158.1, EVALUE 5.00e-98; SWISSPROT HIT: P09118, EVALUE 1.50e+00; NT HIT: AE001059.1, EVALUE 6.40e-01
ttagtgctcattgccttcttccaccaaatctgaaggcggggggatgaggtctcggggattcatcctggctactaggcagacatcatagctgtcatgcatgaggacgttgatggctacaacattccactggttttcccatgggtccagttccaatatttctttggagataacctcatggcgat

SEQ ID NO: 18345 - DNA, 183 bp, Homo sapiens
  MAP TO AL096853.12; EXPRESSED IN BONE MARROW, SIGNAL = 3.4; EXPRESSED IN PLACENTA, SIGNAL =   2; EXPRESSED IN ADULT LIVER, SIGNAL = 2.8; EXPRESSED IN LUNG, SIGNAL = 2.3; EXPRESSED IN FETAL LIVER, SIGNAL = 2.7; EXPRESSED IN BRAIN, SIGNAL = 2.7; EXPRESSED IN HELA, SIGNAL = 2.4; EST_HUMAN HIT: AU131184.1, EVALUE 2.40e-01; SWISSPROT HIT: Q9PKU9, EVALUE 4.30e+00; NT HIT: U46551.1, EVALUE 1.60e-01
gttaatattgagaactttgcgtccagcggccgcggcacggtgtacccgggcctcgattccagaagcgctttcagaaccgctgtggcgtgcctgtctttgagcagctgctcggagggcagactgttgattgagtcaacggattcaacttccattgatttagttagctggctctttcggaaatga

SEQ ID NO: 18346 - DNA, 169 bp, Homo sapiens
  MAP TO AC007229.1; EXPRESSED IN BRAIN, SIGNAL = 1.6; EXPRESSED IN PLACENTA, SIGNAL = 2.3; EXPRESSED IN ADULT LIVER, SIGNAL =   2; EXPRESSED IN HEART, SIGNAL = 2.5; EXPRESSED IN FETAL LIVER, SIGNAL = 1.7; EST_HUMAN HIT: BF092977.1, EVALUE 6.00e-88; SWISSPROT HIT: P39054, EVALUE 1.00e-25; NT HIT: gi14759745, EVALUE 4.00e-88
gcagaaaacgaggatggggcccaggagaacaccttctccatggacccccaactggagcggcaggtggagaccattcgcaacctggtggactcatacgtggccatcatcaacaagtccatccgcgacctcatgccaaagaccatcatgcacctcatgatcaacaatgtga

SEQ ID NO: 18347 - DNA, 273 bp, Homo sapiens
  MAP TO AL109865.36; EXPRESSED IN PLACENTA, SIGNAL = 4.4; EXPRESSED IN ADULT LIVER, SIGNAL = 3.9; EXPRESSED IN LUNG, SIGNAL = 4.8; NT HIT: gi13636928, EVALUE 0.00e+00; EST_HUMAN HIT: BI766439.1, EVALUE 1.00e-123; SWISSPROT HIT: Q06587, EVALUE 5.10e-02
actgcagcgaggcaagaaacaacagattgaaaatggtagtggagcagaagataatggtgacagttcacactgcagtaatgcatccacacatagcaatcaggaagcaggccctagtaacaaacggaccaaaacatctgatgattctgggctagagcttgataataacaatgcagcaatggcaattgatccagtaatggatggtgctagtgaaattgaattagtattcaggcctcatcccacacttatggaaaaagatgacagtgcacagacgag

SEQ ID NO: 18348 - DNA, 107 bp, Homo sapiens
  MAP TO AC005547.1; EXPRESSED IN BRAIN, SIGNAL = 1.4; EXPRESSED IN BONE MARROW, SIGNAL =   1; EXPRESSED IN HEART, SIGNAL = 2.9; EXPRESSED IN ADULT LIVER, SIGNAL = 1.2; SWISSPROT HIT: P48123, EVALUE 4.60e+00; EST_HUMAN HIT: BF128446.1, EVALUE 2.00e+00
gccaccgtggctgaccacccaagcatccgagtcaataagtctttcactgagaaagacctgatgccccgcacaatctcgccccaactgggagggttggcacaggcttt

SEQ ID NO: 18349 - DNA, 90 bp, Homo sapiens
  MAP TO AC002102.1; EXPRESSED IN BONE MARROW, SIGNAL = 0.52; EXPRESSED IN PLACENTA, SIGNAL = 0.58; EXPRESSED IN ADULT LIVER, SIGNAL = 0.52; EXPRESSED IN BRAIN, SIGNAL = 0.52; EST_HUMAN HIT: BF807250.1, EVALUE 4.00e-41; NT HIT: gi4503638, EVALUE 1.00e-06
ctacggttcatgtccttcctggaacctcagaatgccaccttctttggaaataggatcacagcggatgtcatgagtgacgatgaggtcacc

SEQ ID NO: 18350 - DNA, 269 bp, Homo sapiens
  MAP TO AF274858.1; EXPRESSED IN LUNG, SIGNAL = 2.5; EXPRESSED IN BRAIN, SIGNAL = 2.6; EXPRESSED IN BONE MARROW, SIGNAL = 1.9; EXPRESSED IN ADULT LIVER, SIGNAL = 1.7; EXPRESSED IN FETAL LIVER, SIGNAL = 1.5; SWISSPROT HIT: Q16720, EVALUE 1.00e-37; EST_HUMAN HIT: BF933654.1, EVALUE 1.00e-25; NT HIT: gi15314119, EVALUE 8.00e-94
atccgggtggtgaaagcgttccgtagctcgctctatgaaggcctggagaaaccagaatccaagacctccattcacaacttcatggccacgcccgagtttctgatcaatgactacacccacaacatcccgctcattgacgacacggacgtggacgagaacgaggagcgcctccgggcccccccgcccccgtcccccaaccagaacaacaacgccatagacagcggcatctacctgaccacgcatgtcaccaagtcagctacctcttcagt

SEQ ID NO: 18351 - DNA, 226 bp, Homo sapiens
  MAP TO AC004699.1; EXPRESSED IN FETAL LIVER, SIGNAL = 0.39; EXPRESSED IN LUNG, SIGNAL = 0.7; EXPRESSED IN ADULT LIVER, SIGNAL = 0.59; SWISSPROT HIT: P31944, EVALUE 1.00e-38; EST_HUMAN HIT: BE940739.1, EVALUE 1.00e-124; NT HIT: gi11426521, EVALUE 1.00e-124
caattccaggaagagctggaaaaattccagcaggccatcgattcccgggaagatcccgtcagttgtgccttcgtggtactcatggctcacgggagggaaggcttcctcaagggagaagatggggagatggtcaagctggagaatctcttcgaggccctgaacaacaagaactgccaggccctgcgagctaagcccaaggtgtacatcatacaggcctgtcgaggag

SEQ ID NO: 18352 - DNA, 267 bp, Homo sapiens
  MAP TO AC011400.4; EXPRESSED IN BRAIN, SIGNAL = 0.69; EXPRESSED IN LUNG, SIGNAL = 0.61; EXPRESSED IN FETAL LIVER, SIGNAL = 0.45; EXPRESSED IN ADULT LIVER, SIGNAL = 0.66; EXPRESSED IN HEART, SIGNAL = 1.5; EST_HUMAN HIT: BE271316.1, EVALUE 0.00e+00; SWISSPROT HIT: O76093, EVALUE 3.00e-39; NT HIT: gi16160181, EVALUE 0.00e+00
ctaggcagggtgtgtgggccggatccgacgggacctcttggtcaccgtcgtgtacttgaagggcttctgaagctccggctgccccttggggtagcgcttcatgaaatgcacgtcctgctggttctcccgggtcttggggcccttccgcggccgccccttcttggtgaagcccacgtaccagccggagtacttagccgacatcagggccgtgtagttgttctccagaaccttctcgatgaacacacactccttgctggtgccatcggg

SEQ ID NO: 18353 - DNA, 210 bp, Homo sapiens
  MAP TO AC010206.8; EXPRESSED IN LUNG, SIGNAL = 0.95; EXPRESSED IN BRAIN, SIGNAL = 0.96; EXPRESSED IN BONE MARROW, SIGNAL = 0.89; EXPRESSED IN ADULT LIVER, SIGNAL = 1.1; EXPRESSED IN HEART, SIGNAL = 1.1; EXPRESSED IN FETAL LIVER, SIGNAL = 0.85; EST_HUMAN HIT: BF311730.1, EVALUE 4.30e+00; SWISSPROT HIT: Q9PB63, EVALUE 8.30e-01; NT HIT: AL163267.2, EVALUE 7.50e-01
ctagctgatgaaggtggctattgtccctgccttgaaatacaagtcctggtcaactgccttgttctcaacttttccccaggccacttggttggagggacagtcaagccccctttcgttgtccttcttgttctgtctcagggagatattgctgatggaatggtggttaggagcccatgtgttggagtcaggcataatggagtcatcatacat

SEQ ID NO: 18354 - DNA, 115 bp, Homo sapiens
  MAP TO AC012152.12; EXPRESSED IN BRAIN, SIGNAL = 1.1; EXPRESSED IN HELA, SIGNAL =   1; EXPRESSED IN FETAL LIVER, SIGNAL = 1.1; EXPRESSED IN BONE MARROW, SIGNAL = 0.85; EXPRESSED IN PLACENTA, SIGNAL = 1.2; EXPRESSED IN ADULT LIVER, SIGNAL = 1.3; EXPRESSED IN LUNG, SIGNAL = 0.99; EST_HUMAN HIT: AL524401.1, EVALUE 5.50e-01; SWISSPROT HIT: P16713, EVALUE 2.10e+00; NT HIT: AE000347.1, EVALUE 1.50e+00
gttacctgccctgtactcacctattgatgatctaactgcccagaatgagatctatcatagtcaggacatcttcacctttgtacaacctggagaaacaaagcgaggtggtgtttga

SEQ ID NO: 18355 - DNA, 202 bp, Homo sapiens
  MAP TO AL109940.18; EXPRESSED IN BONE MARROW, SIGNAL = 1.5; EXPRESSED IN PLACENTA, SIGNAL = 1.2; EXPRESSED IN ADULT LIVER, SIGNAL = 1.1; EXPRESSED IN HEART, SIGNAL = 1.1; EXPRESSED IN FETAL LIVER, SIGNAL =   1; SWISSPROT HIT: Q16676, EVALUE 1.40e+00; NT HIT: U09191.1, EVALUE 1.80e-01
tggagcaaacacagtcacgtaggcatgctccccggaacgggggctgggagtggagactcgctgtgtgcctgccataattccgtctgcgtcgaggaagggggcggcttgggaagcagctgggcacctgtgccacagccgccacagactcagcctctgctgccattttaggaaaaagcaggtattcatcgcgatctctctgcat

SEQ ID NO: 18356 - DNA, 213 bp, Homo sapiens
  MAP TO AC010422.6; EXPRESSED IN ADULT LIVER, SIGNAL = 0.36; EXPRESSED IN FETAL LIVER, SIGNAL = 0.55; EXPRESSED IN BRAIN, SIGNAL = 0.73; EXPRESSED IN LUNG, SIGNAL = 0.65; EXPRESSED IN BONE MARROW, SIGNAL = 0.4; EST_HUMAN HIT: BF314039.1, EVALUE 1.00e-101; SWISSPROT HIT: P49366, EVALUE 3.00e-27; NT HIT: gi7108341, EVALUE 1.00e-101
gcgcatggaaggttccctggaacgggaggcgccagcgggggggcgctggccgccgtgctaaagcacagctcgacgttgccgcccgaaagcacccaggtccggggctacgacttcaaccgcggtgtgaattaccgcgcactgctggaggccttcggcaccaccggcttccaagcaaccaacttcgggcgcgctgtacagcaagtcaatgccatg

SEQ ID NO: 18357 - DNA, 261 bp, Homo sapiens
  MAP TO AC004144.1; EXPRESSED IN ADULT LIVER, SIGNAL = 0.64; EXPRESSED IN BRAIN, SIGNAL = 0.6; NT HIT: gi14767154, EVALUE 0.00e+00; EST_HUMAN HIT: AI024401.1, EVALUE 0.00e+00; SWISSPROT HIT: P46531, EVALUE 4.00e-01
ttggtctccagtggccaggtggacaccgggcagcagcaggcacggactgagctggtctccaccttcctgtggatccacagccagctggaggctgaatgcctggtggggactagtgtggccccagcccaggctctgcccagcccaggacccccgtccccaccgacgctgtaccccctggccagcccagacctgcaggccctgctggaacactactcggagctgctggtgcaggccgtgcggaggaaggcacgggggcactga

SEQ ID NO: 18358 - DNA, 123 bp, Homo sapiens
  MAP TO AC005903.3; EXPRESSED IN BRAIN, SIGNAL = 2.4; EXPRESSED IN HEART, SIGNAL = 2.2; EXPRESSED IN ADULT LIVER, SIGNAL = 2.2; SWISSPROT HIT: Q02388, EVALUE 1.00e-18; NT HIT: gi14736240, EVALUE 4.00e-63; EST_HUMAN HIT: BF870818.1, EVALUE 1.00e-60
ctccttgcctggggggccctgttcgcctgagtcccccttggggcctcgacgccgttcgggcacaggcaggaagctaccagagctctcatcccaggtctccacgatctcccgcagggcagatgc

SEQ ID NO: 18359 - DNA, 274 bp, Homo sapiens
  MAP TO AC016943.7; EXPRESSED IN BONE MARROW, SIGNAL =   1; EXPRESSED IN PLACENTA, SIGNAL = 0.74; EXPRESSED IN ADULT LIVER, SIGNAL = 0.95; EXPRESSED IN LUNG, SIGNAL = 0.86; EXPRESSED IN FETAL LIVER, SIGNAL = 0.76; EST_HUMAN HIT: BI553063.1, EVALUE 1.00e-105; SWISSPROT HIT: Q15032, EVALUE 2.00e-10; NT HIT: gi14728796, EVALUE 1.00e-127
aggtaatcctgtccctgtgcatctttctggtggtcgtactccaggggcaacagagatggctcagggagaacatctgggagtcgacagagcagctcagaaaatgaactcaagtggtctgaccaccaaagggcctggagcagcacagactccgacagttccaaccgcaatctaaagcccgccatgaccaagacggcgagttttgggggcatcacggtgctgaccaggggtgacagcacttccagtactaggagtaccgggaagctgtccaaagcag

SEQ ID NO: 18360 - DNA, 139 bp, Homo sapiens
  MAP TO AC009123.6; EXPRESSED IN BONE MARROW, SIGNAL = 0.92; EXPRESSED IN ADULT LIVER, SIGNAL = 0.95; EXPRESSED IN HEART, SIGNAL = 0.92; EXPRESSED IN LUNG, SIGNAL = 1.9; EXPRESSED IN BRAIN, SIGNAL = 1.1; EXPRESSED IN FETAL LIVER, SIGNAL = 0.88; EST_HUMAN HIT: BE244179.1, EVALUE 2.00e-72; SWISSPROT HIT: P28284, EVALUE 5.90e+00; NT HIT: gi13627310, EVALUE 1.00e-72
ctctgagttctggggctgggcctctggcagagtcagtgcgtctcgccagctgcacatgaaagagaggtcagggacgtcgctcagaccaagggggccggtcagaaacaatgcagggcggagggagctggggaagtccatc

SEQ ID NO: 18361 - DNA, 105 bp, Homo sapiens
  MAP TO AL035402.7; EXPRESSED IN BRAIN, SIGNAL = 3.2; EXPRESSED IN HELA, SIGNAL = 4.1; EXPRESSED IN BONE MARROW, SIGNAL = 2.9; EXPRESSED IN HEART, SIGNAL = 2.6; EXPRESSED IN ADULT LIVER, SIGNAL = 3.7; EXPRESSED IN FETAL LIVER, SIGNAL = 3.8; EST_HUMAN HIT: BI667310.1, EVALUE 1.00e-35; SWISSPROT HIT: Q9NR31, EVALUE 3.00e-13; NT HIT: AY008268.1, EVALUE 8.00e-36
atgttgacccaatctgtcatctttgagcatgtgaagaagagtggttttgcctgcgttgtccaaaccgaaaaatacaagttttccaaatttcttgtagagtcctag

SEQ ID NO: 18362 - DNA, 188 bp, Homo sapiens
  MAP TO AC000060.1; EXPRESSED IN LUNG, SIGNAL = 0.57; EXPRESSED IN BRAIN, SIGNAL = 0.44; EXPRESSED IN ADULT LIVER, SIGNAL = 0.59; EXPRESSED IN PLACENTA, SIGNAL = 0.63; EXPRESSED IN HEART, SIGNAL = 1.4; SWISSPROT HIT: Q90643, EVALUE 1.90e+00
ccagacatacgctcaggtggcctagaccccagaattccttgcccagattgccctgatctgctccagggataggcagatatctttcctggattctgtcttccaagggtaggtctcactactagcatggccaccctggggcctaagagtaggccaagaaacagctgtttgggagtggagagagcagtcat

SEQ ID NO: 18363 - DNA, 209 bp, Homo sapiens
  MAP TO AC010300.5; EXPRESSED IN BRAIN, SIGNAL = 1.4; EXPRESSED IN BONE MARROW, SIGNAL = 1.3; EXPRESSED IN ADULT LIVER, SIGNAL = 1.3; EXPRESSED IN PLACENTA, SIGNAL = 1.2; EXPRESSED IN HEART, SIGNAL = 2.9; EST_HUMAN HIT: N59517.1, EVALUE 4.30e+00; NT HIT: gi6753235, EVALUE 1.90e-01; SWISSPROT HIT: P22674, EVALUE 2.40e+00
ctcaggactcctggctttggagaagtcgctgcatggatcggggaccagaggccagagggccgggctgggaagaggagctctccggctggcagcttctccggaaatgaaatcctctgcaccctggaaggcagactcgcacccctggtgcccctacctacctgctggccacacgtggacggccgcatctggcctctcagatgggctgggag

SEQ ID NO: 18364 - DNA, 237 bp, Homo sapiens
  MAP TO AL096870.3; EXPRESSED IN ADULT LIVER, SIGNAL = 0.42; EXPRESSED IN FETAL LIVER, SIGNAL = 0.72; EXPRESSED IN BRAIN, SIGNAL = 0.42; EXPRESSED IN HELA, SIGNAL = 2.2; EST_HUMAN HIT: AA379943.1, EVALUE 1.00e-124; SWISSPROT HIT: Q00139, EVALUE 3.30e-01; NT HIT: gi13385891, EVALUE 1.00e-46
ctttaggttctgcagcacacggcggcgcagcttgcgcgtcacagaggggctggtcaggatggcatcgagcacatgagagccagcgggactttgggcaagggacagaagctgtggtcccgtcaaggcacccagacttcgaagtacaagaccaggagtggagaagtgcagcagatgctggagcagtagagacccaaggactgtcacatcccccaaggctctggctgcggccattgccac

SEQ ID NO: 18365 - DNA, 160 bp, Homo sapiens
  MAP TO AC010398.6; EXPRESSED IN HEART, SIGNAL = 1.2; EXPRESSED IN ADULT LIVER, SIGNAL = 1.7; EXPRESSED IN BRAIN, SIGNAL = 1.8; EXPRESSED IN HELA, SIGNAL = 1.5; EXPRESSED IN FETAL LIVER, SIGNAL = 1.4; EXPRESSED IN PLACENTA, SIGNAL = 1.3; SWISSPROT HIT: O84371, EVALUE 2.60e+00
gctgtgcagagagaatctagagctttgagcttgaggtgggtgccaatggcctgcagggagctgtccatgggtccgatgggccaaaggattatggcgtgggaagtcagcctgatgcagactgaagaagaatcaccggaaacaataaaagttaatgatacag

SEQ ID NO: 18366 - DNA, 194 bp, Homo sapiens
  MAP TO AC008546.5; EXPRESSED IN LUNG, SIGNAL = 0.69; EXPRESSED IN BONE MARROW, SIGNAL = 0.43; EXPRESSED IN ADULT LIVER, SIGNAL = 1.1; EXPRESSED IN FETAL LIVER, SIGNAL = 1.2; NT HIT: AL163268.2, EVALUE 8.00e-10; SWISSPROT HIT: P13393, EVALUE 1.90e+00; EST_HUMAN HIT: BF955216.1, EVALUE 5.00e-15
ctggaaatggcagcttggttttcacgcttcaggctgtcgttggcttgaaggtcaggtttcaccggggacccatcactgtttgccttggaatttgtctgtctcccgctgctatcaaaaacaactttggtgcctgcagttagaggcctgatgatctcaatgttagtctgtggggagttgatacccacaattacagt

SEQ ID NO: 18367 - DNA, 392 bp, Homo sapiens
  MAP TO AL096870.3; EXPRESSED IN ADULT LIVER, SIGNAL = 3.2; EXPRESSED IN HEART, SIGNAL = 2.3; EXPRESSED IN FETAL LIVER, SIGNAL = 3.2; EXPRESSED IN BONE MARROW, SIGNAL = 4.2; EXPRESSED IN PLACENTA, SIGNAL = 3.2; NT HIT: gi14750850, EVALUE 0.00e+00; SWISSPROT HIT: O15321, EVALUE 5.00e-67; EST_HUMAN HIT: AU140435.1, EVALUE 0.00e+00
gttccactgccttaaggatgacagtcgtagggaaccctcgaagttggagctgccagtggttgccaatcctgatactgttgctgggcacaggccatgggccaggggtggaaggcgtgacacactacaaggccggcgaccctgttattctgtatgtcaacaaagtgggaccctaccataaccctcaggaaacttaccactactatcagcttccagtctgctgccctgagaagatacgtcacaaaagccttagcctgggtgaagtgctggatggggaccgaatggctgagtctttgtatgagatccgctttcgggaaaacgtggagaagagaattctgtgccacatgcagctcagttctgcacaggtcagcctctccacattggctatcacgtag

SEQ ID NO: 18368 - DNA, 212 bp, Homo sapiens
  MAP TO AC004206.1; EXPRESSED IN HELA, SIGNAL = 0.82; EXPRESSED IN BONE MARROW, SIGNAL = 0.51; EXPRESSED IN PLACENTA, SIGNAL = 0.49; EXPRESSED IN ADULT LIVER, SIGNAL = 0.7; EXPRESSED IN BRAIN, SIGNAL = 0.59; EXPRESSED IN LUNG, SIGNAL = 0.82; NT HIT: AJ271735.1, EVALUE 2.00e-04; SWISSPROT HIT: P10401, EVALUE 5.60e-01; EST_HUMAN HIT: BG429320.1, EVALUE 3.00e-04
ttataatattctgtgtttttctgtggcacttggttcttgactgaagaaattacaaagtgccaatctgggtctaaatgtaatccattttctgaagttaagtgtcccaaatatttcttctgagttttcactagctgcaatttttcgtcagagacttcatggtctttagcagtcagttgctttaacagttgtacaccatttttttcataggctat

SEQ ID NO: 18369 - DNA, 109 bp, Homo sapiens
  MAP TO AC010423.5; EXPRESSED IN ADULT LIVER, SIGNAL = 1.5; EXPRESSED IN HEART, SIGNAL = 1.4; EXPRESSED IN FETAL LIVER, SIGNAL = 1.3; EXPRESSED IN BRAIN, SIGNAL = 1.6; EXPRESSED IN PLACENTA, SIGNAL = 1.1; SWISSPROT HIT: P55884, EVALUE 6.10e+00
ctgacacatccaacactgcctcctccttctttcttcccactggcccaaattcagtctcagccatgaaacaaagtatttctatccataaatgcaggtaagtttgctgcat

SEQ ID NO: 18370 - DNA, 270 bp, Homo sapiens
  MAP TO AC009509.7; EXPRESSED IN HELA, SIGNAL = 2.9; EXPRESSED IN BONE MARROW, SIGNAL = 1.1; EXPRESSED IN BRAIN, SIGNAL = 1.4; EXPRESSED IN PLACENTA, SIGNAL = 1.4; EXPRESSED IN ADULT LIVER, SIGNAL = 1.4; EST_HUMAN HIT: N24248.1, EVALUE 0.00e+00; NT HIT: AF068296.1, EVALUE 0.00e+00; SWISSPROT HIT: Q05050, EVALUE 1.20e-02
aatactgaagaatgggaaaaaagtaagactgaagcagacatggaagagtatatatgggaaaatagctcatcagaaagaaatatcctggaaacgcttctccagatgaaagctgctgagaaaaatatggaaataaataaagaagagctccttggtactaaagaaattgaagagtacaaaaagtctgttgttagtcttaaaaatgaggaggaaaatgaaaattccatttctcagtacaaagaatccgtgaagagactattaaatgtgacatga

SEQ ID NO: 18371 - DNA, 277 bp, Homo sapiens
  MAP TO AC009145.4; EXPRESSED IN BONE MARROW, SIGNAL = 0.44; EXPRESSED IN ADULT LIVER, SIGNAL = 0.76; EXPRESSED IN HEART, SIGNAL = 1.1; EXPRESSED IN LUNG, SIGNAL = 0.89; EXPRESSED IN BRAIN, SIGNAL = 0.64; EST_HUMAN HIT: AV727590.1, EVALUE 9.50e-02; NT HIT: M55336.1, EVALUE 2.60e-01; SWISSPROT HIT: P25123, EVALUE 3.00e+00
aaagatggcacaaggaacaatggacaggagttactttccgaggtgccgggtcaagaagcctacggtaggaaggcaaaaccctcgccagtgctggcatctggcaacagtgacaatggacacctcgaccatggacacagtcatgggcaaaaggattctgcttgggacccaactgtttctaatcagcctttacgatgggcaaatgcgtcgcctctggttctgcacagctgtgcccaggaggaagctgctcctcctgttccagggcttggctgttctgtga

SEQ ID NO: 18372 - DNA, 430 bp, Homo sapiens
  MAP TO AC008580.5; EXPRESSED IN BRAIN, SIGNAL = 1.9; EXPRESSED IN PLACENTA, SIGNAL = 2.4; EXPRESSED IN BONE MARROW, SIGNAL = 1.3; EXPRESSED IN ADULT LIVER, SIGNAL = 1.8; EXPRESSED IN HELA, SIGNAL = 2.4; EST_HUMAN HIT: BG028830.1, EVALUE 1.00e-105; NT HIT: AL163227.2, EVALUE 1.00e-90; SWISSPROT HIT: Q10358, EVALUE 2.80e+00
caatatggacaataaggtccagggtcaggtggtctcagatgaagaagatgaggaacttgttgggaactggagcaaaggtggttctttttatgttttagcaaagagactggcagcatttttcccctgccctaaagatttgtggaactttgaactggagagaaatgatttagggtatctggtagaagaaatttctaagcagcaaagcattcaaaaggtgacttgggtgctgttaaaagcattctgtttcaaaagggaaacaaagcataaaagttcagaaaagttgcagcctgatgatatagtagaaaagaaaaacccattttttgaaaagaaattcaagctggctgcagaaatttacataagtagcaaggaacctaatgtcaatccccaagaccatagggaaaatgtctccaggccatgtcagagagcttca

SEQ ID NO: 18373 - DNA, 189 bp, Homo sapiens
  MAP TO AF107045.1; EXPRESSED IN FETAL LIVER, SIGNAL = 2.2; EXPRESSED IN BRAIN, SIGNAL =   1; EXPRESSED IN PLACENTA, SIGNAL = 1.5; EXPRESSED IN BONE MARROW, SIGNAL = 1.9; EXPRESSED IN ADULT LIVER, SIGNAL = 1.4; EST_HUMAN HIT: AI580705.1, EVALUE 1.00e-102; NT HIT: gi14765091, EVALUE 1.00e-102; SWISSPROT HIT: P07742, EVALUE 3.00e-32
agcataccagaaattcctgatgacctgaagcaactttataaaactgtgtgggaaatctctcagaaaactgttctcaagatggcagctgagagaggtgctttcattgatcaaagccaatctttgaacatccacattgctgagcctaactatggcaaactcactagtatgcacttctacggctggaagcag

SEQ ID NO: 18374 - DNA, 299 bp, Homo sapiens
  MAP TO AJ251973.1; EXPRESSED IN PLACENTA, SIGNAL = 2.7; EXPRESSED IN ADULT LIVER, SIGNAL = 2.1; EXPRESSED IN HEART, SIGNAL = 3.6; SWISSPROT HIT: P48382, EVALUE 1.40e-01; NT HIT: AJ251973.1, EVALUE 0.00e+00
acaagtcccagccagtagacctcagcttcccctgcttcctgccaaggctctgcccactctgcccatgcccactctgatggggcaccaccactggctgcccatccttgtctttctcttgacacagactggggtgattgcattctctgccaaggaccaggcccagctgaatggcccccagctggtttgctgaagcctgaagccagggtctacaggcaagagcttggggaaggaggatgggctcaaatccttttactatgcgctccccaccacgacatctcagctcttcctccatttctgtc

SEQ ID NO: 18375 - DNA, 126 bp, Homo sapiens
  MAP TO AC004173.1; EXPRESSED IN BRAIN, SIGNAL = 0.56; EXPRESSED IN ADULT LIVER, SIGNAL = 0.79; EXPRESSED IN PLACENTA, SIGNAL = 0.59; NT HIT: AF055066.1, EVALUE 6.00e-65; SWISSPROT HIT: Q9USY4, EVALUE 7.80e+00; EST_HUMAN HIT: AA700304.1, EVALUE 6.00e-41
cagagcatcagtgtcaattatgcactcagggaattggaagataatcagggttgggtctatgcatccagtggtcccattgcgggccataatgtgtccaggtttactccctggcctccgtaagcccca

SEQ ID NO: 18376 - DNA, 144 bp, Homo sapiens
  MAP TO AL031730.1; EXPRESSED IN ADULT LIVER, SIGNAL = 0.58; EXPRESSED IN BRAIN, SIGNAL = 0.52; EXPRESSED IN BONE MARROW, SIGNAL = 0.91; EXPRESSED IN PLACENTA, SIGNAL = 0.52; EST_HUMAN HIT: AV701722.1, EVALUE 9.00e-53
cacaaaaaaaagtgatttaaaaacagaaggtggtggtgaggataaggacagaaaacaccctcttatgggagataagatgacagagagtaagaccgatttatggatctatgagatgggcaatgcgggcgtcttgctcttcaggag

SEQ ID NO: 18377 - DNA, 322 bp, Homo sapiens
  MAP TO AC008456.4; EXPRESSED IN PLACENTA, SIGNAL = 2.1; EXPRESSED IN HEART, SIGNAL = 2.1; EXPRESSED IN ADULT LIVER, SIGNAL = 1.7; EXPRESSED IN BRAIN, SIGNAL = 1.8; EXPRESSED IN HELA, SIGNAL = 1.8; NT HIT: gi14722720, EVALUE 0.00e+00; SWISSPROT HIT: O94823, EVALUE 5.00e-56; EST_HUMAN HIT: BF366883.1, EVALUE 0.00e+00
gagacctgtgaatccatcctcaattgtgcattggaagagctaaagcaatttcgtgaactacagaagccagaccgcaagctctttggattccgcttaccttccaagacaccatccatcacctcagaagctgtggttccagaagctggattggtcatcgatgggaagacattgaatgccatcttccagggaaagctagagaagaagtttctggaattgacccagtattgtcggtccgtcctgtgctgccgctccacgccactccagaagagtatgatagtcaagctggtgcgagacaagttgcgcgtcatgaccctttccatag

SEQ ID NO: 18378 - DNA, 158 bp, Homo sapiens
  MAP TO AF241733.1; EXPRESSED IN BONE MARROW, SIGNAL = 0.9; EXPRESSED IN ADULT LIVER, SIGNAL = 0.72; EXPRESSED IN PLACENTA, SIGNAL = 0.67; EXPRESSED IN BRAIN, SIGNAL = 0.58; EST_HUMAN HIT: AA040379.1, EVALUE 3.20e+00; NT HIT: AE008624.1, EVALUE 3.50e-02; SWISSPROT HIT: Q9Z110, EVALUE 4.40e+00
cagagcacagtggttatcatcaccagctgccatttctacgtagagatcaattagaggcatctttttgctggggaagtggtcaggccaacttactaaaaatcccattcggattctttctgcaaaatgcattgtgttttggtcttccaatgcagttgtta

SEQ ID NO: 18379 - DNA, 284 bp, Homo sapiens
  MAP TO AL117259.3; EXPRESSED IN ADULT LIVER, SIGNAL = 0.52; EXPRESSED IN HEART, SIGNAL = 1.6; EXPRESSED IN BRAIN, SIGNAL = 1.6; EXPRESSED IN BONE MARROW, SIGNAL = 0.56; EXPRESSED IN PLACENTA, SIGNAL = 0.8; EST_HUMAN HIT: BF038259.1, EVALUE 9.70e-02; NT HIT: gi15299922, EVALUE 4.10e+00; SWISSPROT HIT: Q9SEH4, EVALUE 3.00e-06
ccagagcagcacagctgtaattttggagaggtagccattcatggtcagtgtgatttcagaggggtggccattcacgggttgtgtgatttcagaggggtggccattcacagatggtgtgatttcagaggagcagccattcctggatggtttgagttcagaggcatggccgttcatggatggtgtgatttcagaggggtgaccatttacagatggtgcgattgcagaggggtggcccttcatggagggcttcagcaagatgctccctccagtactgggggtgaccc

SEQ ID NO: 18380 - DNA, 452 bp, Homo sapiens
  MAP TO AC008563.4; EXPRESSED IN PLACENTA, SIGNAL =   1; EXPRESSED IN ADULT LIVER, SIGNAL = 0.82; EXPRESSED IN HELA, SIGNAL = 0.84; EXPRESSED IN FETAL LIVER, SIGNAL = 0.8; EXPRESSED IN BRAIN, SIGNAL = 0.94; EST_HUMAN HIT: AL138373.1, EVALUE 0.00e+00; NT HIT: AB033051.1, EVALUE 0.00e+00; SWISSPROT HIT: P32900, EVALUE 2.70e-01
agtcaacagaacaatcactgtcatgtggttcagtcctattaggagactgggaagtttcctcagaatgtccatttaccttatttacggattccaaattaggatacttgtttccattttccaagtgctcagtttcctctttagaattaatgcttaaaaagcttgttccaagcacaatatcctgtgtttttgatctttccatgatctctggttgaaatgtatcattagttataagtttattaagattcatattgatatgatctaatttgtgagtgtcatcagctgtggctgttgagtcaacacttttctcaattagaactaatcgctcttcaacattcaaatcatattcaggtaagttaaaatcttttttatcatgagctttgaacttttcctctgttgaactgtttaaaatatctccattttgtaaaaggctgttaaaattttcatcttcttgc

SEQ ID NO: 18381 - DNA, 197 bp, Homo sapiens
  MAP TO AL035444.9; EXPRESSED IN LUNG, SIGNAL = 2.4; EXPRESSED IN BONE MARROW, SIGNAL = 2.5; EXPRESSED IN PLACENTA, SIGNAL = 2.8; EXPRESSED IN ADULT LIVER, SIGNAL = 2.6; EXPRESSED IN HEART, SIGNAL = 2.5; EXPRESSED IN BRAIN, SIGNAL = 2.7; EXPRESSED IN FETAL LIVER, SIGNAL = 2.9; SWISSPROT HIT: P17059, EVALUE 4.20e+00; EST_HUMAN HIT: BE536242.1, EVALUE 1.00e-103
gaaaaatagttactgtacactggagaaacatgacaaacaccatccttaaccaaatgatgaaggttaacatcaccagtgacatcatgcaggcatcgtatactcccagatatgatgcgacaagaagggcaccggaactagtggtattccttctcaaaatctgtaaccacagtcaaatcacaagagaagcaacagactga

SEQ ID NO: 18382 - DNA, 103 bp, Homo sapiens
  MAP TO AC008979.6; EXPRESSED IN FETAL LIVER, SIGNAL = 0.44; EXPRESSED IN BONE MARROW, SIGNAL = 0.53; EXPRESSED IN ADULT LIVER, SIGNAL = 0.78; EXPRESSED IN PLACENTA, SIGNAL = 0.82; EST_HUMAN HIT: AI818450.1, EVALUE 4.00e-26; NT HIT: AJ130755.1, EVALUE 2.00e-27
atcacaaagaagtttctcagaatgcttctgtctggttttgatgtgaggatattaccttttccactataggccacaaagcgctccgaatatccagttgcagaat

SEQ ID NO: 18383 - DNA, 203 bp, Homo sapiens
  MAP TO AC011513.2; EXPRESSED IN PLACENTA, SIGNAL = 0.63; EXPRESSED IN ADULT LIVER, SIGNAL = 0.6; EXPRESSED IN BRAIN, SIGNAL = 0.93; SWISSPROT HIT: P40199, EVALUE 3.00e-06; EST_HUMAN HIT: BE616093.1, EVALUE 9.00e-60; NT HIT: gi13630123, EVALUE 6.00e-60
acatcaccttcattccttctctcttcttcccacaaggaagtgctcctgtcctctcagctgtggccaccgtcggcatcacgattggagtgctggccagggtggctctgatatagcagccctggtgtattttcgatatttcaggaagactggcaggtatgatcgcctttcctcttgccatgtttcctgcagggctgaccaccatg

SEQ ID NO: 18384 - DNA, 321 bp, Homo sapiens
  MAP TO AL096870.3; EXPRESSED IN ADULT LIVER, SIGNAL = 0.38; EXPRESSED IN FETAL LIVER, SIGNAL = 0.36; EXPRESSED IN BONE MARROW, SIGNAL = 0.46; EXPRESSED IN PLACENTA, SIGNAL = 0.41; NT HIT: gi14750768, EVALUE 0.00e+00; SWISSPROT HIT: P22735, EVALUE 1.00e-19; EST_HUMAN HIT: BG675728.1, EVALUE 0.00e+00
gcatgatggatgggccacgttccgatgtgggccgttggggtggcaaccccttgcagccccctaccacgccatctccagagccagagccagagccagacggacgctctcgcagaggaggaggccgttccttctgggctcgctgctgtggctgctgttcatgccgaaatgcggcagatgacgactggggacctgaaccctctgactccaggggtcgagggtccagctctggcactcgaagacctggctcccggggctcagactcccgccggcctgtatcccggggcagcggtgtcaatgcagctggagatggcaccatccgag

SEQ ID NO: 18385 - DNA, 276 bp, Homo sapiens
  MAP TO AC010168.6; EXPRESSED IN ADULT LIVER, SIGNAL = 5.7; EXPRESSED IN HEART, SIGNAL =   3; EXPRESSED IN LUNG, SIGNAL = 6.5; EXPRESSED IN FETAL LIVER, SIGNAL = 3.1; EXPRESSED IN BONE MARROW, SIGNAL = 6.5; EXPRESSED IN PLACENTA, SIGNAL = 4.6; NT HIT: gi14754384, EVALUE 0.00e+00; SWISSPROT HIT: P25092, EVALUE 1.00e-28; EST_HUMAN HIT: AW578382.1, EVALUE 0.00e+00
gagcccaacagagcaaagcaagtgggcacaaggagtatggttctaacgtgattggggtcatgaagacgttgctgttggacttggctttgtggtcactgctcttccagcccgggtggctgtcctttagttcccaggtgagtcagaactgccacaatggcagctatgaaatcagcgtcctgatgatgggcaactcagcctttgcagagcccctgaaaaacttggaagatgcggtgaatgaggggctggaaatagtgagaggacgtctgcaaaatgctg

SEQ ID NO: 18386 - DNA, 452 bp, Homo sapiens
  MAP TO AL031721.1; EXPRESSED IN LUNG, SIGNAL = 4.4; EXPRESSED IN BRAIN, SIGNAL = 3.5; EXPRESSED IN BONE MARROW, SIGNAL = 5.4; EXPRESSED IN PLACENTA, SIGNAL =   4; EXPRESSED IN ADULT LIVER, SIGNAL = 3.2; EST_HUMAN HIT: BG168533.1, EVALUE 1.00e-104; NT HIT: gi12751488, EVALUE 1.00e-119; SWISSPROT HIT: Q9YEK4, EVALUE 1.00e+00
ggatgaggctgcagagcccagtgtgcccggctctgaacgcaggggtggcggctgctggggaggcgtcatggctgaggagcccaccggccctgggaggggctgggacagcgaaccgagcggcgaggtggacgcagaggatggcgagtgtagcgatggtgctctgggcagggagccggggatggcgacaggtgcagagccggccagcgacctgggacctggcgggggcggaccagtcagcgaagggagtaccgccaggcctctgcccaaacatctgccatgggcggcagccgtggaagacggaccctgcaggtggtggtggtggggatatggggggtgggaatataggggccaggccagccaccaccatctatgtgtttggagccacagcgcccccggtggccatgtccaacacagctgggcaagccatgggctcaaagggattccaaccagag

SEQ ID NO: 18387 - DNA, 254 bp, Homo sapiens
  MAP TO AC005788.1; EXPRESSED IN ADULT LIVER, SIGNAL =  12; EXPRESSED IN FETAL LIVER, SIGNAL = 8.6; EXPRESSED IN BRAIN, SIGNAL = 4.2; EXPRESSED IN LUNG, SIGNAL = 2.2; EXPRESSED IN BONE MARROW, SIGNAL = 2.8; EST_HUMAN HIT: BF926552.1, EVALUE 1.00e-129; NT HIT: U41725.1, EVALUE 0.00e+00; SWISSPROT HIT: P23468, EVALUE 7.00e-15
tggacaggcacggggctctggccgtcaggaagatacaccatgatgaagccgtcagcatcaggcttgggggcgacgctgggcttgccgttgagcaggttgaaggcagtccaggcggtgaccgtctgctggaggccgcccaggctgctgccgcgattggtcagcacaaagttgtagaaggtgtggggcttgaggtgcgtgatgagcttcttggtggtacggccatccacatccagtgtgagcccattgtactggat

SEQ ID NO: 18388 - DNA, 173 bp, Homo sapiens
  MAP TO AC008599.5; EXPRESSED IN ADULT LIVER, SIGNAL = 0.63; EXPRESSED IN HEART, SIGNAL = 1.3; EXPRESSED IN FETAL LIVER, SIGNAL = 1.7; EST_HUMAN HIT: R75696.1, EVALUE 1.00e-92; NT HIT: gi14781268, EVALUE 8.00e-93; SWISSPROT HIT: O76082, EVALUE 3.00e-25
gaacagaaattcttggcaagtcagttcgtattatattctctacattaggagtgtgcacattttttgcagttggctatatgctgctgccactgtttgcttacttcatcagagactggcggatgctgctgctggcgctgacggtgccgggagtgctgtgtgtcccgctgtggtgg

SEQ ID NO: 18389 - DNA, 318 bp, Homo sapiens
  MAP TO AC016620.5; EXPRESSED IN BRAIN, SIGNAL = 2.1; EXPRESSED IN BONE MARROW, SIGNAL = 1.9; EXPRESSED IN PLACENTA, SIGNAL = 1.5; EXPRESSED IN HEART, SIGNAL = 1.9; EXPRESSED IN ADULT LIVER, SIGNAL = 1.9; EST_HUMAN HIT: BF819915.1, EVALUE 6.00e-68; NT HIT: AJ271735.1, EVALUE 1.00e-31
gctgagagagatgaggaagctgcagaagaaaagtgtgaagctagcagaggttggttcatgaggtttaaggaaagaagccatctccataacataaaaatgcaaggggaagcagcaagtactgaggcagaagcgtcaacaagttatccagaagatctagctaagatacttgaaggtggctatgataaacagcaaattttcaatgtagacagaacagccctctattggaagaagatgccatctaggactcttatagttagagagaagttgatgcctggctccaaagcttcaaaaggacaggttgactctcttgataaggac

SEQ ID NO: 18390 - DNA, 494 bp, Homo sapiens
  MAP TO AC016553.4; EXPRESSED IN BONE MARROW, SIGNAL = 1.8; EXPRESSED IN PLACENTA, SIGNAL = 2.5; EXPRESSED IN ADULT LIVER, SIGNAL = 1.9; EXPRESSED IN BRAIN, SIGNAL = 2.1; EXPRESSED IN LUNG, SIGNAL = 2.8; EXPRESSED IN HELA, SIGNAL = 2.5; EST_HUMAN HIT: BE222256.1, EVALUE 2.00e-66; NT HIT: AL163248.2, EVALUE 1.00e-110; SWISSPROT HIT: P70213, EVALUE 2.00e-25
agtgggccaccttttaatccgtatttcagataaccaagcaaataagctattggaactttttctaacttcccgagctgcaacattaaatgcagagtccatacttagtgggcccaaatcaataaattcgacctgatccaactctatgttccttccaccattatcccatacccttaatatccattcccgtgcctgttctccagatttctgtttatataaattagagaagtcaagcagttcttttctagtgtagcccacctcctcatgggtcacactcacaacttcacctctagggacctgccggaacgttagtctagttttaggtctagaagccaacaggggtgttgggggtggctcctgaggagaatcaacattattttgcctggcagctgcttcagaagaggtcatcactgttgcctcaggcagcacagggtttatctcttcagacaaacgcagaatagttaatggcagcatgggtggaggaggggatgttgcca

SEQ ID NO: 18391 - DNA, 172 bp, Homo sapiens
  MAP TO AC012055.8; EXPRESSED IN BRAIN, SIGNAL = 1.9; EXPRESSED IN LUNG, SIGNAL =   2; EXPRESSED IN BONE MARROW, SIGNAL = 1.9; EXPRESSED IN ADULT LIVER, SIGNAL = 1.6; EXPRESSED IN PLACENTA, SIGNAL = 1.6; EXPRESSED IN HEART, SIGNAL = 2.6; EST_HUMAN HIT: BF035327.1, EVALUE 1.00e-42; NT HIT: AF181897.1, EVALUE 4.00e-39
agcaaagccctaactctcttcaattctgtgaaggctgagaaaggtgaggaggctgcagaagaaaagttggaagctagaagaagttggtttatgaggtttaacgaaagaagacgtctccataacctaaaagggcaaggtgaagcagcaagtgctgatggagaagttgtagcag

SEQ ID NO: 18392 - DNA, 300 bp, Homo sapiens
  MAP TO AC010327.5; EXPRESSED IN BRAIN, SIGNAL = 1.1; EXPRESSED IN PLACENTA, SIGNAL = 1.2; EXPRESSED IN ADULT LIVER, SIGNAL = 1.2; EXPRESSED IN HEART, SIGNAL = 1.5; SWISSPROT HIT: Q61772, EVALUE 5.00e-03; EST_HUMAN HIT: BF802275.1, EVALUE 5.00e-87; NT HIT: AF275139.1, EVALUE 0.00e+00
ctcccaatgaggtcacagatctccagaatgaaactcagactaagaactcagtcatgctgtggtggaaggcccctggagacccccactctcagttgtacgtatactgggtccagtgggccagcaagggacatccccggagggggcaagatccccaagcgaattgggtcaaccagaccagcaggaccaatgagacgtggtacaaagtggaggccctggaacccgggacgttgtacaatttcaccgtgtgggcagagaggaatgacgtagccagttccacgcagagcctctgtgcgtccacat

SEQ ID NO: 18393 - DNA, 82 bp, Homo sapiens
  MAP TO AC009757.8; EXPRESSED IN ADULT LIVER, SIGNAL = 0.42; NT HIT: AE001180.1, EVALUE 1.60e-02
ttagttctttttggattgagcttgggccttttgccaagtttcttcttcttcattaatattatcacaatccctctcctcagaa

SEQ ID NO: 18394 - DNA, 102 bp, Homo sapiens
  MAP TO AC008822.5; EXPRESSED IN HELA, SIGNAL = 1.6; EXPRESSED IN PLACENTA, SIGNAL = 1.6; EXPRESSED IN HEART, SIGNAL =   2; EXPRESSED IN ADULT LIVER, SIGNAL = 1.2; EXPRESSED IN BRAIN, SIGNAL = 1.3; EST_HUMAN HIT: BE728394.1, EVALUE 4.80e-01
ggaatatccagaatttcttctgaacgtcttcaaaaatagctctatacctttgccagccttcaggaaccaagcttacctgcatgcaggcaagaagggccagtg

SEQ ID NO: 18395 - DNA, 132 bp, Homo sapiens
  MAP TO AC008983.6; EXPRESSED IN FETAL LIVER, SIGNAL = 0.6; EXPRESSED IN PLACENTA, SIGNAL = 0.7; EXPRESSED IN ADULT LIVER, SIGNAL = 0.53; NT HIT: AF184977.1, EVALUE 1.10e-01; EST_HUMAN HIT: AW131486.1, EVALUE 3.00e-03; SWISSPROT HIT: Q9SM60, EVALUE 7.80e+00
cttgtcaggatttacccaatccttaaatacaaagctaatcactgtgatccaaaatggcctggagagagggcacccaggcaggggctggggaaggtggcaccctccaaggaggctccagaagtcagggaaaag

SEQ ID NO: 18396 - DNA, 242 bp, Homo sapiens
  MAP TO AC008784.5; EXPRESSED IN ADULT LIVER, SIGNAL = 0.5; NT HIT: AJ277661.1, EVALUE 5.60e-02; EST_HUMAN HIT: AW809130.1, EVALUE 1.00e-113; SWISSPROT HIT: Q94818, EVALUE 7.70e-01
agagttataaaagaaatagccaactgtggaaatgttgacactgctgccatacaagagactccagatatgcagctagagaaacttaaggaaggtgagcttatcaacgtgcattcagaaagtggttatgattacaagaatgaagatatcccagaggaattgacattgtcagaaaacttcacattaatcgaattctcagagatgtctcacaacattgaaagcacaaaagatgaaatgttagaagc

SEQ ID NO: 18397 - DNA, 179 bp, Homo sapiens
  MAP TO AF131215.1; EXPRESSED IN BONE MARROW, SIGNAL = 1.4; EXPRESSED IN ADULT LIVER, SIGNAL = 1.1; EXPRESSED IN BRAIN, SIGNAL = 1.2; NT HIT: gi14738661, EVALUE 4.00e-02; EST_HUMAN HIT: BF184166.1, EVALUE 2.30e-01; SWISSPROT HIT: O66554, EVALUE 2.90e-01
agaaaaggacacgtctaatccagcaaaccaaaaaaaaaaaaagtcttttttccttctgggaaagcagtggtttggagtcattcacaggggctgggagtgcaggagggggaaggggcgtggaatccaggagtgctcggaggcggcagcaagggtttttccacagggccccacgcaggcca

SEQ ID NO: 18398 - DNA, 172 bp, Homo sapiens
  MAP TO AC012331.9; EXPRESSED IN HEART, SIGNAL = 1.7; EXPRESSED IN ADULT LIVER, SIGNAL = 1.7; EXPRESSED IN LUNG, SIGNAL = 2.8; EXPRESSED IN BRAIN, SIGNAL = 2.2; EXPRESSED IN BONE MARROW, SIGNAL = 1.7; SWISSPROT HIT: P11274, EVALUE 1.00e-18; NT HIT: gi14777543, EVALUE 1.00e-82; EST_HUMAN HIT: AL045446.1, EVALUE 1.00e-89
ctccatcccgtcctgcgcaggccgacactcactgacgttgaagcctgccttcagtgcctggatgtccgtggccaccccagacatgcggtagatgcccacctcctccatgcctcggcgctcgatctcctccacacactggcgcacgatgtagggcaccttggacctctctctc

SEQ ID NO: 18399 - DNA, 261 bp, Homo sapiens
  MAP TO AL109754.13; EXPRESSED IN BONE MARROW, SIGNAL = 2.6; EXPRESSED IN PLACENTA, SIGNAL = 3.3; EXPRESSED IN ADULT LIVER, SIGNAL =   3; NT HIT: AL163227.2, EVALUE 4.00e-46; SWISSPROT HIT: O00459, EVALUE 1.20e+00; EST_HUMAN HIT: BI011251.1, EVALUE 1.00e-59
ttaaagctccaaatgatctcctttgactccatgtctcacatccaggtcatgctgatgcaagaagtgggcttccatggtcttgggcagctccactcctttagcttcgcaggatagaggctccctcccagctgccttcacaggctggcattgagtgtctgcagcttttccaggtgcacagtgcaagctgtcggtggatctaccattccagggtctgtaggatggtggcccttttctcacagctccactaggcagagcccccat

SEQ ID NO: 18400 - DNA, 219 bp, Homo sapiens
  MAP TO AC008282.2; EXPRESSED IN LUNG, SIGNAL = 3.4; EXPRESSED IN FETAL LIVER, SIGNAL = 2.1; EXPRESSED IN BRAIN, SIGNAL = 2.3; EXPRESSED IN BONE MARROW, SIGNAL = 2.6; EXPRESSED IN HEART, SIGNAL = 3.2; EXPRESSED IN ADULT LIVER, SIGNAL = 2.3; EST_HUMAN HIT: BE881680.1, EVALUE 1.00e-120; NT HIT: gi7706239, EVALUE 1.00e-120; SWISSPROT HIT: P75452, EVALUE 9.10e-02
ctgctcactattcttcagagaaaggatgaagctgtggctcagggtttccaggtgggcaagtgatttctccagatgattcaaagtatctgcataggtaactttagaatccttagcttcttgagcttcgtcttctgagtttcttttccttggcttctcaataaaatgtttgactgtcttaatagcctttctagtcatctctttacgggcttccacagacag

SEQ ID NO: 18401 - DNA, 123 bp, Homo sapiens
  MAP TO AC010328.4; EXPRESSED IN HEART, SIGNAL = 1.7; EXPRESSED IN BRAIN, SIGNAL = 2.1; EXPRESSED IN HELA, SIGNAL = 1.6; EXPRESSED IN BONE MARROW, SIGNAL = 2.4; EXPRESSED IN PLACENTA, SIGNAL = 1.5; EXPRESSED IN ADULT LIVER, SIGNAL = 1.9; EST_HUMAN HIT: T79289.1, EVALUE 6.00e-01; SWISSPROT HIT: P31823, EVALUE 7.90e+00
ctacaccctcacccccacctctggtccatattacctcctctgcatgcttctcttgattctttctgcttccactgtctggatcctgatgacaccaaggtctcaaggggagaatagagtcagaag

SEQ ID NO: 18402 - DNA, 120 bp, Homo sapiens
  MAP TO AC005493.1; EXPRESSED IN BONE MARROW, SIGNAL = 0.77; EXPRESSED IN PLACENTA, SIGNAL = 1.2; EXPRESSED IN HEART, SIGNAL = 1.3; EXPRESSED IN ADULT LIVER, SIGNAL =   1; EXPRESSED IN FETAL LIVER, SIGNAL = 1.1; EXPRESSED IN BRAIN, SIGNAL = 0.91; EST_HUMAN HIT: BE503136.1, EVALUE 5.80e-01
ggccccaagactgtatggatagctgcagaccaccacattcaggaagaggggccagatccattagggagtatatttggcattgagctgatagagaataaaggagaaaaacttcctgagtag

SEQ ID NO: 18403 - DNA, 82 bp, Homo sapiens
  MAP TO AL049198.2; EXPRESSED IN BONE MARROW, SIGNAL = 1.7; EXPRESSED IN PLACENTA, SIGNAL = 1.4; EXPRESSED IN ADULT LIVER, SIGNAL = 1.4; EXPRESSED IN HEART, SIGNAL = 0.95; EXPRESSED IN FETAL LIVER, SIGNAL = 1.1; NT HIT: M85212.1, EVALUE 6.30e-02; SWISSPROT HIT: P04523, EVALUE 8.20e+00
acgattccaagcagcagatgaggtgaagtcgaactccactggacctgtggtgggtgtggccagcgtcatccatccagagtga

SEQ ID NO: 18404 - DNA, 147 bp, Homo sapiens
  MAP TO AC008620.5; EXPRESSED IN BRAIN, SIGNAL = 0.91; EXPRESSED IN BONE MARROW, SIGNAL =   1; EXPRESSED IN PLACENTA, SIGNAL = 0.96; EXPRESSED IN ADULT LIVER, SIGNAL = 0.92; NT HIT: gi7706191, EVALUE 5.00e-01; EST_HUMAN HIT: AA625320.1, EVALUE 7.40e-01; SWISSPROT HIT: Q07092, EVALUE 1.80e-01
ctgctgcttccctgtttcccagttccagggctcccccagggcccctgctgaccagctcttttccaaggctacactccacgggaggactggagaacatctcagggaggcagccacagccgccactgcgtggggccccagcaatgacat

SEQ ID NO: 18405 - DNA, 169 bp, Homo sapiens
  MAP TO AC004004.1; EXPRESSED IN ADULT LIVER, SIGNAL = 1.2; EXPRESSED IN BRAIN, SIGNAL = 1.1; EXPRESSED IN HELA, SIGNAL = 0.79; NT HIT: M12140.1, EVALUE 1.00e-29; EST_HUMAN HIT: AI218081.1, EVALUE 3.00e-34; SWISSPROT HIT: P47091, EVALUE 5.00e-01
ctattttctcaagcttccgccatgtgtagactggtcagcttccgaagtgaccagagcagggctgttgtcatctccactgacaatgcgatctcgtcgcaggatcagccaggttggatggtctgggtcctgttggctggtccactggtcctgggctgctggttttagccaa

SEQ ID NO: 18406 - DNA, 110 bp, Homo sapiens
  MAP TO AF129108.1; EXPRESSED IN FETAL LIVER, SIGNAL = 0.35; EXPRESSED IN BONE MARROW, SIGNAL = 0.9; EXPRESSED IN PLACENTA, SIGNAL = 0.74; EXPRESSED IN ADULT LIVER, SIGNAL = 0.73; EXPRESSED IN HEART, SIGNAL = 0.98; NT HIT: AJ229042.1, EVALUE 2.00e-55; EST_HUMAN HIT: BF771092.1, EVALUE 1.00e-17; SWISSPROT HIT: P33291, EVALUE 2.10e+00
tccattttctgttgcttataacagaatacctgaaacagtttataaagaaaaggaatttattttttgcagttatagaggttgagaagtccaaggtcaaggggccacatctg

SEQ ID NO: 18407 - DNA, 438 bp, Homo sapiens
  MAP TO AC007207.22; EXPRESSED IN HEART, SIGNAL =  29; EXPRESSED IN ADULT LIVER, SIGNAL = 2.8; EXPRESSED IN BRAIN, SIGNAL =   6; NT HIT: gi14765201, EVALUE 0.00e+00; EST_HUMAN HIT: BG286181.1, EVALUE 0.00e+00; SWISSPROT HIT: P19120, EVALUE 3.00e-70
ctatgtcgcctctacggacactgaacgaatgactggtgatgccgcaaagaatcaagttgcaatgaaccccaccaacatggtttttgatgccaaacgtctgattgcacacagatttgatgatgctgttgtccagtctgagatgaagcattggcccttcatggtggtgaatgatgctggcaggcccaaggtccaagtggaatacaagggagagagcaaaagcttctatccagagaaggtatcctctatggttctgacaaatatgaaggaaattgcagaagcctaccttgggaagactgttacccatgctgtggtcgcagtgccagcttactttaatgactctcagcgtcaggctaccaaagatgctggaactattgttggtctcaatgtacttagaattattaatgagccaactgctgctgcttatggcttagacaaaag

SEQ ID NO: 18408 - DNA, 206 bp, Homo sapiens
  MAP TO AC008448.5; EXPRESSED IN PLACENTA, SIGNAL =   7; EXPRESSED IN ADULT LIVER, SIGNAL =   2; EXPRESSED IN FETAL LIVER, SIGNAL =   4; EXPRESSED IN LUNG, SIGNAL = 4.3; SWISSPROT HIT: Q14934, EVALUE 2.20e-01; NT HIT: Z70730.1, EVALUE 8.00e-04; EST_HUMAN HIT: BE869883.1, EVALUE 1.10e+00
gctcccagtcttctgttcctcctctccctgcatctggacttccggattgtactcacataaatgctcagcagctcctttggggtcttatatgtcagtatcagcaaggaagcccccgggcagtaagtgggcatggtcagattgtctttgtgaaatatgttggagctcaaacagaactggccacgtcagctgctctgggacaggacaag

SEQ ID NO: 18409 - DNA, 165 bp, Homo sapiens
  MAP TO AC011524.4; EXPRESSED IN BONE MARROW, SIGNAL = 0.51; EXPRESSED IN ADULT LIVER, SIGNAL = 0.66; EXPRESSED IN LUNG, SIGNAL = 0.55; NT HIT: X62778.1, EVALUE 1.40e-01; EST_HUMAN HIT: BF939619.1, EVALUE 8.40e-01; SWISSPROT HIT: P49591, EVALUE 5.10e-01
ggtgtctgctgtcagagatgggcaaggatgggtgtcagccattggagagctgttccagggagggagcccgaccactctctggccttagccagcccagtcagcactggagaaagacctcatccaacgctgaaatagatggtgctagtgtatgcattacaatagcag

SEQ ID NO: 18410 - DNA, 88 bp, Homo sapiens
  MAP TO AC005202.1; EXPRESSED IN LUNG, SIGNAL = 3.8; EXPRESSED IN FETAL LIVER, SIGNAL = 1.7; EXPRESSED IN HELA, SIGNAL = 1.5; EXPRESSED IN BRAIN, SIGNAL = 1.7; EXPRESSED IN BONE MARROW, SIGNAL = 2.7; EXPRESSED IN PLACENTA, SIGNAL =   1; EXPRESSED IN HEART, SIGNAL = 1.6; EXPRESSED IN ADULT LIVER, SIGNAL = 1.9; EST_HUMAN HIT: AW814694.1, EVALUE 4.00e-38; NT HIT: AF051692.1, EVALUE 6.90e-02; SWISSPROT HIT: P54785, EVALUE 8.10e+00
cccaagccctccagaaacagctgctgcaggtcagcaccagcaccagggccaggcacacagtctcatcggcacgtctgccactggctgt

SEQ ID NO: 18411 - DNA, 441 bp, Homo sapiens
  MAP TO AC008408.5; EXPRESSED IN FETAL LIVER, SIGNAL = 2.3; EXPRESSED IN BRAIN, SIGNAL = 3.2; EXPRESSED IN BONE MARROW, SIGNAL = 1.7; EXPRESSED IN PLACENTA, SIGNAL = 2.4; EXPRESSED IN HEART, SIGNAL = 2.6; EXPRESSED IN ADULT LIVER, SIGNAL = 2.5; EXPRESSED IN LUNG, SIGNAL = 2.2; EST_HUMAN HIT: BG719489.1, EVALUE 0.00e+00; NT HIT: gi4502556, EVALUE 0.00e+00; SWISSPROT HIT: Q16566, EVALUE 1.00e-57
ttagtactctggcaggatcacatcttgctgtggaacttcaaaacccacagcagagcttccttgcccttctctgggagctgctgcctcctccacagtcttcagcttctcctctgctaggccctcctctagttccaggtcagccacctttatcccatcctccactgccttgggcaccattttgggggcctcttcagcatttatatctgcacctttaactttctctaaggcttgcaccttcatcagctcagcctgtgcccccttaactgcggcttgggccccatcgccttgaattttctctccttctggaatagctttcatgtcctcgttgccatcttggattggagaagggtctcggctagccttgtggctctcctggatgctgccatggctgctgctggcacttcccaggcgggaagaggccaccacagccttcaccgctgc

SEQ ID NO: 18412 - DNA, 211 bp, Homo sapiens
  MAP TO AC005515.1; EXPRESSED IN HEART, SIGNAL =   8; EXPRESSED IN ADULT LIVER, SIGNAL = 4.8; EXPRESSED IN LUNG, SIGNAL =   6; EXPRESSED IN BRAIN, SIGNAL = 5.5; EXPRESSED IN HELA, SIGNAL = 5.3; EXPRESSED IN BONE MARROW, SIGNAL = 4.7; EXPRESSED IN PLACENTA, SIGNAL = 6.2; EST_HUMAN HIT: AV715923.1, EVALUE 6.00e-24; NT HIT: U67985.1, EVALUE 1.00e-85; SWISSPROT HIT: P97400, EVALUE 4.00e-33
catggacccacagctgcaggtggatttccataccgagatgaaggaagactcagacatcgccttccatttccgagtgtactttggtcattgggtggtcatgaacagccgcgtgaatggggcttggcagtatgaggtgacatgccacaatatgccctttcaggatggtaaaccatttaacctgtgcatctccgtgctggccgatgagtaccag

SEQ ID NO: 18413 - DNA, 155 bp, Homo sapiens
  MAP TO AC000367.1; EXPRESSED IN ADULT LIVER, SIGNAL = 0.36; EST_HUMAN HIT: BI545320.1, EVALUE 3.10e+00; NT HIT: gi4504148, EVALUE 1.00e-69; SWISSPROT HIT: O00222, EVALUE 9.00e-24
catcaattgatgctcgtttgggcaaaattgtcacagccccttctgcaatctcctcttgctgatagacaggtgctattttggatccccaactatctgagccaatccagagaaaatgcccactttggtttagtttttttgctgcttccaatatcctc

SEQ ID NO: 18414 - DNA, 182 bp, Homo sapiens
  MAP TO AC008747.4; EXPRESSED IN ADULT LIVER, SIGNAL = 0.68; EXPRESSED IN LUNG, SIGNAL = 1.5; EST_HUMAN HIT: BF215665.1, EVALUE 1.00e-89; NT HIT: gi14766724, EVALUE 8.00e-90; SWISSPROT HIT: O83827, EVALUE 2.50e+00
attgtcaaaacgaaccttatcccatatgagctcagctccatcccccttttctgctaaatgaactctcaaagtctcgatgctctttgaaaaaagacgtgcatagctctttacatctagaacctgctggtctttcaggcctaactggggttcattctgttgatctgatgcattcgtttcttctc

SEQ ID NO: 18415 - DNA, 114 bp, Homo sapiens
  MAP TO AL031300.1; EXPRESSED IN BRAIN, SIGNAL = 1.4; EXPRESSED IN FETAL LIVER, SIGNAL = 1.3; EXPRESSED IN BONE MARROW, SIGNAL =   2; EXPRESSED IN PLACENTA, SIGNAL = 1.3; EXPRESSED IN ADULT LIVER, SIGNAL = 1.3; EXPRESSED IN HEART, SIGNAL = 1.2; EST_HUMAN HIT: BF813186.1, EVALUE 1.40e-01; SWISSPROT HIT: P37701, EVALUE 6.00e+00
atggtccagccacctggcactgtggtcatgccttggagacaagatatggtgtccatcctcaaggaactcatcactgaagagctcctgggacacttggggaccatgtttgtcatg

SEQ ID NO: 18416 - DNA, 128 bp, Homo sapiens
  MAP TO AF027207.1; EXPRESSED IN BONE MARROW, SIGNAL = 2.4; EXPRESSED IN ADULT LIVER, SIGNAL = 1.8; EXPRESSED IN BRAIN, SIGNAL =   2; EXPRESSED IN HELA, SIGNAL = 3.7; EXPRESSED IN PLACENTA, SIGNAL = 2.4; EXPRESSED IN HEART, SIGNAL = 2.9; EXPRESSED IN FETAL LIVER, SIGNAL = 3.3; EXPRESSED IN LUNG, SIGNAL = 2.3; SWISSPROT HIT: P09866, EVALUE 7.80e+00; NT HIT: AL163267.2, EVALUE 4.00e-66; EST_HUMAN HIT: BI488743.1, EVALUE 3.00e-03
cttggccaggtgatcaagattgacaacatcagtgataagccgtgttgataccatgtgccccagatatggtgtgatgagaagggcacttcctctctgtgacattctttcccaagacccataacccccag

SEQ ID NO: 18417 - DNA, 165 bp, Homo sapiens
  MAP TO AC020553.4; EXPRESSED IN PLACENTA, SIGNAL = 3.4; EXPRESSED IN ADULT LIVER, SIGNAL =   3; EXPRESSED IN FETAL LIVER, SIGNAL = 3.7; EXPRESSED IN BRAIN, SIGNAL = 2.9; EXPRESSED IN HELA, SIGNAL = 2.6; SWISSPROT HIT: P41997, EVALUE 1.00e-04; NT HIT: AL163246.2, EVALUE 3.00e-46; EST_HUMAN HIT: BG181188.1, EVALUE 7.00e-57
ctgacctcttgccagccgactaccactttttctagcatcttgacaattttttgcagggaaaatgcttccacaaccagcaggatgcagaaaatgctttccaagagtttgtcgaatcccgaagcatggatttttacactacaggaataaacaaacatttctccttga

SEQ ID NO: 18418 - DNA, 131 bp, Homo sapiens
  MAP TO AC011904.3; EXPRESSED IN ADULT LIVER, SIGNAL = 1.1; EXPRESSED IN BRAIN, SIGNAL = 1.3; EXPRESSED IN HELA, SIGNAL = 0.79; EXPRESSED IN FETAL LIVER, SIGNAL = 0.89; EXPRESSED IN BONE MARROW, SIGNAL =   2; EXPRESSED IN PLACENTA, SIGNAL =   1; EST_HUMAN HIT: AA723942.1, EVALUE 3.00e-09; SWISSPROT HIT: Q07215, EVALUE 2.60e+00; NT HIT: gi13937343, EVALUE 6.00e-68
atgggaaattgcctgtccccaacaaatcaggctgtttgcagatgagtcttcctttgcaacttcgtaacttcttcctagcctctgattggttgctttctgcaaagcatgaactggccaaagggaaacttcta

SEQ ID NO: 18419 - DNA, 184 bp, Homo sapiens
  MAP TO AC008427.5; EXPRESSED IN BONE MARROW, SIGNAL = 0.99; EXPRESSED IN PLACENTA, SIGNAL = 3.4; EXPRESSED IN HEART, SIGNAL = 3.7; EXPRESSED IN ADULT LIVER, SIGNAL = 2.4; EXPRESSED IN LUNG, SIGNAL = 1.1; EXPRESSED IN FETAL LIVER, SIGNAL = 3.6; NT HIT: U78513.1, EVALUE 6.40e-01; EST_HUMAN HIT: BG829583.1, EVALUE 7.00e-82; SWISSPROT HIT: P79295, EVALUE 3.30e+00
tagactgtggctgggtttcaggggcttaccgtagtcagtgtatctgggccagcagaagtgccggagccctccgtagctcagctggaaggagggctcgttgcgcttcctcagggcagcgccctttgtcaaagagagggccgcgtgctcagaacaccggtaggtgatgaagccgtacttctcgcct

SEQ ID NO: 18420 - DNA, 339 bp, Homo sapiens
  MAP TO AC002056.1; EXPRESSED IN LUNG, SIGNAL = 3.2; EXPRESSED IN BRAIN, SIGNAL = 1.7; EXPRESSED IN FETAL LIVER, SIGNAL = 2.8; EXPRESSED IN BONE MARROW, SIGNAL = 2.5; EXPRESSED IN ADULT LIVER, SIGNAL = 1.6; NT HIT: gi14779798, EVALUE 0.00e+00; EST_HUMAN HIT: BE738305.1, EVALUE 0.00e+00; SWISSPROT HIT: P09661, EVALUE 6.00e-46
tcaggacccgtttgtgactgtgtcttcttccatctcttcttcaccatcatcagtgggccccaatctgcgttctctgccagggatctgaccagactgcagcaaccccttcagcctctccacttcagccagagttgaagcatttgctatagcattcttgattgcttctacatcccctggagatggcccacctttctttttgtcagttggcaaaccagcacctggattaaaagttttgcttctcctggcaatatcctttgcaagctgtgcaccccgtttgcccttgaacattttctctgcttcctgacgctctttagtttcactttctggaaatccagtact

SEQ ID NO: 18421 - DNA, 189 bp, Homo sapiens
  MAP TO AC016603.5; EXPRESSED IN LUNG, SIGNAL = 1.1; EXPRESSED IN BRAIN, SIGNAL = 1.1; EXPRESSED IN BONE MARROW, SIGNAL = 0.6; EXPRESSED IN ADULT LIVER, SIGNAL = 0.62; EXPRESSED IN PLACENTA, SIGNAL = 0.73; NT HIT: gi16158802, EVALUE 1.00e-102; EST_HUMAN HIT: BG460294.1, EVALUE 1.00e-102; SWISSPROT HIT: P22792, EVALUE 5.70e-02
ctttggaagctcttcaatctgattagcatctaaatagagttcctccaaggttttttcaaaagtaaaaatctctttcggaacttgttctaagctgcaatgagaataatcaagagtagtgacagtctcctcttcccctcgtagacagcgacatggtaccaaccgcacaaacaaacttcgttttgtagtcat

SEQ ID NO: 18422 - DNA, 126 bp, Homo sapiens
  MAP TO AC008509.5; EXPRESSED IN HEART, SIGNAL =   1; EXPRESSED IN ADULT LIVER, SIGNAL = 0.5; EXPRESSED IN FETAL LIVER, SIGNAL = 0.48; EXPRESSED IN BRAIN, SIGNAL = 0.58; NT HIT: gi7662117, EVALUE 6.00e-65; EST_HUMAN HIT: BE157258.1, EVALUE 9.00e-65; SWISSPROT HIT: Q53046, EVALUE 2.00e+00
acagccgaagagaagaaccatctttacttttggttctaaaatggggaggtgaattaactcctgcaggcagggtccaggctgaagaacttggaagagccttcaggtgtatgtatcctggaggtcaag

SEQ ID NO: 18423 - DNA, 444 bp, Homo sapiens
  MAP TO AC020663.1; EXPRESSED IN PLACENTA, SIGNAL = 1.6; EXPRESSED IN ADULT LIVER, SIGNAL = 1.1; EXPRESSED IN LUNG, SIGNAL = 1.4; EXPRESSED IN FETAL LIVER, SIGNAL = 1.7; EXPRESSED IN BRAIN, SIGNAL = 2.1; EXPRESSED IN HELA, SIGNAL = 1.9; NT HIT: gi14779656, EVALUE 0.00e+00; EST_HUMAN HIT: BG479965.1, EVALUE 0.00e+00; SWISSPROT HIT: O95125, EVALUE 4.00e-36
tcacctgagggtcaaaatgcccccactcacccgctgcctgtgtttcctgggcttccgctgcagcccttccacaaggaccacggcctcctcaccgctctccggctgctgctcgcgtacccgagcctggatctcccccggcagcacagtcaggaactgctccagcaccagcagctccaggatctgctccttggtgcgcagctccggccgcagccagcggcagcacagctcccagaggcggctcagggcctcccggggcccagccacctcctggtagcagaagagccggaagagctggcggaaagtctcagggctggggtcctccgtctccacggagggctcctcttccaagcagaagtcctcctccaccttcacaatcaggatctcttcctgttccaggtcctgctccaaggttggcaggggctggaggccagggacagtggccat

SEQ ID NO: 18424 - DNA, 221 bp, Homo sapiens
  MAP TO AC007570.23; EXPRESSED IN HELA, SIGNAL = 1.2; EXPRESSED IN PLACENTA, SIGNAL = 1.5; EXPRESSED IN BONE MARROW, SIGNAL = 0.61; EXPRESSED IN HEART, SIGNAL = 1.4; EXPRESSED IN ADULT LIVER, SIGNAL = 0.9; SWISSPROT HIT: Q04980, EVALUE 1.40e+00; NT HIT: gi13626339, EVALUE 7.90e-01; EST_HUMAN HIT: BG395136.1, EVALUE 1.90e-02
ctgtcagtggggggcagcaccagcctctcagttaagaggatggaacgtgcacagtaccagcacccccaagctctcagggcagccatggcattggcaggggccagaggagcacagaggataagctctcccccaaaggcagagttggggagcttccgggaggaaaagccagctaagtgaggcctaaaggagccagccaggcactggtacgaggccccaggcat

SEQ ID NO: 18425 - DNA, 176 bp, Homo sapiens
  MAP TO AC005222.1; EXPRESSED IN BRAIN, SIGNAL = 4.8; EXPRESSED IN BONE MARROW, SIGNAL = 6.6; EXPRESSED IN PLACENTA, SIGNAL = 3.1; EXPRESSED IN HEART, SIGNAL = 4.9; EXPRESSED IN ADULT LIVER, SIGNAL = 3.8; EXPRESSED IN FETAL LIVER, SIGNAL = 3.7; SWISSPROT HIT: P57737, EVALUE 4.00e-28; NT HIT: gi13375689, EVALUE 1.00e-94; EST_HUMAN HIT: N39489.1, EVALUE 2.00e-78
ctcaagcacagccacctgtcccccgctgctgagcagcggcacggccacacgcagcttgttggcacagaagccgtcactctcaccaggtgtggtgaggttgagccccttgaggttggtgatgtggctgtctcggtgcaggacagtgccctgagcatggcggaacttggaactggggc

SEQ ID NO: 18426 - DNA, 146 bp, Homo sapiens
  MAP TO AC010972.2; EXPRESSED IN FETAL LIVER, SIGNAL = 1.1; EXPRESSED IN PLACENTA, SIGNAL = 0.95; EXPRESSED IN ADULT LIVER, SIGNAL = 1.2; EST_HUMAN HIT: H61604.1, EVALUE 1.00e-48; SWISSPROT HIT: P10272, EVALUE 9.00e-05; NT HIT: X57147.1, EVALUE 4.00e-51
tcatatcccattttccacagatgaacttccatcggtatataggttaagctcaggattagttaaggggacttctaagagatcatcttgggcagcataagtctggactacaatttgttggcagtcatgctcgattggcttcccatcct

SEQ ID NO: 18427 - DNA, 183 bp, Homo sapiens
  MAP TO AL049779.5; EXPRESSED IN ADULT LIVER, SIGNAL = 0.76; EXPRESSED IN BRAIN, SIGNAL = 0.46; EXPRESSED IN BONE MARROW, SIGNAL = 0.56; NT HIT: gi14784246, EVALUE 9.00e-99; EST_HUMAN HIT: AV722479.1, EVALUE 1.00e-98; SWISSPROT HIT: Q62217, EVALUE 1.50e+00
ctggggcggaattctcttgaacgcttccaggcagttgaggaggatggtgtccccgtcacttttggctgccatgcctgactcactgacacatttgagcagttgctggatctcactgtacttctctttctccaccaactggcgggcagctctgcagtaggtcatggcagcatccagctggaagtc

SEQ ID NO: 18428 - DNA, 490 bp, Homo sapiens
  MAP TO AL031600.4; EXPRESSED IN BONE MARROW, SIGNAL = 0.59; EXPRESSED IN PLACENTA, SIGNAL = 1.3; EXPRESSED IN ADULT LIVER, SIGNAL = 1.1; EXPRESSED IN HEART, SIGNAL = 1.3; SWISSPROT HIT: O08550, EVALUE 1.50e+00
tcagtggacacagatacatggtgaacggccgctgtatcggatggcacaggccgagagggttagggtctcctcctcggccctctgggcggcccccctgaagcctgggcctggtggtacctgcattctggccacctccaggtccaccctccggctgctgtcctcttggttcttctgcagggcgccgcaggccacctcccggccctgctcctcctgctgcagcaagtcggtcagcttggccagtctagagaagtcggctgtggtcacaccagcccagctggccggagggcccagcagggtgaggctgacccacaggctggccaggcaggaggtgtacgacccccgccccctgccccaccagaaaacagaggaatgggaaacacagcaccggtggcagggaagggctgctgcgagtctcttccccacagagggtccgcagcgggcccaggcttcccagcacgcttggcaccgagggcggtgccccgccgggtta

SEQ ID NO: 18429 - DNA, 140 bp, Homo sapiens
  MAP TO AF187320.1; EXPRESSED IN PLACENTA, SIGNAL = 2.9; EXPRESSED IN HEART, SIGNAL = 1.7; EXPRESSED IN ADULT LIVER, SIGNAL = 1.1; EXPRESSED IN BRAIN, SIGNAL = 1.7; EST_HUMAN HIT: BE780643.1, EVALUE 4.00e-73; NT HIT: gi4507456, EVALUE 3.00e-73; SWISSPROT HIT: P02786, EVALUE 3.00e-22
gctcatctggggacaggtgacccttacacacctggattcccttccttcaatcacactcagtttccaccatctcggtcatcaggattgcctaatatacctgtccagacaatctccagagctgctgcagaaaagctgtttgg

SEQ ID NO: 18430 - DNA, 99 bp, Homo sapiens
  MAP TO AC012055.8; EXPRESSED IN HEART, SIGNAL = 3.2; EXPRESSED IN ADULT LIVER, SIGNAL = 2.2; EXPRESSED IN BRAIN, SIGNAL = 2.5; EXPRESSED IN LUNG, SIGNAL = 2.4; EXPRESSED IN FETAL LIVER, SIGNAL = 4.4; EXPRESSED IN BONE MARROW, SIGNAL = 3.8; EXPRESSED IN PLACENTA, SIGNAL = 2.8; EST_HUMAN HIT: AA864397.1, EVALUE 7.00e-03; NT HIT: AJ229042.1, EVALUE 7.90e-02
tgcagcccatgagagtagtcacggggcttgcaccctgaaaagccacagagatggagctgcccaattccttgacagtccacccccttgcaccagtgttac

SEQ ID NO: 18431 - DNA, 170 bp, Homo sapiens
  MAP TO AL109839.11; EXPRESSED IN FETAL LIVER, SIGNAL = 0.85; EXPRESSED IN BONE MARROW, SIGNAL = 0.74; EXPRESSED IN ADULT LIVER, SIGNAL =   1; EXPRESSED IN BRAIN, SIGNAL = 0.92; EST_HUMAN HIT: BI830217.1, EVALUE 7.00e-91; NT HIT: gi14771042, EVALUE 5.00e-91; SWISSPROT HIT: O00409, EVALUE 1.90e+00
aatgaccagagctctcatggactcgcttgggcctgagtggcgcctgaagctgccctcaatccccttggtgcctgtttcagctcagaagaggtggaattccttgccttcggagaaccacaaagagatggctaaaagcaaatccaaagaaaccacagctacaaagaacagag

SEQ ID NO: 18432 - DNA, 244 bp, Homo sapiens
  MAP TO AC012313.5; EXPRESSED IN BONE MARROW, SIGNAL = 3.6; EXPRESSED IN ADULT LIVER, SIGNAL = 3.6; EXPRESSED IN HEART, SIGNAL = 2.9; EXPRESSED IN BRAIN, SIGNAL = 3.4; EXPRESSED IN LUNG, SIGNAL = 4.7; EST_HUMAN HIT: AI811355.1, EVALUE 5.00e-03; NT HIT: gi14766390, EVALUE 8.80e-01; SWISSPROT HIT: O88410, EVALUE 4.00e+00
ctgaccagtgctgctgccagcactcatccccctctactacaccatcctgctcagagggcaggtttggcagcatcacagggacctgagtgactttatcgaggaatgaactccctgattgggggtcagccctccttgctgcctgagtcccatcatctggggctttgctgggttgggaaaaataatcctgagggacaagctgtggcaagtccaggggcaggaaggcggcagctgtgaggagccacag

SEQ ID NO: 18433 - DNA, 101 bp, Homo sapiens
  MAP TO AC006479.2; EXPRESSED IN BONE MARROW, SIGNAL = 9.4; EXPRESSED IN PLACENTA, SIGNAL =  10; EXPRESSED IN ADULT LIVER, SIGNAL =  11; EXPRESSED IN BRAIN, SIGNAL =  11; EXPRESSED IN LUNG, SIGNAL = 7.3; EST_HUMAN HIT: BI771186.1, EVALUE 6.00e-50; NT HIT: AF334780.1, EVALUE 5.00e-03
gtagaaaatgtcagaatcatagggaagactaagctgaaaaaagaatttggagttccaaaggaattctgtgccacctgccgtccggcaattccctttgccag

SEQ ID NO: 18434 - DNA, 148 bp, Homo sapiens
  MAP TO AC008149.14; EXPRESSED IN HEART, SIGNAL = 6.7; EXPRESSED IN ADULT LIVER, SIGNAL = 2.3; EXPRESSED IN LUNG, SIGNAL = 1.5; EXPRESSED IN FETAL LIVER, SIGNAL = 3.7; EXPRESSED IN BRAIN, SIGNAL = 2.8; EXPRESSED IN BONE MARROW, SIGNAL = 2.1; EXPRESSED IN PLACENTA, SIGNAL = 2.5; SWISSPROT HIT: P29726, EVALUE 4.50e+00; EST_HUMAN HIT: H60423.1, EVALUE 4.80e-02; NT HIT: AF143952.2, EVALUE 2.00e+00
cctctaggagattattttgcatgctaactttgagaaccattggtctacagtagtgactgaggactgaagaaacgagcggatgcacgtatcccaactcccagagatcctgataacgtgtcgaatcactgtagacatgaaccatcatttc

SEQ ID NO: 18435 - DNA, 179 bp, Homo sapiens
  MAP TO AC016613.5; EXPRESSED IN BRAIN, SIGNAL = 0.8; EXPRESSED IN BONE MARROW, SIGNAL = 0.69; EXPRESSED IN ADULT LIVER, SIGNAL = 0.59; SWISSPROT HIT: P77619, EVALUE 1.90e+00; NT HIT: AJ229041.1, EVALUE 6.00e-29; EST_HUMAN HIT: AW271345.1, EVALUE 1.00e-55
cggctcagcaccatcttgcctgcttgcgcaacctccactctccactcttgaagtaatgaggaccggaattttagctccagatcgactgcaagaacaaaccagcaatcccaagaggccccacagaccctctgaaggaagcggacttctcctgcaggaccggaagagacaccccaaatact

SEQ ID NO: 18436 - DNA, 83 bp, Homo sapiens
  MAP TO AC004107.1; EXPRESSED IN ADULT LIVER, SIGNAL = 0.53; EXPRESSED IN BRAIN, SIGNAL = 0.41; NT HIT: gi14759612, EVALUE 6.40e-02; SWISSPROT HIT: P08547, EVALUE 1.60e+00
cttctcaacaacagtgtgcaaggattttttattctccacattctctccaacacctttgtctttctgatagtaaccatttttaa

SEQ ID NO: 18437 - DNA, 312 bp, Homo sapiens
  MAP TO AC012000.3; EXPRESSED IN HELA, SIGNAL =  11; EXPRESSED IN FETAL LIVER, SIGNAL =  11; EXPRESSED IN BONE MARROW, SIGNAL = 6.6; EXPRESSED IN ADULT LIVER, SIGNAL = 6.2; EXPRESSED IN LUNG, SIGNAL =  11; EST_HUMAN HIT: H04625.1, EVALUE 1.00e-96; SWISSPROT HIT: P00390, EVALUE 4.30e-01; NT HIT: AL163282.2, EVALUE 1.00e-77
tagtggctttcttctcacagctccactaggcagtgccccactagggactctgtgtggggactccaaccccacagttccattctgcactgctctagcagaggttctccatgagggccccgcccctgcagcaaacttctgcctgggcatccagtcatttccatacaacttctgaaatctaggcagaggtttccaaacctcaattcttgacttctgtgcacccgcaggctcaacaccaggtggaagttgccaaggtttggggcttccaccctctgaaggcacagcctgagctgtacattggctcctttcagccat

SEQ ID NO: 18438 - DNA, 206 bp, Homo sapiens
  MAP TO AC009509.7; EXPRESSED IN FETAL LIVER, SIGNAL = 1.4; EXPRESSED IN HELA, SIGNAL = 1.8; EXPRESSED IN BRAIN, SIGNAL = 1.4; EXPRESSED IN BONE MARROW, SIGNAL = 0.58; EXPRESSED IN PLACENTA, SIGNAL = 1.6; EXPRESSED IN ADULT LIVER, SIGNAL = 2.1; EST_HUMAN HIT: BE671905.1, EVALUE 1.00e-112; SWISSPROT HIT: Q58328, EVALUE 7.20e+00; NT HIT: gi14764108, EVALUE 1.00e-112
gttctaaggctctggaatattccaatgggatttttgattgccaatctcccacctctccattcatgggaagtttgcgagctctgcaccttgtggaagacctgcgtggattgttagagatgatggaaacagatgagaaagaaggcttgagatgccagatcccagattcaacagcagaaacgcttgttgaatggcttcagagtcaaatg

SEQ ID NO: 18439 - DNA, 105 bp, Homo sapiens
  MAP TO AL049824.4; EXPRESSED IN ADULT LIVER, SIGNAL = 1.3; EXPRESSED IN BONE MARROW, SIGNAL = 1.7; SWISSPROT HIT: Q9UNP9, EVALUE 2.00e-07; NT HIT: gi16168526, EVALUE 1.00e-50; EST_HUMAN HIT: BG756744.1, EVALUE 9.00e-52
tttggtcagatgatgactggttgaagaagttttctgggaagacgcttgaagagaataaagaggaagaagggtcagagcctcccaaagcagagacccaggaggtga

SEQ ID NO: 18440 - DNA, 137 bp, Homo sapiens
  MAP TO AC010345.4; EXPRESSED IN PLACENTA, SIGNAL =  12; EXPRESSED IN ADULT LIVER, SIGNAL =  14; EXPRESSED IN HEART, SIGNAL =  11; EXPRESSED IN FETAL LIVER, SIGNAL = 8.7
tccagtagctctactgagttacttttgaggctgtacttattgtcctctagatggaatctttcttcttcatctctgcagagtttctaaaagagtgtcatgtggtgtggctgtcccagatggctggctttgcaacctag

SEQ ID NO: 18441 - DNA, 238 bp, Homo sapiens
  MAP TO AC002096.1; EXPRESSED IN HEART, SIGNAL = 1.1; EXPRESSED IN ADULT LIVER, SIGNAL =   1; EXPRESSED IN LUNG, SIGNAL = 0.42; EXPRESSED IN FETAL LIVER, SIGNAL = 0.8; SWISSPROT HIT: P57783, EVALUE 3.80e-02; EST_HUMAN HIT: BI459202.1, EVALUE 1.00e-125; NT HIT: gi16161010, EVALUE 0.00e+00
ataccctcatgatgtggtgaaccacctcagctgtgacgaggcccggaaccactacggcggcgtggtcagcctcatccccctcatcctagacttaatgaaagaatggatcgcccactccgagaagttgccgcgcaaggtgctgcagcacgtgagtgagccccaggcgcaccaggagagcaccaggggagccgctcgtcctgcccaggccatagggacccagcccagggccactaaacac

SEQ ID NO: 18442 - DNA, 151 bp, Homo sapiens
  MAP TO AC016572.4; EXPRESSED IN LUNG, SIGNAL = 1.8; EXPRESSED IN FETAL LIVER, SIGNAL =   1; EXPRESSED IN ADULT LIVER, SIGNAL = 0.93; NT HIT: AF038425.1, EVALUE 5.20e-01; SWISSPROT HIT: Q9V4U7, EVALUE 2.00e+00; EST_HUMAN HIT: H15262.1, EVALUE 3.00e-43
gccttggcgataaagcatgaacaagaagcacggaagagtgcccagaggttgttggtcgtatgtagtttggaaggagtgggtggcgttctatgtttgacgcttttgactgatgtaaccaggctattagactcatgctgcgtgttgaaaactg

SEQ ID NO: 18443 - DNA, 338 bp, Homo sapiens
  MAP TO AC008990.5; EXPRESSED IN ADULT LIVER, SIGNAL = 0.65; EXPRESSED IN LUNG, SIGNAL = 1.1; EXPRESSED IN BRAIN, SIGNAL = 0.5; EXPRESSED IN PLACENTA, SIGNAL = 0.67; EST_HUMAN HIT: AA883982.1, EVALUE 2.00e-06; SWISSPROT HIT: P03360, EVALUE 7.00e-11
agccccctttgccagaggtacccaattactcttcaattgaaaaagcttggtttggccaggaaacaggaaaatatattaaaggtggatggtggctgttctctgacgggaggctagctgtcccagagacaatagccccaaggtttgtgaagcagatccatcaaggaacacatgctggaagcacggccctagagactttgataggtcaacacttctatgtgccacggctctctgccatcacccgtgctgtttgcgaacaatgtctatcctgcgaacaatatctaatccaaaacaaggacctactcgacccccagaaattcaggaaatgggagctgtgcctt

SEQ ID NO: 18444 - DNA, 94 bp, Homo sapiens
  MAP TO AC011311.11; EXPRESSED IN LUNG, SIGNAL = 0.69; EXPRESSED IN FETAL LIVER, SIGNAL = 0.57; EXPRESSED IN PLACENTA, SIGNAL = 0.76; EXPRESSED IN ADULT LIVER, SIGNAL = 0.77; EXPRESSED IN HEART, SIGNAL = 1.1; NT HIT: AF055481.1, EVALUE 7.40e-02; EST_HUMAN HIT: H17529.1, EVALUE 1.10e-01; SWISSPROT HIT: P04264, EVALUE 8.10e+00
ttggagggttggaaggtgtattgccccttgccccctcctcctgaggttcgtgacctgtgagaagctaaaccactaccactggagaaggctaaag

SEQ ID NO: 18445 - DNA, 231 bp, Homo sapiens
  MAP TO AJ007973.1; EXPRESSED IN ADULT LIVER, SIGNAL = 0.66; EXPRESSED IN LUNG, SIGNAL = 1.2; EXPRESSED IN HELA, SIGNAL = 0.53; EXPRESSED IN BRAIN, SIGNAL = 0.69; EXPRESSED IN BONE MARROW, SIGNAL = 0.86; NT HIT: AJ007973.1, EVALUE 1.00e-127; SWISSPROT HIT: O31289, EVALUE 1.40e+00
gacatgaaagaattagaggaacctttgtaccgtgattccagtactacagatgtagagctatggggtagcagtactggagatcaaactgatgacactggcaatatcaacaagaacattaatcatggtaaactttacaggttacagcatatctttgtagatatctactctgagccttacagtaaccccagtgttgggttgttatgttactatcttgatgatgatgatttgtac

SEQ ID NO: 18446 - DNA, 136 bp, Homo sapiens
  MAP TO AC010203.13; EXPRESSED IN BRAIN, SIGNAL = 0.89; EXPRESSED IN PLACENTA, SIGNAL = 0.91; EXPRESSED IN HEART, SIGNAL = 1.3; EXPRESSED IN ADULT LIVER, SIGNAL = 1.1; EXPRESSED IN FETAL LIVER, SIGNAL = 0.81; EXPRESSED IN LUNG, SIGNAL = 1.3; EST_HUMAN HIT: AL528280.1, EVALUE 3.00e-55; NT HIT: AB038229.1, EVALUE 2.00e-55; SWISSPROT HIT: P45890, EVALUE 5.00e-03
cgaataattgcttcttttttctttttacttctacaataaggaactatatgtgtaaaggaatatccactatcaacaatgatacagcataattcggaaggattatctcggaaatacctatgtgcactgagagccccag

SEQ ID NO: 18447 - DNA, 86 bp, Homo sapiens
  MAP TO AC023905.4; EXPRESSED IN BONE MARROW, SIGNAL = 1.2; EXPRESSED IN PLACENTA, SIGNAL = 1.1; EXPRESSED IN ADULT LIVER, SIGNAL = 1.1; EXPRESSED IN BRAIN, SIGNAL = 1.1; NT HIT: AF056975.1, EVALUE 6.70e-02; SWISSPROT HIT: O00585, EVALUE 8.10e+00
cttctcctttgggtgttctcttccttcttcctttcttgcatcctaggagcccagagcctgtcagttccacactcaccactctgcat

SEQ ID NO: 18448 - DNA, 195 bp, Homo sapiens
  MAP TO AC006138.1; EXPRESSED IN BRAIN, SIGNAL = 0.82; EXPRESSED IN PLACENTA, SIGNAL = 0.64; EXPRESSED IN ADULT LIVER, SIGNAL = 0.93; EXPRESSED IN FETAL LIVER, SIGNAL = 0.41; SWISSPROT HIT: Q62130, EVALUE 4.30e+00; EST_HUMAN HIT: AL135720.1, EVALUE 1.00e-105; NT HIT: gi14752388, EVALUE 1.00e-106
gagtgttccatggatgagactccgtatgttgagactctggaacctggggggtcaggtggctcacctgatggggcaggaggctccaagttgcctccagttctggccaatcttatgggaagcatgggtgctggaaagggcccccaaggccctggaggaggaggcattaatgtccaagagatcctcacctccatcatg

SEQ ID NO: 18449 - DNA, 154 bp, Homo sapiens
  MAP TO AD001502.1; EXPRESSED IN BRAIN, SIGNAL = 6.8; EXPRESSED IN BONE MARROW, SIGNAL = 7.7; EXPRESSED IN PLACENTA, SIGNAL = 9.1; EXPRESSED IN ADULT LIVER, SIGNAL =   6; SWISSPROT HIT: Q05858, EVALUE 3.00e-01; EST_HUMAN HIT: AI961281.1, EVALUE 6.00e-17; NT HIT: gi14767332, EVALUE 2.00e-19
ctgatcgtctctgcctgcacgtttctgcagtgatgacgcgtccgcaccctgaaaggaagaaggggccacagttcgtgcctccgcagtcgtgcgggcattgccgggctttcagagccccagtttctccctcaccccacccctttccacgtgctac

SEQ ID NO: 18450 - DNA, 177 bp, Homo sapiens
  MAP TO AC008625.4; EXPRESSED IN LUNG, SIGNAL = 1.1; EXPRESSED IN BONE MARROW, SIGNAL =   1; EXPRESSED IN ADULT LIVER, SIGNAL = 0.74; NT HIT: gi15297120, EVALUE 1.00e-48; SWISSPROT HIT: P25700, EVALUE 2.50e+00; EST_HUMAN HIT: AA812197.1, EVALUE 2.00e-48
aaggtaagggagaatcagggtaaccatcagaagcagcacaatgctggctctctttagagggcaattttgtctacctacttctgctaactgggccttattgaagcctggtctggtctgcaacttgtagtgtcgtttataacgtcgtagggtgttcacctgcagctggaacagatcaac

SEQ ID NO: 18451 - DNA, 125 bp, Homo sapiens
  MAP TO AC008719.5; EXPRESSED IN PLACENTA, SIGNAL = 0.7; EXPRESSED IN ADULT LIVER, SIGNAL = 0.71; EXPRESSED IN FETAL LIVER, SIGNAL = 0.51; NT HIT: gi14723010, EVALUE 2.00e-64; SWISSPROT HIT: Q9Y2W7, EVALUE 3.00e-10; EST_HUMAN HIT: AL538404.1, EVALUE 3.00e-64
ataagattgaagatgagctggagatgaccatggtttgccatcggcccgagggactggagcagctcgaggcccagaccaacttcaccaagagggagctgcaggtcctttatcgaggcttcaaaaat

SEQ ID NO: 18452 - DNA, 153 bp, Homo sapiens
  MAP TO AC008536.5; EXPRESSED IN PLACENTA, SIGNAL = 0.78; EXPRESSED IN HEART, SIGNAL = 1.3; EXPRESSED IN ADULT LIVER, SIGNAL = 0.7; EXPRESSED IN FETAL LIVER, SIGNAL = 0.6; EXPRESSED IN LUNG, SIGNAL = 0.44; NT HIT: gi8923935, EVALUE 6.00e-81; SWISSPROT HIT: P20719, EVALUE 4.40e+00; EST_HUMAN HIT: BI758045.1, EVALUE 8.00e-81
acctcctcctcagagaaagcactggccaaccagttcctggcccctggccgtgtgccaaccacagccagagagcgagtgcccgccacaaagacggtgcatctgcagtcacgggcgcggtacaccagcgagatgcggagtgagctactaggcacg

SEQ ID NO: 18453 - DNA, 147 bp, Homo sapiens
  MAP TO AC000051.2; EXPRESSED IN ADULT LIVER, SIGNAL = 2.6; EXPRESSED IN LUNG, SIGNAL = 2.6; EXPRESSED IN BRAIN, SIGNAL = 0.6; EXPRESSED IN FETAL LIVER, SIGNAL = 2.5; EXPRESSED IN BONE MARROW, SIGNAL = 0.74; EST_HUMAN HIT: AI339340.1, EVALUE 3.00e-77; NT HIT: gi9845492, EVALUE 2.00e-77; SWISSPROT HIT: P19440, EVALUE 9.00e-22
gcagtgactgcagccctggagacccggcaccatcacacccagatcgcgtccaccttcatcgctgtggtgcaagccatcgtccgcacggctggtggctgggcagctgcctcggactccaggaaaggcggggagcctgccggctactga

SEQ ID NO: 18454 - DNA, 214 bp, Homo sapiens
  MAP TO AC005793.1; EXPRESSED IN HEART, SIGNAL = 1.1; EXPRESSED IN ADULT LIVER, SIGNAL = 1.2; EXPRESSED IN FETAL LIVER, SIGNAL = 0.75; EXPRESSED IN BRAIN, SIGNAL = 1.1; EXPRESSED IN LUNG, SIGNAL = 2.2; EXPRESSED IN BONE MARROW, SIGNAL = 1.6; EST_HUMAN HIT: BG984517.1, EVALUE 1.00e-89; NT HIT: AB011133.1, EVALUE 1.00e-115; SWISSPROT HIT: P12450, EVALUE 4.80e+00
gccacagcacagatggagggccgtctgcaggagttcctgacggcctacgcgcccggcgcccggctggcgctggctgatggcgtcttgggcttcatccaccaccagatcgtcgagctggcccgagactgcttggccaagtctggcgagaacctcgtcacctcccgctacttcctagagatgcaggagaagctggagcggcttctgcaggatgtgc

SEQ ID NO: 18455 - DNA, 220 bp, Homo sapiens
  MAP TO AC012384.16; EXPRESSED IN ADULT LIVER, SIGNAL = 1.4; EXPRESSED IN LUNG, SIGNAL = 2.3; EXPRESSED IN BRAIN, SIGNAL = 1.3; EXPRESSED IN BONE MARROW, SIGNAL = 1.4; EST_HUMAN HIT: BF511825.1, EVALUE 4.50e+00; SWISSPROT HIT: P06922, EVALUE 2.40e-02
cttcaggggcaggcctggtaagagcctggccaatcagaatagtcttcatttctagccatgggattggttcagagacaggcacatgaccgaaagtgggccaatcagagctgatcaatgtcaacttgggccatttactagagcttatccccagagtattggctcgcttctctgcagcaaccctgagctgataaaatgacagcctggatctgagggcagccat

SEQ ID NO: 18456 - DNA, 246 bp, Homo sapiens
  MAP TO AC007774.1; EXPRESSED IN PLACENTA, SIGNAL = 1.8; EXPRESSED IN HEART, SIGNAL = 1.2; EXPRESSED IN ADULT LIVER, SIGNAL = 1.8; EXPRESSED IN FETAL LIVER, SIGNAL = 1.1; EXPRESSED IN BRAIN, SIGNAL = 1.7; EXPRESSED IN HELA, SIGNAL = 1.3; EXPRESSED IN BONE MARROW, SIGNAL = 1.5; EST_HUMAN HIT: BE894740.1, EVALUE 1.00e-118; NT HIT: AL163302.2, EVALUE 8.90e-01; SWISSPROT HIT: Q13474, EVALUE 2.40e+00
aaagccagactcggaccccgaagcctcgccgctctctggccctgaacaagcctgagaagctggtggccccatccccagaccagaaaggaagtggcacaggggggaccactacccctccaaggtgccctgactcctgcggtcacccgaggcctgcatcatcctcacctccaggtgacagaaaaggaggacagtcccagctgacgctgttggatctggccgaggacaccatccactgtgacatctcaa

SEQ ID NO: 18457 - DNA, 183 bp, Homo sapiens
  MAP TO AC005258.1; EXPRESSED IN ADULT LIVER, SIGNAL = 1.4; EXPRESSED IN LUNG, SIGNAL = 2.3; EXPRESSED IN FETAL LIVER, SIGNAL = 1.4; EXPRESSED IN BRAIN, SIGNAL = 1.6; EXPRESSED IN BONE MARROW, SIGNAL = 1.6; SWISSPROT HIT: P25152, EVALUE 7.50e-02; EST_HUMAN HIT: BG395367.1, EVALUE 1.00e-98; NT HIT: AB040965.1, EVALUE 9.00e-99
tctttcctgcagctgcgcaactggacggcctccctgctctgctccgcagccgacctccccgcccgtggcttcagcaaccagatcccgctggtggcgcgggggaactgcaccttctatgagaaagtgaggctggcccagggcagcggagcacgcgggctgctcatcgtcagcagggagaggctg

SEQ ID NO: 18458 - DNA, 226 bp, Homo sapiens
  MAP TO AC024124.1; EXPRESSED IN BONE MARROW, SIGNAL = 2.6; EXPRESSED IN PLACENTA, SIGNAL = 4.2; EXPRESSED IN HEART, SIGNAL =   4; EXPRESSED IN ADULT LIVER, SIGNAL = 3.1; EXPRESSED IN FETAL LIVER, SIGNAL = 4.7; EXPRESSED IN LUNG, SIGNAL = 3.2; NT HIT: AF283320.1, EVALUE 1.00e-124; SWISSPROT HIT: P05781, EVALUE 7.80e-02
atgaagaatgccatgagaaatgaagggcgttgtgctgcagtgtttggggaaactggcttagggaaggaaggacacttgagctgctaccaaggagcagccgtccggtgggagggcagttcaggaagagcagacatccacggaggaggcgctggggcagagggcagcctggtcgctggattcgggggaggaaccacatcaggccatgagctggagctggtggtagaag

SEQ ID NO: 18459 - DNA, 481 bp, Homo sapiens
  MAP TO AC020914.6; EXPRESSED IN LUNG, SIGNAL = 1.3; EXPRESSED IN FETAL LIVER, SIGNAL = 1.9; EXPRESSED IN BRAIN, SIGNAL = 1.3; EXPRESSED IN BONE MARROW, SIGNAL = 0.97; EXPRESSED IN HEART, SIGNAL = 1.2; EXPRESSED IN ADULT LIVER, SIGNAL = 0.97; NT HIT: AF277806.1, EVALUE 0.00e+00; SWISSPROT HIT: P20138, EVALUE 2.00e-36; EST_HUMAN HIT: AU138048.1, EVALUE 1.00e-05
ctgtcacatgcacagagagcttgtcatatatgtagttccatttcctgcttcctctctccacctggaagtagtacttccctgaatcccccttcctggcatctctgatgctcagggagcagttgttggtctgtgggtccccaaggaggaggaatcgaccgtgggtatcctcttgcacttttccacttggggtgtttgtggccactggaatatcccatggtatatcggccccttccttgaaccaggatccataaacagggctagaggcagtccagttgtaatgggggtaaaggacactgcagggcacagagacacacagaccctcctgcacagtcaccgactctggcacctccagcctgtatcttgacagtaggtcctgggacgctgtggagaaacgagggtcagcccagcccccactgtccctctcttcatttgcccatagcaggggcagcagcatctctgaggcagaggcttcctgggctcc

SEQ ID NO: 18460 - DNA, 234 bp, Homo sapiens
  MAP TO AC018427.3; EXPRESSED IN ADULT LIVER, SIGNAL = 0.95; EXPRESSED IN LUNG, SIGNAL = 1.4; EXPRESSED IN FETAL LIVER, SIGNAL = 0.96; EXPRESSED IN BONE MARROW, SIGNAL = 1.1; EXPRESSED IN PLACENTA, SIGNAL = 1.2; NT HIT: gi13162313, EVALUE 2.10e-01; SWISSPROT HIT: P53420, EVALUE 2.10e+00
ttacagcatgctcccactggggtgttccaggaagagacatggctgggaacctgtcccatgctctgatggccaggctgcttgaagctgagctcccatatccatggccaaatgccctacagcagtcctggaggccagactctgaagtcctgtggaagtccttcctccagcaggaggcttagggcccagatgggagatgcccttgtcccctgcagtcaagtggctactggtcccgat

SEQ ID NO: 18461 - DNA, 199 bp, Homo sapiens
  MAP TO AC002101.1; EXPRESSED IN HEART, SIGNAL = 1.7; EXPRESSED IN ADULT LIVER, SIGNAL = 0.81; EXPRESSED IN FETAL LIVER, SIGNAL = 0.57; EXPRESSED IN LUNG, SIGNAL = 0.62; EXPRESSED IN PLACENTA, SIGNAL =   1; EST_HUMAN HIT: BE745683.1, EVALUE 1.70e-02; SWISSPROT HIT: Q09392, EVALUE 1.40e+00
gtagcctacccgacttgcagggatctggacgtggccattgggggacatccctctgtctgtcacaccacacgccagaagctcagagagattccagggagggaggcggattctcatgttctccgagaccctcctgggccagagccctgcctgttggaccctgtgatgtcagtgggtgcagcagcccccgagatggatgcgg

SEQ ID NO: 18462 - DNA, 360 bp, Homo sapiens
  MAP TO AC008999.5; EXPRESSED IN HEART, SIGNAL = 1.1; EXPRESSED IN ADULT LIVER, SIGNAL = 0.85; EXPRESSED IN LUNG, SIGNAL = 2.6; EXPRESSED IN FETAL LIVER, SIGNAL = 1.3; EST_HUMAN HIT: BI759915.1, EVALUE 0.00e+00; NT HIT: M17303.1, EVALUE 0.00e+00; SWISSPROT HIT: P06731, EVALUE 3.00e-66
cctcacttctaaccttctggaacccgcccaccactgccaagctcactattgaatccacgccgttcaatgtcgcagaggggaaggaggtgcttctacttgtccacaatctgccccagcatctttttggctacagctggtacaaaggtgaaagagtggatggcaaccgtcaaattataggatatgtaataggaactcaacaagctaccccagggcccgcatacagtggtcgagagataatataccccaatgcatccctgctgatccagaacatcatccagaatgacacaggattctacaccctacacgtcataaagtcagatcttgtgaatgaagaagcaactggccagttccgggtatacc

SEQ ID NO: 18463 - DNA, 112 bp, Homo sapiens
  MAP TO AC005265.1; EXPRESSED IN BONE MARROW, SIGNAL =   3; EXPRESSED IN PLACENTA, SIGNAL = 3.4; EXPRESSED IN HEART, SIGNAL = 4.5; EXPRESSED IN ADULT LIVER, SIGNAL = 2.8; EXPRESSED IN BRAIN, SIGNAL = 3.1; EST_HUMAN HIT: D83891.1, EVALUE 2.10e+00; NT HIT: AL139794.3, EVALUE 2.30e-02; SWISSPROT HIT: P43135, EVALUE 6.10e+00
tatcatctggacactgggtcctccccaagggccacatcacacgtctgcattgccaggacaggagaagcagcagcagcttctgtttccaagtaaagatgacaagtgtggatga

SEQ ID NO: 18464 - DNA, 159 bp, Homo sapiens
  MAP TO AC008959.4; EXPRESSED IN ADULT LIVER, SIGNAL = 0.55; SWISSPROT HIT: P08547, EVALUE 2.00e-06; EST_HUMAN HIT: BF825127.1, EVALUE 1.00e-08; NT HIT: U53588.1, EVALUE 6.00e-07
gacaaaagcaacctgattatctccataaatgtggaagaagattttgccaaaatccaaaatgtcttcgtgataatatttaacaaactaagaatagaagggaaatttttcagcctgataaagggcatctacaaaaaactcacagctaatatcatacttaaa

SEQ ID NO: 18465 - DNA, 143 bp, Homo sapiens
  MAP TO AF196970.1; EXPRESSED IN ADULT LIVER, SIGNAL = 1.3; EXPRESSED IN BRAIN, SIGNAL = 1.3; EXPRESSED IN LUNG, SIGNAL = 1.3; EXPRESSED IN PLACENTA, SIGNAL = 1.5; SWISSPROT HIT: P25777, EVALUE 5.20e-01; EST_HUMAN HIT: BF688268.1, EVALUE 2.00e-19; NT HIT: AF196779.1, EVALUE 8.00e-37
cgcgcaccctgtcctgccccttctcgggccaacaaccccacacgacgcagcggtgtgagaaccagcaaccggaaccgcaaaagcacggctttcccggagcccgggctctggactggcacccactgcgcatgctccagagcggc

SEQ ID NO: 18466 - DNA, 221 bp, Homo sapiens
  MAP TO AL109944.19; EXPRESSED IN PLACENTA, SIGNAL = 1.4; EXPRESSED IN ADULT LIVER, SIGNAL = 1.5; EXPRESSED IN BRAIN, SIGNAL = 1.6; EXPRESSED IN HELA, SIGNAL = 1.9; EXPRESSED IN FETAL LIVER, SIGNAL = 1.6; EXPRESSED IN LUNG, SIGNAL = 0.64; SWISSPROT HIT: P49421, EVALUE 8.20e-01; EST_HUMAN HIT: BG387224.1, EVALUE 1.20e+00; NT HIT: AB035308.1, EVALUE 5.10e-02
tcaaccagaaacagcatgatggtactctgttaggtcatctccaaggagaagaattttaggtgagcgcttcaatgtccctaaaatagggcccaactccacttcgttgttggttggcattgctgcttccagcctgctgccagttcttgaactggactctttgtgccaagaccccgggtcttcttcctctttaccaaggtgcttcataaagacagtcactctcc

SEQ ID NO: 18467 - DNA, 163 bp, Homo sapiens
  MAP TO AC006930.1; EXPRESSED IN ADULT LIVER, SIGNAL = 5.8; EXPRESSED IN BRAIN, SIGNAL = 4.9; EXPRESSED IN LUNG, SIGNAL = 2.9; EXPRESSED IN BONE MARROW, SIGNAL = 3.7; EXPRESSED IN PLACENTA, SIGNAL = 3.1; NT HIT: gi14763353, EVALUE 1.00e-66; SWISSPROT HIT: P53686, EVALUE 1.50e-02; EST_HUMAN HIT: BG484613.1, EVALUE 2.00e-66
ggccttgcctcgacttcccctgcacaatcacagacctgaagtcggggatgccagaggcagtgctgatgccggcacccgtgtggaacaccacactggaagactgccagaccagcctcgccagttcccacaccttccgctccagctcctccggggggtcgaagat

SEQ ID NO: 18468 - DNA, 150 bp, Homo sapiens
  MAP TO AC011400.4; EXPRESSED IN BONE MARROW, SIGNAL = 8.9; EXPRESSED IN PLACENTA, SIGNAL = 7.7; EXPRESSED IN ADULT LIVER, SIGNAL = 8.4; EXPRESSED IN HEART, SIGNAL = 8.8
aagaaagaagaagaaaaagaaggggagaaggaggaagaggaagaggaggaggaggaagaggaagaggaggaagaggaagaagaagaagaaggagaaggagaaggagaaggagaagaagaaggagaagaagaagaagaaggcggcacttag

SEQ ID NO: 18469 - DNA, 157 bp, Homo sapiens
  MAP TO AC012152.12; EXPRESSED IN ADULT LIVER, SIGNAL = 1.3; EXPRESSED IN PLACENTA, SIGNAL = 1.3; EXPRESSED IN HEART, SIGNAL = 1.6; EXPRESSED IN LUNG, SIGNAL = 1.4; EXPRESSED IN BRAIN, SIGNAL = 1.4; SWISSPROT HIT: P52427, EVALUE 2.00e+00; EST_HUMAN HIT: BF953781.1, EVALUE 2.00e-01
ctccctctctatattgccataatcaagatgggcaagggaggtcatctcttttctctctctctcactgatggcaataggaacgtttccaagacctccagcttccttgaggtgatgctttccgaccagagcagatagctcaagaatcagggcggagaat

SEQ ID NO: 18470 - DNA, 396 bp, Homo sapiens
  MAP TO AC006163.1; EXPRESSED IN BONE MARROW, SIGNAL =   1; EXPRESSED IN PLACENTA, SIGNAL = 2.9; EXPRESSED IN ADULT LIVER, SIGNAL = 2.4; EXPRESSED IN FETAL LIVER, SIGNAL = 2.3; EXPRESSED IN BRAIN, SIGNAL = 1.9; NT HIT: gi7662666, EVALUE 0.00e+00; SWISSPROT HIT: P24639, EVALUE 3.00e-03
gcctctttgcccggagcatcggtgttgtggaggagaaagtttcccaaaacttggggaccaacttgcctcagctcggacaaccttcctccactggcccctctaactctgaacatccgcagcccgctctggaccctaggtctaatgacttggcaagggttcctctgaagctcagcgtgcctccatcagatggcttcccacctgcaggaggttctgcagtgcagaggtggcctccatcgtgggggctgcctgccatggattcctggccccctgaggatccttggcagatgatggctgctgcggctgaggaccgcctgggggaagcgctgcctgaagaactctcttacctctccagtgctgcggccctcgctccgggcagtggccctttgcctggggagt

SEQ ID NO: 18471 - DNA, 157 bp, Homo sapiens
  MAP TO AF002993.1; EXPRESSED IN PLACENTA, SIGNAL = 1.5; EXPRESSED IN ADULT LIVER, SIGNAL = 1.5; EXPRESSED IN BRAIN, SIGNAL = 1.2; EXPRESSED IN LUNG, SIGNAL = 1.7; NT HIT: gi14753865, EVALUE 2.00e-83; SWISSPROT HIT: Q60436, EVALUE 7.00e-16; EST_HUMAN HIT: AL527779.1, EVALUE 4.00e-83
ggtcctgagtttgtgcgcaaacatatcttcaacaagcatgcagagaaaattgaggaagtgaaaaaggaagtcgcgttttttaacaacttcctcactgatgctaagcgcccagctctgcctgagatcaagccagcccagccacctggccccgcccaga

SEQ ID NO: 18472 - DNA, 500 bp, Homo sapiens
  MAP TO AC000109.1; EXPRESSED IN HELA, SIGNAL = 2.1; EXPRESSED IN BRAIN, SIGNAL = 0.6; EXPRESSED IN ADULT LIVER, SIGNAL = 0.56; EST_HUMAN HIT: BI837767.1, EVALUE 0.00e+00; NT HIT: gi7705609, EVALUE 0.00e+00; SWISSPROT HIT: P35200, EVALUE 8.00e-14
caccacccggacatcgctcaggctgccggcaccgtgaagatctggacttcagagcatgtctttgaccactcatgggaaactgttacaacagctgcaatgcagaaatacccaaaccctatgaaccaactgtggttggagttgatgtgttggacagacatgtagatccctctggaaagttgcacagccacagacttctcagcacagagtggggactaccttccattgtgaagtctcttattggtgcagcaagaatgaaaacatatgtgcaagaacattctgtagttgatcctgtagagaaaacaatgaaacttaaatctactaatatttcatttacagatatggtttcagcagatgagagacttatatacaaaccacgtcctcgggacccagaaaaaactattttgactcaagaagccataatcaccatgaaaggagttagcctcagcagttactttgaagaactgatggcaagtatgatatcctcaaacactagtaaaggc

SEQ ID NO: 18473 - DNA, 270 bp, Homo sapiens
  MAP TO AC010407.4; EXPRESSED IN ADULT LIVER, SIGNAL = 1.1; EXPRESSED IN HEART, SIGNAL = 1.3; EXPRESSED IN BRAIN, SIGNAL = 1.1; EXPRESSED IN PLACENTA, SIGNAL =   1; EST_HUMAN HIT: BI488505.1, EVALUE 3.00e-45; NT HIT: AL163227.2, EVALUE 2.00e-35; SWISSPROT HIT: P17277, EVALUE 3.30e-01
ctactggggcagtgcagaaggaaaatgtggggttggagcccctacagagtccccaatagggcactgcctagtggacctgtgaaaagagggccaccaccttccagacccaagaatggtagatccaccaacagcttgtaccatgtgcctggaaaagctgcaggcactcaatgccagcctgtgaaagcagctgggaggggcactgtaccctgcaaagtcatagaggcagagctgcacaaggttgtgagagcccacatcttgcatcggtgtgac

SEQ ID NO: 18474 - DNA, 410 bp, Homo sapiens
  MAP TO AL031714.8; EXPRESSED IN BONE MARROW, SIGNAL = 1.3; EXPRESSED IN ADULT LIVER, SIGNAL =   1; EXPRESSED IN HEART, SIGNAL = 2.8; EXPRESSED IN BRAIN, SIGNAL = 1.2; SWISSPROT HIT: Q16204, EVALUE 4.00e-01; EST_HUMAN HIT: AU122024.1, EVALUE 0.00e+00; NT HIT: AB015440.1, EVALUE 3.90e-01
tgtgtgtccttccgtagcattgagagagaagagggaggatgcccaggtaaaagatgggaaatagcctagaatatcaactgtgatggtccctggtggggctaatggtggcaaacttttctgcttttttgtaaagaaataacacagggtcctaaaagcccgtatatcctggaagcagagggtctgcgtcggaacagccgactctggaagggcgttggctatgtccctggacgtctcctgcagctcctcccatctcccctgagtctggcccagctggaaaggatgtgggggccacaggttaagtggccaccctggggcctgtgttcccagactgcctggctgtgctgggagttctgtcctgggagagacacagcttcgtctcggctgcggccgtgtccccaaggctctgttcc

SEQ ID NO: 18475 - DNA, 248 bp, Homo sapiens
  MAP TO AC008537.4; EXPRESSED IN PLACENTA, SIGNAL = 0.68; EXPRESSED IN HEART, SIGNAL =   1; EXPRESSED IN ADULT LIVER, SIGNAL = 1.2; EXPRESSED IN FETAL LIVER, SIGNAL = 0.7; EXPRESSED IN BRAIN, SIGNAL = 0.91; EXPRESSED IN HELA, SIGNAL = 0.6; SWISSPROT HIT: P20813, EVALUE 9.00e-15; EST_HUMAN HIT: AA574228.1, EVALUE 0.00e+00; NT HIT: gi14277708, EVALUE 0.00e+00
gagccctcgtggaccccaccttcctcttccattccattaccgccaacatcatctgctccatcatctttggaaaacgcttccactaccaagatcaagagttcctgaagacgctgaacttgttctgccagagtttcttactcatcagctctatatccagccaggtccaggagagggagaaggagagggagggtgggggtgaggtgaacatccaggacacacgagaaaaggatgacctgacttgggggctc

SEQ ID NO: 18476 - DNA, 215 bp, Homo sapiens
  MAP TO AC008599.5; EXPRESSED IN BRAIN, SIGNAL = 0.69; EXPRESSED IN HELA, SIGNAL = 0.79; EXPRESSED IN BONE MARROW, SIGNAL = 0.8; EXPRESSED IN ADULT LIVER, SIGNAL =   1; NT HIT: gi14781268, EVALUE 1.00e-118; SWISSPROT HIT: O76082, EVALUE 9.00e-25; EST_HUMAN HIT: AL557808.1, EVALUE 1.00e-113
gatgctgacctcagtgggttactttgctctgtctctggatgctcctaatttacatggagatgcctacctgaactgtttcctctctgccttgattgaaattccagcttacattacagcctggctgctattgcgaaccctgcccaggcgttatatcatagctgcagtactgttctggggaggaggtgtgcttctcttcattcaactggtacctgtgg

SEQ ID NO: 18477 - DNA, 129 bp, Homo sapiens
  MAP TO AF196971.1; EXPRESSED IN ADULT LIVER, SIGNAL = 1.7; EXPRESSED IN LUNG, SIGNAL = 2.6; EXPRESSED IN BRAIN, SIGNAL = 1.6; EXPRESSED IN FETAL LIVER, SIGNAL = 2.4; EXPRESSED IN BONE MARROW, SIGNAL = 2.3; NT HIT: AF207550.1, EVALUE 3.00e-54; SWISSPROT HIT: O60830, EVALUE 6.00e-19; EST_HUMAN HIT: BF683458.1, EVALUE 5.00e-54
tgcgggcagccagcacagccccggtcaatgctccactggtgatagagttccagggatcctccttgccccgaagccgcaccaggccacagtcaatggtggagaacaggcccccccacactgcgaagctac

SEQ ID NO: 18478 - DNA, 81 bp, Homo sapiens
  MAP TO AC006980.3; EXPRESSED IN HEART, SIGNAL = 2.1; EXPRESSED IN BRAIN, SIGNAL =   2; EXPRESSED IN HELA, SIGNAL = 1.3; EXPRESSED IN BONE MARROW, SIGNAL = 1.7; EXPRESSED IN PLACENTA, SIGNAL = 1.3; EXPRESSED IN ADULT LIVER, SIGNAL =   2; EXPRESSED IN FETAL LIVER, SIGNAL = 0.86; EXPRESSED IN LUNG, SIGNAL = 1.7; EST_HUMAN HIT: BF827606.1, EVALUE 9.00e-05
cttttttaaaatggcatttgcctcctctttattttgttcaagtttcttcttcttctcctcttccatgtaatatgtgtgcat

SEQ ID NO: 18479 - DNA, 225 bp, Homo sapiens
  MAP TO AL022332.2; EXPRESSED IN BONE MARROW, SIGNAL = 0.77; EXPRESSED IN PLACENTA, SIGNAL = 0.83; EXPRESSED IN ADULT LIVER, SIGNAL = 0.74; EXPRESSED IN BRAIN, SIGNAL = 0.81; EXPRESSED IN HELA, SIGNAL = 0.54; EST_HUMAN HIT: AA992366.1, EVALUE 3.00e-87; NT HIT: AL445821.1, EVALUE 5.20e-02; SWISSPROT HIT: P87132, EVALUE 3.80e-01
atgggcttatgtctggggccccagaggagtgagggcagcaaagaacagacaatgggctccacgcagacctctgcaacacactggagcctgagcccactgctgcaggacccatcaacaacaagaaggagggagaaggtgtatgacccccctccctgcaactctcccatgatctccatggacacccaaagatatacactgcagcacccagcaaagacgtggtacttg

SEQ ID NO: 18480 - DNA, 95 bp, Homo sapiens
  MAP TO AC018514.6; EXPRESSED IN FETAL LIVER, SIGNAL = 5.5; EXPRESSED IN PLACENTA, SIGNAL = 3.6; EXPRESSED IN ADULT LIVER, SIGNAL = 2.1; EST_HUMAN HIT: BE272282.1, EVALUE 1.70e+00
atttcattaatgaaagtagtaattcttgtcagtgtgattgcaagcacaaactcaaagataacattacatggcagtccttggttggcaattgaatg

SEQ ID NO: 18481 - DNA, 181 bp, Homo sapiens
  MAP TO AL035666.7; EXPRESSED IN BRAIN, SIGNAL =  14; EXPRESSED IN BONE MARROW, SIGNAL =  15; EXPRESSED IN PLACENTA, SIGNAL =  12; EXPRESSED IN HEART, SIGNAL =  16; EXPRESSED IN ADULT LIVER, SIGNAL = 9.6; EXPRESSED IN HELA, SIGNAL =  17; SWISSPROT HIT: P50677, EVALUE 2.50e+00
aactctcatcgaagagtgggaagttgttgcttggaatcacattaagattaataatgacaatagagataatgacaactgcaaatatagcaactctcccactcacaatggcagtcccgattgcacaaagaatccagtaccaggaagggacacattttaagctatcttggaactgtttcctaat

SEQ ID NO: 18482 - DNA, 326 bp, Homo sapiens
  MAP TO AC008971.5; EXPRESSED IN PLACENTA, SIGNAL = 0.78; EXPRESSED IN ADULT LIVER, SIGNAL = 0.76; EXPRESSED IN LUNG, SIGNAL = 0.67; EXPRESSED IN BONE MARROW, SIGNAL = 0.6; SWISSPROT HIT: Q28247, EVALUE 3.10e+00; NT HIT: gi14725891, EVALUE 0.00e+00; EST_HUMAN HIT: N32718.1, EVALUE 0.00e+00
ctgttcagcatgatttttgttttttgctccctgcattgccagctctggatttacgtaaccatttttaactttcttgatagaaccatactcgtacattccatctgatgacaatggagggtcctgaggggtttgctgtgggggaatgccctttgcaacctctgtaagtggggcttcagagatactgcacagatgaacagtaaaacacaaagtgagcaccaatgcagagaagaagaacatgacctggaattctgtacccaacagtcttcccagctccagatgggcccagtctatagcacccaaaaggtaacccagggcacctccaaaac

SEQ ID NO: 18483 - DNA, 147 bp, Homo sapiens
  MAP TO AB022537.1; EXPRESSED IN ADULT LIVER, SIGNAL = 0.71; EXPRESSED IN BRAIN, SIGNAL = 1.1; EXPRESSED IN FETAL LIVER, SIGNAL = 3.5; NT HIT: gi15303540, EVALUE 2.00e-77; EST_HUMAN HIT: BG180370.1, EVALUE 3.00e-77
ggagcgctgacccagctgatccagctctatcatcgcttccaccgggtgctgtcccagccgcagctccgagccctccctgcccgggctgagctcatcaacattcaccaccttatggtggagctcaagaagcataagcccaacttctga

SEQ ID NO: 18484 - DNA, 354 bp, Homo sapiens
  MAP TO AC011471.5; EXPRESSED IN PLACENTA, SIGNAL = 1.3; EXPRESSED IN ADULT LIVER, SIGNAL =   1; EXPRESSED IN BRAIN, SIGNAL = 0.98; EXPRESSED IN LUNG, SIGNAL = 0.68; SWISSPROT HIT: P46598, EVALUE 9.30e-01; NT HIT: gi14767583, EVALUE 0.00e+00; EST_HUMAN HIT: BI520890.1, EVALUE 1.00e-110
ggtcaagaggatgcatctgtgggttcaagacccacttcttggtctgtgggcctggggaggggtgctggtcaaggagcatgggtggtgacagaggtgtctgggggcagtgtgagatgaatcagatgagcggagaacctctggacaagctgaacttcgaggccatcaacttctgtcggggtctgggcagccaggcatccaccgtgactgagattgtgaagcagcaagaccccctggtctacaaggccatccagcaaggcatcaatgctgtgaaccaggaagccatgaacaatgcacagaggattgaaaagtgggtcatcttggagaaggacttttccatctatggtggagagctag

SEQ ID NO: 18485 - DNA, 158 bp, Homo sapiens
  MAP TO AC000036.5; EXPRESSED IN ADULT LIVER, SIGNAL = 0.96; EXPRESSED IN LUNG, SIGNAL = 3.9; EXPRESSED IN HELA, SIGNAL = 0.74; SWISSPROT HIT: Q64355, EVALUE 1.70e-01; EST_HUMAN HIT: AI198827.1, EVALUE 9.00e-84
tcagcgttcagactcatcaggtgtcgatcccccatggtcgggctcaggtgggcccaggtctcgtcattggctctgtcctctcctgtgaggcagctgcagcagttgcagggcagggtcaggggattcctcagccggaacctctggcacttccccttctc

SEQ ID NO: 18486 - DNA, 305 bp, Homo sapiens
  MAP TO AC010423.5; EXPRESSED IN BRAIN, SIGNAL = 0.87; EXPRESSED IN PLACENTA, SIGNAL = 0.76; EXPRESSED IN ADULT LIVER, SIGNAL =   1; NT HIT: gi14149648, EVALUE 7.10e-02; SWISSPROT HIT: P47806, EVALUE 1.20e+00; EST_HUMAN HIT: AL570655.1, EVALUE 1.60e+00
atgcaagatttcaggctctggcctcttcccatgttcctgtcactgcagcccaaagctgtccaaaatatcagttggaaaactaaagagaaacaaggccaggaggaggagggaaagtccatcaaagcccagcaatgctgcccctatcacataatgggtatttctttcctggagagaagactacacatcagccatccaggacctttcctgcaaggatgccgtaaaatcacttgcttcacccatcgttcactacctgtgtcacacgtttctctgtcagcacctgcggcccacctgggcttcctatggag

SEQ ID NO: 18487 - DNA, 137 bp, Homo sapiens
  MAP TO AL031730.1; EXPRESSED IN BONE MARROW, SIGNAL = 1.2; EXPRESSED IN PLACENTA, SIGNAL = 1.4; EXPRESSED IN ADULT LIVER, SIGNAL = 1.2; EXPRESSED IN BRAIN, SIGNAL = 1.5; EST_HUMAN HIT: AL547489.1, EVALUE 1.00e-67; NT HIT: AL049847.1, EVALUE 2.00e-71; SWISSPROT HIT: P43564, EVALUE 2.00e-04
gcattgtggctgccctgacctggccagcctcactcctcagtgtcgccaatgtcatcgacaacccctggggggtgtgtctccatcgatcagcagaggttggcaagcacctggcccacatcctgctctcccggcagcag

SEQ ID NO: 18488 - DNA, 122 bp, Homo sapiens
  MAP TO AC016605.4; EXPRESSED IN BRAIN, SIGNAL =  16; EXPRESSED IN LUNG, SIGNAL =  31; EXPRESSED IN BONE MARROW, SIGNAL =  12; EXPRESSED IN PLACENTA, SIGNAL =  11; EXPRESSED IN ADULT LIVER, SIGNAL =  17; EXPRESSED IN HEART, SIGNAL =   8; EST_HUMAN HIT: BG676608.1, EVALUE 8.00e-59; NT HIT: gi14730809, EVALUE 1.00e-62
atggaccagcttttgggaaatatgattgaaatgtgggttgatcgaatggacaacattacccagcctgaaagaagaaaactttcagctttggctttgctctctcttctgccatctgataatag

SEQ ID NO: 18489 - DNA, 195 bp, Homo sapiens
  MAP TO AC005888.1; EXPRESSED IN LUNG, SIGNAL = 2.1; EXPRESSED IN BRAIN, SIGNAL =   2; EXPRESSED IN BONE MARROW, SIGNAL = 1.9; EXPRESSED IN PLACENTA, SIGNAL = 3.6; EXPRESSED IN ADULT LIVER, SIGNAL = 2.4; EST_HUMAN HIT: BE972756.1, EVALUE 2.00e-72; SWISSPROT HIT: P39764, EVALUE 7.30e+00
atggtggatcagactttggagcaggtgatccttggacgcccacagtacatcaccttcatgagcgcatcagtgaacaccagtctaaggaagacatctctgaacgtaattttggagattttgatgagttccattgaaacaaggaggaatgtgatgtccagtatcagttctgcagacccaaggacaaagaaaattctg

SEQ ID NO: 18490 - DNA, 83 bp, Homo sapiens
  MAP TO AC005276.1; EXPRESSED IN ADULT LIVER, SIGNAL = 0.88; EXPRESSED IN HELA, SIGNAL = 0.94; EXPRESSED IN BRAIN, SIGNAL = 1.5; EXPRESSED IN FETAL LIVER, SIGNAL =   2; EXPRESSED IN BONE MARROW, SIGNAL = 1.1; EXPRESSED IN PLACENTA, SIGNAL = 1.1; NT HIT: gi9635487, EVALUE 8.00e-23; EST_HUMAN HIT: BE150340.1, EVALUE 7.00e-21; SWISSPROT HIT: P21414, EVALUE 4.80e-02
tcttgcgaaaggacaatgcgtcaatatttatactgactctaaatatgccttccatattctgcaccaccatgtggtcgtatagg

SEQ ID NO: 18491 - DNA, 313 bp, Homo sapiens
  MAP TO AC010524.5; EXPRESSED IN HELA, SIGNAL = 1.9; EXPRESSED IN BONE MARROW, SIGNAL = 0.86; EXPRESSED IN BRAIN, SIGNAL = 0.85; EXPRESSED IN ADULT LIVER, SIGNAL = 0.92; EST_HUMAN HIT: AL522254.1, EVALUE 1.00e-78; SWISSPROT HIT: Q15562, EVALUE 2.00e-32; NT HIT: gi14757575, EVALUE 8.00e-79
ccagaacttgaccaggaagaaggcatggggggggccacgatcatatagctctcggaggccaccctttttctcagggaatttgtcgtagatctgccggacgtccacactctcgagcggcggcgctccggggctggggcagtgctggctgatgtgcacgaacaggtgcctctggtactgaggagggttggccgtgggtgagaagtcggaggtgagctggatctccagcctgtgctgcctgagcccaccaaatgccgtcaccatccccacagctctggccagctgttccacacagtccacccagcactgggcctga

SEQ ID NO: 18492 - DNA, 128 bp, Homo sapiens
  MAP TO AC026736.3; EXPRESSED IN BRAIN, SIGNAL = 3.3; EXPRESSED IN PLACENTA, SIGNAL = 4.4; EXPRESSED IN HEART, SIGNAL = 4.2; EXPRESSED IN ADULT LIVER, SIGNAL = 5.5; EXPRESSED IN FETAL LIVER, SIGNAL = 5.9; EST_HUMAN HIT: BG709020.1, EVALUE 6.30e-01; NT HIT: U49915.1, EVALUE 1.10e-01; SWISSPROT HIT: O51067, EVALUE 4.60e+00
ctgcgaggagctgcaggaggtggagggaccaaggcaggagctgacgataaggaatttccaagcctatgagtatgacagcgccaagtgtcgggtctgtttcagttcagttgttttggtcccgttgaggg

SEQ ID NO: 18493 - DNA, 174 bp, Homo sapiens
  MAP TO AF015726.1; EXPRESSED IN HEART, SIGNAL = 1.2; EXPRESSED IN ADULT LIVER, SIGNAL = 1.3; EXPRESSED IN FETAL LIVER, SIGNAL = 1.3; EXPRESSED IN PLACENTA, SIGNAL = 1.1; EST_HUMAN HIT: BF810488.1, EVALUE 1.00e-03; NT HIT: AL163268.2, EVALUE 2.00e-93; SWISSPROT HIT: P70178, EVALUE 8.60e-01
atggaggcagagattggagccatgtggccaggagctcaggactgcctgctgccctcagttgctggcagaagcaaggaacgaattctcccctggatctttcagaaagaggcagctctgctgacatctcaatgtgagctacctgagacttacattgggcttctgatctctaggact

SEQ ID NO: 18494 - DNA, 453 bp, Homo sapiens
  MAP TO AC012313.5; EXPRESSED IN BONE MARROW, SIGNAL = 1.3; EXPRESSED IN PLACENTA, SIGNAL = 1.2; EXPRESSED IN ADULT LIVER, SIGNAL = 1.3; EXPRESSED IN HEART, SIGNAL = 1.8; EXPRESSED IN LUNG, SIGNAL = 2.5; EXPRESSED IN BRAIN, SIGNAL = 1.4; EST_HUMAN HIT: BG820551.1, EVALUE 0.00e+00; NT HIT: gi14755571, EVALUE 2.00e-31; SWISSPROT HIT: P28698, EVALUE 2.00e-14
atggctgcccagatgagtgaggcatcagccctggccccccaggtcttcccgagtccactggaactgatggtgggtgagcccagctccaagagccctggccagtgcttctgggggttctgctatgagaaggcagcagggccccgaggggccctggctcagctgcgtgagctgtgttgccagtggctgatgcctgaggcctgctccaaggagcagatgctggagctcttggtgctggagcagttattgggcacactgctcccagagatccaggcctacacgcaggagcagtggctaggcagccctgaggaggccactgccctggcagagcggctacagcaggagtcagctgggccaggactccagatgagtgggggctggtctgggggctgggtgtgcttcccctgctcacgaccccagctgagccagcactggggccagtcgtgggttggtggc

SEQ ID NO: 18495 - DNA, 133 bp, Homo sapiens
  MAP TO AC010169.7; EXPRESSED IN ADULT LIVER, SIGNAL = 0.61; EXPRESSED IN FETAL LIVER, SIGNAL = 0.5; SWISSPROT HIT: P32241, EVALUE 4.00e-20; EST_HUMAN HIT: BI819409.1, EVALUE 6.00e-69; NT HIT: X75299.1, EVALUE 4.00e-69
cgagccctcggagcactggtccgactccccgctgtcgaagagggccaagtctttgatgaagacagcggcagccctcaggatgaaggatatgaagaggtgcatgtggatgtagttccgcgtgcagtggagcttc

SEQ ID NO: 18496 - DNA, 122 bp, Homo sapiens
  MAP TO AC000358.1; EXPRESSED IN PLACENTA, SIGNAL = 0.8; EXPRESSED IN ADULT LIVER, SIGNAL = 0.5; SWISSPROT HIT: P46729, EVALUE 7.90e+00; EST_HUMAN HIT: BE615665.1, EVALUE 1.50e-01; NT HIT: AF144523.1, EVALUE 1.00e-01
ctaggattcaggtcgaattccgcgatgatccgcctgctgcaagcccaggttcttacaggaacgctgaccgggctgtctgctggtcgcgtggtgtgctgtttgttttagtctcacctgggggt

SEQ ID NO: 18497 - DNA, 125 bp, Homo sapiens
  MAP TO AC010483.4; EXPRESSED IN LUNG, SIGNAL = 3.5; EXPRESSED IN PLACENTA, SIGNAL = 2.5; EXPRESSED IN ADULT LIVER, SIGNAL =   3; EXPRESSED IN HEART, SIGNAL = 2.6; SWISSPROT HIT: Q92628, EVALUE 1.20e+00; NT HIT: L78810.1, EVALUE 2.00e-40; EST_HUMAN HIT: BF982332.1, EVALUE 3.00e-46
gagtgaagctgcagaccttcgctgtgagtgttacagctcttaaggcagcacgtctggagttgttcgttcctcctggtgggctcgtggtctcactggcttcaggagagaagctgcagatcttcgcg

SEQ ID NO: 18498 - DNA, 519 bp, Homo sapiens
  MAP TO AC025182.2; EXPRESSED IN FETAL LIVER, SIGNAL = 1.9; EXPRESSED IN ADULT LIVER, SIGNAL = 1.3; SWISSPROT HIT: P10361, EVALUE 9.50e-01; NT HIT: AF224669.1, EVALUE 0.00e+00; EST_HUMAN HIT: BE463763.1, EVALUE 0.00e+00
aaagaggcacaatgcctagtgggcctgtttggattttggaggcaacatatttgtcatttgggtgtgttattctggcccatttatcaagtgactcaaaggctgccagttttgagtggggtccagaacaggagaaggctctgcaacaggtccaggctgctgtgcaagctgctctgccacttgggccatttgacccggcagatccaatgatgcctgaggtgtcagtggcagataaagatgctgtttggagcctctggcaggcccccataggtgaatcacagcagaggcctctaggattttggagcaaggccctgccatcttctgcaaataactactctccttttgagacaaagctcttggcctgttactgggctttgatggaaactgaatatttgactacaggtcatcaagtcaccatgcatcctgaacttcctattatgaactgtgtggtttctgacccatcttgccatgaagtagggcatgcacagcagcatttcatcataaaatggaagtggtgtatat

SEQ ID NO: 18499 - DNA, 244 bp, Homo sapiens
  MAP TO AL031007.1; EXPRESSED IN ADULT LIVER, SIGNAL = 1.2; EXPRESSED IN BRAIN, SIGNAL = 1.2; EXPRESSED IN LUNG, SIGNAL = 1.4; EXPRESSED IN BONE MARROW, SIGNAL = 1.5; EXPRESSED IN PLACENTA, SIGNAL = 1.1; SWISSPROT HIT: Q07960, EVALUE 7.90e-01; NT HIT: gi15308614, EVALUE 0.00e+00; EST_HUMAN HIT: AW367998.1, EVALUE 0.00e+00
cactagttcctgggggttgtaatacatctcctgtcaggcgacaccacccagctgggaaaatatctcgagaatcatacttgcaccagtaatcaaaagctccactccagccatcaaatgtgatatgaacttcatcccctttaacatctccaatggtcgcaggacagatgagatacgggttctttttgtcaatagcttccagtttcatccccactttaaaattatttagtgggggctttggtggttc

SEQ ID NO: 18500 - DNA, 117 bp, Homo sapiens
  MAP TO AC016619.5; EXPRESSED IN LUNG, SIGNAL = 2.9; EXPRESSED IN BRAIN, SIGNAL = 2.7; EXPRESSED IN BONE MARROW, SIGNAL = 2.1; EXPRESSED IN ADULT LIVER, SIGNAL = 2.1; EXPRESSED IN PLACENTA, SIGNAL = 2.4; NT HIT: gi6006008, EVALUE 1.00e-59; EST_HUMAN HIT: BE006077.1, EVALUE 7.00e-50; SWISSPROT HIT: P17301, EVALUE 9.00e-03
cttccataaaattgcaaccagagctaacagcaaaaggattccagcaattatacttcctattataactcctgttggtacttcggctttctcatcaggtttcattatcatcaggggaat

SEQ ID NO: 18501 - DNA, 159 bp, Homo sapiens
  MAP TO AC008795.5; EXPRESSED IN ADULT LIVER, SIGNAL = 0.87; EXPRESSED IN FETAL LIVER, SIGNAL = 0.93; NT HIT: gi11416983, EVALUE 2.00e-84; EST_HUMAN HIT: BF242887.1, EVALUE 2.00e-84; SWISSPROT HIT: P35307, EVALUE 3.40e+00
atggcggcaaccaagaggaaacggcgtggaggctttgcagttcaggcgaagaagccaaaaagaaacgaaatagatgcggagccgccagctaagcggcacgccacagcagaggaggtggaggaagaagagagggaccggatcccaggccccgtttgcaag

SEQ ID NO: 18502 - DNA, 81 bp, Homo sapiens
  MAP TO AC005903.3; EXPRESSED IN BRAIN, SIGNAL = 5.7; EXPRESSED IN LUNG, SIGNAL = 3.3; EXPRESSED IN PLACENTA, SIGNAL = 6.2; EXPRESSED IN ADULT LIVER, SIGNAL = 6.5; NT HIT: gi4502960, EVALUE 2.00e-38
atctcgtcctcgggggccaacaggtcctggggggccaggccgcccagggtctcccttctctccaggaggccctgagtcacc

SEQ ID NO: 18503 - DNA, 381 bp, Homo sapiens
  MAP TO AF131216.1; EXPRESSED IN BRAIN, SIGNAL = 1.4; EXPRESSED IN HELA, SIGNAL = 1.2; EXPRESSED IN PLACENTA, SIGNAL = 1.9; EXPRESSED IN ADULT LIVER, SIGNAL = 1.4; EST_HUMAN HIT: AL522457.1, EVALUE 0.00e+00; NT HIT: AJ011500.1, EVALUE 1.40e+00; SWISSPROT HIT: Q29442, EVALUE 4.10e-02
cagttccttcctgagccaggctatagcttcatcgatgctctgaaagccttccagcttgccagtggacaggggtctggcaccttggctggcactcctggcagaaggggggtgctgcccagcctctctcagggggagcaagggctcctgccccccacgctccccctcctccaagctcgcctgtggctccgcagccggcctcgggaagggccaggtatgctcctccagcctggcctgccattccaggtaggagggcctgcgggtctccagcctcagtttctcggtgagggccttcaggctccggaggtggtcatcgggtggtgcggctgctcccgccccctcttctgcacccacttcttccacgtggatctggggcacagacat

SEQ ID NO: 18504 - DNA, 280 bp, Homo sapiens
  MAP TO AC011522.6; EXPRESSED IN PLACENTA, SIGNAL = 0.85; EXPRESSED IN ADULT LIVER, SIGNAL = 0.94; EXPRESSED IN LUNG, SIGNAL =   1; EST_HUMAN HIT: BF795446.1, EVALUE 0.00e+00; NT HIT: gi14763476, EVALUE 0.00e+00; SWISSPROT HIT: Q03252, EVALUE 1.00e-10
gctgaagctgtcccccagcccatcctcgcgcgtcaccgtctcacgagccacctcgagcagcagcggcagcttgtccgccaccgggcgcctgggccgcagtaagcggaagcggctggaggtggaggagcccttgggcagcggcccaagcgtcctgggcacgggcacgggtggcagcggtggcttccacctggcccagcaggcctcggcctcgggtagcgtcagcatcgaggagatcgacctggagggcaagtttgtgcagctcaagaacaactcggacaag

SEQ ID NO: 18505 - DNA, 261 bp, Homo sapiens
  MAP TO AC000075.2; EXPRESSED IN BONE MARROW, SIGNAL = 1.5; EXPRESSED IN PLACENTA, SIGNAL = 0.72; EXPRESSED IN ADULT LIVER, SIGNAL = 0.5; SWISSPROT HIT: P54797, EVALUE 3.00e-10; EST_HUMAN HIT: BI028475.1, EVALUE 3.00e-91; NT HIT: X74504.1, EVALUE 1.00e-06
gcagctgccagacccggccatcgaggaccagggtggggagtacgtgcagcccatgctgagcaagtacgcggctgtgtgcgtgcgctgccctggctacggcaccaggtattgcagcaccgtgggtgcgccacctcctatcccatgtcccacctcccacgctagagggccggcaaagaagccaagtgcccatagccagagccaggcttcttcctcgcctgagtggattccagagcttctgccctgtccagacgcagctgcagg

SEQ ID NO: 18506 - DNA, 198 bp, Homo sapiens
  MAP TO AC012082.6; EXPRESSED IN BRAIN, SIGNAL = 2.9; EXPRESSED IN FETAL LIVER, SIGNAL = 2.5; EXPRESSED IN BONE MARROW, SIGNAL = 3.8; EXPRESSED IN PLACENTA, SIGNAL = 2.2; EXPRESSED IN ADULT LIVER, SIGNAL = 2.6; SWISSPROT HIT: O25869, EVALUE 8.40e-01; EST_HUMAN HIT: BE549957.1, EVALUE 2.00e-54; NT HIT: AF369029.1, EVALUE 1.80e-01
ctttctctctaagccccgtttgcacctgatctgcaaccataaatacttcgtggtgcttagtgtgcagccaaacgatggccaaatgttaaacaattcttcacgctccctcccccttttaaaaaacaggctcaaaagaatgttaatagtgttcttgttatccatcggctccaaaacattccgcttcgtggggaggagaga

SEQ ID NO: 18507 - DNA, 183 bp, Homo sapiens
  MAP TO AC010203.13; EXPRESSED IN ADULT LIVER, SIGNAL = 2.1; EXPRESSED IN BRAIN, SIGNAL = 2.2; EXPRESSED IN HELA, SIGNAL = 3.6; EXPRESSED IN PLACENTA, SIGNAL = 1.9; SWISSPROT HIT: Q08379, EVALUE 2.00e-09; EST_HUMAN HIT: BG741794.1, EVALUE 1.00e-98; NT HIT: gi14745290, EVALUE 1.00e-36
gagtaggaggagaggctgctggagctggagcaggtggccgagctcttgcgggagcaggcagagtcacgcaggcaaatcctggagaccatgcagaacaaatgcaccaccatcagccacgtgctcacccagaaccacaagctcaaagagcagctgtctccgctgcagaacggattcataaagctg

SEQ ID NO: 18508 - DNA, 473 bp, Homo sapiens
  MAP TO AC019209.3; EXPRESSED IN LUNG, SIGNAL =   2; EXPRESSED IN BRAIN, SIGNAL = 1.5; EXPRESSED IN ADULT LIVER, SIGNAL = 1.5; SWISSPROT HIT: Q13569, EVALUE 3.00e-19; EST_HUMAN HIT: AI332786.1, EVALUE 0.00e+00; NT HIT: gi13650432, EVALUE 0.00e+00
atggtgagcagttttgacccatcatgtaggataaaaagtcaacaggtgaggtctctggggttgtcttaccgcagtgagtaccacgcggtactacagagaccggctgcccgtgtgcctggcaggtggagctgcccgcatcagcggcctcggggaatggaagcggagaacgcgggcagctactcccttcagcaagctcaagctttttatacgtttccatttcaacaactgatggctgaagctcctaatatggcagttgtgaatgaacagcaaatgccagaagaagttccagccccagctcctgctcaggaaccagtgcaagaggctccaaaaggaagaaaaagaaaacccagaacaacagaaccaaaacaaccagtggaacccaaaaaacctgttgagtcaaaaaaatctagcaagtctgcaaaatcaaaagaaaagcaagaaaaattacagacacatttaaagtcaaaagaaaa

SEQ ID NO: 18509 - DNA, 95 bp, Homo sapiens
  MAP TO AC026774.4; EXPRESSED IN BONE MARROW, SIGNAL = 0.94; EXPRESSED IN PLACENTA, SIGNAL = 2.5; EXPRESSED IN HEART, SIGNAL = 2.1; EXPRESSED IN ADULT LIVER, SIGNAL = 2.8; EXPRESSED IN FETAL LIVER, SIGNAL = 2.5; NT HIT: AF162137.2, EVALUE 7.50e-02; SWISSPROT HIT: P35275, EVALUE 2.10e+00; EST_HUMAN HIT: AA700814.1, EVALUE 1.70e+00
ctgatgccagtgctttccacatgatatgcactcagagggtctgtatcccagaccctgccaataatggcatccactgcccatatcaccaatccctc

SEQ ID NO: 18510 - DNA, 183 bp, Homo sapiens
  MAP TO AF022794.1; EXPRESSED IN ADULT LIVER, SIGNAL = 1.1; EXPRESSED IN FETAL LIVER, SIGNAL = 0.97; EXPRESSED IN LUNG, SIGNAL = 0.7; EXPRESSED IN BONE MARROW, SIGNAL = 0.66; EXPRESSED IN PLACENTA, SIGNAL = 0.93; NT HIT: AJ229042.1, EVALUE 9.00e-99; SWISSPROT HIT: P32386, EVALUE 4.30e+00
aaaggctttgaaatcaaggcacagaggggatgaaagacaggaggatgtgaaaagaaaagggcttggcttttctccctctgagatgatcagaaagggtgccttggaggtgcagagtcctgcgctggagagggttattgcctccattatgggctcgtctctgtggaaaatctctcccctgccatg

SEQ ID NO: 18511 - DNA, 200 bp, Homo sapiens
  MAP TO AC005952.1; EXPRESSED IN ADULT LIVER, SIGNAL = 3.9; EXPRESSED IN HEART, SIGNAL = 3.9; EXPRESSED IN LUNG, SIGNAL = 5.5; EXPRESSED IN BRAIN, SIGNAL = 4.5; EXPRESSED IN BONE MARROW, SIGNAL = 5.6; EXPRESSED IN PLACENTA, SIGNAL =   3; EST_HUMAN HIT: BE746499.1, EVALUE 1.00e-108; NT HIT: gi14766271, EVALUE 1.00e-109; SWISSPROT HIT: P47973, EVALUE 7.40e-02
ttctcccgcccgggtccccagtctgtgcctctgcagctcagtgcccactggcagtgtggagccaccctcacccaggtctcagtggagtacggctaccggcccggtgccacggctgtgcccacaccactcacgaacgtccagatcctgctgcctgtgggggagcctgtgaccaacgtccgcttgcagccggctgccacctg

SEQ ID NO: 18512 - DNA, 170 bp, Homo sapiens
  MAP TO AL031600.4; EXPRESSED IN PLACENTA, SIGNAL =   4; EXPRESSED IN ADULT LIVER, SIGNAL = 2.7; EXPRESSED IN HEART, SIGNAL = 3.1; EXPRESSED IN FETAL LIVER, SIGNAL = 3.7; EXPRESSED IN BONE MARROW, SIGNAL = 2.7; EXPRESSED IN BRAIN, SIGNAL = 2.8; EST_HUMAN HIT: BF983844.1, EVALUE 7.00e-91; NT HIT: gi16164470, EVALUE 5.00e-91; SWISSPROT HIT: P51798, EVALUE 2.00e-27
cgccgcccccgtgaggtaggacagggagatcccaaagagccggccccaggcagccccgatgagcagggacgggatgaagaccccggcagacaccgtgagcccgtaggtccagcaggccaggaagaagtagaccagcgtgaacaggccgagggtcagggggttgtaggagc

SEQ ID NO: 18513 - DNA, 157 bp, Homo sapiens
  MAP TO AC005307.1; EXPRESSED IN ADULT LIVER, SIGNAL = 1.5; EXPRESSED IN BONE MARROW, SIGNAL = 1.3; EST_HUMAN HIT: AA534354.1, EVALUE 6.00e-57; NT HIT: D11078.1, EVALUE 1.00e-54; SWISSPROT HIT: P03342, EVALUE 3.40e+00
ctccatccacctttttaagagtaaattgctgggcaggtgggggagggctagtcaaggaacgaaactgtaagccggactgggtgtgaggaggcgaggtgataaaaggattacagggtggaggagcggaagctgaggaggaattgggacctagctcagc

SEQ ID NO: 18514 - DNA, 224 bp, Homo sapiens
  MAP TO AF274857.1; EXPRESSED IN BRAIN, SIGNAL = 1.1; EXPRESSED IN BONE MARROW, SIGNAL = 1.5; EXPRESSED IN PLACENTA, SIGNAL = 1.8; EXPRESSED IN ADULT LIVER, SIGNAL = 1.1; EXPRESSED IN HEART, SIGNAL = 1.2; SWISSPROT HIT: P73177, EVALUE 6.50e-01; EST_HUMAN HIT: BG461002.1, EVALUE 3.00e-01
ctatatattggatgtcagcttctgttgcagaacctgagtgtgcatcgtggtcaaatgctcagactcctgtggtggctgctcatgcaccacggatgtttgagcatgtgctacggtgtctacttttgctacattgccgtctgcttctggaccaaagccatttgttcctgtgctctgtgtttctaatcttgtatcacatccatatgaggaagcatggcaccatcagt

SEQ ID NO: 18515 - DNA, 153 bp, Homo sapiens
  MAP TO AC012331.9; EXPRESSED IN ADULT LIVER, SIGNAL = 2.4; EXPRESSED IN LUNG, SIGNAL = 7.9; EXPRESSED IN BRAIN, SIGNAL = 3.1; EXPRESSED IN HELA, SIGNAL = 3.3; EXPRESSED IN FETAL LIVER, SIGNAL = 6.9; EXPRESSED IN BONE MARROW, SIGNAL = 5.2; SWISSPROT HIT: Q9Y2N3, EVALUE 1.00e-06; EST_HUMAN HIT: AL045185.1, EVALUE 7.00e-69; NT HIT: gi16163581, EVALUE 2.00e-71
gatgctgccacctcccttagagctggggtaccgggtcactgctgaagacctggactgggagaaggaggcggcattccagtgcatcaacagtgcactgcaggttgaggaccaggccatctcggactgcagaccctcacggccttcccacacttt

SEQ ID NO: 18516 - DNA, 217 bp, Homo sapiens
  MAP TO AC000363.1; EXPRESSED IN ADULT LIVER, SIGNAL = 0.42; SWISSPROT HIT: O00222, EVALUE 3.00e-36; EST_HUMAN HIT: BG722120.1, EVALUE 1.00e-119; NT HIT: AJ236922.1, EVALUE 1.00e-119
caatctccctcgagatctgggtgaaggcctccacaccgctctcaccatagttcccctcagaagccagtgtcgaaacataattccatcccagtgctgtcacgatgtccaccatggcttgggcttggtaggagtcaggcggaaccactcgagagaaaaagtcatacctggtgttatcacttagctctggggctgtggatgcatagctgatttgaggtat

SEQ ID NO: 18517 - DNA, 222 bp, Homo sapiens
  MAP TO AC006022.1; EXPRESSED IN ADULT LIVER, SIGNAL = 1.1; EXPRESSED IN HEART, SIGNAL =   2; EXPRESSED IN BONE MARROW, SIGNAL = 1.3; EXPRESSED IN BRAIN, SIGNAL = 1.3; EXPRESSED IN PLACENTA, SIGNAL = 0.69; SWISSPROT HIT: P40936, EVALUE 7.00e-11; NT HIT: gi6678280, EVALUE 9.00e-13
acttcccctctcggtcaggccctcttctgccaggctggcctcagacactggggcccttgcaggcagccacaaagcagatgccgtcgttgatggagcatgtctcagagcagctgatggggcacacctctgcacctggcagccagcctcctgcatggccttctccaccgtctccttctctgggtggagcccaaagaacttcttggagcctaccatatagtggga

SEQ ID NO: 18518 - DNA, 419 bp, Homo sapiens
  MAP TO AC016628.5; EXPRESSED IN BRAIN, SIGNAL = 3.2; EXPRESSED IN BONE MARROW, SIGNAL = 2.7; EXPRESSED IN ADULT LIVER, SIGNAL = 2.4; EXPRESSED IN LUNG, SIGNAL =   4; EXPRESSED IN HELA, SIGNAL = 3.1; EXPRESSED IN FETAL LIVER, SIGNAL = 5.4; SWISSPROT HIT: Q05481, EVALUE 6.00e-83; EST_HUMAN HIT: BE064551.1, EVALUE 0.00e+00; NT HIT: gi14755315, EVALUE 0.00e+00
tctctagtatgaattctcttatgtccatttagggttgaggatgatataaatgctttgccacattcttcacacttgtaaggtttctctccagtatgaattatcttatgtgtagtaagctttgaggatcgattaaaagctttgccacattcttcacatttgtatggtttctctccagtgtgcatcctcgtatgtctagttagggttgaggattggctaaatgctttgccacattcttcacatttgtagggtttctctccagtatgaattatcttatgttcagtaagagttgaagatttcctaaaagctttgccacattcttcacatttgtagggtttctctccagtatgaattatcttatgtgtagtaagggttgaggattggctaaaagctttgccacattcttcacatttgtagggttt

SEQ ID NO: 18519 - DNA, 134 bp, Homo sapiens
  MAP TO AF260011.1; EXPRESSED IN BRAIN, SIGNAL = 1.2; EXPRESSED IN FETAL LIVER, SIGNAL =   1; EXPRESSED IN BONE MARROW, SIGNAL = 1.3; EXPRESSED IN ADULT LIVER, SIGNAL = 0.95; EXPRESSED IN HELA, SIGNAL = 1.2; NT HIT: gi7019462, EVALUE 1.00e-69; SWISSPROT HIT: Q9Y5N5, EVALUE 1.00e-12; EST_HUMAN HIT: AL520475.1, EVALUE 1.00e-67
cctgccagttcggcagccgctgcctcgagcgcgtccaaaagcagaaacgtgtcctccgcgggctcgtacacgtcgctgaaggcgccgcggcccacgtgcccgtggaacggcgtagcgaagttctcccctgccat

SEQ ID NO: 18520 - DNA, 469 bp, Homo sapiens
  MAP TO AC004004.1; EXPRESSED IN ADULT LIVER, SIGNAL = 0.85; EXPRESSED IN HELA, SIGNAL = 0.92; EXPRESSED IN PLACENTA, SIGNAL = 0.76; EST_HUMAN HIT: BI560594.1, EVALUE 1.00e-109; NT HIT: gi4508038, EVALUE 1.00e-113; SWISSPROT HIT: Q03923, EVALUE 2.00e-60
atgaaaaatgtggacattaagaaatttctgttaaaagaaggctataaaagtgtggatgagtgtaaggtgcacaaagaaggttataatgaacttaaccaatgtttcccaactacccagagcaaaatatttcaatgtgataaatatgtgaaagtctttcataaattttcacatttaaaagcatataagataagacatgctgataagaaacctttcaaatgtaaagaatgtggcaaatcattttgcatgctgttacacctaattcaacataaaagaattcatgctacagtgaagttttacaaatgtaaagaatgtggaaaagtctataacagatcctcaacctttactacacataagagaattcatactggagagaaaccttacaaatgtgaagaatgtggcaaagcttttaaccagtctacaaaccttactagacataagagaattcatactgcagagaaaccctacaaat

SEQ ID NO: 18521 - DNA, 217 bp, Homo sapiens
  MAP TO AC012085.4; EXPRESSED IN BRAIN, SIGNAL = 1.9; EXPRESSED IN HELA, SIGNAL = 1.2; EXPRESSED IN BONE MARROW, SIGNAL =   2; EXPRESSED IN PLACENTA, SIGNAL = 1.6; EXPRESSED IN ADULT LIVER, SIGNAL = 1.8; EST_HUMAN HIT: BF966501.2, EVALUE 2.90e-01; NT HIT: gi14783961, EVALUE 7.70e-01; SWISSPROT HIT: O06377, EVALUE 1.30e+00
tgtctctcaagagggaagtgatcctggcgccacggggtgatgcagcagaagttctttttgtctgtggccagggtagagtgcggagccccacggagctgtggcgtggcggctcctcccagacgcgtccggggcgccgctcgggtctcccaggaccttatgtaacccagcgtcggcagcaaggagccggtcacaggctgaccaacgtcaaggcgtttca

SEQ ID NO: 18522 - DNA, 371 bp, Homo sapiens
  MAP TO AC010205.5; EXPRESSED IN ADULT LIVER, SIGNAL = 1.6; EXPRESSED IN BRAIN, SIGNAL = 1.1; EXPRESSED IN BONE MARROW, SIGNAL = 0.61; EXPRESSED IN PLACENTA, SIGNAL = 1.7; SWISSPROT HIT: P08548, EVALUE 2.00e-13; EST_HUMAN HIT: AW835565.1, EVALUE 2.00e-03; NT HIT: AF224669.1, EVALUE 6.00e-06
tcaggtacaattttgaataagaatggtgatgggaggaggagtccacacttgtcttgttcctggttttaggaggaaagcatgtagtttctcatcactaagtatgatattaggtgaaactgtttttgtggatgctctatcaaactgaggaagttctcctgtattcctagtttgctgaacatttttatcataaattaatgttggattgtcaaatgctttttctgcatctattggtatcgtcatacaatttttcttctttagcttgttgatgtgaaggattttatgaattgatttttggttgttaaaccaggcttgtatacctgggatgaatcccagttggttgtggtaaataattctttttatatattgttgga

SEQ ID NO: 18523 - DNA, 431 bp, Homo sapiens
  MAP TO AC016601.5; EXPRESSED IN PLACENTA, SIGNAL = 0.72; EXPRESSED IN ADULT LIVER, SIGNAL = 0.75; EXPRESSED IN FETAL LIVER, SIGNAL = 0.8; EXPRESSED IN LUNG, SIGNAL = 0.54; EXPRESSED IN HELA, SIGNAL = 0.64; EXPRESSED IN BONE MARROW, SIGNAL = 0.61; SWISSPROT HIT: Q9UPN3, EVALUE 1.90e-01; EST_HUMAN HIT: BG122957.1, EVALUE 7.00e-13; NT HIT: gi14741379, EVALUE 5.00e-13
tactaaaggaaaccatagatgcactaaaggacatcaggagaatgatacatgaacaaatagagaatatcaataaagagacagaaattataaaaaggaaccaaatagaaaatctggagctgacatatgaacaaatagagaccatcaataaagagatagaaattacagaaaggaaccaaacagaaaatctggagctgaaaactacaatgactcaaataaaaagctcactagagggttttaatagcagatgtgggcaagcagaaaaaataaccagtgaacatgaagataggtccactgcaattatccaatctgaggagcagaaagaaaaaaggatgaagaaaaatgatcagagcctaaaagaccagctggacaccataacagtataccaacttacacataatgggaagcccagaagagaagagaaagaaaaaaaa

SEQ ID NO: 18524 - DNA, 169 bp, Homo sapiens
  MAP TO AC005783.1; EXPRESSED IN BRAIN, SIGNAL = 5.7; EXPRESSED IN BONE MARROW, SIGNAL = 6.3; EXPRESSED IN PLACENTA, SIGNAL =   6; EXPRESSED IN ADULT LIVER, SIGNAL =   6; SWISSPROT HIT: P35024, EVALUE 1.50e+00; EST_HUMAN HIT: BI223668.1, EVALUE 3.00e-90; NT HIT: AE001760.1, EVALUE 5.90e-01
cttggtggcagaaggtcagccgccgctcctcgcctgtctcgatgttggccacccacaggtcgctgttattgatgaaggagaagaaggcagggtcggcagggcagattttggggtccatccggggccctgagcactgggtcttgatttccagcggtttcataggggacac

SEQ ID NO: 18525 - DNA, 163 bp, Homo sapiens
  MAP TO AC009003.7; EXPRESSED IN BONE MARROW, SIGNAL = 1.4; EXPRESSED IN PLACENTA, SIGNAL = 1.2; EXPRESSED IN ADULT LIVER, SIGNAL = 1.2; EXPRESSED IN BRAIN, SIGNAL = 1.4; SWISSPROT HIT: Q9GZZ6, EVALUE 4.40e+00; EST_HUMAN HIT: AW408612.1, EVALUE 1.00e-86; NT HIT: gi14757758, EVALUE 7.00e-87
gagatccagcccctgcgtctgttccccagccccggcctcccaactcgcaccagccctgtgcggggctccaagagaatggtcagcacctcagctacagacgagcccagggagaccccagggcggccacccgatcccaccggggccccgctgcctggacctacag

SEQ ID NO: 18526 - DNA, 176 bp, Homo sapiens
  MAP TO AC010617.5; EXPRESSED IN ADULT LIVER, SIGNAL = 0.92; EXPRESSED IN BRAIN, SIGNAL = 0.77; EXPRESSED IN HELA, SIGNAL = 0.51; EXPRESSED IN PLACENTA, SIGNAL = 0.44; NT HIT: AJ006343.1, EVALUE 1.60e-01; SWISSPROT HIT: Q9KUC0, EVALUE 8.60e-01; EST_HUMAN HIT: BG177458.1, EVALUE 2.30e-01
ggatgggaactccagtgtcctcgtacatttccagctgcactttctgctgcgacccctccagacgctgagcctgggcctggaggaggagctattgcagcgagggatccgggcaaggctgcgggagcacggcatctccctggctgcctatggcacaattgtgtcggctgagctcacag

SEQ ID NO: 18527 - DNA, 181 bp, Homo sapiens
  MAP TO AC008536.5; EXPRESSED IN BRAIN, SIGNAL =   3; EXPRESSED IN BONE MARROW, SIGNAL = 1.4; EXPRESSED IN PLACENTA, SIGNAL = 2.3; EXPRESSED IN ADULT LIVER, SIGNAL = 2.8; EXPRESSED IN HEART, SIGNAL = 2.3; EXPRESSED IN FETAL LIVER, SIGNAL =   3; EXPRESSED IN HELA, SIGNAL = 6.9; SWISSPROT HIT: P08675, EVALUE 3.80e-01
agaaacagggaggctgcggcggaaagaggggcggtgtcgtcggagagcagggtcgacgatggaaagcgagcagcggcgggagcggaaagcgaggacatggacgtgggcggggaagaagacccagaggcctctgggggtccgcgaaactgagaaaacccgacgggggcgaaagggggtcggg

SEQ ID NO: 18528 - DNA, 207 bp, Homo sapiens
  MAP TO AC005584.1; EXPRESSED IN BONE MARROW, SIGNAL = 1.4; EXPRESSED IN PLACENTA, SIGNAL = 0.93; EXPRESSED IN ADULT LIVER, SIGNAL = 1.2; EXPRESSED IN BRAIN, SIGNAL = 1.6; NT HIT: AL163282.2, EVALUE 5.00e-45; EST_HUMAN HIT: BE062167.1, EVALUE 1.00e-55; SWISSPROT HIT: P52746, EVALUE 4.20e+00
ttgaacacttgctgcttaggaatttcttctgccagatactgtaactcatctctctcaagttcaaagttccacagatctccagggcaggggcaaaatgctgccagtctctttgctaaagcataagaagggtgatctttactccagttcccaataagtttctcatctccatctgagaacacctcatcctggacttcattgtccatatca

SEQ ID NO: 18529 - DNA, 348 bp, Homo sapiens
  MAP TO AC016951.9; EXPRESSED IN HEART, SIGNAL = 1.5; EXPRESSED IN BRAIN, SIGNAL = 0.85; EXPRESSED IN FETAL LIVER, SIGNAL = 1.3; EXPRESSED IN LUNG, SIGNAL = 0.4; EXPRESSED IN ADULT LIVER, SIGNAL = 0.78; EST_HUMAN HIT: BF509424.1, EVALUE 1.00e-107; NT HIT: gi15295281, EVALUE 0.00e+00; SWISSPROT HIT: P54762, EVALUE 3.00e-66
cttcatcagccttcccccaaagtccacctgggagaagctctcatctgcagcaatggtgtctactttgaggtagggggcctcagaccagaaggctgacttcttggtggcaatgacagagtcagtctcatagtaatacaagttgaaggtctccttgcaggatcctgggacattagggaggctgctgcagtctctcacagtgaagcgcatctctgtgtagatgcgatgggccccccgccggttgatgaaggtggtgagcagccaattgttctggttgggctcgaagacattgcacacctggtaggtgcggatggtgttcaggttttcatcgtagccactgacttcttccca

SEQ ID NO: 18530 - DNA, 291 bp, Homo sapiens
  MAP TO AC010642.4; EXPRESSED IN ADULT LIVER, SIGNAL = 0.64; EXPRESSED IN FETAL LIVER, SIGNAL = 0.53; EXPRESSED IN HELA, SIGNAL = 0.46; SWISSPROT HIT: P52742, EVALUE 1.00e-22; EST_HUMAN HIT: BF772758.1, EVALUE 2.00e-09; NT HIT: gi16163870, EVALUE 1.00e-09
ctgtgtgtacctgctggtgcttgctgagggatgagctgtggctgaaagctttcccacattcctgacacgcatacagcttctctcccgtgtggcagcgtatgtgctcagccagggacaagctggggctgaatgccttgcagcatacccggcactcgtagggcctctcacccgtgtaggttccgtggcatgcaaggagggccgagaagtcagcaaaggctttgctgctcttggcaggcaaatggcttttccccggtgtggaatcaccagtgctgtacaaggtgtgtgctctcg

SEQ ID NO: 18531 - DNA, 76 bp, Homo sapiens
  MAP TO AC034103.5; EXPRESSED IN HEART, SIGNAL = 1.1; EXPRESSED IN ADULT LIVER, SIGNAL = 1.1; EXPRESSED IN FETAL LIVER, SIGNAL = 1.3; EXPRESSED IN PLACENTA, SIGNAL = 1.2; EST_HUMAN HIT: AV702748.1, EVALUE 3.30e-01; NT HIT: gi14735342, EVALUE 9.00e-01
tgaaggatattcagaagccagctgttccacgtctttctccaccactgtaagcacctcttcctcttggggctgactg

SEQ ID NO: 18532 - DNA, 180 bp, Homo sapiens
  MAP TO AC008537.4; EXPRESSED IN ADULT LIVER, SIGNAL = 0.78; EXPRESSED IN HELA, SIGNAL = 0.72; NT HIT: AF274763.1, EVALUE 5.00e-97; SWISSPROT HIT: P24461, EVALUE 2.00e-15; EST_HUMAN HIT: BG028389.1, EVALUE 5.90e-02
atggagctgggaggggctgtcaccatctttctggcactccgcttgtcttgcctgctcatcctcattgcctggaaacgaatggataaggcaggaaagctgcccccaggtcctacaccaattcttttcctggggcacctgctgcaagttcgaactgatgctacgtttcagtctttcatgaag

SEQ ID NO: 18533 - DNA, 187 bp, Homo sapiens
  MAP TO AC019209.3; EXPRESSED IN PLACENTA, SIGNAL = 0.97; EXPRESSED IN ADULT LIVER, SIGNAL = 1.1; EXPRESSED IN BRAIN, SIGNAL = 1.3; EXPRESSED IN LUNG, SIGNAL = 0.88; NT HIT: AL163303.2, EVALUE 2.00e-28; SWISSPROT HIT: O20118, EVALUE 6.50e-01; EST_HUMAN HIT: AA652788.1, EVALUE 2.00e-17
tatatttgatgtgaaatgcacaatccttttattttctttgtccaaatgcccatgactctctgttagaaatagataatcggtgccacgaagaaaagtcagcacggagacaaaggacctctcagcaaggcaatctttgctttctgcagaaagggtgctccatgcatttggaacaatggcaaggccacac

SEQ ID NO: 18534 - DNA, 108 bp, Homo sapiens
  MAP TO AC007766.1; EXPRESSED IN FETAL LIVER, SIGNAL = 0.63; EXPRESSED IN HELA, SIGNAL = 0.59; EXPRESSED IN BRAIN, SIGNAL = 1.8; EXPRESSED IN LUNG, SIGNAL = 2.1; EXPRESSED IN BONE MARROW, SIGNAL = 0.39; EXPRESSED IN ADULT LIVER, SIGNAL = 1.3; NT HIT: gi14764152, EVALUE 3.00e-54; SWISSPROT HIT: Q04725, EVALUE 1.00e-13; EST_HUMAN HIT: BE857057.1, EVALUE 4.00e-54
tcagtagaccacctcatacacggtggccttcttgtcccccgagcctgtcacgatgtatttgttatttctggagatgtcacaactcaggactgaggacgactccttgga

SEQ ID NO: 18535 - DNA, 153 bp, Homo sapiens
  MAP TO AC022469.4; EXPRESSED IN HEART, SIGNAL = 1.4; EXPRESSED IN ADULT LIVER, SIGNAL = 1.2; EXPRESSED IN BRAIN, SIGNAL = 1.6; EXPRESSED IN LUNG, SIGNAL =   1; EXPRESSED IN FETAL LIVER, SIGNAL = 1.2; NT HIT: AL161585.2, EVALUE 1.30e-01; SWISSPROT HIT: P58107, EVALUE 1.20e+00; EST_HUMAN HIT: AW197864.1, EVALUE 9.00e-13
cattgcctatcatcccactaacaccaaagccaactgccagttctagtaataacaaccaaatatgaaaatgcttgagcaccagaatttgtaaacccagcccatgaatttgcattacctgcttgacctctggggtcgttggttttgcaaaccata

SEQ ID NO: 18536 - DNA, 408 bp, Homo sapiens
  MAP TO AC002321.1; EXPRESSED IN BONE MARROW, SIGNAL = 0.44; EXPRESSED IN ADULT LIVER, SIGNAL = 0.48; EXPRESSED IN HELA, SIGNAL = 0.46; EST_HUMAN HIT: BF365944.1, EVALUE 1.00e-26; NT HIT: gi14767782, EVALUE 1.50e+00; SWISSPROT HIT: P54726, EVALUE 4.40e+00
tcacacgtcggtgctgatgctgcggctcctggcgaaggcctcccgcatggctgagaggcggttggggttgagcgcctgcaggcccccgaaagccccccggggcagctccacgtcctcctggctcacgctcttgtagagcacgcgctccccgccgttcagcacgtcctcttcctcctccggcggctcctgcaggaagaaggtggggggctcgcagtgggagcagctgcggcagagggcgcgggcctgcggggacttctggctgaaggaggtggaggcggtggggtagagcgccggcccgttggtcagcaccaggttgcggttggagtgcagcgggggcaggtgcgagtgaacggcgaagtctggttcctcctcgtcctcctccgactcgtccttcttgcagcagtagta

SEQ ID NO: 18537 - DNA, 177 bp, Homo sapiens
  MAP TO AC004078.1; EXPRESSED IN ADULT LIVER, SIGNAL = 1.4; EXPRESSED IN BRAIN, SIGNAL = 1.5; EXPRESSED IN FETAL LIVER, SIGNAL = 1.1; EXPRESSED IN LUNG, SIGNAL = 1.5; EXPRESSED IN PLACENTA, SIGNAL = 1.8; SWISSPROT HIT: O67232, EVALUE 3.30e+00
atgatgggagaaactgtgttcaaggaatgggaccctgaagatgaagacataaagaaggtagtagctgactactcacatagagacaaatgtggcagccctgagaatgcaactagtgtacctcctactaccaggagcacaagtgacaaagacccccagcagctgatctttaaaattcat

SEQ ID NO: 18538 - DNA, 205 bp, Homo sapiens
  MAP TO AC008033.8; EXPRESSED IN HEART, SIGNAL = 7.4; EXPRESSED IN ADULT LIVER, SIGNAL = 2.7; EXPRESSED IN BRAIN, SIGNAL = 4.5; EXPRESSED IN HELA, SIGNAL = 3.3; EXPRESSED IN BONE MARROW, SIGNAL = 3.1; EXPRESSED IN PLACENTA, SIGNAL = 2.5; EST_HUMAN HIT: AV734627.1, EVALUE 4.20e+00; NT HIT: U72342.1, EVALUE 7.30e-01; SWISSPROT HIT: P41885, EVALUE 3.20e+00
cctggcatttggactttctttgactccagtacatggatggctcttccatcctgcttatcctcttagttttggatctacctttggaatcaagattctgtattatttttgcttcagtgactgacatctggcctttgtccgtgatctgattgcaaggctgcctggcttcctggctttggcccagccaaccacaactcaaatccaaatg

SEQ ID NO: 18539 - DNA, 155 bp, Homo sapiens
  MAP TO AC010247.6; EXPRESSED IN BRAIN, SIGNAL = 1.6; EXPRESSED IN FETAL LIVER, SIGNAL = 1.1; EXPRESSED IN PLACENTA, SIGNAL = 1.4; EXPRESSED IN ADULT LIVER, SIGNAL = 1.3; NT HIT: AP003004.2, EVALUE 8.30e+00
  unsure 10
  unsure 41
  unsure 42
  unsure 59
  unsure 91
  unsure 98
  unsure 100
  unsure 101
  unsure 107
  unsure 126
cccttcccantgaacttcgactccctgactccttttccacnnatgagggactgtctacntacgtccatctacggaacgacagccctcctgnctcctgngnnacctantccgcacgcaaaccgctgncaccaacagtactcgcgaagaaggtttag

SEQ ID NO: 18540 - DNA, 291 bp, Homo sapiens
  MAP TO AC004209.1; EXPRESSED IN HELA, SIGNAL = 0.7; EXPRESSED IN PLACENTA, SIGNAL = 1.1; EXPRESSED IN ADULT LIVER, SIGNAL = 0.93; SWISSPROT HIT: Q60780, EVALUE 1.10e+00; EST_HUMAN HIT: BE902727.1, EVALUE 0.00e+00; NT HIT: gi15304499, EVALUE 0.00e+00
cttccataacctgggggtcatccttgggcgggcaggtattcttgataagagaccagcttttgagccttcgagggtttctctgttccttgtgaaagcttcccctggtgggacccccatggcctggccccggaaaaggaggttctgcattgactccccaccaaccacgaccatatgggctagacctggggccaagccctctccgaattgggcctctaccccaaggaggaggtgggagactcagcagtggtggaatcagtggtccccttgatcctggaggacctctgtgaagag

SEQ ID NO: 18541 - DNA, 260 bp, Homo sapiens
  MAP TO AC016577.4; EXPRESSED IN PLACENTA, SIGNAL = 0.72; EXPRESSED IN ADULT LIVER, SIGNAL = 0.6; EXPRESSED IN LUNG, SIGNAL = 1.3; EXPRESSED IN HELA, SIGNAL = 1.3; NT HIT: M14123.1, EVALUE 0.00e+00; SWISSPROT HIT: P10265, EVALUE 2.00e-35; EST_HUMAN HIT: BE395061.1, EVALUE 4.00e-07
cacactagtatgaatttgaactccttttagatttagacttgatcttcccaagattagtcctacagtcccctcaggcagtgggccatatacccctgtagggattttttgtgggggctcccctggaagcagagagactgcttgtatagtacataaatctactgctgcactgccgcttgtggtgagggacaattgttgtattgtggtaactggcttattccctgaaacacttgggacagtaggggttgttgtccctgaaaacc

SEQ ID NO: 18542 - DNA, 267 bp, Homo sapiens
  MAP TO AC005789.1; EXPRESSED IN PLACENTA, SIGNAL = 5.1; EXPRESSED IN ADULT LIVER, SIGNAL = 5.2; EXPRESSED IN BRAIN, SIGNAL = 4.2; SWISSPROT HIT: Q04854, EVALUE 9.50e-01; EST_HUMAN HIT: AA426091.1, EVALUE 0.00e+00
gtgtcagctagcgtgtttgtgggcctggtgatcttctacatcgccttctgcctcctgtggcccctcgtggtgaagggctgcacgatgatccggtggaagataaacaacctcattgcctcagaatcctactacacctacgcctccatttccggaatctcgagcatgccgtctctgagacattccaggatgggctccatgttcagctccaggatgacagaggacagggctgaacccaaggaagccgtggagagacagttgatgacctga

SEQ ID NO: 18543 - DNA, 151 bp, Homo sapiens
  MAP TO AC006147.2; EXPRESSED IN LUNG, SIGNAL = 0.57; EXPRESSED IN BRAIN, SIGNAL = 0.81; EXPRESSED IN PLACENTA, SIGNAL =   1; EXPRESSED IN ADULT LIVER, SIGNAL = 0.88; NT HIT: gi9790176, EVALUE 2.00e+00; SWISSPROT HIT: Q63087, EVALUE 2.30e-01
atggacaaagagaaactcgtcagtggcagtggccacgaactcagaaagcctgaggacagtcagcagctcctctggctcttcactttcacactggtgcaactacaggagctgaagaacatttttcaactcgttccatacccggacgtgttag

SEQ ID NO: 18544 - DNA, 144 bp, Homo sapiens
  MAP TO AC008565.5; EXPRESSED IN PLACENTA, SIGNAL = 0.66; EXPRESSED IN ADULT LIVER, SIGNAL = 0.65; EXPRESSED IN BRAIN, SIGNAL = 0.57; EXPRESSED IN HELA, SIGNAL = 0.73; EXPRESSED IN LUNG, SIGNAL = 0.75; EST_HUMAN HIT: BF081492.1, EVALUE 7.20e-01; NT HIT: AF208051.1, EVALUE 7.60e+00; SWISSPROT HIT: P26326, EVALUE 4.50e+00
cagtaccagtgagcttgtcttcagatgagatacaagagaagtagtctgaggaagaagaagaagcttcctcagctttgtggtcctgagttgggcacagcaccttgtatctatgttgcggagcatctttttgtaaattcagctttc

SEQ ID NO: 18545 - DNA, 384 bp, Homo sapiens
  MAP TO AC006950.1; EXPRESSED IN ADULT LIVER, SIGNAL = 5.4; EXPRESSED IN HEART, SIGNAL = 6.5; EXPRESSED IN LUNG, SIGNAL = 4.1; EXPRESSED IN BONE MARROW, SIGNAL = 3.4; EXPRESSED IN BRAIN, SIGNAL =   5; EXPRESSED IN PLACENTA, SIGNAL = 5.4; EST_HUMAN HIT: BF344145.1, EVALUE 0.00e+00; NT HIT: gi13651412, EVALUE 0.00e+00; SWISSPROT HIT: P57999, EVALUE 1.40e-02
ccacacacccttgtttggagtcaacgtcaccatcccatcctggaagaagatgtggacctggcccacagcctccgttttgccatggcagatctggacttcggcaactacacggtaccaggggatggtattctgtagtcctgggcagcgggaagagagctcatagacaccaggagaggtggtggcaccacgggccccatcaaaggtggtgaggttggcacccacagacaggacacagagaccacgggtggcccagcagttccgggcttcagccttgacctcacatacacggcctggtgggcagccagctgcctggcatgtcaggccagagcttgaggaacaggaacagcgctcgctgcagtctgaggtcagcagggaggagtttac

SEQ ID NO: 18546 - DNA, 138 bp, Homo sapiens
  MAP TO AC006138.1; EXPRESSED IN BONE MARROW, SIGNAL =   2; EXPRESSED IN PLACENTA, SIGNAL =   2; EXPRESSED IN ADULT LIVER, SIGNAL = 1.9; EXPRESSED IN FETAL LIVER, SIGNAL = 2.1; EXPRESSED IN BRAIN, SIGNAL = 2.2; EST_HUMAN HIT: AL522474.1, EVALUE 2.00e-29; NT HIT: gi14761357, EVALUE 1.00e-29
ccagatgcctcccaggattggtgggccctgtggcacttgtacctgctgttgctgttgctgctgctgctgctccttctccttgagcactttctcttcttccccagcctgtttatcttctactgccagctcttcaaagaa

SEQ ID NO: 18547 - DNA, 345 bp, Homo sapiens
  MAP TO AC004202.1; EXPRESSED IN ADULT LIVER, SIGNAL = 0.61; SWISSPROT HIT: Q02084, EVALUE 4.00e-13; EST_HUMAN HIT: AL573465.1, EVALUE 1.00e-116; NT HIT: Y07829.2, EVALUE 0.00e+00
cttgtagtggctgagggcattttcaatggtcagttcatgatgagacatgtgttcaggggacaccaggcattccacacatagaagaagtctgctctcctcacagaacctgcacaccctcttctggtggttggggcagatatagcctgtccctagcacctcctcagaacagggcttccggcagagggggcagcagaagaccccagaggctgaggccttctccacatgctgtgtcaggcacactcgacagaagagatgtccgcagttggtgctcacggcctccttcaggctctcctggcagatggggcagacaccctcctcctggttgtccttctgcaaagggatcat

SEQ ID NO: 18548 - DNA, 146 bp, Homo sapiens
  MAP TO AC000060.1; EXPRESSED IN PLACENTA, SIGNAL = 0.79; EXPRESSED IN ADULT LIVER, SIGNAL = 0.78; SWISSPROT HIT: P08547, EVALUE 5.00e-07; EST_HUMAN HIT: R16220.1, EVALUE 1.00e-17; NT HIT: AL163208.2, EVALUE 1.00e-13
agttctaatagtatttttagtggattccttaggattttctctctatataagatcatgtcatctgcaaatagagatacttttacttcttgcttttcaatctggttgccctttatttcatttacttgcccaaatgccctggctagaac

SEQ ID NO: 18549 - DNA, 97 bp, Homo sapiens
  MAP TO AC000960.1; EXPRESSED IN BONE MARROW, SIGNAL = 0.86; EXPRESSED IN PLACENTA, SIGNAL = 2.1; EXPRESSED IN ADULT LIVER, SIGNAL = 1.4; NT HIT: gi12731110, EVALUE 9.00e-48; SWISSPROT HIT: Q60716, EVALUE 7.00e-10; EST_HUMAN HIT: BF203856.1, EVALUE 1.00e-47
ctcttaatcttggaaagcttggcttcctccacaaggatgtactctttcagagactgcaccagctctttctctgcataaatcaggtcagtcatgtgcc

SEQ ID NO: 18550 - DNA, 215 bp, Homo sapiens
  MAP TO AC018452.11; EXPRESSED IN PLACENTA, SIGNAL = 2.5; EXPRESSED IN ADULT LIVER, SIGNAL = 2.4; EXPRESSED IN HEART, SIGNAL = 1.8; EXPRESSED IN BRAIN, SIGNAL = 2.5; EXPRESSED IN LUNG, SIGNAL = 3.9; NT HIT: gi14149705, EVALUE 9.00e-53; SWISSPROT HIT: Q12774, EVALUE 1.30e-02; EST_HUMAN HIT: AW136396.1, EVALUE 1.00e-58
taacatgtcaagatttggaatatgggcaatgatgacaaaatgacactcctcgggtctatagcactctgcatcctggaccacgagtgtcccataagaacgctcccactcaccatcgctgacacgttgatagatgaggacgacgtcagccacctgcagggagagttcatctggctgcttagcagtaaatgacctaacgatttccacctgggtcagtg

SEQ ID NO: 18551 - DNA, 222 bp, Homo sapiens
  MAP TO AF107045.1; EXPRESSED IN PLACENTA, SIGNAL = 1.6; EXPRESSED IN ADULT LIVER, SIGNAL = 1.4; EXPRESSED IN FETAL LIVER, SIGNAL =   2; EXPRESSED IN BRAIN, SIGNAL = 1.3; EXPRESSED IN LUNG, SIGNAL = 1.8; EST_HUMAN HIT: BI086486.1, EVALUE 1.00e-122; NT HIT: gi4506748, EVALUE 1.00e-122; SWISSPROT HIT: P23921, EVALUE 2.00e-38
gcatgcctatcaaataaacgccatcgccccattggaattggggtacaaggtctggcagatgcttttatcctgatgagatacccttttgagagtgcagaagcccagttactgaataagcagatctttgaaactatttattatggtgctctggaagccagctgtgaccttgccaaggagcagggcccatacgaaacctatgagggctctccagttagcaaagga

SEQ ID NO: 18552 - DNA, 153 bp, Homo sapiens
  MAP TO AC004211.1; EXPRESSED IN LUNG, SIGNAL = 1.2; EXPRESSED IN PLACENTA, SIGNAL = 0.83; EXPRESSED IN ADULT LIVER, SIGNAL = 0.71; EST_HUMAN HIT: BE272593.1, EVALUE 8.00e-81; NT HIT: gi15304389, EVALUE 6.00e-81; SWISSPROT HIT: P49696, EVALUE 1.00e-08
caggtagacgtcacagaggttgtgaagccagaagtggtgcagggcatgagtgacgagcgagagctctcgggtgaggaagccccgctcacactcctgggcagccagggcaaggcggctcaggatccaggcatccatcggggaggagggagacag

SEQ ID NO: 18553 - DNA, 97 bp, Homo sapiens
  MAP TO AL118559.4; EXPRESSED IN BONE MARROW, SIGNAL = 4.1; EXPRESSED IN PLACENTA, SIGNAL = 6.9; EXPRESSED IN HEART, SIGNAL = 3.8; EXPRESSED IN ADULT LIVER, SIGNAL = 5.4; EXPRESSED IN BRAIN, SIGNAL =   6; SWISSPROT HIT: Q01955, EVALUE 8.10e+00; EST_HUMAN HIT: BE515245.1, EVALUE 2.90e-02
ggtctccaggtcccccaggtccaagcctcgtgcgggaagctcaaggaagcagacagtgtggtcatggggtctgcagcttagagggcagggatgaaaa

SEQ ID NO: 18554 - DNA, 270 bp, Homo sapiens
  MAP TO AL117187.3; EXPRESSED IN BONE MARROW, SIGNAL = 1.1; EXPRESSED IN ADULT LIVER, SIGNAL = 0.78; EXPRESSED IN BRAIN, SIGNAL = 0.78; SWISSPROT HIT: P14982, EVALUE 2.20e+00
tcccttgtttatgctcccagcacagaggctccccactttattgccagagccctggtcaccagctgctgtgtccttggtgggcctccacggggagtctttgattctggagcccagccaagaacaggcctccacttccccatgagcgtggcctggcacttcacacctggtggagctgacccactggtttgccttgtaatgccatcttcccccaacctggaggagcgtcagtgtgcttcagttcagggtgagttggctgtgatggtattcctg

SEQ ID NO: 18555 - DNA, 155 bp, Homo sapiens
  MAP TO AC000069.2; EXPRESSED IN BRAIN, SIGNAL = 1.6; EXPRESSED IN ADULT LIVER, SIGNAL = 1.2; EXPRESSED IN BONE MARROW, SIGNAL =   1; EXPRESSED IN PLACENTA, SIGNAL = 1.4; NT HIT: X91348.1, EVALUE 1.00e-75; SWISSPROT HIT: P34501, EVALUE 4.40e+00; EST_HUMAN HIT: BI964887.1, EVALUE 5.00e-73
ttcttgctgtcgacatctttgacaagttcaacttcacgggagccagagtcccatggttcgacgccattcatgaagcattccccagggagctggagtcctccatctccttcccagccaacttcttcaaaccacctgaagaaaaaggtagaaccgct

SEQ ID NO: 18556 - DNA, 201 bp, Homo sapiens
  MAP TO AC018557.5; EXPRESSED IN BONE MARROW, SIGNAL =   2; EXPRESSED IN PLACENTA, SIGNAL = 1.2; EXPRESSED IN ADULT LIVER, SIGNAL = 1.4; EXPRESSED IN FETAL LIVER, SIGNAL = 1.3; SWISSPROT HIT: P38035, EVALUE 2.50e+00; EST_HUMAN HIT: AI201364.1, EVALUE 1.00e-109
tcatttctttccctttgctggccctggtggcttgccaggttctggtggcttggcgggttctggtcccttgccctgctggggtcctttttcctttcctggaggaggaaccagcatatgctttttggccttcttgcctctgaagtggtttctttgaagacacacatcgataaaagcaaaaactccagccgcaccaataaggat

SEQ ID NO: 18557 - DNA, 130 bp, Homo sapiens
  MAP TO AC005903.3; EXPRESSED IN HEART, SIGNAL = 4.3; EXPRESSED IN ADULT LIVER, SIGNAL = 5.2; EXPRESSED IN FETAL LIVER, SIGNAL = 8.9; EXPRESSED IN BRAIN, SIGNAL = 3.7; EST_HUMAN HIT: BE279356.1, EVALUE 4.00e-67; NT HIT: gi4758901, EVALUE 3.00e-67; SWISSPROT HIT: Q16877, EVALUE 1.00e-18
ctgctgccttgtcgaggaagtaggccagcaggcagcgcatcacagcctggtggcagatgaccagcacattctcttgcctctccagctccatgatgacaggctccagtctctggaccaggtcctcgtagga

SEQ ID NO: 18558 - DNA, 174 bp, Homo sapiens; identical to SEQ ID NO: 18493
  MAP TO AF015722.1; EXPRESSED IN PLACENTA, SIGNAL = 1.4; EXPRESSED IN HEART, SIGNAL = 1.3; EXPRESSED IN ADULT LIVER, SIGNAL = 1.3; EXPRESSED IN FETAL LIVER, SIGNAL = 1.3; EXPRESSED IN BRAIN, SIGNAL =   2; EXPRESSED IN HELA, SIGNAL = 1.2; EXPRESSED IN BONE MARROW, SIGNAL =   2; EST_HUMAN HIT: BF810488.1, EVALUE 1.00e-03; NT HIT: AL163268.2, EVALUE 2.00e-93; SWISSPROT HIT: P70178, EVALUE 8.60e-01

SEQ ID NO: 18559 - DNA, 153 bp, Homo sapiens
  MAP TO AF131215.1; EXPRESSED IN PLACENTA, SIGNAL = 0.99; EXPRESSED IN ADULT LIVER, SIGNAL = 1.3; EXPRESSED IN BRAIN, SIGNAL = 0.75; EXPRESSED IN HELA, SIGNAL = 0.64; EXPRESSED IN FETAL LIVER, SIGNAL = 1.1; EST_HUMAN HIT: BG036072.1, EVALUE 3.10e+00; NT HIT: AF115505.1, EVALUE 8.20e+00
ctgctcaacagaatgtacttgtgcagcaagaaggaaatcagagtgtatgtccagctaatgaaatctttacgagccgagcaccgcatcgactccaacactgggagctgccagctgctgcctaaatactattttccagcatcttctgaaggctag

SEQ ID NO: 18560 - DNA, 213 bp, Homo sapiens
  MAP TO AC026743.3; EXPRESSED IN FETAL LIVER, SIGNAL = 1.2; EXPRESSED IN HELA, SIGNAL = 0.63; EXPRESSED IN PLACENTA, SIGNAL = 1.2; EXPRESSED IN ADULT LIVER, SIGNAL = 0.77; SWISSPROT HIT: O24989, EVALUE 1.60e+00; NT HIT: X07776.1, EVALUE 3.00e+00
attgccttctctggctcgcaggctggtacctgagcaaggtcacgcttaagactccaataggagtggaattggaagagaaagggggccatgaacattgagtcttgcattccatgagcccgtgttatcttttctttctctatcatagtgttcgagtaccccaaaatgtggaattcgtggtaatctgacttggttgccatgaagatcacttttgaa

SEQ ID NO: 18561 - DNA, 141 bp, Homo sapiens
  MAP TO AC010300.5; EXPRESSED IN BONE MARROW, SIGNAL = 1.4; EXPRESSED IN PLACENTA, SIGNAL = 1.5; EXPRESSED IN ADULT LIVER, SIGNAL = 1.5; EXPRESSED IN BRAIN, SIGNAL = 1.3; SWISSPROT HIT: P52835, EVALUE 4.50e+00; EST_HUMAN HIT: AA164347.1, EVALUE 4.50e-02; NT HIT: AF242432.1, EVALUE 1.90e+00
atgtctaaggtcaaactgatggctcttgctggtgtcaaggttgaccacatggctctcattggcagcactattgttcaggcccagcagagggatacaatcatgattcaatgcagcaacgatcttcgtggtctcatccggaag

SEQ ID NO: 18562 - DNA, 181 bp, Homo sapiens
  MAP TO AC000366.1; EXPRESSED IN BRAIN, SIGNAL = 1.3; EXPRESSED IN HELA, SIGNAL = 1.2; EXPRESSED IN HEART, SIGNAL = 3.3; EXPRESSED IN ADULT LIVER, SIGNAL = 1.1; NT HIT: gi5835932, EVALUE 6.30e-01; SWISSPROT HIT: P42918, EVALUE 4.30e+00; EST_HUMAN HIT: BG569771.1, EVALUE 9.30e-01
cctcaatgtgccattcatcatcaatgacgccatcccctggggaagcgctgtagacactcgggattctcagatgggccagcccaaggaccacagcctactgccactcatggctggctcagtgcgtaaatgctgtcctgaacccaagagaagcatgaacttgggggaaccccagagacccaca

SEQ ID NO: 18563 - DNA, 184 bp, Homo sapiens
  MAP TO AL050302.2; EXPRESSED IN BRAIN, SIGNAL = 0.94; EXPRESSED IN BONE MARROW, SIGNAL = 0.82; EXPRESSED IN PLACENTA, SIGNAL = 1.2; EXPRESSED IN ADULT LIVER, SIGNAL = 1.3; NT HIT: AL163203.2, EVALUE 2.00e-99; SWISSPROT HIT: P31647, EVALUE 4.30e+00; EST_HUMAN HIT: AA279718.1, EVALUE 3.00e-59
ggaaagctttacaaaaacccacagaggtacctgtaccatatgagaagatgctacaagaccagtcagctttgatagtacaggggcttccggaaggtgttgcctttaaacaccctgagaactatgatcttgcaaccctgaaatggattttggagaacacagctgggatttcatttattattaatag

SEQ ID NO: 18564 - DNA, 81 bp, Homo sapiens
  MAP TO AF263284.2; EXPRESSED IN BRAIN, SIGNAL = 0.96; EXPRESSED IN HELA, SIGNAL = 0.78; EXPRESSED IN BONE MARROW, SIGNAL = 0.72; EXPRESSED IN PLACENTA, SIGNAL = 0.58; EXPRESSED IN ADULT LIVER, SIGNAL = 0.56; EST_HUMAN HIT: AW340574.1, EVALUE 1.00e-19; NT HIT: AB015045.1, EVALUE 1.60e-02
ttttcagaggcctgcattaatttgatttcagtgacccactggaaaccagtgtcagcataacaacagttacgagagctaaac

SEQ ID NO: 18565 - DNA, 121 bp, Homo sapiens
  MAP TO AL117191.4; EXPRESSED IN ADULT LIVER, SIGNAL =  19; EXPRESSED IN BRAIN, SIGNAL =  19; EXPRESSED IN BONE MARROW, SIGNAL =  19; EXPRESSED IN PLACENTA, SIGNAL =  22; NT HIT: AF282384.1, EVALUE 4.00e-01; SWISSPROT HIT: P30537, EVALUE 3.50e+00
agccatggagaagaggagacagagtgtgcaagggaatgaagaaaaggaacaagactattttcaaatcacccatggcactactagaaatgtatttcagcaaaaggactggctgattttatga

SEQ ID NO: 18566 - DNA, 278 bp, Homo sapiens
  MAP TO AC025172.2; EXPRESSED IN HEART, SIGNAL = 2.3; EXPRESSED IN ADULT LIVER, SIGNAL = 1.2; EXPRESSED IN HELA, SIGNAL = 1.6; EXPRESSED IN FETAL LIVER, SIGNAL = 1.4; EXPRESSED IN BONE MARROW, SIGNAL = 1.3; EXPRESSED IN BRAIN, SIGNAL = 1.6; EXPRESSED IN PLACENTA, SIGNAL = 1.6; SWISSPROT HIT: P16053, EVALUE 3.10e+00; EST_HUMAN HIT: AW291219.1, EVALUE 3.00e-63; NT HIT: AL161580.2, EVALUE 2.60e-01
ctagaaattcccaactgttccaaagtggtggtacccgcaggcccgactgctagttgtgtatgaccacgtctgccggtccatgttttcagcacccattgcctgaagtgttagcaccttcactccggtgggtgtggggtagtggagggagtggggtggtggagggcgcggggtggcggagggcgcggggtggtggaacgtgtggggtagacctctttctggtttcattggcttctccttgttcagcaccttctcatgtgtctgcggctcattgggatttc

SEQ ID NO: 18567 - DNA, 213 bp, Homo sapiens
  MAP TO AC020944.3; EXPRESSED IN BONE MARROW, SIGNAL = 2.5; EXPRESSED IN PLACENTA, SIGNAL =   2; EXPRESSED IN ADULT LIVER, SIGNAL = 1.8; EXPRESSED IN BRAIN, SIGNAL =   2; EXPRESSED IN FETAL LIVER, SIGNAL = 1.7; NT HIT: AF029308.1, EVALUE 5.00e-36; SWISSPROT HIT: O88307, EVALUE 2.80e+00; EST_HUMAN HIT: BG687097.1, EVALUE 4.00e-56
atggtgtgtccggagttcattccttcagatgttcagatgtatctggagtttcttccatctggtgggtctgtggtctcgctgacttcaggagtgaagctgcagacgttcgcagtgagtgttacagctcttaaacatggcagtctggagttgtttgttcctcccggtgggtttgtggtctcactgacttcaggaatgaagctgcataccctcgcg

SEQ ID NO: 18568 - DNA, 198 bp, Homo sapiens
  MAP TO AC004237.1; EXPRESSED IN BONE MARROW, SIGNAL = 1.2; EXPRESSED IN ADULT LIVER, SIGNAL =   1; EXPRESSED IN PLACENTA, SIGNAL = 1.6; EXPRESSED IN HEART, SIGNAL = 2.1; EXPRESSED IN HELA, SIGNAL = 1.5; EXPRESSED IN BRAIN, SIGNAL = 1.3; NT HIT: gi14781205, EVALUE 1.00e-107; SWISSPROT HIT: Q9Y496, EVALUE 4.00e-31; EST_HUMAN HIT: BG186738.1, EVALUE 1.00e-107
ggttcagaaagacaggcaaaaactggagctactggacagcgcctaaaggaagctacaaaaatcaatctttcactttccacccttggtaatgtaatttctgccttggttgatggaaaaagcactcatgtgccttatcgtaactctaaactgactcgtcttcttcaggattccttaggaggaaattcaaaaaccatgatg

SEQ ID NO: 18569 - DNA, 179 bp, Homo sapiens
  MAP TO AC004195.1; EXPRESSED IN BRAIN, SIGNAL = 2.3; EXPRESSED IN FETAL LIVER, SIGNAL = 2.7; EXPRESSED IN BONE MARROW, SIGNAL = 4.4; EXPRESSED IN PLACENTA, SIGNAL = 2.7; EXPRESSED IN ADULT LIVER, SIGNAL = 3.8; EXPRESSED IN HEART, SIGNAL = 4.7; SWISSPROT HIT: P34407, EVALUE 1.90e+00; NT HIT: AB029343.1, EVALUE 2.00e-96; EST_HUMAN HIT: BG998530.1, EVALUE 2.00e-91
gtgttggaagcatctactggaacaatttccagatcaaagtgaactttgctgtgctgctggggatgcagctgcaagccttcatcatcatgtgtttttctgtgggtgcagacctggactctcctgaggaaaccccagcccggccccagacactccttggcctcctcctggggcctgtttaa

SEQ ID NO: 18570 - DNA, 171 bp, Homo sapiens
  MAP TO AF020801.1; EXPRESSED IN ADULT LIVER, SIGNAL = 1.2; EXPRESSED IN FETAL LIVER, SIGNAL = 1.8; EXPRESSED IN HELA, SIGNAL = 1.2; EXPRESSED IN BRAIN, SIGNAL = 1.6; EXPRESSED IN BONE MARROW, SIGNAL = 1.1; EXPRESSED IN PLACENTA, SIGNAL = 1.7; SWISSPROT HIT: P11845, EVALUE 4.80e-02; NT HIT: AJ229041.1, EVALUE 1.00e-82; EST_HUMAN HIT: BI459936.1, EVALUE 2.00e-82
ttctggaatttttttgctcagctcctcgtccacactcccgtggagctgttaggccgacaccgccgtagaggaagtcatagaggaagttgttcttgaggttctccttgattggccggtgcgaggctgtccaggccgccaatgccgggacttccggctcttggctcagggtgg

SEQ ID NO: 18571 - DNA, 250 bp, Homo sapiens
  MAP TO AC022336.12; EXPRESSED IN FETAL LIVER, SIGNAL = 2.7; EXPRESSED IN BONE MARROW, SIGNAL = 1.3; EXPRESSED IN ADULT LIVER, SIGNAL = 1.7; EXPRESSED IN BRAIN, SIGNAL = 1.4; SWISSPROT HIT: P18084, EVALUE 3.00e-34; NT HIT: X53002.1, EVALUE 0.00e+00; EST_HUMAN HIT: AU134256.1, EVALUE 0.00e+00
ccaatgcacggattggtctggtacctcggtgccgtgtaggagaaaggagagatgtccttatcaacaaaagacccaaatcccaaccggaagttgctggtgagcttcctcatctcctccgcgagtttggtgcccaggctccggatattgtccaagtcatccttcatggacagggagaggtccatcaggtagtacaggtccacaggatagtcctccacctggcgaacctgtagctggaaggtggtcttgtcac

SEQ ID NO: 18572 - DNA, 226 bp, Homo sapiens
  MAP TO AF025422.1; EXPRESSED IN ADULT LIVER, SIGNAL = 1.8; EXPRESSED IN FETAL LIVER, SIGNAL = 1.8; EXPRESSED IN BRAIN, SIGNAL = 4.3; EXPRESSED IN PLACENTA, SIGNAL = 1.9; EST_HUMAN HIT: BF771050.1, EVALUE 4.00e-16; SWISSPROT HIT: Q39994, EVALUE 1.10e+00; NT HIT: AF056184.1, EVALUE 2.00e-16
ttacttgctactgtcacacatttgctggcaggagaggcccctctgatggccgacatcaccacctgggctatcatcacccctcagctgtgcagtgggaccctcctgcctgctgacgtggctgctggcgcccgtgccagcgtgaaccccaaacctgtccgtgtttctgcgggcgacgccaccggggacatccctagcttgaccccctttcctggcagtgacactgtcg

SEQ ID NO: 18573 - DNA, 368 bp, Homo sapiens
  MAP TO AC009286.31; EXPRESSED IN BRAIN, SIGNAL = 0.72; EXPRESSED IN FETAL LIVER, SIGNAL = 0.77; EXPRESSED IN BONE MARROW, SIGNAL = 2.8; EXPRESSED IN ADULT LIVER, SIGNAL = 0.84; EXPRESSED IN PLACENTA, SIGNAL = 0.56; EST_HUMAN HIT: AW405449.1, EVALUE 0.00e+00; NT HIT: U03901.1, EVALUE 0.00e+00; SWISSPROT HIT: P04208, EVALUE 2.00e-32
cctcctggcagaaaaggaagggggttcttgtctctgttccccctgggcctggagcactgtgggaccattcaggctgtcatcccatgctgcacagtaataatcagcctcatcctcagactggagcccactgatggccagggaggctgaggtgccagacttggagccagagaatcggtcagagacccctgagggcagcagatcatcataatagatgaggagtttgggagcctttcctgggagctgctggtaccagtttacagcattatttccgatgttggagctgcttccagaacaggagatggtgaccctctgcctgggggcttcagacaccgagggtggctgagtcagcacagactgggcccaggacc

SEQ ID NO: 18574 - DNA, 302 bp, Homo sapiens
  MAP TO AC016943.7; EXPRESSED IN ADULT LIVER, SIGNAL = 0.55; EXPRESSED IN HELA, SIGNAL = 0.47; EXPRESSED IN PLACENTA, SIGNAL = 0.67; EST_HUMAN HIT: BG391751.1, EVALUE 1.00e-59; NT HIT: gi14728796, EVALUE 3.00e-66; SWISSPROT HIT: P16058, EVALUE 9.30e-01
atgcctgtatattattacccatctggtcagtaccctacctcaaccacgcaacagtaccggcccatggccccggttcagtacaacgctcagaggagtcaacagatgccacaggcagcacagcaagcaggtacttggaatctgtttcccatttgcttctcaacccagttatttttgctggtgaatcttgtactctttggatgagtgtccaagcttggcaatttaaaccagcacattttctctacccagagaagataacaaagcatttgattgactctgtgtggaaaagtagtaggtacaagaag

SEQ ID NO: 18575 - DNA, 148 bp, Homo sapiens
  MAP TO AL117259.3; EXPRESSED IN ADULT LIVER, SIGNAL = 2.4; EXPRESSED IN BRAIN, SIGNAL = 2.9; EXPRESSED IN LUNG, SIGNAL = 2.5; EXPRESSED IN BONE MARROW, SIGNAL =   3; NT HIT: gi14748350, EVALUE 5.00e-78; SWISSPROT HIT: P42866, EVALUE 3.40e+00; EST_HUMAN HIT: BI561986.1, EVALUE 2.00e-75
ctgtgtccctgtgctccagatgcaggagaatgacttggaggaatgagtgggtatatgcatgaattgacactgattcgtcctgcagaatggtcagaaatgacatcgcagccgttaactgcatttccactcctgcaacatgcagggcttc

SEQ ID NO: 18576 - DNA, 200 bp, Homo sapiens
  MAP TO AC025436.2; EXPRESSED IN BRAIN, SIGNAL = 1.8; EXPRESSED IN HELA, SIGNAL = 1.3; EXPRESSED IN FETAL LIVER, SIGNAL = 2.2; EXPRESSED IN PLACENTA, SIGNAL = 2.1; EXPRESSED IN ADULT LIVER, SIGNAL = 1.6; NT HIT: gi14861873, EVALUE 2.00e-96; SWISSPROT HIT: Q07538, EVALUE 8.40e-01
gtctccctcattccccattccagtctttatctccatcgaggcaaccactatcctcactttaatcatcttagggtagtttatacaattattgagctttaaattaatagaatcatagaaaaatttgtttctgatttttttcctgctaaacattgcattatgtctgtgaggctgatacatattgttgcatgtagtagttttta

SEQ ID NO: 18577 - DNA, 161 bp, Homo sapiens
  MAP TO AL121919.19; EXPRESSED IN BONE MARROW, SIGNAL = 0.71; EXPRESSED IN ADULT LIVER, SIGNAL = 0.57; EXPRESSED IN BRAIN, SIGNAL = 0.64; EXPRESSED IN FETAL LIVER, SIGNAL = 0.86; NT HIT: AF128848.1, EVALUE 3.60e-02; SWISSPROT HIT: Q10357, EVALUE 8.70e-01; EST_HUMAN HIT: AW858903.1, EVALUE 5.20e-02
gtctgaatctgcaagaggagccatcttgtgccacctcagaatcacctccttgttgtgggaaggaagagaagaaggaaggtgactgcagacaaaccttaggaaccctctctcttggtacaagttcaagaattgtcagggaaatggacaaacgaactgtgaag

SEQ ID NO: 18578 - DNA, 132 bp, Homo sapiens
  MAP TO AC005925.1; EXPRESSED IN BONE MARROW, SIGNAL = 1.4; EXPRESSED IN PLACENTA, SIGNAL = 3.2; EXPRESSED IN ADULT LIVER, SIGNAL = 3.1; EXPRESSED IN BRAIN, SIGNAL =   3; SWISSPROT HIT: gi139573, EVALUE 6.90e-01; NT HIT: gi14766696, EVALUE 2.00e-68; EST_HUMAN HIT: AL529465.1, EVALUE 2.60e+00
ctccacacttgggggcccctcagactacccccaggcctcgggcagggaccattcccttgagaagtactcgcaaaggggcactgagggagtttctgacgcctctggccacgccttgaggaagggtgagggcac

SEQ ID NO: 18579 - DNA, 120 bp, Homo sapiens
  MAP TO AC008524.5; EXPRESSED IN BRAIN, SIGNAL = 2.3; EXPRESSED IN HELA, SIGNAL = 1.6; EXPRESSED IN PLACENTA, SIGNAL =   3; EXPRESSED IN ADULT LIVER, SIGNAL = 2.6; SWISSPROT HIT: O35464, EVALUE 4.00e-16; NT HIT: gi14728509, EVALUE 2.00e-61; EST_HUMAN HIT: AU140366.1, EVALUE 3.00e-61
ctttcaaccattttgaatcgtgcttgacggtccgcagggtagggctttctccaagactccggtaaatgactgcgtcaatggcaaggaagtcagtcactgtggctgagtatagttttccat

SEQ ID NO: 18580 - DNA, 83 bp, Homo sapiens
  MAP TO AC020949.3; EXPRESSED IN PLACENTA, SIGNAL = 0.87; EXPRESSED IN HEART, SIGNAL = 0.97; EXPRESSED IN ADULT LIVER, SIGNAL = 0.56; EXPRESSED IN BRAIN, SIGNAL = 0.55; EXPRESSED IN FETAL LIVER, SIGNAL = 2.1; NT HIT: M80321.1, EVALUE 3.00e-13; EST_HUMAN HIT: AI820704.1, EVALUE 1.00e-22
tcacagagttgaacctttcttttcatagaacagttttgaaacacactttttgtagaatctgcaagtggatatttgcactgctt

SEQ ID NO: 18581 - DNA, 210 bp, Homo sapiens
  MAP TO AC025447.3; EXPRESSED IN BRAIN, SIGNAL = 1.5; EXPRESSED IN HELA, SIGNAL = 1.7; EXPRESSED IN FETAL LIVER, SIGNAL = 2.3; EXPRESSED IN PLACENTA, SIGNAL = 2.4; EXPRESSED IN HEART, SIGNAL = 3.7; EXPRESSED IN ADULT LIVER, SIGNAL = 1.2; EST_HUMAN HIT: BF832016.1, EVALUE 4.00e-31; SWISSPROT HIT: P49589, EVALUE 2.40e+00; NT HIT: AJ229043.1, EVALUE 5.00e-11
caacccctgatctcttgctttctctctctctctctctccctcatcagtgacctctgcatatgccagcgcctcttccccttccaccacgaacagaagcagtctgaggccctcatcagatgcagatgctggtgtcatgcttcctgtatggtctgcagaaccatgagccaaataaacctcttttcttgataaattgcccagcctcaggtattc

SEQ ID NO: 18582 - DNA, 459 bp, Homo sapiens
  MAP TO AC022336.12; EXPRESSED IN BONE MARROW, SIGNAL = 1.4; EXPRESSED IN PLACENTA, SIGNAL = 2.9; EXPRESSED IN ADULT LIVER, SIGNAL = 1.8; EXPRESSED IN HEART, SIGNAL = 3.1; EXPRESSED IN BRAIN, SIGNAL = 1.8; EXPRESSED IN FETAL LIVER, SIGNAL = 2.5; EST_HUMAN HIT: BG470267.1, EVALUE 0.00e+00; SWISSPROT HIT: P18084, EVALUE 3.00e-88; NT HIT: gi4504772, EVALUE 0.00e+00
ctgagcagaggactcccttgttcctggcacaggagaagttgtcgcactcacagaaaggcccatagatcttgccaaactcgctctcgaagcaggagcactggttgcagctgcagtccccacgcccgctgcacagtggcttgccctctgcctcccggcacaggttctggtacacgctctggttctccccatcctggcactcgcacctggtgcccaggtagccggggctgcactcacacaggccgcagacataggtcccgctcccgttgcacctggcgctgttgggttccagccccacgctgcagccgcacgtgcagttgtaggtgacccccacctccaggctgtcccggaatcccaccggccgcagggcaaacacatgctccgtgtgtctgctgggacagcttcgggcctccaatgatacttcaaaagatgcctgggcagaaggaagagaagggatatcat

SEQ ID NO: 18583 - DNA, 75 bp, Homo sapiens
  MAP TO AC002248.1; EXPRESSED IN PLACENTA, SIGNAL = 0.76; EXPRESSED IN ADULT LIVER, SIGNAL = 0.64; EXPRESSED IN BRAIN, SIGNAL = 1.2; EST_HUMAN HIT: T07297.1, EVALUE 8.20e-02; NT HIT: gi16161404, EVALUE 5.60e-02
atgttcagtggcctcttggagcagcaggagttccttgagcttgctgccagcatcccagagacactgagagagaat

SEQ ID NO: 18584 - DNA, 168 bp, Homo sapiens
  MAP TO AC022469.4; EXPRESSED IN PLACENTA, SIGNAL = 0.79; EXPRESSED IN ADULT LIVER, SIGNAL = 0.8; EXPRESSED IN BRAIN, SIGNAL = 0.85; NT HIT: L00654.1, EVALUE 2.30e+00; SWISSPROT HIT: P17627, EVALUE 9.80e+00
atgggctcagctaaccccacgaggagctctgacactaacatgacctttcagtttgtcctgagttgggccaagatggcaaagtctttctaccccatcatcaacaggtcattgaatgcgggtcactctgggaagagcatgatcttaggcaagatggtgctctgtgtctga

SEQ ID NO: 18585 - DNA, 194 bp, Homo sapiens
  MAP TO AC018766.2; EXPRESSED IN HEART, SIGNAL = 1.3; EXPRESSED IN ADULT LIVER, SIGNAL = 0.95; EXPRESSED IN LUNG, SIGNAL = 1.6; EXPRESSED IN FETAL LIVER, SIGNAL = 1.5; EXPRESSED IN PLACENTA, SIGNAL = 1.4; SWISSPROT HIT: O06703, EVALUE 2.20e+00; NT HIT: gi14786907, EVALUE 5.00e-51; EST_HUMAN HIT: BE244265.1, EVALUE 2.00e-35
tctcgcccatcacccctctccaacaagctgctcccggagtgggtccccccttcagccaggccccagctccccaactacccccaggaccccctggcgcccccaagccaccacctgcttcccagcccagtctggtctccactgtggcccctggctccggcctggctcccacggcacagcccggggcaccgtccatg

SEQ ID NO: 18586 - DNA, 369 bp, Homo sapiens
  MAP TO AC020663.1; EXPRESSED IN HEART, SIGNAL = 1.1; EXPRESSED IN BRAIN, SIGNAL = 1.1; EXPRESSED IN LUNG, SIGNAL = 1.3; EXPRESSED IN ADULT LIVER, SIGNAL = 0.98; SWISSPROT HIT: P27884, EVALUE 6.20e-02; NT HIT: AE004517.1, EVALUE 3.40e-01; EST_HUMAN HIT: BI768301.1, EVALUE 1.00e-130
atggccgaggagccccccaggtggctggaaggcgaccttggaagcctgtctttcaacaccaaaggatcccagggtcctccctgggacccacaggccgaagccactctctcctgccatgaaggagacccaaaggcagagcccctcagcactgcctcacaagaatctgtgaaccgccgggccctccgacaggagagaaggaagatgatagagacggacatcctccagaaagtcacccgggatgcctgcggcccgaccagcagtgacaaaggtggggtgaaggaggcgccctgccacgctgcggagtcagctcccagatccaaaatgcccctcgtggagcctccggagggaccaccagtgctctcgctccag

SEQ ID NO: 18587 - DNA, 167 bp, Homo sapiens
  MAP TO AL117380.28; EXPRESSED IN ADULT LIVER, SIGNAL = 0.54; EXPRESSED IN FETAL LIVER, SIGNAL = 0.66; EXPRESSED IN BRAIN, SIGNAL = 0.48; EXPRESSED IN BONE MARROW, SIGNAL = 0.66; EXPRESSED IN PLACENTA, SIGNAL = 0.6; NT HIT: AJ314911.1, EVALUE 2.30e+00; EST_HUMAN HIT: AW891903.1, EVALUE 3.40e+00
ctgatcaatgtgcattatgatgatgatgatgttattattattaccatcaatattattgcagtggttataggaggaatagtcttgattttttcccagtagtcttcccatcagaacaccataacagtaggcgagaatgatccatttgtcaggtatttctgatgagccag

SEQ ID NO: 18588 - DNA, 220 bp, Homo sapiens
  MAP TO AL079302.4; EXPRESSED IN BONE MARROW, SIGNAL = 1.4; EXPRESSED IN PLACENTA, SIGNAL = 1.5; EXPRESSED IN ADULT LIVER, SIGNAL = 1.3; EXPRESSED IN BRAIN, SIGNAL = 1.6; SWISSPROT HIT: P21292, EVALUE 1.80e-02; NT HIT: gi14748415, EVALUE 1.00e-106; EST_HUMAN HIT: BF223906.1, EVALUE 1.00e-106
ctgagggccgggcgggcgcagttttacagtgtggtggaactggtagagaaggatggctcagtgtccagcctgctgaaggtgttcaacgaccagagtgcctcggaccacatcgtgcagttcctgcgcctgctcacgtcggccttcatcaggaaccgagcagacttcttccggcacttcattgatgaggagatggacatcaaagacttctgcactcacgtag

SEQ ID NO: 18589 - DNA, 193 bp, Homo sapiens
  MAP TO AC006275.1; EXPRESSED IN BRAIN, SIGNAL = 1.1; EXPRESSED IN BONE MARROW, SIGNAL = 0.99; EXPRESSED IN PLACENTA, SIGNAL = 0.86; EXPRESSED IN ADULT LIVER, SIGNAL = 0.98; SWISSPROT HIT: Q10571, EVALUE 1.50e+00; EST_HUMAN HIT: AW007677.1, EVALUE 1.00e-104
tcagcacagaccggcgctcaccaacgacacggcacggaggctttctagggagcagtccccccaggacagcaatacgttcaggcgacagcgacacagggcagcaacagcggttccctcctggcaggcagccagacgcacacacgcacgcagaccacaccatccagaaagttcacctgcgacctgagacgcagct

SEQ ID NO: 18590 - DNA, 125 bp, Homo sapiens
  MAP TO AC020633.3; EXPRESSED IN BRAIN, SIGNAL = 2.7; EXPRESSED IN FETAL LIVER, SIGNAL =   5; EXPRESSED IN BONE MARROW, SIGNAL = 2.9; EXPRESSED IN PLACENTA, SIGNAL = 3.5; EXPRESSED IN ADULT LIVER, SIGNAL = 2.3; EST_HUMAN HIT: AL529907.1, EVALUE 2.00e-34; SWISSPROT HIT: P48039, EVALUE 7.80e+00; NT HIT: AF312032.1, EVALUE 2.00e-34
ttggggagcttggctcttgaggcaggagtcttgctgatgctcccagccaaataaacctcttccttctttaactcggtgtctgaggagttttgtctgcagctcgtcctgctacatttcttggttct

SEQ ID NO: 18591 - DNA, 528 bp, Homo sapiens
  MAP TO AC016955.12; EXPRESSED IN ADULT LIVER, SIGNAL = 2.8; EXPRESSED IN PLACENTA, SIGNAL = 2.8; EXPRESSED IN HEART, SIGNAL = 3.7; EXPRESSED IN FETAL LIVER, SIGNAL = 3.2; EXPRESSED IN BRAIN, SIGNAL = 2.8; EXPRESSED IN BONE MARROW, SIGNAL = 2.2; EST_HUMAN HIT: AL528595.1, EVALUE 1.00e-91; SWISSPROT HIT: P41997, EVALUE 3.80e-02; NT HIT: gi5730038, EVALUE 2.00e-89
atgaccaattgggagcaatcatcaaagctgatccttttacgactacatgagaagatgtcgaagaactcaacattgaacattctatgggtcattcggcatttgaagcaaattggagggatgaaaaggctagaaaagtgggtgcctcatgagctgagcaaaaatcaaaataattgtcattttgaagtgtcatcttctcttattctgtgcaaaaacaatgaaccatttctctatcagatagtgatgtgtgatgacgaggattttatacgagaactggcgatgaccaactcagtggttggaacaagaagaagctgcaaagcacctcccaaagccaaatttgtatcagaaaaatgtcacagacactggtggtctgctgcctgtttgacctgctacagctttctgaattctggtgaaaccattacatctgaaaactatgatcagcaattcaatgagatgcaccaaaaactgcaacgtctgcagccgacactggtcaacagaaagggcccaattcttttccacgactatgcttga

SEQ ID NO: 18592 - DNA, 192 bp, Homo sapiens
  MAP TO AC011400.4; EXPRESSED IN BRAIN, SIGNAL = 1.1; EXPRESSED IN BONE MARROW, SIGNAL = 0.85; EXPRESSED IN ADULT LIVER, SIGNAL = 0.93; EST_HUMAN HIT: AA412336.1, EVALUE 1.00e-03; SWISSPROT HIT: Q05205, EVALUE 5.60e+00; NT HIT: AJ400877.1, EVALUE 1.10e-02
cttggatggtttggacgataataactgctggagtgacaaacagagcagtgtagttatagcgactggagtaaagctcttttaaagaaatagtcagggaatctgacattgaagtcagatctgaataagtcgtcatctgggtcaagaactgagagagaaacatttctggcagaaggaacagcaggtgcaaaggcc

SEQ ID NO: 18593 - DNA, 512 bp, Homo sapiens
  MAP TO AC007619.22; EXPRESSED IN ADULT LIVER, SIGNAL = 1.2; EXPRESSED IN BRAIN, SIGNAL = 1.1; EXPRESSED IN HELA, SIGNAL = 0.52; NT HIT: AY037865.1, EVALUE 1.00e-128; EST_HUMAN HIT: AL540987.1, EVALUE 0.00e+00; SWISSPROT HIT: P45443, EVALUE 7.20e-01
ggagatagaaatctcaggatctcaacaaggtacaaataacgcacattcccagaacatagagccagggacagtcccctctcagttctcttctaaaggtggttctggcacaacagttgataaagctgtgtccctgaagggctttttagccctgggtgcttcctgtaaaacttgtcagcttccactggatctgcgggactgtgtccctcacaggctggacacccggccctgcggagaggacttgattaaacaaggtataatgtacttctctttcccatccacagatggatctgtctgtagaaactctgttcagcttcatgcaggagcgccagaaaagatacgccaagtatgccgagcagatccagaaagtgaacgagatgtccgccatcctccgccgcatacagatgggcatcgaccagactgtgcccctgctggacaggctcaacagcatgctgcccgagggcgagcggctggagcccttcagcatgaagcccgaccgcgagctcaggctgtag

SEQ ID NO: 18594 - DNA, 176 bp, Homo sapiens
  MAP TO AC022336.12; EXPRESSED IN BONE MARROW, SIGNAL = 2.2; EXPRESSED IN PLACENTA, SIGNAL =   2; EXPRESSED IN HEART, SIGNAL =   2; EXPRESSED IN ADULT LIVER, SIGNAL = 1.8; EXPRESSED IN BRAIN, SIGNAL = 1.7; EXPRESSED IN LUNG, SIGNAL = 1.9; SWISSPROT HIT: P11172, EVALUE 7.00e-28; NT HIT: gi4507834, EVALUE 1.00e-94; EST_HUMAN HIT: BI089070.1, EVALUE 2.00e-94
gaggtatctttaaaatagcttcctgggcagatctagtaaatgctcacgtggtgccaggctcaggagttgtgaaaggcctgcaagaagtgggcctgcctttgcatcgggggtgcctccttattgcggaaatgagctccaccggctccctggccactggggactacactagagcagcg

SEQ ID NO: 18595 - DNA, 211 bp, Homo sapiens
  MAP TO AJ007973.1; EXPRESSED IN ADULT LIVER, SIGNAL = 1.1; EXPRESSED IN HELA, SIGNAL = 1.1; EXPRESSED IN BRAIN, SIGNAL = 1.2; EXPRESSED IN LUNG, SIGNAL = 2.2; EXPRESSED IN BONE MARROW, SIGNAL = 1.6; NT HIT: AJ007973.1, EVALUE 1.00e-115
ctacactggtgaccctggtgctgatgttggtgaccacatgggtaatggaggtggtgatggtgatgccgctgacgcagaatctgactggtgatgggatggtgttgggcttggtgatctcagtggtggtgactctggtagagatgagagtggtggtcatgatggtgattgtgtcagtgacaattgtatttgtttttagtctgttttcatgctg

SEQ ID NO: 18596 - DNA, 225 bp, Homo sapiens
  MAP TO AL096768.7; EXPRESSED IN BONE MARROW, SIGNAL = 3.8; EXPRESSED IN ADULT LIVER, SIGNAL = 3.2; EXPRESSED IN BRAIN, SIGNAL = 4.8; EXPRESSED IN LUNG, SIGNAL = 5.2; SWISSPROT HIT: P27465, EVALUE 2.00e-35; NT HIT: gi14778395, EVALUE 1.00e-124; EST_HUMAN HIT: AA297076.1, EVALUE 1.00e-122
ctagagcgagcccagggcttccccaaagcggattttctgtcctgttttcagctggaaattgaagtccttgggggcctcgaagatgagcacgatggtggagcccaggttgaactcgcccaggtgctcgcccttacgcatggggacgccctctctattggtgtgcgtcacgaagctgaagtcattgtaggagcccttgctgtgccttgggctgtttgtgtgcaggtc

SEQ ID NO: 18597 - DNA, 154 bp, Homo sapiens
  MAP TO AC000095.3; EXPRESSED IN HELA, SIGNAL = 0.98; EXPRESSED IN PLACENTA, SIGNAL = 0.73; EXPRESSED IN ADULT LIVER, SIGNAL = 0.53; EST_HUMAN HIT: AL566331.1, EVALUE 2.00e-75; SWISSPROT HIT: P78774, EVALUE 1.00e+01; NT HIT: X91348.1, EVALUE 1.00e-81
accaagagcagtgatgaccttttagctggaatggccagaggggtaacggtgactaatggtgttaaagggaaggaaagctcctgcccatctgcagcaccttcggcatctgcccctgccatgaccactgtggagaacaaatccaagattagcacag

SEQ ID NO: 18598 - DNA, 134 bp, Homo sapiens
  MAP TO AC018452.11; EXPRESSED IN BRAIN, SIGNAL = 2.3; EXPRESSED IN HELA, SIGNAL = 5.1; EXPRESSED IN FETAL LIVER, SIGNAL = 3.2; EXPRESSED IN BONE MARROW, SIGNAL = 2.1; EXPRESSED IN HEART, SIGNAL =   5; EXPRESSED IN ADULT LIVER, SIGNAL = 1.9; EST_HUMAN HIT: BF898617.1, EVALUE 6.60e-01; NT HIT: gi14771564, EVALUE 4.50e-01
ccagcctaaatgcctggacccatctacatcctgtgaagcagcgtcattgcgaactctcctttcattgcttgtgaaggatgctgacactgatcaccaggactatgtcactcaccaggacccagagcagctgattt

SEQ ID NO: 18599 - DNA, 148 bp, Homo sapiens
  MAP TO AC017019.3; EXPRESSED IN BRAIN, SIGNAL = 4.9; EXPRESSED IN BONE MARROW, SIGNAL = 3.1; EXPRESSED IN PLACENTA, SIGNAL = 3.1; EXPRESSED IN ADULT LIVER, SIGNAL = 3.5; EXPRESSED IN HEART, SIGNAL = 3.1; NT HIT: gi8928577, EVALUE 2.00e+00; EST_HUMAN HIT: AI954648.1, EVALUE 7.40e-01; SWISSPROT HIT: P21292, EVALUE 3.40e+00
gtcttttgactgcaaggaatttcagacagcaaagaagacttcagagagactggctgagctccaggttgtgggtcatggttgcattgttgggggtgaagatttttgcagtttgcaggaggattttgagtcctctgacaagaatcattga

SEQ ID NO: 18600 - DNA, 141 bp, Homo sapiens
  MAP TO AC004211.1; EXPRESSED IN HEART, SIGNAL = 1.2; EXPRESSED IN FETAL LIVER, SIGNAL = 0.61; EXPRESSED IN BONE MARROW, SIGNAL = 0.85; EXPRESSED IN ADULT LIVER, SIGNAL = 0.88; EXPRESSED IN PLACENTA, SIGNAL = 1.2; SWISSPROT HIT: Q04462, EVALUE 2.00e-04; NT HIT: gi15304389, EVALUE 1.00e-53; EST_HUMAN HIT: BG910407.1, EVALUE 2.00e-53
ctgcagatgggcagtaccatggggtggttctggaggccccggaacaggccccattcactcagcacagacattatcttttcccgggccacaaaccggtgaagaccctggagaaaaagcggcaagagtaaagactgaaggcct

SEQ ID NO: 18601 - DNA, 130 bp, Homo sapiens
  MAP TO AF196968.1; EXPRESSED IN HEART, SIGNAL = 1.3; EXPRESSED IN BRAIN, SIGNAL = 1.1; EXPRESSED IN LUNG, SIGNAL = 0.89; EXPRESSED IN BONE MARROW, SIGNAL = 1.2; EXPRESSED IN PLACENTA, SIGNAL = 1.8; EXPRESSED IN ADULT LIVER, SIGNAL = 1.4; NT HIT: AJ278435.1, EVALUE 4.30e-01; EST_HUMAN HIT: BF892555.1, EVALUE 2.50e+00
ggcttggctcccatgatgaggcttgggaattgcccaagctgtgaagtgaccattctaattcaaattgtagaagtgatacgaaggaaggcaggcaaacgtgccatgaaatggagccctgtgccgattccag

SEQ ID NO: 18602 - DNA, 114 bp, Homo sapiens
  MAP TO AC003076.1; EXPRESSED IN PLACENTA, SIGNAL = 0.85; EXPRESSED IN ADULT LIVER, SIGNAL = 0.45; EXPRESSED IN BRAIN, SIGNAL = 0.59; SWISSPROT HIT: O30135, EVALUE 2.70e+00; NT HIT: AL111646.1, EVALUE 9.40e-02; EST_HUMAN HIT: BI910565.1, EVALUE 1.40e-01
aaagatggcaaaagcaaccaaaagttcattcactggacccagcacctgggtcatgaaaggcttgagggcaaggtggagcccagtggctggcaactaaaccaccaaaagcaaggt

SEQ ID NO: 18603 - DNA, 152 bp, Homo sapiens
  MAP TO AC026402.2; EXPRESSED IN BRAIN, SIGNAL = 1.9; EXPRESSED IN PLACENTA, SIGNAL = 1.9; EXPRESSED IN ADULT LIVER, SIGNAL = 2.1; EXPRESSED IN HEART, SIGNAL = 2.9; EXPRESSED IN LUNG, SIGNAL = 2.7; NT HIT: gi6912669, EVALUE 2.10e+00; EST_HUMAN HIT: AA458850.1, EVALUE 7.70e-01
ttctctacgatctagtttttgcccttactgctccttcaatgaaactgctctcagtgctcaatgaagtcactgatgaccagaatctgcaagtagatgtcaatctgagtaggctacgatgcctgtatctcatgtgcttttataagcttctgcag

SEQ ID NO: 18604 - DNA, 190 bp, Homo sapiens
  MAP TO AC018427.3; EXPRESSED IN PLACENTA, SIGNAL = 0.71; EXPRESSED IN ADULT LIVER, SIGNAL = 0.78; EST_HUMAN HIT: BF882111.1, EVALUE 6.30e-02; SWISSPROT HIT: P08923, EVALUE 4.90e-01
cctccagttcctcccaggccccagtgcagacatctccatgcagcgcccctgctgcctgctctctggggatctgacggccgggctcagcatggactcaagccaccagccctgatccccctggagatcagggagaggccctggcagctccacctctccagggctccacggacctgggaccagccacccaggg

SEQ ID NO: 18605 - DNA, 223 bp, Homo sapiens
  MAP TO AC020894.3; EXPRESSED IN BRAIN, SIGNAL = 2.7; EXPRESSED IN PLACENTA, SIGNAL = 2.8; EXPRESSED IN ADULT LIVER, SIGNAL = 2.2; EXPRESSED IN HEART, SIGNAL =   2; EST_HUMAN HIT: BF751916.1, EVALUE 1.00e-115; SWISSPROT HIT: P08547, EVALUE 5.00e-03; NT HIT: AL163201.2, EVALUE 8.00e-01
agaatggccacaatttaaaagacggacaataccaattgttgacatggattcagagcaagtggaactctcagacactgctggagtgaatgtaaaatggaacctcttggaaactgttttccattttcttacagagttaccatacaatccagcaatttcactatttatcccagataaaaacataggtccacccaaagacttgcatgtaaatgtacaagcgaatgga

SEQ ID NO: 18606 - DNA, 220 bp, Homo sapiens
  MAP TO AC011471.5; EXPRESSED IN BRAIN, SIGNAL = 1.3; EXPRESSED IN LUNG, SIGNAL = 1.6; EXPRESSED IN BONE MARROW, SIGNAL =   1; EXPRESSED IN ADULT LIVER, SIGNAL = 1.3; EXPRESSED IN PLACENTA, SIGNAL =   1; EST_HUMAN HIT: BI461749.1, EVALUE 1.00e-120; SWISSPROT HIT: P28876, EVALUE 7.90e-01; NT HIT: AY009107.1, EVALUE 1.00e-121
gctgtggaccacctgtcgagatggagaagtccttctgaggctatccaaacacggaccaggccatgagaccccgatgaccatccctgaattttttcgagagtcagtcaaccgatttggaacttatccagccctcgcatccaagaatggcaaaaagtgggaaattctgaatttcaaccagtactatgaggcttgtcggaaggctgcaaaatccttgatcaag

SEQ ID NO: 18607 - DNA, 222 bp, Homo sapiens
  MAP TO AL118557.2; EXPRESSED IN PLACENTA, SIGNAL =  14; EXPRESSED IN ADULT LIVER, SIGNAL =  11; EXPRESSED IN HEART, SIGNAL =  13; EXPRESSED IN LUNG, SIGNAL = 8.2; EXPRESSED IN FETAL LIVER, SIGNAL =  16; NT HIT: gi14753584, EVALUE 1.00e-122; EST_HUMAN HIT: BI196227.1, EVALUE 1.00e-119; SWISSPROT HIT: Q14112, EVALUE 1.00e-43
acgcaggggtggtgcctggctgggagcgggtgccctgcacctctctgccatctttgtccacacaccagcagaagtcgctctttccgtggcactgcagggggatgaagtggcccaggtcatcgcactggggcacgtactggtcatctcggggggtgccaccgtagtgctccagcaggttttccctccagcgctcacagatggtcgggggcctctgggtgggct

SEQ ID NO: 18608 - DNA, 146 bp, Homo sapiens
  MAP TO AC000124.1; EXPRESSED IN HELA, SIGNAL = 0.44; EXPRESSED IN ADULT LIVER, SIGNAL = 0.57; SWISSPROT HIT: P36941, EVALUE 1.20e+00; NT HIT: X60759.1, EVALUE 5.00e-01
ctgttttcatgtcctcaaagtcaaagcaggaagatggtagacaggaaaatgataaaatattctgtgaactgatatcttcatgccctgagggtcatgagctcttcaaaggttcctatcactgtactcctttctcctgcaacatctag

SEQ ID NO: 18609 - DNA, 134 bp, Homo sapiens
  MAP TO AC018427.3; EXPRESSED IN HEART, SIGNAL = 2.3; EXPRESSED IN FETAL LIVER, SIGNAL = 2.4; EXPRESSED IN PLACENTA, SIGNAL = 1.9; EXPRESSED IN ADULT LIVER, SIGNAL = 1.8; SWISSPROT HIT: P49138, EVALUE 2.30e-01; NT HIT: AF198031.1, EVALUE 7.00e+00; EST_HUMAN HIT: AL548273.1, EVALUE 2.60e+00
ctgggagtgaggctcggtacctttctgttctcacccacagacatggggaaaaggaggaggaggagccagtttgcttctccctggactagaagggagaagctgagctggtggggtgctggcaggagcctgagcat

SEQ ID NO: 18610 - DNA, 381 bp, Homo sapiens
  MAP TO AC004215.1; EXPRESSED IN FETAL LIVER, SIGNAL = 1.1; EXPRESSED IN BRAIN, SIGNAL = 1.1; EXPRESSED IN ADULT LIVER, SIGNAL = 1.4; EXPRESSED IN PLACENTA, SIGNAL = 1.5; SWISSPROT HIT: P14350, EVALUE 3.00e-04; NT HIT: AL163246.2, EVALUE 1.00e-115; EST_HUMAN HIT: BE064410.1, EVALUE 4.00e-85
tcaatccagctgcttcaggatggagaacatggtaagaccagtgaattccatgagcatgagcccactgctgcacttctttagccatgaagtgagtgccttggttagaggcaatgctgtgtggaataccataagggtggacaaggtattctgtgactccatgatggtagtcttggcagaagcattgcatgcaggataggcaaacccatatccggagtaagtgtctattccagtgaagacaaacttctgccctttccataatggaagaggtccaataatcaacctgtcaccaggtagctggctgatcgcccaaggaatggtgtcatattgagagctcagtgttggtctctgctgctggcaaattgggcactcagaagtggccat

SEQ ID NO: 18611 - DNA, 187 bp, Homo sapiens
  MAP TO AC026432.2; EXPRESSED IN PLACENTA, SIGNAL = 1.1; EXPRESSED IN ADULT LIVER, SIGNAL = 0.92; EXPRESSED IN HEART, SIGNAL = 1.2; EXPRESSED IN BRAIN, SIGNAL = 0.89; EXPRESSED IN LUNG, SIGNAL = 0.7; EXPRESSED IN HELA, SIGNAL =   1; SWISSPROT HIT: P34545, EVALUE 1.50e+00; NT HIT: AE007618.1, EVALUE 6.60e-01
ttagctgctgaagcaagcctctccttctttccagagatgccccccgtgaaaacccactgtgagaggagttgggcttgagtggctccaaatacacagcagtaatattctgaagcctgtcctgttcctaatcctgcacggcagctcttggcactgctggacagttccccaggcttctttccaattcttc

SEQ ID NO: 18612 - DNA, 105 bp, Homo sapiens
  MAP TO AC022116.3; EXPRESSED IN LUNG, SIGNAL = 1.2; EXPRESSED IN BRAIN, SIGNAL = 0.69; EXPRESSED IN FETAL LIVER, SIGNAL = 0.99; EXPRESSED IN ADULT LIVER, SIGNAL = 0.63; EST_HUMAN HIT: AA583042.1, EVALUE 2.00e-52; SWISSPROT HIT: Q19532, EVALUE 1.60e+00; NT HIT: gi16157929, EVALUE 2.00e-52
cttaagaaatgtataaaaactccagaaatcccttctaaacatgttaggaactgggtccccaaagtcttggaacagcgacgacaaggcttggaaacatacttacag

SEQ ID NO: 18613 - DNA, 145 bp, Homo sapiens
  MAP TO AF196972.1; EXPRESSED IN BRAIN, SIGNAL = 1.6; EXPRESSED IN LUNG, SIGNAL = 2.1; EXPRESSED IN PLACENTA, SIGNAL = 2.1; EXPRESSED IN ADULT LIVER, SIGNAL =   2; EXPRESSED IN HEART, SIGNAL = 4.4; NT HIT: gi15723369, EVALUE 3.00e-76; EST_HUMAN HIT: BE151847.1, EVALUE 5.00e-76; SWISSPROT HIT: Q10751, EVALUE 7.70e+00
cgataactccaaagatatcccggatggttggcacacagatgacaaggacattgaccaaaacaagcaggatcagagctatggccacatgtcgtggccagctgaaggccttgcctgggaaaagcagctgctgcagggcccggcggat

SEQ ID NO: 18614 - DNA, 115 bp, Homo sapiens
  MAP TO AC019106.3; EXPRESSED IN ADULT LIVER, SIGNAL =   2; EXPRESSED IN PLACENTA, SIGNAL = 1.9; EXPRESSED IN HEART, SIGNAL = 1.5; EXPRESSED IN FETAL LIVER, SIGNAL = 2.5; EXPRESSED IN BONE MARROW, SIGNAL = 2.3; NT HIT: AL163249.2, EVALUE 3.00e-17; EST_HUMAN HIT: AW855477.1, EVALUE 2.00e-25; SWISSPROT HIT: Q9QUJ1, EVALUE 6.00e+00
cgcgagggtccgtggcctcattcttgaagtcagtgagaccaagaacccaccaattccagacacattatgacttgctttttcactcaagattagtttgggagcatcagccacactg

SEQ ID NO: 18615 - DNA, 136 bp, Homo sapiens
  MAP TO AC010267.5; EXPRESSED IN ADULT LIVER, SIGNAL = 1.3; EXPRESSED IN BONE MARROW, SIGNAL = 1.3; EXPRESSED IN PLACENTA, SIGNAL = 1.1; EXPRESSED IN HEART, SIGNAL = 1.8; SWISSPROT HIT: P47767, EVALUE 3.50e+00; NT HIT: AL163227.2, EVALUE 4.00e-23; EST_HUMAN HIT: AA720574.1, EVALUE 2.00e-32
atgtgggaaagtttggaattatcttgggacttattgaatggcttggaccaaaatgttgatcatgatatagataataaagttcaggctgaggtggtctcagatggagatgaggaactttttgggaactggagtaaag

SEQ ID NO: 18616 - DNA, 258 bp, Homo sapiens
  MAP TO AL031730.1; EXPRESSED IN BONE MARROW, SIGNAL = 2.3; EXPRESSED IN PLACENTA, SIGNAL = 1.1; EXPRESSED IN ADULT LIVER, SIGNAL = 1.2; EXPRESSED IN BRAIN, SIGNAL = 1.1; EXPRESSED IN LUNG, SIGNAL = 1.6; EXPRESSED IN FETAL LIVER, SIGNAL = 0.83; EST_HUMAN HIT: BG205549.1, EVALUE 1.40e+00; SWISSPROT HIT: Q9RDE9, EVALUE 1.10e+00; NT HIT: gi14733094, EVALUE 9.30e-01
agcggccccatcccatcctcccctggggactcctgtaggactgcactcagatgcccactatggacagagactggcggtggcagtgcacgtggagggcactcttcccttcacttcttccacatttgcagcagccagcgttttccagaaagcacgtccttggcagcatccaggagagcagatggccttctctgggaagccttttctggtggctgccgtcacttctgcaggtggatccggggctccctctgtgggctgcac

SEQ ID NO: 18617 - DNA, 288 bp, Homo sapiens
  MAP TO AC016749.4; EXPRESSED IN LUNG, SIGNAL = 0.67; EXPRESSED IN HELA, SIGNAL = 0.66; EXPRESSED IN FETAL LIVER, SIGNAL = 1.1; EXPRESSED IN BRAIN, SIGNAL = 0.87; EXPRESSED IN BONE MARROW, SIGNAL = 0.74; EXPRESSED IN PLACENTA, SIGNAL = 1.1; EXPRESSED IN ADULT LIVER, SIGNAL = 0.62; EST_HUMAN HIT: AA668227.1, EVALUE 8.00e-55; SWISSPROT HIT: P14077, EVALUE 8.00e-08; NT HIT: X57147.1, EVALUE 2.00e-70
ttaaatgtacccagggatcagtgagagtgatgacatgagctggcacttgccccaggcaccctcagtcctgttgttggattgtctggttgggggcttctgacacagagaaactttgtcctctggggcagtgtgtcttccaatgattgccttggcatagtggacatgggcaaggcagcagcttatttcttgttgtacaatcttttttaaagtgtccttgtaaaccacactgataacaagccttactgggttattgttctgctctattttctgtcctctctgaaccaccat

SEQ ID NO: 18618 - DNA, 83 bp, Homo sapiens
  MAP TO AC002113.1; EXPRESSED IN HELA, SIGNAL = 2.6; EXPRESSED IN HEART, SIGNAL =   2; EXPRESSED IN ADULT LIVER, SIGNAL = 0.77; NT HIT: AE001221.1, EVALUE 2.50e-01; EST_HUMAN HIT: BF883812.1, EVALUE 9.30e-02
cttccccaagcacagctttccatgatctcctcaatgctgagctgcccttctctgtgctccttttgcaacagctgccaagccat

SEQ ID NO: 18619 - DNA, 133 bp, Homo sapiens
  MAP TO AC016639.5; EXPRESSED IN HEART, SIGNAL = 0.99; EXPRESSED IN ADULT LIVER, SIGNAL = 1.3; NT HIT: AL163218.2, EVALUE 2.90e-02; EST_HUMAN HIT: BI464442.1, EVALUE 6.00e-69; SWISSPROT HIT: P33075, EVALUE 5.90e+00
gcctttctgtatagagcccacaaacatcgtgaatgtgaatcatgtcattcagagggttagtgaccatgcctctgccatgaacaagagaattcattactacagccggctcaccactcctgcagacaaggcactg

SEQ ID NO: 18620 - DNA, 242 bp, Homo sapiens
  MAP TO AL121592.14; EXPRESSED IN BONE MARROW, SIGNAL = 4.1; EXPRESSED IN PLACENTA, SIGNAL = 4.8; EXPRESSED IN ADULT LIVER, SIGNAL = 4.2; EXPRESSED IN FETAL LIVER, SIGNAL = 5.3; EXPRESSED IN BRAIN, SIGNAL = 4.7; NT HIT: AL163208.2, EVALUE 6.00e-08; EST_HUMAN HIT: AU152602.1, EVALUE 1.00e-06; SWISSPROT HIT: Q06587, EVALUE 3.00e+00
cttcaggtctgaaggccaagggctgggatcccagtcctgcagatgggagtggggacttgtggtgcctcttccagccccacccatggctgcccttgtaccaatcagcacacactttctcccttctgaggttcataaaagccccaggctcaggcacagcagggcagaggatggagaggatgaagagacctctggacaaccagctacagagaggagcaacgctctctgctgagagcttcagagac

SEQ ID NO: 18621 - DNA, 131 bp, Homo sapiens
  MAP TO AC024070.2; EXPRESSED IN ADULT LIVER, SIGNAL = 2.8; EXPRESSED IN FETAL LIVER, SIGNAL = 2.4; EXPRESSED IN BRAIN, SIGNAL = 2.7; EXPRESSED IN LUNG, SIGNAL = 1.8; EXPRESSED IN BONE MARROW, SIGNAL = 2.7; EXPRESSED IN PLACENTA, SIGNAL = 2.8; NT HIT: gi14777332, EVALUE 1.70e+00; EST_HUMAN HIT: BF062298.1, EVALUE 9.00e-68; SWISSPROT HIT: P20013, EVALUE 5.90e+00
tcatcctgctgtgttcccctctccaggaaggcactgcccacgcagtctgtctgatagaggtgttgagtgctcactgaactccgtgatcttcctgaaacccaactttgattcagtgggctctgcttggaagc

SEQ ID NO: 18622 - DNA, 144 bp, Homo sapiens
  MAP TO AL121877.13; EXPRESSED IN FETAL LIVER, SIGNAL = 1.3; EXPRESSED IN BRAIN, SIGNAL = 1.1; EXPRESSED IN PLACENTA, SIGNAL =   1; EXPRESSED IN BONE MARROW, SIGNAL = 1.2; EXPRESSED IN ADULT LIVER, SIGNAL = 1.2; NT HIT: AL163300.2, EVALUE 2.00e-31; EST_HUMAN HIT: BG223404.1, EVALUE 3.00e-34
gcaattatgtctccatactacaggacactccactcaaatgcatcctccaaactaggaaaagttaatttcccaaaccttaaactagttggcttaggattgggctcagggaaagggaacccagaagcccagtatgccggcaaaagg

SEQ ID NO: 18623 - DNA, 325 bp, Homo sapiens
  MAP TO AC010508.5; EXPRESSED IN BRAIN, SIGNAL = 0.69; EXPRESSED IN PLACENTA, SIGNAL = 0.81; EXPRESSED IN ADULT LIVER, SIGNAL = 0.96; EXPRESSED IN LUNG, SIGNAL = 0.95; SWISSPROT HIT: P10267, EVALUE 8.00e-50; NT HIT: X92887.1, EVALUE 0.00e+00; EST_HUMAN HIT: AU124350.1, EVALUE 0.00e+00
aacagaagagtgcaatgcaactcctgctacagcagccgtagctgtgactgcaattaatcccataatcactgctattaaagtaaaaatgaatcttttggatctatttaaaacaccttttaatacttcagtcaaagtatggatggatggtgaggcctcccacggtcggtccatggacacagggatccacacgccctctcttgctctcaccagcagaatacggtgttgccaattaaaagttgaatcaatgcaagtaagcaatctacaattttcacaggttatagtctgggagtctggtttaataactatatttcctacaactagcata

SEQ ID NO: 18624 - DNA, 139 bp, Homo sapiens
  MAP TO AC026717.3; EXPRESSED IN ADULT LIVER, SIGNAL = 1.1; EXPRESSED IN PLACENTA, SIGNAL = 1.1; EXPRESSED IN HEART, SIGNAL = 1.5; EXPRESSED IN HELA, SIGNAL = 1.4; EXPRESSED IN BRAIN, SIGNAL = 0.97; NT HIT: gi14733382, EVALUE 4.70e-01; EST_HUMAN HIT: BG424530.1, EVALUE 6.90e-01
ccttcagtgcctcatcacactgtgaattggtcttctctcgaccaataagcacataagcagtcactgcaggatcaccttgatgtagacaaagtttgtccaaagggtgccttgtgatcactaaacctgaaagagcctccat

SEQ ID NO: 18625 - DNA, 195 bp, Homo sapiens
  MAP TO AC061958.9; EXPRESSED IN ADULT LIVER, SIGNAL = 1.9; EXPRESSED IN HEART, SIGNAL = 2.1; EXPRESSED IN BRAIN, SIGNAL = 1.4; EXPRESSED IN LUNG, SIGNAL = 1.5; EXPRESSED IN BONE MARROW, SIGNAL = 1.8; EXPRESSED IN PLACENTA, SIGNAL =   2; EST_HUMAN HIT: BF736370.1, EVALUE 5.00e-18; SWISSPROT HIT: P38992, EVALUE 2.50e+00; NT HIT: D87675.1, EVALUE 1.00e-17
caactcctcataggttaaagttttactatgagattttagaaacttaatcacatcttggagctctacttctaattgtagttctcttgctatttccaccaagtcatctgcagtgacttcctttgctgaagtcttcaactcctcaaagtcatccccgtcggttggaataaacttcttccaaaattgctgtttggacat

SEQ ID NO: 18626 - DNA, 216 bp, Homo sapiens
  MAP TO AC024578.2; EXPRESSED IN BRAIN, SIGNAL = 1.2; EXPRESSED IN LUNG, SIGNAL = 1.8; EXPRESSED IN ADULT LIVER, SIGNAL = 1.2; EXPRESSED IN HEART, SIGNAL = 0.95; EST_HUMAN HIT: AV661768.1, EVALUE 7.20e-02; SWISSPROT HIT: P20938, EVALUE 1.70e+00; NT HIT: AF109718.1, EVALUE 4.90e-02
gggccacagcaaaaatatgactgtgttagtcatgcattcgtgggattagagctgcctcaggcagggactcagattatggatgaggccaacctcaaaaagaccctggccaattatttttatttctggagcaaggaacatttgaaaacttataatttattcaattatggaaccgggttgccctataacctgctttacatcacccagaatgatttctga

SEQ ID NO: 18627 - DNA, 147 bp, Homo sapiens
  MAP TO AC053467.1; EXPRESSED IN LUNG, SIGNAL = 8.8; EXPRESSED IN FETAL LIVER, SIGNAL = 4.6; EXPRESSED IN BONE MARROW, SIGNAL = 8.3; EXPRESSED IN PLACENTA, SIGNAL = 5.2; EXPRESSED IN ADULT LIVER, SIGNAL = 6.1; NT HIT: gi14764019, EVALUE 2.00e-77; EST_HUMAN HIT: BG024447.1, EVALUE 3.00e-77; SWISSPROT HIT: Q61982, EVALUE 5.20e-01
gactgcctggacagatcctttcgggcacaggtgttcagctgccctgcctgccgctacgacctgggccgcagctatgccatgcaggtgaaccagcctctgcagaccgtcctcaaccagctcttccccggctacggcaatggccggtga

SEQ ID NO: 18628 - DNA, 301 bp, Homo sapiens
  MAP TO AF129107.1; EXPRESSED IN LUNG, SIGNAL = 0.95; EXPRESSED IN FETAL LIVER, SIGNAL = 0.87; EXPRESSED IN BONE MARROW, SIGNAL = 1.1; EXPRESSED IN PLACENTA, SIGNAL = 0.64; EXPRESSED IN ADULT LIVER, SIGNAL = 0.65; EXPRESSED IN BRAIN, SIGNAL = 0.73; NT HIT: AL163268.2, EVALUE 0.00e+00; EST_HUMAN HIT: BG956480.1, EVALUE 4.10e-01; SWISSPROT HIT: P13808, EVALUE 5.30e-01
tcatttcaaagccatccaggttgtgcttccctgaagaagtctcagcccctgagcactaatctttcgggcctctgcttccaggtagctgctagggtggctgattgaaggtggattctgggctgttttctctgggaaaacactcatcagtgaacatgaatgctcattcagggggtgactgggaattgggactgcctcaagggcagtatcagaggtgttcaggctgaccatgggcctcttgaccctcatcagagggatcagaaagggtctaaactttcgggttaattccacacggattgggtcc

SEQ ID NO: 18629 - DNA, 284 bp, Homo sapiens
  MAP TO AC020553.4; EXPRESSED IN HEART, SIGNAL = 0.92; EXPRESSED IN LUNG, SIGNAL = 2.1; EXPRESSED IN FETAL LIVER, SIGNAL = 0.83; EXPRESSED IN BONE MARROW, SIGNAL = 1.8; EXPRESSED IN ADULT LIVER, SIGNAL = 1.2; NT HIT: gi5730038, EVALUE 5.00e-58; EST_HUMAN HIT: BG505051.1, EVALUE 2.00e-55; SWISSPROT HIT: P41997, EVALUE 2.00e-07
actatagaaatgatgttagacaaagccaaattcgagctattttcttatttgagttcaaaatgggttgtaaagcaatgaagacaacttataacattaataacacatttggtccaggaactgttaacaaatgtccagtgcagtggtggttcaagaacttttccaaaggagatgagagccttgaagatgaggagcttagtggctggctattgcaagttgacaacgaccaattaagagcaatcatcgaaactgatcttcttaaaactacacaagaagttgccaaataa

SEQ ID NO: 18630 - DNA, 226 bp, Homo sapiens
  MAP TO AC020927.4; EXPRESSED IN ADULT LIVER, SIGNAL = 3.1; EXPRESSED IN HEART, SIGNAL = 2.8; EXPRESSED IN LUNG, SIGNAL = 2.9; EXPRESSED IN PLACENTA, SIGNAL = 1.5; NT HIT: gi5729886, EVALUE 1.00e-117; EST_HUMAN HIT: BG254607.1, EVALUE 1.00e-117; SWISSPROT HIT: Q13576, EVALUE 5.00e-35
gaggtagaccatgccacggacatggtgagccgtgcaatgatagattccaggactccagaagaaatgaagcatagccaatctatgattgaagatgcacagctgcctcttgagcagaagaagaggaaaatccagaggaatcttcggacgttggaacagactggacacgtgtcatccgaaaataaataccaagacattctcaatgagattgccaaggtttttggaaaca

SEQ ID NO: 18631 - DNA, 215 bp, Homo sapiens
  MAP TO AC003961.1; EXPRESSED IN ADULT LIVER, SIGNAL = 0.52; SWISSPROT HIT: P08548, EVALUE 2.00e-04; NT HIT: AJ006345.1, EVALUE 7.70e-01; EST_HUMAN HIT: BF885110.1, EVALUE 5.00e-06
ttccggaaatcctagccaaagaaatcagtcaaaagaaagaaatgaaagaggaagaaccaaatcaagaactcatttccatttataatatctacaaacaaacgaaaatacatttaactagggaggtgaaagatctccacaaggagaactacacaatattgatgaaagaaatcatagaaaacacaaacatggaaaagcatcccttgttcatggattaa

SEQ ID NO: 18632 - DNA, 185 bp, Homo sapiens
  MAP TO AC020923.4; EXPRESSED IN BONE MARROW, SIGNAL = 2.9; EXPRESSED IN ADULT LIVER, SIGNAL = 2.7; EXPRESSED IN PLACENTA, SIGNAL = 2.4; EXPRESSED IN HEART, SIGNAL =   2; EXPRESSED IN FETAL LIVER, SIGNAL = 1.7; EXPRESSED IN BRAIN, SIGNAL = 3.3; SWISSPROT HIT: Q07075, EVALUE 5.00e-01; NT HIT: gi14733634, EVALUE 1.00e-100; EST_HUMAN HIT: BE386012.1, EVALUE 1.00e-100
ctcaagtttccattggattccttccactttctgaaatagccttctgccctctgtacgcacggctgatagttgtgcacacaggcgaggagtagtagttgactccgcagcattcgctctgagactgagccctcgtctgtccatgtctgcttatcaatgaggtcccttagcagcctgatgaggaaggc

SEQ ID NO: 18633 - DNA, 132 bp, Homo sapiens
  MAP TO AC016830.5; EXPRESSED IN BRAIN, SIGNAL = 1.3; EXPRESSED IN BONE MARROW, SIGNAL = 2.4; EXPRESSED IN PLACENTA, SIGNAL = 1.1; EXPRESSED IN HEART, SIGNAL = 1.5; EXPRESSED IN ADULT LIVER, SIGNAL = 1.2; EXPRESSED IN LUNG, SIGNAL = 2.1; EXPRESSED IN HELA, SIGNAL = 1.6; NT HIT: M18043.1, EVALUE 1.10e-01; EST_HUMAN HIT: BE171840.1, EVALUE 6.50e-01
attaccggtgaccgctcgggatgttaagctagtgaagacaatgcaaggtggcctgaagcagcatgaggcagaccatggtcccgacctgcattggctggtgctggctgcagctgctgatggaggctacaaaca

SEQ ID NO: 18634 - DNA, 81 bp, Homo sapiens
  MAP TO AC005903.3; EXPRESSED IN PLACENTA, SIGNAL = 3.9; EXPRESSED IN ADULT LIVER, SIGNAL = 4.2; EXPRESSED IN HEART, SIGNAL = 2.4; EXPRESSED IN HELA, SIGNAL =   8; EXPRESSED IN BRAIN, SIGNAL = 4.3; EXPRESSED IN FETAL LIVER, SIGNAL = 2.9; NT HIT: gi4502960, EVALUE 2.00e-38; EST_HUMAN HIT: AL589571.1, EVALUE 5.60e+00; SWISSPROT HIT: Q02388, EVALUE 2.00e-11
cctttccccaggggctccagggaggccaggatcacccttgggccctcgaggaccctcttgtccgcggtccccaggctctcc

SEQ ID NO: 18635 - DNA, 336 bp, Homo sapiens
  MAP TO AC009123.6; EXPRESSED IN BONE MARROW, SIGNAL = 2.2; EXPRESSED IN PLACENTA, SIGNAL = 2.7; EXPRESSED IN HEART, SIGNAL = 2.9; EXPRESSED IN ADULT LIVER, SIGNAL = 2.3; EXPRESSED IN FETAL LIVER, SIGNAL = 2.7; EXPRESSED IN HELA, SIGNAL =   2; EXPRESSED IN BRAIN, SIGNAL = 1.5; NT HIT: AE004223.1, EVALUE 1.20e+00; SWISSPROT HIT: Q01456, EVALUE 1.00e-07
ctagatgccagcctgagtgtagatgcccgcctgggtgtacactccatcctgagtgtagacaccagcctgggtgtagacgccatccttggtgtagatgccatcctgagtgtagatgccagcctgggtgtagacgccatcctgagtgtagatgccagcctgggtgtagacgccatgctgagtgtagacgccagcctgggtgtagatgccatcctcagtgtagatgccagcctgggtgtagatgccagcctgggtgtagacgccagcctgggcatagatgccatcctgggtgtagacaccagcctgggcatagatgccatcctgggtgtagacaccatc

SEQ ID NO: 18636 - DNA, 125 bp, Homo sapiens
  MAP TO AC008413.5; EXPRESSED IN BRAIN, SIGNAL = 8.9; EXPRESSED IN LUNG, SIGNAL =  10; EXPRESSED IN FETAL LIVER, SIGNAL =  13; EXPRESSED IN BONE MARROW, SIGNAL = 7.9; EXPRESSED IN PLACENTA, SIGNAL =  12; EXPRESSED IN ADULT LIVER, SIGNAL = 7.8; NT HIT: AL163249.2, EVALUE 4.00e-32; EST_HUMAN HIT: BF756324.1, EVALUE 2.00e-38
tgcgaaagtctgcagcttcactcctgaagccagcgagaccatgaacccacggggaggaaccagcaactccagatgcaacgccttaagagctgtaacactgaccgcgaaggtctgcagcttcactc

SEQ ID NO: 18637 - DNA, 199 bp, Homo sapiens
  MAP TO AC025450.3; EXPRESSED IN HEART, SIGNAL = 2.3; EXPRESSED IN ADULT LIVER, SIGNAL = 1.6; EXPRESSED IN FETAL LIVER, SIGNAL = 1.7; EXPRESSED IN HELA, SIGNAL = 1.8; EXPRESSED IN BRAIN, SIGNAL = 1.6; EXPRESSED IN BONE MARROW, SIGNAL = 1.6; EXPRESSED IN PLACENTA, SIGNAL = 1.6; SWISSPROT HIT: P47179, EVALUE 2.20e-01; NT HIT: U43090.1, EVALUE 7.00e-01
ctatgcactggtaatatccagaactctggatgcagatatgatatcaagaacattgggtacaggggtgatatccagattgctgggtgccggggtgatatccagaacactgggtgcaggggtgatatccagattgctgggtgcagaggtgatatccaaaacactgggtgcaggagtgttattgagatcactgggtacaggg

SEQ ID NO: 18638 - DNA, 128 bp, Homo sapiens
  MAP TO AC067967.2; EXPRESSED IN FETAL LIVER, SIGNAL = 0.92; EXPRESSED IN HELA, SIGNAL = 0.85; EXPRESSED IN BONE MARROW, SIGNAL = 1.5; EXPRESSED IN PLACENTA, SIGNAL = 1.1; EXPRESSED IN ADULT LIVER, SIGNAL = 1.8; EST_HUMAN HIT: BE890431.1, EVALUE 2.00e-41; NT HIT: AF021345.1, EVALUE 3.00e-17
ttgaattaaatgaagaaaagcacaaagaactaatagagaaaaaggagatggaaatttcagagttaaatgcaaagctaagaagtcaagaaaaagaaaaacaaaatgaaataatcaagctacaactagaa

SEQ ID NO: 18639 - DNA, 210 bp, Homo sapiens
  MAP TO AC003967.1; EXPRESSED IN ADULT LIVER, SIGNAL = 0.43; EXPRESSED IN BRAIN, SIGNAL = 0.4; NT HIT: gi14766840, EVALUE 1.00e-115; SWISSPROT HIT: P45575, EVALUE 3.20e+00; EST_HUMAN HIT: BF361069.1, EVALUE 1.00e-86
tcaatgctgcttcttgtggagggctagggggtcggagggtggtggctggtggaagaatgcgggccactgaaggcaacggtaggccagcaggtgggggcccagcgcatacagcagattgcacacgaagaagcagccccaggtgtcctcaggcacacggtaggtgaagggtgtgcgcaggtgcatggaagcccccatgtgcgagaactgtgc

SEQ ID NO: 18640 - DNA, 178 bp, Homo sapiens
  MAP TO AF131215.1; EXPRESSED IN PLACENTA, SIGNAL = 1.1; EXPRESSED IN ADULT LIVER, SIGNAL = 1.3; EXPRESSED IN LUNG, SIGNAL = 0.69; EXPRESSED IN HELA, SIGNAL = 1.2; EXPRESSED IN FETAL LIVER, SIGNAL = 1.4; SWISSPROT HIT: P15662, EVALUE 8.60e-01; EST_HUMAN HIT: AW409386.1, EVALUE 2.00e-54
ctggcacctgcactgtgctctctcttctgggactgcccttccctccctcatgatgttcttggcttgccacctcatcgcagcagaggatcggctccagtgctacctgctcagaggcactgccgtgagcagcctctctaaaacagtcctgtctcttcatcaaatcccaagcaatctctag

SEQ ID NO: 18641 - DNA, 357 bp, Homo sapiens
  MAP TO AC012082.6; EXPRESSED IN HELA, SIGNAL = 1.1; EXPRESSED IN BONE MARROW, SIGNAL = 1.4; EXPRESSED IN PLACENTA, SIGNAL = 1.2; EXPRESSED IN ADULT LIVER, SIGNAL = 1.3; EXPRESSED IN BRAIN, SIGNAL = 1.1; EXPRESSED IN FETAL LIVER, SIGNAL = 1.2; EST_HUMAN HIT: BE158670.1, EVALUE 3.00e-08; NT HIT: AF055066.1, EVALUE 6.00e-09; SWISSPROT HIT: P08547, EVALUE 8.00e-26
tgaacaatctgtaagaaatcaagaaggcaattccatttataatagttacaaaaaaataaaatacctaggaataaatttcaccaaagaggtgagacagctctgccataaaaactataaaatactgaagaatgaaattaaaaatgacacacaaaaaattaaaagacatatcatgttcctggagaaaaataatattgttaaaatgtccatactacccaaagtgatctacaatgtcaatgcaattcctatcaaaataacaatgatatttttcacagatttagaaaaaaatttcttaaaatttgcatggaactacaaagaaccccaaatagtcaaagtagtcctgagcaaaaagaacaaagc

SEQ ID NO: 18642 - DNA, 131 bp, Homo sapiens
  MAP TO AC006231.18; EXPRESSED IN HEART, SIGNAL = 0.96; EXPRESSED IN BRAIN, SIGNAL = 1.7; EXPRESSED IN HELA, SIGNAL =   1; EXPRESSED IN FETAL LIVER, SIGNAL = 1.3; EXPRESSED IN BONE MARROW, SIGNAL = 1.8; EXPRESSED IN PLACENTA, SIGNAL = 1.7; EXPRESSED IN ADULT LIVER, SIGNAL = 1.9; EST_HUMAN HIT: R55851.1, EVALUE 2.00e-22; NT HIT: AB036934.1, EVALUE 5.00e-19; SWISSPROT HIT: P08547, EVALUE 5.00e-06
atgaactcgaaatggatcacagacctaaatttaaaatgcaaaaccataaaactcctagaagataatataggagaaaatctagatgactttgagtttggaggtgactttttgtacaacaccaaagacatgac

SEQ ID NO: 18643 - DNA, 147 bp, Homo sapiens
  MAP TO AC026745.3; EXPRESSED IN PLACENTA, SIGNAL = 0.95; EXPRESSED IN ADULT LIVER, SIGNAL = 1.2; EXPRESSED IN HEART, SIGNAL = 1.7; EXPRESSED IN BRAIN, SIGNAL = 0.91; EXPRESSED IN LUNG, SIGNAL = 0.85; EXPRESSED IN HELA, SIGNAL = 1.8; EXPRESSED IN FETAL LIVER, SIGNAL =   2; EST_HUMAN HIT: AW895625.1, EVALUE 7.40e-01; NT HIT: D12688.1, EVALUE 2.00e+00; SWISSPROT HIT: Q9V7H4, EVALUE 4.50e+00
atctccttctggggtacctttctggctgactccaacaggaagtctggggactttaactatagtccacagaagaccacctccggggatagggaaccaggcaagaagaatagcagttttggaggggaagatagaaaatgcccaggctac

SEQ ID NO: 18644 - DNA, 549 bp, Homo sapiens
  MAP TO AC016594.5; EXPRESSED IN ADULT LIVER, SIGNAL = 0.63; EXPRESSED IN FETAL LIVER, SIGNAL = 0.69; EXPRESSED IN HELA, SIGNAL = 0.77; EXPRESSED IN PLACENTA, SIGNAL = 1.3; EST_HUMAN HIT: BI519571.1, EVALUE 0.00e+00; NT HIT: AB020695.1, EVALUE 0.00e+00; SWISSPROT HIT: P39723, EVALUE 1.50e-01
tcaggtcagcttagctttcttcttagcaggtcctttatgccctttggcctttcttcttaaattccgcctgtctaccacaggcacttccacttctatttcctctgagctgctatccacagctttttctgccgattgtgtaaactgatccagttgctcggaagatgcttcagactgctcctctgactgattcttctgtcctgcattctgtgaaaatggcacgtcttcaagttcaacctctatcaaagaactctgaggaagagcagtagatgtttcctggggctcagataccccctcctcaccctggtcttccaatgaggaagtagtattaggagacaaattctcagagaccggttcttcggaaaattcagctatcacagagtttggaaaaccaccatcagatcgttcttcatttgacatagtagcaacattgtctgaactcccaagatgtgctttctttcttggaagtagggacaatttctcttccatgtgccccttttcatcagatgtgccttcatccatcaacatttctgagtcaggtatacgtggggt

SEQ ID NO: 18645 - DNA, 483 bp, Homo sapiens
  MAP TO AC016940.7; EXPRESSED IN BONE MARROW, SIGNAL = 2.4; EXPRESSED IN PLACENTA, SIGNAL = 2.7; EXPRESSED IN HEART, SIGNAL = 2.2; EXPRESSED IN ADULT LIVER, SIGNAL = 1.6; EXPRESSED IN LUNG, SIGNAL = 2.4; EXPRESSED IN HELA, SIGNAL = 1.5; EXPRESSED IN FETAL LIVER, SIGNAL = 2.7; EST_HUMAN HIT: AW006998.1, EVALUE 0.00e+00; NT HIT: Z73599.1, EVALUE 1.80e+00; SWISSPROT HIT: P38533, EVALUE 2.00e-07
atggcgagtcagaacactgaacaggaatatgaagccaagctggccccatctgttggtggagagccaacaagcgggggcccatctggttcttcacctgatccaaatccagattccagcgaggttttggacaggcacgaggaccaagccatgagccaagatccaggctcccaagataactcaccaccagaagaccgaaaccaacgcgtggtcaacgtggaagacaaccacaacctttttaggctctccttcccaagaaagctttggacgattgtggaggaagacacattcaagtctgtgagctggaacgatgatggagacgccgtgatcatcgacaaggatctcttccagagggaggttcttcaacggaaaggtgcagagaggatcttcaaaacagacagcttgacgagtttcattcgccagctgaacctctatggattctgcaaaacacgcccaagcaactctccaggaaacaagaaaatgatg

SEQ ID NO: 18646 - DNA, 146 bp, Homo sapiens
  MAP TO AC020728.4; EXPRESSED IN LUNG, SIGNAL = 1.6; EXPRESSED IN BONE MARROW, SIGNAL = 1.3; EXPRESSED IN PLACENTA, SIGNAL = 1.9; EXPRESSED IN ADULT LIVER, SIGNAL = 1.7; EXPRESSED IN HEART, SIGNAL = 1.8; NT HIT: gi14743593, EVALUE 7.70e+00; EST_HUMAN HIT: R75968.1, EVALUE 1.00e-76; SWISSPROT HIT: P34269, EVALUE 8.80e-01
cttactcttagggtcctcttcatatgtttttgttttaggttgcaatggaggtgaaatagtggcttgtatttgaggagactgaaatttaggcctacttttaggttgctgctcttcaaattcctgactgaatccttcaggaagtgcat

SEQ ID NO: 18647 - DNA, 123 bp, Homo sapiens
  MAP TO AF022794.1; EXPRESSED IN BRAIN, SIGNAL = 1.1; EXPRESSED IN LUNG, SIGNAL = 0.72; EXPRESSED IN FETAL LIVER, SIGNAL = 0.67; EXPRESSED IN ADULT LIVER, SIGNAL = 0.89; SWISSPROT HIT: P55283, EVALUE 6.00e+00; NT HIT: AJ229042.1, EVALUE 4.00e-63; EST_HUMAN HIT: AL543529.1, EVALUE 1.50e-01
tggatatctggaggactgagtggaggaggattctgaaggctcatctggaaagagtgtcttggccaataaacaaggtcttccatgggcttgggagtgggtagaagtgctgtattagtcagagtt

SEQ ID NO: 18648 - DNA, 75 bp, Homo sapiens
  MAP TO AC013602.2; EXPRESSED IN LUNG, SIGNAL = 1.3; EXPRESSED IN HELA, SIGNAL = 0.49; EXPRESSED IN BONE MARROW, SIGNAL = 1.1; EXPRESSED IN BRAIN, SIGNAL =   1; EXPRESSED IN PLACENTA, SIGNAL =   1; EXPRESSED IN HEART, SIGNAL = 1.2; EXPRESSED IN ADULT LIVER, SIGNAL = 1.1; SWISSPROT HIT: O28116, EVALUE 6.30e+00; EST_HUMAN HIT: BF963682.1, EVALUE 5.00e+00
tggtcttctccagagcacctgaagctgcatcatcctccatgagccccaagaccacaggggattgctcagagaagg

SEQ ID NO: 18649 - DNA, 278 bp, Homo sapiens
  MAP TO AL121915.8; EXPRESSED IN HELA, SIGNAL = 0.93; EXPRESSED IN PLACENTA, SIGNAL = 1.1; EXPRESSED IN BONE MARROW, SIGNAL = 1.6; EXPRESSED IN ADULT LIVER, SIGNAL = 1.2; EST_HUMAN HIT: BG745436.1, EVALUE 1.50e+00; SWISSPROT HIT: Q58168, EVALUE 1.40e+00; NT HIT: M61705.1, EVALUE 4.00e-03
ttttctggttctttgcttttttctctgtctgtaaaatggactccgacaacaaccatgatgtaacattgctcatggcagaaactcggttaaaaacaaaatctaggggacaagttgcagggaggttagaattaaccaggtccctggccactgggccctggaaggtcagatggcttccagctggaggggagctccaaccctgtacattccaataggaagccggcagctgaagctttgtctccagggcttccaggttctctggggtttcttcctttctgacc

SEQ ID NO: 18650 - DNA, 134 bp, Homo sapiens
  MAP TO AC005568.1; EXPRESSED IN HEART, SIGNAL = 3.1; EXPRESSED IN ADULT LIVER, SIGNAL = 3.7; EXPRESSED IN FETAL LIVER, SIGNAL =   2; EXPRESSED IN LUNG, SIGNAL = 2.8; EXPRESSED IN BRAIN, SIGNAL = 3.3; EXPRESSED IN PLACENTA, SIGNAL = 3.5; NT HIT: U52421.1, EVALUE 4.50e-01; EST_HUMAN HIT: AI001906.1, EVALUE 8.00e-53; SWISSPROT HIT: O95486, EVALUE 2.60e+00
cttctccctctggttttgattccaggctccacatggaccaaacccagctggcagtcagagggcaagagcatctcgatgcagcgcatacaggccaattccagggtgcagtgcagcatggaaaaggagaaatgtac

SEQ ID NO: 18651 - DNA, 208 bp, Homo sapiens
  MAP TO AC016951.9; EXPRESSED IN HEART, SIGNAL = 1.2; EXPRESSED IN ADULT LIVER, SIGNAL = 1.3; EXPRESSED IN BRAIN, SIGNAL = 1.2; EXPRESSED IN LUNG, SIGNAL = 2.4; EXPRESSED IN HELA, SIGNAL = 0.78; EXPRESSED IN BONE MARROW, SIGNAL = 1.7; NT HIT: gi14750209, EVALUE 7.40e-01; EST_HUMAN HIT: R60744.1, EVALUE 2.70e-01; SWISSPROT HIT: O14360, EVALUE 5.50e+00
acaccctcctcctccaggccagatacatggaaaaggtgtctgctccgagccagctgaacagacctcacatgatgataatcaaatcatatttgaaaatgagatgaggaggggagtcagaacaaaagtctatgaaaagaaaaataaggtggaagttgcagaaattggtgttctgtattctaaggccttcctggctcctggcagggtttga

SEQ ID NO: 18652 - DNA, 132 bp, Homo sapiens
  MAP TO AC005776.1; EXPRESSED IN BONE MARROW, SIGNAL = 1.3; EXPRESSED IN PLACENTA, SIGNAL = 0.48; EXPRESSED IN ADULT LIVER, SIGNAL = 0.65; NT HIT: X69394.1, EVALUE 4.40e-01; EST_HUMAN HIT: BE160567.1, EVALUE 2.00e-68; SWISSPROT HIT: Q9R244, EVALUE 5.90e+00
atccatcctcctggagatgcccaatgcccccaagtctggtctagatccacccttgcattccaggcttgcacatccaaccgcttcaatgacagcatccatgaggatgtcgacaagctccacatggtcaaggaa

SEQ ID NO: 18653 - DNA, 345 bp, Homo sapiens
  MAP TO AC020951.4; EXPRESSED IN LUNG, SIGNAL = 0.72; EXPRESSED IN FETAL LIVER, SIGNAL = 0.44; EXPRESSED IN ADULT LIVER, SIGNAL = 0.65; NT HIT: X87638.1, EVALUE 5.00e-03; EST_HUMAN HIT: AW841847.1, EVALUE 4.00e-60; SWISSPROT HIT: P51517, EVALUE 1.00e-21
ctagcattgcgcacagccaatgaatatcccctaacaactgttgaaaatcatttaaaatctgtaacctgtctttatggagaactactttctgaggccgaacacttctttcagtaacaatagtgcctaagtaatggtatggggaagttgcttgtactttctctggaccaattttgagattccatttagtcaaagcctgcttcctttctctgaataactgatgtaagatttgatctgtaggagtggccaaaagaatgtcatccatgaaatgaatgatgtgagcagtaggaaacatattcagagtctccttcaatgtttgtcctacaaaatgctgacagcgtaggactg

SEQ ID NO: 18654 - DNA, 302 bp, Homo sapiens
  MAP TO AC012085.4; EXPRESSED IN PLACENTA, SIGNAL = 2.4; EXPRESSED IN ADULT LIVER, SIGNAL =   2; EXPRESSED IN BRAIN, SIGNAL = 2.1; EXPRESSED IN FETAL LIVER, SIGNAL = 1.8; EXPRESSED IN LUNG, SIGNAL = 2.8; NT HIT: AF020590.1, EVALUE 0.00e+00; EST_HUMAN HIT: BI335340.1, EVALUE 0.00e+00; SWISSPROT HIT: Q9PW70, EVALUE 8.00e-26
gatggtactggggaagtatgactgttaatgaagccaaagagaaattaaaagaggcaccagaaggaactttcttgattagagatagctcgcattcagactacctactaacaatatctgttaaaacatcagctggaccaactaatcttcgaatcgaataccaagacggaaaattcagattggactctatcatatgtgtcaaatccaagcttaaacaatttgacagtgtggttcatctgatcgactactatgttcagatgtgcaaggataagcggacaggtccagaagccccccggaacggcact

SEQ ID NO: 18655 - DNA, 193 bp, Homo sapiens
  MAP TO AC025457.3; EXPRESSED IN BONE MARROW, SIGNAL = 2.5; EXPRESSED IN ADULT LIVER, SIGNAL =   2; EXPRESSED IN HELA, SIGNAL = 2.7; EXPRESSED IN LUNG, SIGNAL = 3.8; EXPRESSED IN BRAIN, SIGNAL = 2.1; EXPRESSED IN FETAL LIVER, SIGNAL =   2; NT HIT: gi15296094, EVALUE 1.00e-104; EST_HUMAN HIT: BE748488.1, EVALUE 1.00e-104; SWISSPROT HIT: Q9NRJ3, EVALUE 1.00e-35
ctaataaggagttttatggccgtatgtttcgtgtttcccctgatgtgccctgttactgttcctcttgccatggtgtttcttcctgtggcaaacatttcctttaccatttttcttggcagcttgcactttcatccactgcttaacagtatggttgtgcgggctgacacagattcttctgcgcttgacatgaagg

SEQ ID NO: 18656 - DNA, 87 bp, Homo sapiens
  MAP TO AC004398.1; EXPRESSED IN PLACENTA, SIGNAL = 0.91; EXPRESSED IN ADULT LIVER, SIGNAL = 0.5; EXPRESSED IN HEART, SIGNAL =   2; EXPRESSED IN BRAIN, SIGNAL = 0.68; NT HIT: AY035115.1, EVALUE 2.70e-01; EST_HUMAN HIT: BG284608.1, EVALUE 3.90e-01
ctagcactctaccatctttttcgccaccatctcctctgctacttctttagcctggaagttgtagctgctttctgcatttgctatttt

SEQ ID NO: 18657 - DNA, 321 bp, Homo sapiens
  MAP TO AL121906.18; EXPRESSED IN BONE MARROW, SIGNAL = 1.2; EXPRESSED IN PLACENTA, SIGNAL = 0.96; EXPRESSED IN ADULT LIVER, SIGNAL = 1.1; EXPRESSED IN LUNG, SIGNAL = 0.92; EXPRESSED IN FETAL LIVER, SIGNAL = 1.1; EXPRESSED IN HELA, SIGNAL = 1.3; SWISSPROT HIT: Q06455, EVALUE 2.00e-21; NT HIT: gi4826662, EVALUE 0.00e+00; EST_HUMAN HIT: H04886.1, EVALUE 0.00e+00
actgatgcctgtgtcttgcagaactgctggaactgtggccgcaaagccagcgagacatgcagtggctgcaatatcgcgcgatactgtggctctttctgccagcacaaggactgggagcggcaccaccgcctctgtggtcagaacctgcatggccagagcccccacggccagggccggccgctgcttcctgtaggcaggggctcctctgccaggtccgccgactgcagcgtgcccagcccagccctcgacaagacctcggcaaccacatcgcgttcctcaacacctgcttctgtgacagctatcgacaccaacggactctga

SEQ ID NO: 18658 - DNA, 295 bp, Homo sapiens
  MAP TO AC005601.1; EXPRESSED IN BONE MARROW, SIGNAL = 4.4; EXPRESSED IN PLACENTA, SIGNAL =   5; EXPRESSED IN ADULT LIVER, SIGNAL = 4.8; EXPRESSED IN HELA, SIGNAL = 5.3; EXPRESSED IN BRAIN, SIGNAL = 4.4; EXPRESSED IN FETAL LIVER, SIGNAL = 5.5; NT HIT: U78509.1, EVALUE 0.00e+00; SWISSPROT HIT: P04150, EVALUE 5.00e-48; EST_HUMAN HIT: AU139958.1, EVALUE 0.00e+00
atgttttgcatcttacctggtattgcctttgcccatttcactgctgcaatcacttgccgccctcctaacatgttgagcgtagtcatgatcctccaagttgagtctggaacagagctatcatatcctgcatataacacttcaggttcaataacctccaacagtgacaccagggtaggggtgagttgtggtaacgttgcaggaactattgttttgttaccaggattttcagaggtttcttgtgagactcctgtagtggcctgctgaattccttttatttttttctttgtttttcgag

SEQ ID NO: 18659 - DNA, 116 bp, Homo sapiens
  MAP TO AF031075.1; EXPRESSED IN BRAIN, SIGNAL = 1.1; EXPRESSED IN FETAL LIVER, SIGNAL = 2.6; EXPRESSED IN PLACENTA, SIGNAL = 3.8; EXPRESSED IN ADULT LIVER, SIGNAL =   2; NT HIT: AB038386.1, EVALUE 2.40e-02; EST_HUMAN HIT: AW998583.1, EVALUE 3.00e-21
atggcggaagatgaggtggaggaagtcactgaggagggcctcagtgccccagggacagtagcatggaggatggttacgccagaggatggatcgacttctagccatgtggtggtcag

SEQ ID NO: 18660 - DNA, 132 bp, Homo sapiens
  MAP TO AC025458.3; EXPRESSED IN BONE MARROW, SIGNAL = 1.8; EXPRESSED IN ADULT LIVER, SIGNAL =   2; EXPRESSED IN HEART, SIGNAL =   2; EXPRESSED IN BRAIN, SIGNAL = 2.3; EXPRESSED IN FETAL LIVER, SIGNAL = 2.3; NT HIT: AY035311.1, EVALUE 4.40e-01; EST_HUMAN HIT: AW814039.1, EVALUE 1.10e-02
gttcacttttccatctttctttgcaattagggtgatgtagttctggcagatgtacaggaaagtcagctttatgtggtggagggttggggggtgatgggccagagggtcatggttctgagaaacattttcctt

SEQ ID NO: 18661 - DNA, 214 bp, Homo sapiens
  MAP TO AC005925.1; EXPRESSED IN ADULT LIVER, SIGNAL = 0.83; EXPRESSED IN HEART, SIGNAL = 1.4; EXPRESSED IN FETAL LIVER, SIGNAL = 0.67; EXPRESSED IN LUNG, SIGNAL = 0.76; SWISSPROT HIT: Q9NR22, EVALUE 4.00e-17; NT HIT: gi11436351, EVALUE 3.00e-59; EST_HUMAN HIT: BF953462.1, EVALUE 6.00e-27
caggtgggggctgtgcaggagccggcattgcctggactccagggtggcacagcggggctcccagcacacccaggtccaccccggatgagtgtccagacctttatcaaacaggcattggtcaccacttgctttggatccacgatgtccactagaggctccttcatggccacgtcccggatgcaggtcatgtcaaagccatagacattctcccacc

SEQ ID NO: 18662 - DNA, 145 bp, Homo sapiens
  MAP TO AL022345.2; EXPRESSED IN BRAIN, SIGNAL = 7.8; EXPRESSED IN BONE MARROW, SIGNAL =  14; EXPRESSED IN PLACENTA, SIGNAL = 5.5; EXPRESSED IN HEART, SIGNAL =  11; EXPRESSED IN ADULT LIVER, SIGNAL = 4.5; EXPRESSED IN LUNG, SIGNAL =  20; SWISSPROT HIT: Q06730, EVALUE 5.00e-20; NT HIT: gi14741165, EVALUE 5.00e-69; EST_HUMAN HIT: AL539493.1, EVALUE 2.00e-72
ccactgagacaaggttgctgtagttctccagcatcacatctctatacagagccctctgactagggtccaggtgctgccactcctcctgggtgaagcccacagtcacatctttaaatgatactgacccctggaacttctgatctac

SEQ ID NO: 18663 - DNA, 175 bp, Homo sapiens
  MAP TO AC025469.3; EXPRESSED IN ADULT LIVER, SIGNAL = 1.1; EXPRESSED IN HEART, SIGNAL = 1.6; EXPRESSED IN LUNG, SIGNAL = 1.4; EXPRESSED IN HELA, SIGNAL = 2.1; EXPRESSED IN BRAIN, SIGNAL = 1.1; EXPRESSED IN PLACENTA, SIGNAL = 0.94; SWISSPROT HIT: Q16960, EVALUE 9.00e-03; NT HIT: gi16157671, EVALUE 5.00e-94; EST_HUMAN HIT: BI257605.1, EVALUE 7.00e-94
gactgtgaggacgtgggaagttgaaaatccaaagaagcaaaaaagtgtgtttaaaccacggacgatgcaaggcaaaaaagtcattcccactacgtgcacatatagtagagatggaaacctcatagcagctgcctgccagaatggaagcatacagatctgggaccgaaatttgact

SEQ ID NO: 18664 - DNA, 113 bp, Homo sapiens
  MAP TO AC002319.1; EXPRESSED IN ADULT LIVER, SIGNAL = 0.75; EXPRESSED IN HELA, SIGNAL =   1; EST_HUMAN HIT: BF570881.1, EVALUE 5.40e-01; SWISSPROT HIT: Q06154, EVALUE 6.00e+00; NT HIT: Y15730.1, EVALUE 1.50e+00
gggcgcctggctcagaggcccccagcaaaggaggacagatcctaaaccggacagcaagctgcgtccagctggttctccctttccgtgactgcttcaaagctcttataaacaag

SEQ ID NO: 18665 - DNA, 231 bp, Homo sapiens
  MAP TO AC036102.3; EXPRESSED IN BONE MARROW, SIGNAL = 0.99; EXPRESSED IN PLACENTA, SIGNAL = 0.72; EXPRESSED IN ADULT LIVER, SIGNAL = 0.84; EXPRESSED IN HEART, SIGNAL = 1.2; EXPRESSED IN BRAIN, SIGNAL = 0.73; NT HIT: AF179681.1, EVALUE 1.00e-86; EST_HUMAN HIT: BG654971.1, EVALUE 1.00e-86
aaagggtacactcgccagcagttttaccacaagagtacaccaaacaaaggagacagagtcatttataacctgacgcgtccaccctactgctatgtccggtttccattggctagtacgggacctcacattctgtatttgtcccaattggctagcaacttagaactttttaaaagaggcacgggcagacgagaacaaaggaaggaggaagtaacttgtggaatgctgagaaag

SEQ ID NO: 18666 - DNA, 166 bp, Homo sapiens
  MAP TO AC020927.4; EXPRESSED IN BONE MARROW, SIGNAL = 1.6; EXPRESSED IN PLACENTA, SIGNAL = 1.1; EXPRESSED IN ADULT LIVER, SIGNAL = 1.1; EXPRESSED IN BRAIN, SIGNAL =   1; EXPRESSED IN LUNG, SIGNAL = 0.86; EXPRESSED IN HELA, SIGNAL = 1.3; EXPRESSED IN FETAL LIVER, SIGNAL =   1; SWISSPROT HIT: P00325, EVALUE 5.80e+00; NT HIT: gi15893298, EVALUE 1.50e-01; EST_HUMAN HIT: BF366180.1, EVALUE 2.00e-88
tatattgacattttttaaatcatccaaagcttttatttttaactcagtgttcctgtttaatacattgatgatgatggctggaggaaggtggtgtgtaggaaggaaaggatacattgctttctcagccacagccgctttaggaaacatgccatcccccacgtggctg

SEQ ID NO: 18667 - DNA, 271 bp, Homo sapiens
  MAP TO AC012313.5; EXPRESSED IN PLACENTA, SIGNAL = 1.2; EXPRESSED IN HEART, SIGNAL = 1.2; EXPRESSED IN ADULT LIVER, SIGNAL = 1.2; EXPRESSED IN BRAIN, SIGNAL = 1.3; EXPRESSED IN LUNG, SIGNAL = 0.79; EXPRESSED IN BONE MARROW, SIGNAL = 1.3; SWISSPROT HIT: P04680, EVALUE 2.20e+00; NT HIT: U73749.1, EVALUE 9.80e-01; EST_HUMAN HIT: AI567545.1, EVALUE 6.00e-03
agaatctttggcctgtggtgtccatccatactgtatgatggatcagaggccactgcagctgccacgtctcctggaagcccctgaggggatggacaatgataaccacattgtgagcagaagccacaacagttttgccgtcagcaaagtttacagcagggcttctcaaatactccccagcacagtgaggtgtctgggggatacctaccctactcaggccttccttcctgagtgtaatgtctccaatatggaagatgctaatgtctccaatatg

SEQ ID NO: 18668 - DNA, 150 bp, Homo sapiens
  MAP TO AC004471.2; EXPRESSED IN ADULT LIVER, SIGNAL = 2.4; EXPRESSED IN HEART, SIGNAL = 3.1; EXPRESSED IN FETAL LIVER, SIGNAL = 3.8; EXPRESSED IN BRAIN, SIGNAL = 2.2; EXPRESSED IN BONE MARROW, SIGNAL = 1.7; EXPRESSED IN PLACENTA, SIGNAL = 3.8; SWISSPROT HIT: P08704, EVALUE 4.50e+00; NT HIT: L77570.1, EVALUE 3.00e-79
ctacatacttgggaataagaccagggcaggagggtgggacagaactggagcgagagctatctcgcatctgatgtaaacatcagccagcagtttcatccaacactcgcaccacatttcgatcatagccacaggatagcgcagccaatttct

SEQ ID NO: 18669 - DNA, 236 bp, Homo sapiens
  MAP TO AC025754.2; EXPRESSED IN BONE MARROW, SIGNAL = 2.4; EXPRESSED IN PLACENTA, SIGNAL = 2.1; EXPRESSED IN ADULT LIVER, SIGNAL =   2; EXPRESSED IN HEART, SIGNAL = 2.2; EXPRESSED IN BRAIN, SIGNAL = 1.9; EXPRESSED IN FETAL LIVER, SIGNAL = 3.3; SWISSPROT HIT: O57863, EVALUE 8.40e+00; EST_HUMAN HIT: H06162.1, EVALUE 1.20e+00; NT HIT: U88057.1, EVALUE 2.10e-01
tctggaattgtataccctactaaacagtcatccaagactaggggcaaaacaaagacgttttcagaagaatatgggaagatatcctcatactctgggaactccttagcttcttcagaggatcctttatacctgtttctatcacacaaatctctacggttataaaaattataggcagtactgtgctgacatttgatgccactggcagcatctttaaaattatttaggctgatgggtcc

SEQ ID NO: 18670 - DNA, 214 bp, Homo sapiens
  MAP TO AC005789.1; EXPRESSED IN ADULT LIVER, SIGNAL = 5.7; EXPRESSED IN HEART, SIGNAL = 8.7; EXPRESSED IN BRAIN, SIGNAL = 6.6; EXPRESSED IN BONE MARROW, SIGNAL = 3.7; EXPRESSED IN PLACENTA, SIGNAL = 7.7; SWISSPROT HIT: P25032, EVALUE 7.30e-01; EST_HUMAN HIT: AW971824.1, EVALUE 3.00e-72; NT HIT: AF097182.1, EVALUE 1.90e-01
cctcatgctgttcccttcgctctctggcccccttgtccaagatactttttttctctgcaactcaaatctcataaactctcaggtgcttatgggcaacgttccagaccgggggggccgcccaaatgagctggagcctcccatgcccacctggaggagccgaagagaggatggaggcccccagtgttggggtcgcaagaagaagaagaagaagtaa

SEQ ID NO: 18671 - DNA, 189 bp, Homo sapiens
  MAP TO AC016965.10; EXPRESSED IN BRAIN, SIGNAL = 1.2; EXPRESSED IN PLACENTA, SIGNAL = 1.2; EXPRESSED IN HEART, SIGNAL = 1.3; EXPRESSED IN ADULT LIVER, SIGNAL = 1.2; EXPRESSED IN LUNG, SIGNAL = 0.93; NT HIT: U32767.1, EVALUE 1.70e-01; SWISSPROT HIT: P53862, EVALUE 3.30e+00; EST_HUMAN HIT: BE783706.1, EVALUE 9.80e-01
ttaatttctctttttcttatttatgcctttccactgctcaaatcctgtccctaccacaaaagcagtgtacatctctattgtctgcagttttgcagttgccatatccacaacccacaacccttcctgacattcagattcagtcaccatttcttcaatgaaagtgggcaagagaggtgtagaaacattttc

SEQ ID NO: 18672 - DNA, 141 bp, Homo sapiens
  MAP TO AL023576.1; EXPRESSED IN PLACENTA, SIGNAL = 0.9; EXPRESSED IN ADULT LIVER, SIGNAL = 0.85; EXPRESSED IN HELA, SIGNAL = 0.97; EXPRESSED IN FETAL LIVER, SIGNAL = 0.98; EXPRESSED IN BRAIN, SIGNAL = 1.1; NT HIT: gi15208635, EVALUE 3.10e-02; EST_HUMAN HIT: BI018172.1, EVALUE 8.00e-47; SWISSPROT HIT: P08548, EVALUE 1.60e-02
atggagtttatacaaagtgtgttctttgaccacagtggcattaagttagaagccagtaacagaaggaaatttgaagaaaatgacaaatatgtagacattttagaacacaccctaaataaccagtgggtcaaagaagaaatc

SEQ ID NO: 18673 - DNA, 258 bp, Homo sapiens
  MAP TO AC021689.3; EXPRESSED IN LUNG, SIGNAL = 1.2; EXPRESSED IN BRAIN, SIGNAL =   1; EXPRESSED IN PLACENTA, SIGNAL = 1.2; EXPRESSED IN ADULT LIVER, SIGNAL =   1; EXPRESSED IN HEART, SIGNAL = 1.4; NT HIT: AE005652.1, EVALUE 2.40e-01; EST_HUMAN HIT: BF969911.1, EVALUE 6.00e-03; SWISSPROT HIT: Q92545, EVALUE 5.80e+00
tttaatatagttcagaatagtcactgtcgtgtgtgtgtctgtgtttttacaaattgacattctggaggtagtgataagcatatgaatggcccaatctggaatgatctcctgaagaagaggtaccctgttctgtgtcaacaccaaattcttatcaactggcataaaggatgtagaagtaataataacaccattgttgtttaacagaggtgattggctcaaaaaataagcatgaagaagtgtctttgtctgtttgggcgt

SEQ ID NO: 18674 - DNA, 361 bp, Homo sapiens
  MAP TO AC004076.1; EXPRESSED IN HELA, SIGNAL = 0.74; EXPRESSED IN BONE MARROW, SIGNAL = 0.85; EXPRESSED IN ADULT LIVER, SIGNAL =   1; SWISSPROT HIT: O93603, EVALUE 8.40e-02; NT HIT: gi11426550, EVALUE 0.00e+00; EST_HUMAN HIT: BG167434.1, EVALUE 9.00e-46
atccagtgtcattcagcaaatatttcaatccaaaagctgccattgtctgaggtatccctttaaagaaaaggaccatggagttagccaaggccagttggctgagaatcaagtccgtgggtctcagcttgtgtccagtgaacaaaattaagttataaaaacaaaggagaaaggaatttcccaggatcccaactccagtctgaatgaggaagctaatccctgattttacttttccaaaagccatttcatcaaaatctaggggatgttgattttcattgaggtctgaagaatcagtagaataaaaaagcagaaagaagtatcttgtcatcagtggagacagaagttttaatgtgtctccaaccat

SEQ ID NO: 18675 - DNA, 107 bp, Homo sapiens
  MAP TO AC004197.1; EXPRESSED IN ADULT LIVER, SIGNAL = 1.7; EXPRESSED IN FETAL LIVER, SIGNAL = 1.1; NT HIT: AB009667.1, EVALUE 8.70e-02; EST_HUMAN HIT: AV646979.1, EVALUE 1.30e-01
tgggtcccagaagtccaaagagaagcagccacaggaaccagaaagcaggagagatatttcctcttctcatctctaaatgatgcacatagaagttgtcatttagatgc

SEQ ID NO: 18676 - DNA, 204 bp, Homo sapiens
  MAP TO AC016619.5; EXPRESSED IN BRAIN, SIGNAL =  14; EXPRESSED IN FETAL LIVER, SIGNAL =  11; EXPRESSED IN LUNG, SIGNAL =  13; EXPRESSED IN BONE MARROW, SIGNAL =  15; EXPRESSED IN PLACENTA, SIGNAL =  19; EXPRESSED IN HEART, SIGNAL =  14; EXPRESSED IN ADULT LIVER, SIGNAL =  16; SWISSPROT HIT: P17301, EVALUE 8.00e-35; NT HIT: X17033.1, EVALUE 1.00e-111; EST_HUMAN HIT: AU126174.1, EVALUE 1.00e-104
ctgggaatactttgtgcggatagtgccctgatgaccattgtaaatgtatacagctccagaattctgattttctagtggtgaaccaacaatcacatcattaaagccatccatgttgatgtctgaaagagctgcaattgctgaaccaaatcgagtgttttcaatgccctcggggccttcaagaaattggtgctgacccaaaatgcc

SEQ ID NO: 18677 - DNA, 150 bp, Homo sapiens
  MAP TO AC022073.13; EXPRESSED IN FETAL LIVER, SIGNAL = 2.5; EXPRESSED IN ADULT LIVER, SIGNAL =   2; EXPRESSED IN PLACENTA, SIGNAL = 1.8; EXPRESSED IN HEART, SIGNAL = 3.5; SWISSPROT HIT: Q9Z1Z2, EVALUE 7.00e-26; NT HIT: gi6005931, EVALUE 3.00e-79; EST_HUMAN HIT: BE892183.1, EVALUE 5.00e-79
aatcctacaagggacactttggtcctattcactgtgtgagatttagtcctgatggagaactctatgccagtggttcagaagatggaacattgagactatggcaaactgtggtaggaaaaacgtatggcctttggaaatgtgtgcttcctg

SEQ ID NO: 18678 - DNA, 216 bp, Homo sapiens
  MAP TO AC012331.9; EXPRESSED IN ADULT LIVER, SIGNAL = 0.98; EXPRESSED IN BRAIN, SIGNAL =   1; EXPRESSED IN LUNG, SIGNAL = 1.1; EXPRESSED IN FETAL LIVER, SIGNAL = 0.77; EXPRESSED IN PLACENTA, SIGNAL = 0.78; SWISSPROT HIT: Q53554, EVALUE 9.90e-01; NT HIT: AF207841.1, EVALUE 1.20e-02; EST_HUMAN HIT: BF355672.1, EVALUE 7.20e-02
ttaccattgcttgccacacataaacatgtttccactctgcatgatgaacatttttctgctgcacacaatgaacactttcctatctgtggaatttttgcaaaatttttcataagcccagggtttgatggaatcttcgtcgataaatgccagatcgatcagagagaagtaaaaatcaaatataagggttggaatcttgaggattctgttagtaaacat

SEQ ID NO: 18679 - DNA, 336 bp, Homo sapiens
  MAP TO AC004175.1; EXPRESSED IN BONE MARROW, SIGNAL = 0.84; EXPRESSED IN PLACENTA, SIGNAL = 0.87; EXPRESSED IN HEART, SIGNAL = 5.4; EXPRESSED IN ADULT LIVER, SIGNAL = 0.89; NT HIT: gi15318439, EVALUE 1.00e-105; EST_HUMAN HIT: BI857092.1, EVALUE 1.00e-105; SWISSPROT HIT: P08708, EVALUE 5.00e-45
tcatcgtagaaaagtactacatgtgcctgggcaatgacttccacacaaacaagtgtgtgtgaggagatccccattatcctcagcaagaagctccacaacaggagagcaggctgcgtcacgcatctgacgaaccagattcagagaggtccagtgagaggtatctccatcaagctacaggaggaggagaaagaaaggagggacaattatgtccccaaggtctcagccctggatcaggagatcatcgaagtagatcctgacactaaggaaatgctgaagcttttggactttggcagcctgtccaacctgcaggtcactcggcctacagttgggatgaat

SEQ ID NO: 18680 - DNA, 110 bp, Homo sapiens
  MAP TO AC025811.1; EXPRESSED IN PLACENTA, SIGNAL = 1.9; EXPRESSED IN ADULT LIVER, SIGNAL =   2; EXPRESSED IN HEART, SIGNAL = 2.5; EXPRESSED IN BRAIN, SIGNAL = 1.9; EXPRESSED IN FETAL LIVER, SIGNAL = 2.4; NT HIT: AF032124.1, EVALUE 5.60e+00; EST_HUMAN HIT: BI020035.1, EVALUE 4.00e-20; SWISSPROT HIT: Q03314, EVALUE 2.70e+00
agggtgatcatagggcctgttctgtttggttttggtatggacagggcagtgtggcccatattttcattactgtagcagagattgttggtatctgtgccagggaagggcac

SEQ ID NO: 18681 - DNA, 293 bp, Homo sapiens
  MAP TO AL121721.20; EXPRESSED IN ADULT LIVER, SIGNAL = 0.6; EXPRESSED IN FETAL LIVER, SIGNAL = 0.58; EXPRESSED IN BONE MARROW, SIGNAL = 0.75; NT HIT: X64852.1, EVALUE 2.70e-01; EST_HUMAN HIT: AA383822.1, EVALUE 9.00e-64; SWISSPROT HIT: P42620, EVALUE 7.60e+00
ggaatatcattgtctatgggaatacaattgatacttacaccaccgtggagacgctcttaaaccttggcgtgagcggcagccgcatccacctcgtgcagcccccgcccgcctccaccatcacctgcatcaacaactactcggtggagagcgccgtggcggacgcgctaggagccgccggagtcactatgtaccgggatgcgatcctggcccagtggaatgacggcctgcacccagaccccatctacagcgcctccttcaccacacccaccaagcctttcagactccagtgctct

SEQ ID NO: 18682 - DNA, 187 bp, Homo sapiens
  MAP TO AC010643.5; EXPRESSED IN LUNG, SIGNAL = 0.5; EXPRESSED IN FETAL LIVER, SIGNAL = 0.52; EXPRESSED IN BRAIN, SIGNAL = 0.9; EXPRESSED IN ADULT LIVER, SIGNAL = 0.75; EST_HUMAN HIT: BI520117.1, EVALUE 1.00e-101; SWISSPROT HIT: P11121, EVALUE 9.80e-02
gcactgtggctgtggcccaggtgctggcctacctggaggctgtgacaggccagggcccccaggatgcacgcctccaaacattggccaacagcctggaccccaatggggagggccctaaggccactgtggacttggacactttcctggttgtcatgcgtgactggattgctgcctgtcaactacatgg

SEQ ID NO: 18683 - DNA, 140 bp, Homo sapiens
  MAP TO AC067968.1; EXPRESSED IN BRAIN, SIGNAL = 3.3; EXPRESSED IN HELA, SIGNAL = 2.3; EXPRESSED IN FETAL LIVER, SIGNAL = 5.1; EXPRESSED IN BONE MARROW, SIGNAL = 3.6; EXPRESSED IN PLACENTA, SIGNAL =   4; EXPRESSED IN HEART, SIGNAL = 3.4; EXPRESSED IN ADULT LIVER, SIGNAL = 3.9; SWISSPROT HIT: P08547, EVALUE 1.30e-01; NT HIT: M76741.1, EVALUE 3.00e-02; EST_HUMAN HIT: AW852578.1, EVALUE 4.50e-02
gtatttacccaaaggaactgaaagcaggtaatggaataaatatgcgtataggaatgtttgtagtagcactattcacagcagccaaaaggtggaaagaaccaaatgttaccagtagatcaatggataagcaaaatgtagta

SEQ ID NO: 18684 - DNA, 117 bp, Homo sapiens
  MAP TO AC022101.3; EXPRESSED IN ADULT LIVER, SIGNAL = 0.59; EXPRESSED IN BRAIN, SIGNAL = 0.75; EXPRESSED IN LUNG, SIGNAL = 0.82; EXPRESSED IN FETAL LIVER, SIGNAL = 0.42; NT HIT: M59786.1, EVALUE 6.00e+00; EST_HUMAN HIT: T10213.1, EVALUE 8.80e+00
gaagacattttgacttttaccatactttgccccatcattatgtataagagatatataatagtaataataacaataatagtcatgatgataataataataataataaaccaacattat

SEQ ID NO: 18685 - DNA, 363 bp, Homo sapiens
  MAP TO AC005260.1; EXPRESSED IN ADULT LIVER, SIGNAL = 0.34; EXPRESSED IN BONE MARROW, SIGNAL = 0.44; EXPRESSED IN PLACENTA, SIGNAL = 1.6e+02; SWISSPROT HIT: O75244, EVALUE 5.00e-57; NT HIT: M32621.1, EVALUE 0.00e+00; EST_HUMAN HIT: BG435413.1, EVALUE 0.00e+00
agtataaggtgacagtgaaatatccagttactcctccagtcccatcgcctcgctttatgatgtgtaaggtgtaggatcctgcatcctcctgtgtgacattctggatcagcagggatgcattggaatatactgtttctcgtccactgtaggcaggcccatatataatttgaccgtgtactacatatgatgtaatgtaatggtagaggtccgtcatttgccctttgtaccagatgtagccagtaagattctggggcaaattgtggacaagtagaagaacatccttcccctcggaaactttgggtggcttggcttcaattattacttgggcagtggtgggcaggttccagaagtttaaaagtgatg

SEQ ID NO: 18686 - DNA, 288 bp, Homo sapiens
  MAP TO AC010300.5; EXPRESSED IN HEART, SIGNAL = 1.2; EXPRESSED IN ADULT LIVER, SIGNAL = 1.1; EXPRESSED IN LUNG, SIGNAL = 0.78; EXPRESSED IN FETAL LIVER, SIGNAL = 0.93; EXPRESSED IN BONE MARROW, SIGNAL = 1.1; NT HIT: gi4506302, EVALUE 1.70e-02; EST_HUMAN HIT: AW137641.1, EVALUE 2.50e-02; SWISSPROT HIT: Q14940, EVALUE 5.00e-03
ccagcagagaggacagggccaccaggatccacatggccacaaagaagggggtgtgcacgggtagccaccgcaggctgaccactggaaacccgctgctgttccgggcaacggggggctctggccctgggccccggccaacgagtgtgcagggatgggctgtgcccaccagcaaggccagcaacgtgaaggcacagagtccagacccctggggctgcatgctgggggcacgtgccgccgacaaggcgctgtgtatccgccgggctcttctcgacttcgtggacctggtat

SEQ ID NO: 18687 - DNA, 230 bp, Homo sapiens
  MAP TO AC026446.2; EXPRESSED IN BRAIN, SIGNAL = 1.1; EXPRESSED IN PLACENTA, SIGNAL = 0.83; EXPRESSED IN ADULT LIVER, SIGNAL = 0.89; EXPRESSED IN HEART, SIGNAL =   1; NT HIT: AB039932.1, EVALUE 2.10e-01; EST_HUMAN HIT: BE614088.1, EVALUE 7.70e-02; SWISSPROT HIT: P15575, EVALUE 7.00e-01
tgcggaatgatgcccttgcaccatctattcctacctttggggaagaaaataccaaaagcgacagctctcttgaggaacagttgcccttcctcccagacccagcagcaggtggagaaaacccagaaattctgctatttggcatcgctattgttaagtacaaaaccatcctgccttctcaagagcctccttgcagcattgactatgaaatgggcagccttcctttcacctga

SEQ ID NO: 18688 - DNA, 118 bp, Homo sapiens
  MAP TO AC005685.1; EXPRESSED IN HEART, SIGNAL = 3.8; EXPRESSED IN BRAIN, SIGNAL =   2; EXPRESSED IN ADULT LIVER, SIGNAL = 1.4; NT HIT: AL163267.2, EVALUE 4.00e-07; EST_HUMAN HIT: H21193.1, EVALUE 1.00e-08
ccccaaattgctgtctctcttgccatatgatacaccagctccccctttgccatttgccatgattgttagccttctgaggtcctcaccagaagctgagcagatgccaacaccatgcttt

SEQ ID NO: 18689 - DNA, 184 bp, Homo sapiens
  MAP TO AC020923.4; EXPRESSED IN ADULT LIVER, SIGNAL = 1.5; EXPRESSED IN BRAIN, SIGNAL = 1.9; EXPRESSED IN LUNG, SIGNAL = 3.1; NT HIT: gi14733625, EVALUE 2.00e-99; EST_HUMAN HIT: AA399529.1, EVALUE 8.00e-97; SWISSPROT HIT: P15144, EVALUE 1.00e-06
ctgacgagctgaaatgcattgttaatgagactcgcccgatcattactgctgactgctgtgtgtgttccttttaaaaggccagtcaaagagtcccatccatcatcctcgtaatgcacaatgtaatagccattcatgcccacattaaatttgatccattccacctcttctgggaggatgagcacat

SEQ ID NO: 18690 - DNA, 87 bp, Homo sapiens
  MAP TO AF172277.1; EXPRESSED IN HEART, SIGNAL = 1.2; EXPRESSED IN ADULT LIVER, SIGNAL = 0.9; EXPRESSED IN BRAIN, SIGNAL = 1.1; EXPRESSED IN FETAL LIVER, SIGNAL = 1.5; EXPRESSED IN BONE MARROW, SIGNAL = 1.1; EXPRESSED IN PLACENTA, SIGNAL = 1.6; NT HIT: U07000.1, EVALUE 1.00e-03; EST_HUMAN HIT: AA601279.1, EVALUE 2.00e-03; SWISSPROT HIT: P13186, EVALUE 1.20e+00
tcattctttgatggacacttggattgtttctaccttgcggttcttgtgaataatgtcgttgctatggacgtaagtgtagaccacttc

SEQ ID NO: 18691 - DNA, 177 bp, Homo sapiens
  MAP TO AC018557.5; EXPRESSED IN HEART, SIGNAL = 1.6; EXPRESSED IN ADULT LIVER, SIGNAL = 1.4; EXPRESSED IN FETAL LIVER, SIGNAL = 1.4; EXPRESSED IN PLACENTA, SIGNAL = 1.6; SWISSPROT HIT: Q04941, EVALUE 1.90e+00; NT HIT: gi14732546, EVALUE 1.00e-02; EST_HUMAN HIT: AL530351.1, EVALUE 7.00e-94
atcttggccctgattgcattcatctgcatagagaccatcatggcatgctccccgtgtgaaggcctctacttttttgagtttgtgagctgcagtgcgtttgtggtgactggcgtcttgctgattatgttcagtctcaacctgcacatgaggatcccccagatcaactggaatctgaca

SEQ ID NO: 18692 - DNA, 227 bp, Homo sapiens
  MAP TO AC005264.1; EXPRESSED IN ADULT LIVER, SIGNAL = 0.72; EXPRESSED IN BRAIN, SIGNAL = 0.82; EXPRESSED IN PLACENTA, SIGNAL = 0.54; NT HIT: gi12741902, EVALUE 1.00e-125; EST_HUMAN HIT: AL576074.1, EVALUE 1.00e-125; SWISSPROT HIT: P30679, EVALUE 3.00e-38
gccctaagcaggatgctgaggcagccaagaggttcatcctggacatgtacacgaggatgtacaccgggtgcgtggacggccccgagggcagcaagaagggcgcacgatcccgacgcctcttcagccactacacatgtgccacagacacacagaacatccgcaaggtcttcaaggacgtgcgggactcggtgctcgcccgctacctggacgagatcaacctgctgtga

SEQ ID NO: 18693 - DNA, 100 bp, Homo sapiens
  MAP TO AC025167.4; EXPRESSED IN HELA, SIGNAL = 2.4; EXPRESSED IN BRAIN, SIGNAL = 1.9; EXPRESSED IN BONE MARROW, SIGNAL = 1.7; EXPRESSED IN ADULT LIVER, SIGNAL = 1.5; EXPRESSED IN HEART, SIGNAL = 1.8; NT HIT: AF118154.1, EVALUE 8.00e-02; EST_HUMAN HIT: AL120352.1, EVALUE 1.00e-04
ctgggaattgttaaaatacccattctgattcaggatgtctggggttggactcaaggctgcattgccaacaagtttcccaatgatgataaatgctggcagt

SEQ ID NO: 18694 - DNA, 106 bp, Homo sapiens
  MAP TO AC004233.1; EXPRESSED IN PLACENTA, SIGNAL = 1.9; EXPRESSED IN HEART, SIGNAL = 3.1; EXPRESSED IN ADULT LIVER, SIGNAL = 2.4; EXPRESSED IN FETAL LIVER, SIGNAL = 2.3; EXPRESSED IN HELA, SIGNAL =   4; SWISSPROT HIT: P38768, EVALUE 1.60e+00; NT HIT: U51723.1, EVALUE 3.40e-01; EST_HUMAN HIT: BF690407.1, EVALUE 5.00e-01
ctaggggggctagctccaaagtcagggtctgggttggtgtcaggtgtgtcctgcttcccgctgtgcacttggtcaggttcgctcagctccctgagcttgttcctgt

SEQ ID NO: 18695 - DNA, 279 bp, Homo sapiens
  MAP TO AC069278.1; EXPRESSED IN PLACENTA, SIGNAL = 1.4; EXPRESSED IN ADULT LIVER, SIGNAL = 1.7; EXPRESSED IN FETAL LIVER, SIGNAL = 1.2; EXPRESSED IN BRAIN, SIGNAL = 1.5; SWISSPROT HIT: Q16557, EVALUE 6.00e-09; NT HIT: AF283320.1, EVALUE 4.00e+00; EST_HUMAN HIT: BI334852.1, EVALUE 9.50e-02
ctaccaccttgaccaggactgaagtggagcgggccaggccagtgagagagttggaggctgtgcagttgtagatcccgtcgtgttcccaggtcagagccctgataatcagctgctcacccaggtgctccccggtggagtgttcaagagtccagcgatactcagcacctggcttggactcggcccaacactgcagggtcaggctggagttgagctctgcctctatggtgctgatcatctcagatgccgactccctggtgatgtgcacttggtcaggaccat

SEQ ID NO: 18696 - DNA, 258 bp, Homo sapiens
  MAP TO AL022069.1; EXPRESSED IN PLACENTA, SIGNAL = 1.5; EXPRESSED IN BONE MARROW, SIGNAL = 1.2; EXPRESSED IN ADULT LIVER, SIGNAL = 1.6; EXPRESSED IN HEART, SIGNAL = 1.3; EXPRESSED IN LUNG, SIGNAL = 1.1; EXPRESSED IN FETAL LIVER, SIGNAL = 1.1; EXPRESSED IN BRAIN, SIGNAL = 1.2; NT HIT: AF020503.1, EVALUE 1.50e-02; SWISSPROT HIT: Q25489, EVALUE 9.80e-02; EST_HUMAN HIT: AA827420.1, EVALUE 1.40e+00
gggacactggcaatgtctggagactttctggtttttccagctgggacaggggctcctggcattggtgaatacgggtcagggaagctggttagcatcctgtgtgcacaggacagcccccacaacctgctgccccaacgaaaggttgagaagcccagcctcagcatccttgtgggtgagagcaggtctcatgtagataaaggccaggaggttgatattttggagatggggatggagtttttcttcttcattgagtttctg

SEQ ID NO: 18697 - DNA, 282 bp, Homo sapiens
  MAP TO AL096870.3; EXPRESSED IN LUNG, SIGNAL = 2.7; EXPRESSED IN BRAIN, SIGNAL = 2.1; EXPRESSED IN BONE MARROW, SIGNAL = 2.7; EXPRESSED IN PLACENTA, SIGNAL = 1.5; EXPRESSED IN ADULT LIVER, SIGNAL = 1.7; NT HIT: gi4507474, EVALUE 0.00e+00; SWISSPROT HIT: P22735, EVALUE 1.00e-46; EST_HUMAN HIT: BE293065.1, EVALUE 0.00e+00
gctcagacgcagagcggaaggcagtagagacagcagcagcccacggcagcaaacccaatgtgtatgccaaccggggctcagcggaggatgtggccatgcaggtggaggcacaggacgcggtgatggggcaggatctgatggtctctgtgatgctgatcaatcacagcagcagccgccgcacagtgaaactgcacctctacctctcagtcactttctatactggtgtcagtggtaccatcttcaaggagaccaagaaggaagtggagctggcaccaggggcct

SEQ ID NO: 18698 - DNA, 109 bp, Homo sapiens
  MAP TO AC025167.4; EXPRESSED IN BRAIN, SIGNAL =   3; EXPRESSED IN FETAL LIVER, SIGNAL = 3.2; EXPRESSED IN LUNG, SIGNAL = 1.3; EXPRESSED IN PLACENTA, SIGNAL = 2.9; EXPRESSED IN ADULT LIVER, SIGNAL = 2.4; SWISSPROT HIT: O09046, EVALUE 8.00e+00
aaatatggatgattctcacaagcacaagaatgagcaaaagaagtcagaccccaaaaagggcatactacatcattccatttataagaagtacacaagaggagatactagt

SEQ ID NO: 18699 - DNA, 227 bp, Homo sapiens
  MAP TO AC008600.4; EXPRESSED IN PLACENTA, SIGNAL = 0.58; EXPRESSED IN ADULT LIVER, SIGNAL = 0.78; NT HIT: gi4505362, EVALUE 9.00e-44; EST_HUMAN HIT: BG540335.1, EVALUE 1.00e-43; SWISSPROT HIT: Q02380, EVALUE 4.00e-24
cagcagcttgcataactttggtgaatggatgcatgggtgaagctgaactagcagaaagtccaaaagcctatatcccagaacattgggaatactataagcatcctatatcaagacggattgcccacagtttccataatagtcctgaaaagaactatgaaagagcagtgaccgtcattcagatcgaagccaaaaaggctgaattacagttaaagcagctggaaatatga

SEQ ID NO: 18700 - DNA, 91 bp, Homo sapiens
  MAP TO AC005764.1; EXPRESSED IN BRAIN, SIGNAL = 1.6; EXPRESSED IN PLACENTA, SIGNAL = 1.2; EXPRESSED IN BONE MARROW, SIGNAL = 1.7; EXPRESSED IN ADULT LIVER, SIGNAL = 1.5; EXPRESSED IN HEART, SIGNAL = 1.7; NT HIT: gi14777112, EVALUE 4.40e+00; EST_HUMAN HIT: BF801156.1, EVALUE 4.20e-01; SWISSPROT HIT: O22315, EVALUE 4.20e-01
ctgcctgagggggtctggggaaggggggagcctttgccccagcagaaggaaggagttggtgtccacggctgcaccttcgcaagggggctgg

SEQ ID NO: 18701 - DNA, 422 bp, Homo sapiens
  MAP TO AC020948.6; EXPRESSED IN ADULT LIVER, SIGNAL = 7.9; EXPRESSED IN BRAIN, SIGNAL = 7.7; EXPRESSED IN FETAL LIVER, SIGNAL = 4.3; EXPRESSED IN BONE MARROW, SIGNAL = 8.5; EXPRESSED IN PLACENTA, SIGNAL = 5.9; NT HIT: gi15296404, EVALUE 1.00e-35; EST_HUMAN HIT: BI562021.1, EVALUE 5.00e-26; SWISSPROT HIT: Q9Y5X1, EVALUE 4.00e-05
ctcccatgaccaggccacgtatccagtgttcgtcttcgatacccacatccactcccccaagtgatgcccaccttctcgctgacctgctctgcttggatcggaggcagttttcttattttctttcctcaagaggtgctgtgccatacagaaggccttcctcttgccttgtttccaggccttctctcggtgctgctgaggcacatcaggaagtgctggaggacgtggcactgcgccagcactgggcggccggccgtgtagctcatcccgcagatcgtgctctacctgtgcttggagatgaagtcctcctggaagcagctcgtggcccacttctcaggtaggtggggcacagacatagccaggaatgtcaccagacacgcatccagccagtccaagtgcttgttgcgccgtgcactgggacctgc

SEQ ID NO: 18702 - DNA, 121 bp, Homo sapiens
  MAP TO AC008624.5; EXPRESSED IN BONE MARROW, SIGNAL = 0.41; EXPRESSED IN PLACENTA, SIGNAL = 0.42; EXPRESSED IN ADULT LIVER, SIGNAL = 0.78; NT HIT: gi14778732, EVALUE 4.00e-01; EST_HUMAN HIT: AI910672.1, EVALUE 1.50e-01; SWISSPROT HIT: P04008, EVALUE 1.60e+00
ctcacttccaagccaccatgggagtaccgcccttaccgacatagttcagaatggctgctccagctccagcttctacacctgcactccaggaagcaggagaaaggaaaaggtggagaaatgt

SEQ ID NO: 18703 - DNA, 306 bp, Homo sapiens
  MAP TO AC007996.6; EXPRESSED IN BONE MARROW, SIGNAL = 2.8; EXPRESSED IN PLACENTA, SIGNAL =   2; EXPRESSED IN ADULT LIVER, SIGNAL = 2.6; EXPRESSED IN HEART, SIGNAL = 3.1; EXPRESSED IN HELA, SIGNAL = 3.1; EXPRESSED IN BRAIN, SIGNAL = 2.8; EXPRESSED IN FETAL LIVER, SIGNAL = 1.4; NT HIT: gi14762990, EVALUE 3.00e-04; EST_HUMAN HIT: AA393452.1, EVALUE 0.00e+00; SWISSPROT HIT: P33304, EVALUE 6.30e+00
ctggactgagttgaggtgacagtagccatttagtggaaacctgatgacgtgcgtcgagtcgtgattccagcctgcattgacagagttacacatcacgtcgccgatctctggaaatacttcttctatcaaggatttgtcaccgcttagcgtgatcctttctccgaggtctggggccacacgcacgacgaggcactcacagggccttgaaaatcgaccagtttctctgtcctgcttccatctttccatctccaacaacatgggctgaagctgaaaatattttgcctcttcatataacaaagtgtagtc

SEQ ID NO: 18704 - DNA, 238 bp, Homo sapiens
  MAP TO AC027663.12; EXPRESSED IN HEART, SIGNAL = 1.2; EXPRESSED IN BRAIN, SIGNAL = 1.1; EXPRESSED IN HELA, SIGNAL = 0.84; EXPRESSED IN PLACENTA, SIGNAL =   1; EXPRESSED IN ADULT LIVER, SIGNAL = 0.74; NT HIT: AF074608.1, EVALUE 3.40e+00; SWISSPROT HIT: Q9Y6C5, EVALUE 8.40e+00
ccaagattctgtctctcaattttcccttttggttcttcacactgaagtctgtccacggggaagcacacatactgcaatgttccaaccatagcttctaagatattactccctgcccagagcttagcagtccctctcaggatcatgcctcttgggaaggagccatttgagaaccactttttaattgtgtggtcttgagaaattttcagttttcttgactttctgagcctcattttcctat

SEQ ID NO: 18705 - DNA, 163 bp, Homo sapiens
  MAP TO AC009247.11; EXPRESSED IN ADULT LIVER, SIGNAL = 0.96; EXPRESSED IN HEART, SIGNAL = 1.2; EXPRESSED IN BRAIN, SIGNAL = 1.1; EXPRESSED IN LUNG, SIGNAL = 2.1; EXPRESSED IN FETAL LIVER, SIGNAL = 1.6; EXPRESSED IN PLACENTA, SIGNAL = 1.7; NT HIT: gi14723715, EVALUE 7.00e-87; EST_HUMAN HIT: BF797430.1, EVALUE 1.00e-86; SWISSPROT HIT: P54341, EVALUE 3.40e+00
ccgattcccaacatgacgcctgcgagtagacatgggagaatggctgtggctgtgccgtctacgataatctcgactgtaagacctgctacgtgatcgtctatgggagcgggagcgagaccgtgaccgggtataatgccttcgggagcttcttctggatctagac

SEQ ID NO: 18706 - DNA, 152 bp, Homo sapiens
  MAP TO AC005175.1; EXPRESSED IN BONE MARROW, SIGNAL = 1.5; EXPRESSED IN PLACENTA, SIGNAL = 0.63; EXPRESSED IN ADULT LIVER, SIGNAL = 0.98; SWISSPROT HIT: Q15596, EVALUE 5.80e+00; NT HIT: U63610.1, EVALUE 1.30e-01
cgtccaccatggtggagacgtccaagaagacagcgagcgcccaggagtttgcacgctgtttagactccgtcttgggcgagttcgccttccccgacgagtttgtggtggaagtgtgggccgccatcggcgaggccagagaggcctgtggctag

SEQ ID NO: 18707 - DNA, 140 bp, Homo sapiens
  MAP TO AC026446.2; EXPRESSED IN ADULT LIVER, SIGNAL = 1.6; EXPRESSED IN HEART, SIGNAL =   2; EXPRESSED IN FETAL LIVER, SIGNAL =   2; EXPRESSED IN HELA, SIGNAL = 2.4; NT HIT: AJ278435.1, EVALUE 7.40e+00; SWISSPROT HIT: P50896, EVALUE 3.40e+00
gtctccactgctacgacaacaataaagatctaaagcagctgttcagctttgggtggaccacacagagccatccccaggagacacagcaacctgagacaacagtcagtcaaacaaatgtaaacataatcttcagtgtcctg

SEQ ID NO: 18708 - DNA, 152 bp, Homo sapiens
  MAP TO AL121919.19; EXPRESSED IN LUNG, SIGNAL = 0.76; EXPRESSED IN BONE MARROW, SIGNAL = 0.93; EXPRESSED IN PLACENTA, SIGNAL = 0.52; EXPRESSED IN ADULT LIVER, SIGNAL = 0.8; EXPRESSED IN FETAL LIVER, SIGNAL = 0.93; NT HIT: AL163210.2, EVALUE 2.00e-06; SWISSPROT HIT: Q01295, EVALUE 4.40e+00
atccatccatgcccttcagattaattttcgcaatatcatggaaattgattgctaagtgaaattgcaaattgtgctcaagatgttgcattttgtgaaactgatagaaaagaccattggcagcctgctgattcacacccattggcagaatcaga

SEQ ID NO: 18709 - DNA, 250 bp, Homo sapiens
  MAP TO AC011387.4; EXPRESSED IN ADULT LIVER, SIGNAL = 2.5; EXPRESSED IN HEART, SIGNAL = 4.5; EXPRESSED IN BRAIN, SIGNAL =   3; EXPRESSED IN LUNG, SIGNAL = 1.8; EXPRESSED IN BONE MARROW, SIGNAL = 2.6; EXPRESSED IN PLACENTA, SIGNAL = 4.1; EST_HUMAN HIT: BI088274.1, EVALUE 0.00e+00; NT HIT: gi16306497, EVALUE 0.00e+00; SWISSPROT HIT: Q9UKB1, EVALUE 5.00e-43
tttgatggtcctgtcaccagaggcagacacgatgtacttgtcgtcaaagtctactacattgacggcagcccggtggccaaccaggacacggcgtaaagtgatgtcggtcgcagaagccatgtcccacacagcaatggagcggtccttggaacaggtcaccatcagtccattgctgaagcgtaagtgcaatacagcctcattgtggtggatcaatgtgttaagaacttcacccgtgttcacatcccacact

SEQ ID NO: 18710 - DNA, 490 bp, Homo sapiens
  MAP TO AC012083.6; EXPRESSED IN LUNG, SIGNAL = 2.9; EXPRESSED IN FETAL LIVER, SIGNAL = 4.1; EXPRESSED IN BONE MARROW, SIGNAL = 2.3; EXPRESSED IN HEART, SIGNAL = 3.8; EXPRESSED IN ADULT LIVER, SIGNAL = 2.4; EST_HUMAN HIT: BI022322.1, EVALUE 1.00e-100; NT HIT: U60822.1, EVALUE 7.00e-74; SWISSPROT HIT: Q07890, EVALUE 5.80e+00
gaatggggcactgctataaagatacctgaaaatgtggaagtgactttggaactgggtaatgggcagaggtttggagggctcagaagaatacagaaagatgttgtggaaagtttggaacttcctagagacttgttgaatggatttggccaaaatgctgatagtgatatggacaatgaagtccatgctgaggtggtcttagatggagatgaggaacttattgggaactggattaaaggtcactcttgctatgccttagcaaagagactgatggcattttgcctgtgccctagggatctgtgcaactttgaacttgagagagataatttaggatatctggaagaagaaatttttaagcagcaaagcattcaagatgtaacctggctgtttctgaaagcatataggcatatgtgttcacaaagtggtctgaaagtggaacttatttttaaaagggaagcagagcatacaagtttggaaaatgtgcagctgggcc

SEQ ID NO: 18711 - DNA, 130 bp, Homo sapiens
  MAP TO AC010398.6; EXPRESSED IN PLACENTA, SIGNAL = 0.52; EXPRESSED IN ADULT LIVER, SIGNAL = 0.78; EXPRESSED IN BRAIN, SIGNAL = 1.3; EXPRESSED IN LUNG, SIGNAL = 0.92; EST_HUMAN HIT: BG035737.1, EVALUE 2.50e+00; SWISSPROT HIT: P07818, EVALUE 4.60e+00
ttagctcatccatgtgtgacacattaagtgtcatcttaaactgataaatccgggctacgatttcaacacggcggccccttgtgcatttctttcctccggaaatgatctcagagagcttcagatggaacat

SEQ ID NO: 18712 - DNA, 211 bp, Homo sapiens
  MAP TO AC016597.4; EXPRESSED IN PLACENTA, SIGNAL = 1.7; EXPRESSED IN HEART, SIGNAL = 1.7; EXPRESSED IN ADULT LIVER, SIGNAL = 1.8; EXPRESSED IN BRAIN, SIGNAL = 1.9; EXPRESSED IN FETAL LIVER, SIGNAL = 2.1; EXPRESSED IN BONE MARROW, SIGNAL =   2; EST_HUMAN HIT: BF195065.1, EVALUE 4.30e+00
ggaaggactcaataaatgcttatgtggtgagctagaggaagaaagaaaggaaggaaggaaaggaggaggaagggaagaagagaaggaagggagagaggaaggaaggaaggaaggaggaaaggaaggagggaaggaggaaaagaaggaaggagggagggagggagggaaggaaggaaggaaggaaggggaagtggaagaattcaaaccatag

SEQ ID NO: 18713 - DNA, 181 bp, Homo sapiens
  MAP TO AC006290.1; EXPRESSED IN PLACENTA, SIGNAL = 0.66; EXPRESSED IN ADULT LIVER, SIGNAL = 0.71; EXPRESSED IN HEART, SIGNAL = 0.96; SWISSPROT HIT: Q9UFM2, EVALUE 1.10e+00; EST_HUMAN HIT: BG767988.1, EVALUE 3.00e-90
acacagacagcaaaggacaggctggcagcctggcagtggctgtccctcctgctgcctggtgcacatgggcagctggggtgaatgcagaggggccggacagcttccaagtcagctctggggagcacacatcttggtttgctgtgccccagaagtcatctcctcctccaggagcccttggacc

SEQ ID NO: 18714 - DNA, 171 bp, Homo sapiens
  MAP TO AL109827.8; EXPRESSED IN FETAL LIVER, SIGNAL = 8.6; EXPRESSED IN BRAIN, SIGNAL = 5.7; EXPRESSED IN PLACENTA, SIGNAL = 7.5; EXPRESSED IN BONE MARROW, SIGNAL =   8; EXPRESSED IN HEART, SIGNAL = 6.4; EXPRESSED IN ADULT LIVER, SIGNAL = 5.7; EXPRESSED IN LUNG, SIGNAL = 9.2; NT HIT: gi13376130, EVALUE 1.00e-91; EST_HUMAN HIT: BI827331.1, EVALUE 2.00e-91
ctcttgagggggctgaacataacaccagaaagttccacgtcaggctcatcatccaggtcctgctccagctcaagctccagctcattctcttcatcgtcctgctggcctagacttcgagctagcctgcggcctagagccactgcccgccgctccagctgggcctccccaggc

SEQ ID NO: 18715 - DNA, 113 bp, Homo sapiens
  MAP TO AC022127.3; EXPRESSED IN BRAIN, SIGNAL = 1.6; EXPRESSED IN HELA, SIGNAL = 1.7; EXPRESSED IN ADULT LIVER, SIGNAL = 1.3; EXPRESSED IN HEART, SIGNAL =   1; SWISSPROT HIT: P08547, EVALUE 5.00e-06; NT HIT: AF029308.1, EVALUE 2.00e-06; EST_HUMAN HIT: AW993081.1, EVALUE 2.00e-12
ttaatttcctttgtgtatatacccagcagataaatcattgtggtatatggtagttctgttttcaattttttgaagaatctccatactgttttccataatgtttgcaccaatcc

SEQ ID NO: 18716 - DNA, 92 bp, Homo sapiens
  MAP TO AC004201.1; EXPRESSED IN FETAL LIVER, SIGNAL = 0.77; EXPRESSED IN ADULT LIVER, SIGNAL = 1.2; EXPRESSED IN BRAIN, SIGNAL = 1.3; EST_HUMAN HIT: AI636239.1, EVALUE 4.00e-32; SWISSPROT HIT: P12528, EVALUE 8.10e+00; NT HIT: U53588.1, EVALUE 3.00e-32
atttgaagtcccaacatccaagtcatctaattcagaggatgatctccctgaagattatccagtggtcaaaaaaatgcttcatagactgacag

SEQ ID NO: 18717 - DNA, 133 bp, Homo sapiens
  MAP TO AC008696.5; EXPRESSED IN PLACENTA, SIGNAL = 0.59; EXPRESSED IN ADULT LIVER, SIGNAL = 0.49; NT HIT: U20902.1, EVALUE 7.00e-03; EST_HUMAN HIT: BF840261.1, EVALUE 1.70e-01
cttatcatgcctgcaagaggaaagactttgctctcatcactgagaactggttttctgaaattaaataacaatccaagaccagtatgtctagcagggtgttggagatcaatactccaaggcaagtgaaaggcaa

SEQ ID NO: 18718 - DNA, 110 bp, Homo sapiens
  MAP TO AF207955.1; EXPRESSED IN HEART, SIGNAL =   1; EXPRESSED IN BRAIN, SIGNAL = 1.6; EXPRESSED IN HELA, SIGNAL = 1.3; EXPRESSED IN BONE MARROW, SIGNAL =   1; EXPRESSED IN ADULT LIVER, SIGNAL =   1; EXPRESSED IN FETAL LIVER, SIGNAL = 1.5; EXPRESSED IN LUNG, SIGNAL = 1.6; EXPRESSED IN PLACENTA, SIGNAL = 1.8; NT HIT: AL163248.2, EVALUE 2.00e-55; EST_HUMAN HIT: AI765827.1, EVALUE 5.00e-04
ctaacaaccagcaagaaatggaggccctcaacctaacgtgccacaaggaactgaattctaccaacgaccacatgagcttggaagcagatccttccccaattgagtttcag

SEQ ID NO: 18719 - DNA, 281 bp, Homo sapiens
  MAP TO AL121928.13; EXPRESSED IN HELA, SIGNAL = 1.7; EXPRESSED IN BONE MARROW, SIGNAL = 1.5; EXPRESSED IN PLACENTA, SIGNAL = 1.6; EXPRESSED IN HEART, SIGNAL = 2.1; EXPRESSED IN ADULT LIVER, SIGNAL = 1.3; EXPRESSED IN FETAL LIVER, SIGNAL = 1.9; EXPRESSED IN LUNG, SIGNAL = 1.6; NT HIT: gi14746263, EVALUE 0.00e+00; SWISSPROT HIT: Q92538, EVALUE 1.00e-17; EST_HUMAN HIT: BE746582.1, EVALUE 0.00e+00
actttgagaagcccgagagcccccgagccgccagcagcagctccccaggatcaccagtggcctcaagccccagcaggctgagccccacccccgacgggcctccacccttggctcagcccccactgatcctgcagcccttggcctccccactgcaggtgggcgtgccacctatgactctgcccatcatcctcaaccctgcgctcatcgaggccacctcaccagtgcccctcctggccacaccccgccccacagatcccatacccacctctgaggtcaactaa

SEQ ID NO: 18720 - DNA, 231 bp, Homo sapiens
  MAP TO AC012156.14; EXPRESSED IN BRAIN, SIGNAL = 1.5; EXPRESSED IN LUNG, SIGNAL = 2.1; EXPRESSED IN HELA, SIGNAL = 1.4; EXPRESSED IN BONE MARROW, SIGNAL = 1.4; EXPRESSED IN PLACENTA, SIGNAL =   2; EXPRESSED IN HEART, SIGNAL = 1.8; EXPRESSED IN ADULT LIVER, SIGNAL = 1.5; SWISSPROT HIT: Q99469, EVALUE 1.60e+00; EST_HUMAN HIT: BF332913.1, EVALUE 1.00e-62
ctggtaagggcccctccaccaaggctggagggagtcctttatgagatgtcttttccaacagacaaaatttccaggttggaggtcatgaccagaatcttcatctcccaggagcgcactgtgggacgtgtcttgcactaaggtctggcttttcatgagctggtgaacaagtcccttacaacagtgcaagatgtccccattcagtaaatttgtatcagtcatcttgattcccat

SEQ ID NO: 18721 - DNA, 147 bp, Homo sapiens
  MAP TO AC008033.8; EXPRESSED IN HEART, SIGNAL = 2.4; EXPRESSED IN ADULT LIVER, SIGNAL = 2.6; EXPRESSED IN LUNG, SIGNAL = 2.9; EXPRESSED IN BRAIN, SIGNAL = 2.2; EXPRESSED IN BONE MARROW, SIGNAL = 2.7; EXPRESSED IN PLACENTA, SIGNAL = 1.5; NT HIT: AF283321.1, EVALUE 3.20e-02; SWISSPROT HIT: P33973, EVALUE 3.40e+00; EST_HUMAN HIT: R67858.1, EVALUE 4.00e-30
atggtggatgaggtcatttcaagagctggaattgggaagaaggataaatacatacatggaggagcaatagaagtctaccttatggagcatgtggaagtgagtattgaagttgaggttcaaatccttgctctgtcacttactggttat

SEQ ID NO: 18722 - DNA, 142 bp, Homo sapiens
  MAP TO AC016951.9; EXPRESSED IN ADULT LIVER, SIGNAL = 0.63; EXPRESSED IN FETAL LIVER, SIGNAL = 0.89; EST_HUMAN HIT: AI634783.1, EVALUE 8.00e-10; SWISSPROT HIT: Q9ULK2, EVALUE 3.40e+00; NT HIT: gi14744171, EVALUE 5.00e-10
atgagatttggaggggacaaaacatccaaaccttatcatgcccaaagcagcaaaaagcagaaaccaggccctggtaatcaaaagccactcaccttcccacacgaagaggatgagcaccaggaagacaatgcccacaacactt

SEQ ID NO: 18723 - DNA, 273 bp, Homo sapiens
  MAP TO AL079302.4; EXPRESSED IN LUNG, SIGNAL = 2.7; EXPRESSED IN BRAIN, SIGNAL = 2.5; EXPRESSED IN PLACENTA, SIGNAL = 1.6; EXPRESSED IN ADULT LIVER, SIGNAL = 2.8; EXPRESSED IN FETAL LIVER, SIGNAL = 2.4; SWISSPROT HIT: O43281, EVALUE 7.60e-01; EST_HUMAN HIT: AI032378.1, EVALUE 1.00e-87; NT HIT: gi14748360, EVALUE 2.00e-36
tctttcctgagagcacagcagacccctcctcctcatcgccccaggaggatgtcagggaagtctgggggactccgtcccatggggccaaccccaaatctccacttcccgcagttgtggctgtggggactgtgctcgtggcgctcagtgccatgggcttcacctcagtaggaatcgccgcatcctccatagcagccaagatgatgtctacagcagccattgccaacgggggcggagttgctgctggcagtctggtggctattctgcagtcagtgg

SEQ ID NO: 18724 - DNA, 296 bp, Homo sapiens
  MAP TO AC012313.5; EXPRESSED IN HELA, SIGNAL = 1.9; EXPRESSED IN FETAL LIVER, SIGNAL = 1.8; EXPRESSED IN BONE MARROW, SIGNAL = 1.8; EXPRESSED IN PLACENTA, SIGNAL =   2; EXPRESSED IN HEART, SIGNAL = 1.6; EXPRESSED IN ADULT LIVER, SIGNAL = 1.8; NT HIT: gi14755571, EVALUE 0.00e+00; SWISSPROT HIT: P28698, EVALUE 2.00e-34; EST_HUMAN HIT: BE410793.1, EVALUE 0.00e+00
ccagcccaacagttgcccagggtcatgctgcagtccttcgactagggcagcggcctcctcaggactgcctggccgctgaccgcgcacccaggcctggatctcgggaggcagtgtgcccaggaactgctccagcaccagcatctccagcatctgctccttggagtgtgcctcaggctgcagccactggcaacacagctcacgcagccgggccagggcttctcggggacctgccacctcctggtagcagaaccctcggaagcggaggcgggcagtctcaggctcctcaagggtggtct

SEQ ID NO: 18725 - DNA, 131 bp, Homo sapiens
  MAP TO AL109839.11; EXPRESSED IN BRAIN, SIGNAL = 1.7; EXPRESSED IN PLACENTA, SIGNAL = 2.1; EXPRESSED IN BONE MARROW, SIGNAL = 2.1; EXPRESSED IN HEART, SIGNAL = 2.1; EXPRESSED IN ADULT LIVER, SIGNAL =   2; EXPRESSED IN LUNG, SIGNAL = 2.5; EXPRESSED IN FETAL LIVER, SIGNAL = 2.5; NT HIT: gi14771031, EVALUE 6.00e-68; SWISSPROT HIT: Q13310, EVALUE 6.00e-06; EST_HUMAN HIT: AU119786.1, EVALUE 9.00e-68
cttggcatggagggattctggagactccagcatgagcaacagctctgagttgtcaatctccagcagcatgcccgtgatcttgccagccagctgggtgtggacatcatggataagggggtagagacgctccc

SEQ ID NO: 18726 - DNA, 104 bp, Homo sapiens
  MAP TO AC008149.14; EXPRESSED IN ADULT LIVER, SIGNAL = 1.7; EXPRESSED IN HEART, SIGNAL = 2.1; EXPRESSED IN BONE MARROW, SIGNAL = 0.97; EXPRESSED IN PLACENTA, SIGNAL = 1.3; NT HIT: AF387022.1, EVALUE 3.30e-01; SWISSPROT HIT: P20636, EVALUE 8.00e+00; EST_HUMAN HIT: AV681473.1, EVALUE 9.00e-52
tttctcttttcctacccaagctgaaattgttaaaaatcaacatgactatagctcaagttgttgtgatgggaataagggctgtgaaagagatagaaacccaatta

SEQ ID NO: 18727 - DNA, 167 bp, Homo sapiens
  MAP TO AC000038.2; EXPRESSED IN BONE MARROW, SIGNAL = 0.41; EXPRESSED IN ADULT LIVER, SIGNAL = 0.42; SWISSPROT HIT: P41357, EVALUE 8.70e-01; EST_HUMAN HIT: BE778422.1, EVALUE 8.50e-01
aagcagctggagatcaggccctcgacgtggttgtggaaagggaggacctgagagaagacaagagtatcaaacctcaagagtctcctacccctggggtcggggccctgatagggaaggcatgggatgccaggagcctggaggggatgtccgggcagatgctgcaaagc

SEQ ID NO: 18728 - DNA, 154 bp, Homo sapiens
  MAP TO AC008699.4; EXPRESSED IN BONE MARROW, SIGNAL = 0.79; EXPRESSED IN PLACENTA, SIGNAL = 0.49; EXPRESSED IN ADULT LIVER, SIGNAL = 0.55; EXPRESSED IN LUNG, SIGNAL = 0.83; EXPRESSED IN FETAL LIVER, SIGNAL = 0.55; SWISSPROT HIT: Q03640, EVALUE 1.50e+00; NT HIT: AF339157.1, EVALUE 1.30e-01
atggataaccttgcaaagagcaccacagcttcttggctgcatcctgaaaggatatcacacacaggcaggctgaagtgcccagggggcagtggaaggaggtctgtgctcctcgtgagcaggccaaagatgtatgtcttcagtggaccaggtgtgg

SEQ ID NO: 18729 - DNA, 225 bp, Homo sapiens
  MAP TO AL096791.12; EXPRESSED IN BRAIN, SIGNAL = 3.8; EXPRESSED IN BONE MARROW, SIGNAL = 2.2; EXPRESSED IN PLACENTA, SIGNAL = 2.6; EXPRESSED IN ADULT LIVER, SIGNAL = 1.4; EXPRESSED IN FETAL LIVER, SIGNAL = 1.7; EXPRESSED IN LUNG, SIGNAL = 3.3; EST_HUMAN HIT: BI259129.1, EVALUE 1.00e-123; SWISSPROT HIT: P51784, EVALUE 4.00e-41; NT HIT: gi14758436, EVALUE 1.00e-124
ctgctctggcttgcggcgcggatccatggggataaagaagacctccaagaccctcttgtggctgataggcagtggaacactgaggtagcagaaggggtcgaaggtcacagatacattgccacaatcggggcacaccagcgtggacttgaagaggccgtggaaagtgtccacgatcacagaatcgttccgccgtttgtggttttgccatgcctcctgtgccacctc

SEQ ID NO: 18730 - DNA, 142 bp, Homo sapiens
  MAP TO AC011604.10; EXPRESSED IN BRAIN, SIGNAL = 0.51; EXPRESSED IN LUNG, SIGNAL = 0.64; EXPRESSED IN BONE MARROW, SIGNAL = 0.7; EXPRESSED IN ADULT LIVER, SIGNAL = 0.45; EST_HUMAN HIT: BG152524.1, EVALUE 3.00e-09; NT HIT: AF364606.1, EVALUE 3.00e-05
atggcaacaaactatgtactaaagtattcaggctgctattacaagatactgaatactgaatggcttaaacaacagaaatttatttctcatattctgcaggctaagaagtccaaggtgaaggtgccagctgattcaattcctg

SEQ ID NO: 18731 - DNA, 122 bp, Homo sapiens
  MAP TO AL109910.27; EXPRESSED IN BONE MARROW, SIGNAL = 0.61; EXPRESSED IN PLACENTA, SIGNAL = 0.48; EXPRESSED IN ADULT LIVER, SIGNAL = 0.46; EST_HUMAN HIT: AW009818.1, EVALUE 1.50e-01; SWISSPROT HIT: P41131, EVALUE 7.90e+00
gacacagggccccgcgagagaggcttgtggccgccccagatgacctcagctccctgtctgtggccgctttgtctgtcgactgcaaggtctccaggccacacgaccactttgcagatgatatt

SEQ ID NO: 18732 - DNA, 195 bp, Homo sapiens
  MAP TO AC004208.1; EXPRESSED IN PLACENTA, SIGNAL = 4.8; EXPRESSED IN ADULT LIVER, SIGNAL = 5.7; EXPRESSED IN HEART, SIGNAL = 4.5; EXPRESSED IN HELA, SIGNAL = 8.9; EXPRESSED IN BRAIN, SIGNAL = 3.4; EXPRESSED IN LUNG, SIGNAL =  18; EXPRESSED IN FETAL LIVER, SIGNAL = 4.6; SWISSPROT HIT: P06489, EVALUE 1.40e+00; EST_HUMAN HIT: BG703384.1, EVALUE 2.60e-01; NT HIT: S40729.1, EVALUE 1.70e-01
attctggattcaagatcccctccaacagtgaaagccattttcgtgggccctgggcccaggatactccaacctggtcgcataccccttgggatttcccagcagcgggctgcagaatataacgtccaggagtggggtgtcctctctctccgggctcttggaagacgctgctccgcctttgatcacctggatttttaa

SEQ ID NO: 18733 - DNA, 175 bp, Homo sapiens
  MAP TO AC008413.5; EXPRESSED IN HELA, SIGNAL = 4.2; EXPRESSED IN BRAIN, SIGNAL = 4.5; EXPRESSED IN FETAL LIVER, SIGNAL = 2.3; EXPRESSED IN BONE MARROW, SIGNAL =   6; EXPRESSED IN PLACENTA, SIGNAL = 3.1; EXPRESSED IN ADULT LIVER, SIGNAL = 3.9; EXPRESSED IN HEART, SIGNAL = 3.5; NT HIT: L76947.1, EVALUE 2.40e+00; SWISSPROT HIT: P42705, EVALUE 8.60e-01
ggttcttccagtcagcaggacccgaggtgagaatgacagcattcttgatgggagcattgagattcttccatcacaagtacacactgtcacgttcagcctgcctcacgctgtgtttcctctcctgcgtggagcttccagagtgctcacatctgtgaatggaccagccttaatggct

SEQ ID NO: 18734 - DNA, 89 bp, Homo sapiens
  MAP TO AC006272.1; EXPRESSED IN ADULT LIVER, SIGNAL = 1.2; EXPRESSED IN HEART, SIGNAL = 1.4; EXPRESSED IN BRAIN, SIGNAL = 1.3; EXPRESSED IN LUNG, SIGNAL = 0.92; EXPRESSED IN PLACENTA, SIGNAL = 1.8; NT HIT: gi4503780, EVALUE 1.00e-15; EST_HUMAN HIT: AA625209.1, EVALUE 1.00e-01
atggagatggctctggctgtgcattcagcatgttctgtagatataatcaataggacttggattgtattgggtggtaaggaaaatgaaag

SEQ ID NO: 18735 - DNA, 287 bp, Homo sapiens
  MAP TO AL121784.2; EXPRESSED IN HELA, SIGNAL = 0.42; EXPRESSED IN FETAL LIVER, SIGNAL = 0.79; EXPRESSED IN ADULT LIVER, SIGNAL =   1; EXPRESSED IN PLACENTA, SIGNAL = 0.84; NT HIT: gi16191240, EVALUE 0.00e+00; SWISSPROT HIT: P53715, EVALUE 1.50e+00; EST_HUMAN HIT: BI907524.1, EVALUE 0.00e+00
tcaaggctggctctgcctctggcttttgaggggcagcagggtgccagccctcggcttacggcttgggacctcaggcctgctgctcatccagggtaaaagctgcttccaggcgagcggctggctggggtttgttaccttaatgaccgacgggagggcctgagtccaggcctgatctccaggtgccctggagggtccgactgctttcctcaggtactgactgtggacagcacatgagtacaggatgtagagtgcgcaggccagggcatagcctccccagttagaaacac

SEQ ID NO: 18736 - DNA, 179 bp, Homo sapiens
  MAP TO AC008390.6; EXPRESSED IN LUNG, SIGNAL = 0.61; EXPRESSED IN HELA, SIGNAL = 0.52; EXPRESSED IN BONE MARROW, SIGNAL = 0.43; EXPRESSED IN ADULT LIVER, SIGNAL = 0.58; NT HIT: AF224669.1, EVALUE 2.00e-28; SWISSPROT HIT: P31521, EVALUE 3.30e+00; EST_HUMAN HIT: BE350127.1, EVALUE 8.00e-26
ctacacagggccagggttatcaatgtcgctgtcttccaccacctccccatcttttcccattggaaggtcttcaggtgcaatagcacacatggagccgttatctcctatgataacaatgccttcttctggaatacctactgaaggccctgcctgaggctgccttacaatagaagtacact

SEQ ID NO: 18737 - DNA, 117 bp, Homo sapiens
  MAP TO AC067968.1; EXPRESSED IN BONE MARROW, SIGNAL = 6.4; EXPRESSED IN PLACENTA, SIGNAL =   2; EXPRESSED IN ADULT LIVER, SIGNAL = 2.4; EXPRESSED IN HEART, SIGNAL = 1.2; EXPRESSED IN LUNG, SIGNAL =   5; EXPRESSED IN FETAL LIVER, SIGNAL = 1.3; EXPRESSED IN BRAIN, SIGNAL = 1.9; SWISSPROT HIT: P45567, EVALUE 6.00e+00; EST_HUMAN HIT: H18299.1, EVALUE 6.00e-04; NT HIT: gi15828471, EVALUE 3.80e-01
ctgatggcatgtctcgctctgatgatcttgaattattgttgcatctggtgaaggggccagcacgatcatgggctcaatcaggttataaattaatggactgtcaatcttgcagttcat

SEQ ID NO: 18738 - DNA, 450 bp, Homo sapiens
  MAP TO AL096870.3; EXPRESSED IN ADULT LIVER, SIGNAL = 4.3; EXPRESSED IN LUNG, SIGNAL = 9.2; EXPRESSED IN BRAIN, SIGNAL = 4.8; EXPRESSED IN HELA, SIGNAL = 9.1; EXPRESSED IN FETAL LIVER, SIGNAL = 4.9; EXPRESSED IN BONE MARROW, SIGNAL = 8.3; EXPRESSED IN PLACENTA, SIGNAL = 2.6; SWISSPROT HIT: P13068, EVALUE 8.90e+00; EST_HUMAN HIT: BG330808.1, EVALUE 1.00e-107; NT HIT: gi13385891, EVALUE 1.00e-44
cagatgattgggaaccacggggcctggctctctcagactccagaatagtccctcctaacacctgaagcagagttctgaccacgaagctgccatgtgtgtctccacagtagacaagaaaatcatcacacacctcagcggctagtcccaggaccagctcctccagggtctccgtgggaccatcctttccatcctcctcctcctcctcctcctcctctgcagcactccccagcaatcgagggagctgtagcaaagcactttgtaatacatggaccccgcatcggtgacaggccacagtgcgcaagttagagcgcagagcagcccacacgcgacaaagcggtttcaagggactgaatcccaacagttcctgcagcatctcactgccagtcctgttcgtggacaaagctagggcctgagtctctacttccttcattatattgtgcaccatcagat

SEQ ID NO: 18739 - DNA, 374 bp, Homo sapiens
  MAP TO AC068323.6; EXPRESSED IN BONE MARROW, SIGNAL = 1.3; EXPRESSED IN ADULT LIVER, SIGNAL = 0.83; EXPRESSED IN BRAIN, SIGNAL = 0.89; EXPRESSED IN FETAL LIVER, SIGNAL = 0.72; NT HIT: AF405693.1, EVALUE 8.00e-67; EST_HUMAN HIT: BI713115.1, EVALUE 2.00e+00; SWISSPROT HIT: Q01728, EVALUE 1.50e-01
gtcctgggatactgagaattggagcagggataaatggcaatgacagatttacaggtctgatgcaggatgtgaggtcctatgagcggaaactgacgcttgaagaaatttatgaacttcatgccatgcccgcaaaaagtgatttacacccaatttctggatatctggagttcagacagggagaaactaacaaatcattcattatttctgcaagagatgacaatgacgaggaaggagaagaattattcattcttaaactagtttctgtatatggaggagctcgtatttcggaagaaaatactactgcaagattaacaatacaaaaaagtgacaatgcaaatggcttgtttggtttcacaggagcttgtataccagag

SEQ ID NO: 18740 - DNA, 177 bp, Homo sapiens
  MAP TO AC005547.1; EXPRESSED IN HEART, SIGNAL = 4.6; EXPRESSED IN BRAIN, SIGNAL = 5.6; EXPRESSED IN FETAL LIVER, SIGNAL = 7.6; EXPRESSED IN BONE MARROW, SIGNAL = 4.2; EXPRESSED IN PLACENTA, SIGNAL = 6.2; EXPRESSED IN ADULT LIVER, SIGNAL = 6.5; NT HIT: AL445564.1, EVALUE 6.20e-01; SWISSPROT HIT: P57519, EVALUE 6.60e-01
ctgctgtaagcagtcggctgctgtcattaagcaaaaaggccaagacaatgtgagtttatctggtcctacctgcatttctactcatcgttggactgaaacaaatgggaaagaaaaacttactgacttttggcgaactacaaaggttaactctattcatcatggagaaactgatactaa

SEQ ID NO: 18741 - DNA, 190 bp, Homo sapiens
  MAP TO AC010615.5; EXPRESSED IN HELA, SIGNAL = 0.57; EXPRESSED IN BONE MARROW, SIGNAL = 0.89; EXPRESSED IN ADULT LIVER, SIGNAL = 0.76; NT HIT: gi8954359, EVALUE 1.70e-01; EST_HUMAN HIT: AA482523.1, EVALUE 1.00e-103; SWISSPROT HIT: Q00997, EVALUE 1.50e+00
cttccattccttgaacatcttttccttgcaaaaacattggccagagtgtaagtgctggattgagtttattgaaggagggtgctgattttatattcaatcttggtttttctaaataatcaaggtttttattctttgtaggtgacatataacaagcatagttctttgcaacaagatcatcattaacacaaac

SEQ ID NO: 18742 - DNA, 134 bp, Homo sapiens
  MAP TO AC016552.5; EXPRESSED IN BONE MARROW, SIGNAL = 5.7; EXPRESSED IN ADULT LIVER, SIGNAL = 2.3; EXPRESSED IN HEART, SIGNAL =  18; EXPRESSED IN BRAIN, SIGNAL = 2.5; SWISSPROT HIT: P18124, EVALUE 3.00e-12; NT HIT: gi16196130, EVALUE 5.00e-44; EST_HUMAN HIT: AW409911.1, EVALUE 3.00e-43
ctggaaccatggaggttatagaagagaagaagaagtttcctgctgtgccagaaacccttaagaaaaagcgaaagaattttgcagagctgaaggtcaagtgcctgagaaagaagtttgcccaaaagatgctttga

SEQ ID NO: 18743 - DNA, 353 bp, Homo sapiens
  MAP TO AC008507.6; EXPRESSED IN LUNG, SIGNAL = 0.72; EXPRESSED IN BRAIN, SIGNAL = 1.1; EXPRESSED IN PLACENTA, SIGNAL = 1.3; EXPRESSED IN HEART, SIGNAL = 2.6; EXPRESSED IN ADULT LIVER, SIGNAL =   1; EXPRESSED IN FETAL LIVER, SIGNAL = 0.97; EST_HUMAN HIT: BG257066.1, EVALUE 1.00e-112; NT HIT: gi14759189, EVALUE 1.00e-113
taagcctgatactgtgattgcaaatggagaagatacgacatcttctgaagaggaaaaggaagatcgtaacacaaatgtgaatgcgatgcatcaagtaacagactctcatactccttgtcataaggatgttgcaagttcagaaccattcagtggtcaagtgaatagtcagttgaactgttcagtgaatggttccagttcttaccacagtgatgatgatgatgatgatgatgatgacgacgacgacgacaacattgacgacgatgatggtgataacgaccatgaggctttaggggttggagataattctataccaacaatatatttttcacatactgttgagcctaagagggttt

SEQ ID NO: 18744 - DNA, 128 bp, Homo sapiens
  MAP TO AC006334.3; EXPRESSED IN BRAIN, SIGNAL =  11; EXPRESSED IN HELA, SIGNAL =  10; EXPRESSED IN BONE MARROW, SIGNAL = 2.8; EXPRESSED IN PLACENTA, SIGNAL =  15; EXPRESSED IN ADULT LIVER, SIGNAL =  10; NT HIT: gi13899314, EVALUE 4.00e-66; EST_HUMAN HIT: BG203647.1, EVALUE 6.00e-66
tgcattcccagaagcagaacagacagacctgcgtccggaagagcctcatatgcgcctttgctatggccttcatcatcagtgtcatgctgattgcagccaaccagatactccggagcggcatggagtag

SEQ ID NO: 18745 - DNA, 185 bp, Homo sapiens
  MAP TO AF172277.1; EXPRESSED IN HELA, SIGNAL = 2.9; EXPRESSED IN FETAL LIVER, SIGNAL = 1.4; EXPRESSED IN BRAIN, SIGNAL = 2.6; EXPRESSED IN PLACENTA, SIGNAL = 1.6; EXPRESSED IN ADULT LIVER, SIGNAL = 1.5; EXPRESSED IN HEART, SIGNAL = 2.1; NT HIT: U55258.1, EVALUE 1.00e-100; SWISSPROT HIT: P35331, EVALUE 2.00e-19; EST_HUMAN HIT: AL134791.1, EVALUE 1.00e-92
gcctaccccaattatttactgggcaaaggaagatggaatgctacccaaaaacaggacagtttataagaactttgagaaaaccttgcagatcattcatgtttcagaagcagactctggaaattaccaatgtatagcaaaaaatgcattaggagccatccaccataccatttctgttagagttaaag

SEQ ID NO: 18746 - DNA, 119 bp, Homo sapiens
  MAP TO AC011890.4; EXPRESSED IN LUNG, SIGNAL = 3.3; EXPRESSED IN FETAL LIVER, SIGNAL = 1.6; EXPRESSED IN PLACENTA, SIGNAL = 1.6; EXPRESSED IN HEART, SIGNAL = 4.7; EXPRESSED IN ADULT LIVER, SIGNAL = 2.7; NT HIT: gi7662501, EVALUE 8.00e-61; EST_HUMAN HIT: BF794745.1, EVALUE 1.00e-60
atccttttatcctgccacaccagcaggttgataaaggagccatcaaatttgtactcagtggagcaaatatcatgtgtccaggcttaacttctcctggagctaagctttaccctgctgca

SEQ ID NO: 18747 - DNA, 182 bp, Homo sapiens
  MAP TO AL117257.1; EXPRESSED IN FETAL LIVER, SIGNAL = 1.5; EXPRESSED IN BONE MARROW, SIGNAL = 1.5; EXPRESSED IN PLACENTA, SIGNAL = 1.6; EXPRESSED IN ADULT LIVER, SIGNAL = 1.6; EXPRESSED IN HEART, SIGNAL = 2.1; SWISSPROT HIT: Q02413, EVALUE 3.30e+00; NT HIT: AF226868.4, EVALUE 6.40e-01; EST_HUMAN HIT: BG111101.1, EVALUE 1.50e-02
tgcgcaggctaggatggggctttggagtcatccttgctattaattacaggtacttaagcacagctgtagaaaaccaatgtcacaccttctctgtggctgaaagggtggatgcagggagtggacaagaaggtgtctcagggtccaccatcgtggcatccaacaaaggagacacagaaatggct

SEQ ID NO: 18748 - DNA, 461 bp, Homo sapiens
  MAP TO AC010519.6; EXPRESSED IN LUNG, SIGNAL = 6.9; EXPRESSED IN BRAIN, SIGNAL = 0.75; EXPRESSED IN BONE MARROW, SIGNAL = 0.9; EXPRESSED IN ADULT LIVER, SIGNAL = 0.88; SWISSPROT HIT: P13666, EVALUE 1.00e-14; NT HIT: gi16163028, EVALUE 0.00e+00; EST_HUMAN HIT: BG831594.1, EVALUE 0.00e+00
acctgttgaggaaggtgtttccgaaagggttgagtttgcggaagggcttgtccgggtccacgacgagggcgttgccgggcacggtgccctcagtgtccccgtgcatgacggccacaaagcagtcggtggtgggctcaggccccacgcgggagccgggcacctcctgctccagcaggtactggatgaagctggtcttgcccgtgctgtactggccggccaccagcaccatgggcttgccgtcgaagtctgcgtcctccagggccggcgagtggaaggccccaaagcggtagtgctcctccagcggcagcagcttcgtgcggtacagctccttgagggccgaggtcaccgtgcggatggcctcgggctgctggccccgtgccccgccccgcttcagccagctgaacatggtggctgcacaccgctcacggggttcacggagagacgtgcagatggagagctgc

SEQ ID NO: 18749 - DNA, 217 bp, Homo sapiens
  MAP TO AC009510.9; EXPRESSED IN HEART, SIGNAL = 0.98; EXPRESSED IN ADULT LIVER, SIGNAL = 1.3; EXPRESSED IN FETAL LIVER, SIGNAL = 0.76; EXPRESSED IN LUNG, SIGNAL = 0.43; EXPRESSED IN HELA, SIGNAL = 0.56; EXPRESSED IN PLACENTA, SIGNAL = 0.92; SWISSPROT HIT: P11369, EVALUE 9.90e-01; NT HIT: Z49378.1, EVALUE 5.00e-02; EST_HUMAN HIT: BF981711.1, EVALUE 7.30e-02
cgccaaactggagacaactcacatatccatctacaataaaatgcatacatacattatggaatatccatgtgatggaaatcaattcagcaatgagaatgaatgcaacaacatggaggaacctcacaatggtaatgtggaacaagcacagaagacacaaaagaaaaggaaatcaagaaaaaccatctatagacaacgatatatgactggaagcaggacc

SEQ ID NO: 18750 - DNA, 125 bp, Homo sapiens
  MAP TO AL078581.11; EXPRESSED IN PLACENTA, SIGNAL = 0.98; EXPRESSED IN ADULT LIVER, SIGNAL = 0.95; EXPRESSED IN FETAL LIVER, SIGNAL = 0.88; EST_HUMAN HIT: BG030876.1, EVALUE 3.00e-64; SWISSPROT HIT: P04147, EVALUE 5.30e-01; NT HIT: AJ409115.1, EVALUE 1.00e-10
cttcttattggcccaaatctagagaatattatttccagatcctcatctgtggtcactgggttcaatttacacacaaacagtacattttctggaggtttaatatctgcatcaggtaggtctcccac

SEQ ID NO: 18751 - DNA, 216 bp, Homo sapiens
  MAP TO AF274857.1; EXPRESSED IN BONE MARROW, SIGNAL = 3.6; EXPRESSED IN ADULT LIVER, SIGNAL = 4.2; EXPRESSED IN PLACENTA, SIGNAL = 5.1; EXPRESSED IN HEART, SIGNAL = 7.3; EXPRESSED IN BRAIN, SIGNAL = 4.6; EXPRESSED IN HELA, SIGNAL =  10; EXPRESSED IN FETAL LIVER, SIGNAL = 6.8; EST_HUMAN HIT: BF922594.1, EVALUE 2.00e-60; SWISSPROT HIT: P32928, EVALUE 3.40e-01; NT HIT: AL163282.2, EVALUE 9.00e-50
gggcaggggcaaaatgccagcagtatcttcgctaaagcataacaagagtcacttttgctccagtcctcaacaagttcctcatctccatctgagaccacttcagcctggacttcatcgtccattccactatcagcattttggtgaaagtcattcaacaagtcgctaggaagttccaaactttcccacatcttcctgtcttctgagccctccaggtct

SEQ ID NO: 18752 - DNA, 166 bp, Homo sapiens
  MAP TO AF178030.1; EXPRESSED IN BONE MARROW, SIGNAL = 1.7; EXPRESSED IN PLACENTA, SIGNAL = 1.4; EXPRESSED IN ADULT LIVER, SIGNAL = 1.2; EXPRESSED IN BRAIN, SIGNAL = 1.4; EXPRESSED IN LUNG, SIGNAL = 1.1; NT HIT: AB043547.1, EVALUE 2.00e-10; EST_HUMAN HIT: AW898257.1, EVALUE 6.00e-05; SWISSPROT HIT: P30416, EVALUE 1.00e-01
ctgctgtgtggcccagttcctaacaggccacagactggtacgggtccatggcttgggggtttgggaccccagccttgggaaacatctatttcctccactcccttatcatatttggggcttatatcaagtccagaaatgggctccaggtgctcaagttctaattctt

SEQ ID NO: 18753 - DNA, 129 bp, Homo sapiens
  MAP TO AC001479.1; EXPRESSED IN ADULT LIVER, SIGNAL = 0.96; EXPRESSED IN LUNG, SIGNAL = 2.1; EXPRESSED IN HELA, SIGNAL = 2.2; EXPRESSED IN FETAL LIVER, SIGNAL = 2.4; EXPRESSED IN BONE MARROW, SIGNAL = 2.1; SWISSPROT HIT: P23567, EVALUE 1.00e-18; NT HIT: gi16160537, EVALUE 1.00e-66; EST_HUMAN HIT: BF433014.1, EVALUE 1.00e-66
ttatgaatcattccagctttgttcaacaatggccgaaactcttttctcatattctcgtttgttttcctgataaagctgtgctgcctggctattggctggactgttaggattcggttcatccagcagaga

SEQ ID NO: 18754 - DNA, 133 bp, Homo sapiens
  MAP TO AC016577.4; EXPRESSED IN PLACENTA, SIGNAL = 5.3; EXPRESSED IN ADULT LIVER, SIGNAL = 3.7; EXPRESSED IN HEART, SIGNAL =   8; EXPRESSED IN FETAL LIVER, SIGNAL = 5.5; EXPRESSED IN BRAIN, SIGNAL = 3.8; EXPRESSED IN BONE MARROW, SIGNAL = 3.9; SWISSPROT HIT: P10267, EVALUE 1.00e-17; NT HIT: M14123.1, EVALUE 1.00e-66; EST_HUMAN HIT: BG501905.1, EVALUE 4.00e-64
ctacacagacacagtaacaatttgatctctcttgcttttccccacatttcccccttttcttttcgacaaaaccgccatcatcatcatggcccgttctcgatggtcgctgtctcttcggagctgttgggtacac

SEQ ID NO: 18755 - DNA, 191 bp, Homo sapiens
  MAP TO AL022321.1; EXPRESSED IN BONE MARROW, SIGNAL =   2; EXPRESSED IN ADULT LIVER, SIGNAL = 1.5; EXPRESSED IN FETAL LIVER, SIGNAL = 1.4; SWISSPROT HIT: P13866, EVALUE 2.00e-31; NT HIT: L29337.1, EVALUE 1.00e-103; EST_HUMAN HIT: BG742097.1, EVALUE 4.00e-71
gacttctgattgggatttcacgtatgattactgagtttgcttatggaaccgggagctgcatggagcccagcaactgtcccacgattatctgtggggtgcactacttgtactttgccattatcctcttcgccatttctttcatcaccatcgtggtcatctccctcctcaccaaacccattccggatgtgcat

SEQ ID NO: 18756 - DNA, 145 bp, Homo sapiens
  MAP TO AC007487.1; EXPRESSED IN HEART, SIGNAL =  33; EXPRESSED IN ADULT LIVER, SIGNAL = 1.5; EXPRESSED IN FETAL LIVER, SIGNAL = 1.8; EXPRESSED IN PLACENTA, SIGNAL = 1.2; EST_HUMAN HIT: AV756364.1, EVALUE 5.00e-76; SWISSPROT HIT: P00003, EVALUE 7.00e-22; NT HIT: gi16177619, EVALUE 3.00e-76
tcattagtagcttttttgagataagctattaagtctgccctttcttccttcttcttaatgccgacaaagatcatttttgttccagggatgtacttcttgggattctccaaatactccatcagtgtatcctctccccagatgatgc

SEQ ID NO: 18757 - DNA, 129 bp, Homo sapiens
  MAP TO AL117337.25; EXPRESSED IN HELA, SIGNAL = 3.2; EXPRESSED IN FETAL LIVER, SIGNAL = 3.8; EXPRESSED IN PLACENTA, SIGNAL = 3.5; EXPRESSED IN ADULT LIVER, SIGNAL = 2.9; EXPRESSED IN HEART, SIGNAL = 4.1; EST_HUMAN HIT: AV746778.1, EVALUE 7.00e-47; SWISSPROT HIT: Q06730, EVALUE 5.00e-05; NT HIT: gi14747916, EVALUE 5.00e-07
gttaccatgtgaataagccaaatgcagtcttcaagttgaagcaaggaaaagagccatggatattagaagtagaatttccacatcggggcttccctggtgagttagaagaaattatatcccatgttactg

SEQ ID NO: 18758 - DNA, 99 bp, Homo sapiens
  MAP TO AF190641.1; EXPRESSED IN FETAL LIVER, SIGNAL = 1.1; EXPRESSED IN PLACENTA, SIGNAL = 1.1; EXPRESSED IN ADULT LIVER, SIGNAL = 1.6; EXPRESSED IN HEART, SIGNAL = 1.2; EXPRESSED IN HELA, SIGNAL = 1.9; NT HIT: AL163252.2, EVALUE 6.00e-49; SWISSPROT HIT: O08736, EVALUE 2.70e+00
atggaaacggccaagagggagaaggggagctttgtactgatagtcaaaaactttgttacaaatgagaagactgacacgatgtttgccataggagtcata

SEQ ID NO: 18759 - DNA, 189 bp, Homo sapiens
  MAP TO AC012083.6; EXPRESSED IN BONE MARROW, SIGNAL = 1.6; EXPRESSED IN PLACENTA, SIGNAL =   2; EXPRESSED IN ADULT LIVER, SIGNAL = 2.2; EXPRESSED IN BRAIN, SIGNAL = 2.4; EXPRESSED IN FETAL LIVER, SIGNAL = 1.6; NT HIT: AF364606.1, EVALUE 6.60e-01; EST_HUMAN HIT: BG425031.1, EVALUE 9.80e-01
gtcctgcagtgatgaggaaattcttcttaaatacacacagaaacgtgaaagtcttcacctaaacaaccacaaaaagctgtctaaactcaaccataatacttcacttgctccaacaaagaagtggattttcgatagcctattccagaagttccccacacttgtgtatattaatttttcagatggaaactg

SEQ ID NO: 18760 - DNA, 128 bp, Homo sapiens
  MAP TO AC004200.1; EXPRESSED IN BRAIN, SIGNAL =   2; EXPRESSED IN PLACENTA, SIGNAL = 1.8; EXPRESSED IN ADULT LIVER, SIGNAL = 1.4; EXPRESSED IN HEART, SIGNAL = 2.3; NT HIT: L76289.1, EVALUE 6.00e-59; EST_HUMAN HIT: AA700304.1, EVALUE 7.00e-10
cctggggcacaatattgcttctggttcagcttggatgagggatgtttccctttgggcttcagcacaatgagatgccttactctccagactagggacacagtgtggggtgactccagttgccagtgcat

SEQ ID NO: 18761 - DNA, 155 bp, Homo sapiens
  MAP TO AC009533.9; EXPRESSED IN ADULT LIVER, SIGNAL = 1.1; EXPRESSED IN BRAIN, SIGNAL = 0.8; EXPRESSED IN FETAL LIVER, SIGNAL = 1.9; EXPRESSED IN LUNG, SIGNAL = 1.3; SWISSPROT HIT: P22516, EVALUE 1.00e-05; NT HIT: gi14765661, EVALUE 4.00e-82; EST_HUMAN HIT: BE799551.1, EVALUE 1.00e-79
cttctgcacagcagcaatggcggggccaaaggtagctttgacctccacactggctcggatccaggccggcagcttggccaggacagggggccgggcgtatcgctggtccaggagcactatgctggcaaaatccttctggtgcctgatggccctgc

SEQ ID NO: 18762 - DNA, 288 bp, Homo sapiens
  MAP TO AC022163.3; EXPRESSED IN BONE MARROW, SIGNAL = 1.8; EXPRESSED IN PLACENTA, SIGNAL = 3.2; EXPRESSED IN ADULT LIVER, SIGNAL = 1.8; EXPRESSED IN HELA, SIGNAL = 4.1; EXPRESSED IN FETAL LIVER, SIGNAL = 4.9; SWISSPROT HIT: P57530, EVALUE 7.30e+00; NT HIT: AL163303.2, EVALUE 1.00e-31; EST_HUMAN HIT: BF185829.1, EVALUE 2.00e-30
atgaacctagtcataagagctctgatggagatgtttgaggagattaatgttgcttttattcttgctaacacagcatctattctgcagcccacagatcaaggagtaagtttgactttcatgtattattatttaagaaatatgcttaataaggttatagctgccaaagatagtgatatttctgatggatctgtgcaaagtaaattgaaaaccttttctgaaagattcatcattctagatgtcattaagaacatttctgatttatgggaggaagtgaaagataagcattaa

SEQ ID NO: 18763 - DNA, 128 bp, Homo sapiens
  MAP TO AC016597.4; EXPRESSED IN ADULT LIVER, SIGNAL = 4.6; EXPRESSED IN HEART, SIGNAL = 3.9; EXPRESSED IN BRAIN, SIGNAL = 4.3; EXPRESSED IN FETAL LIVER, SIGNAL = 3.6; EXPRESSED IN BONE MARROW, SIGNAL = 3.2; EXPRESSED IN PLACENTA, SIGNAL = 4.2; SWISSPROT HIT: O06200, EVALUE 4.60e+00; NT HIT: AB045575.1, EVALUE 1.10e-01; EST_HUMAN HIT: BE876562.1, EVALUE 1.60e-01
atgctgcagctccactaccagagcttttcccatcctggctttccagaaccgtcctacatggcgccccagttctccaaaatcacgttccctctgtgcactccctcacaccgcacacacgtgcacacgag

SEQ ID NO: 18764 - DNA, 232 bp, Homo sapiens
  MAP TO AC008901.4; EXPRESSED IN BONE MARROW, SIGNAL = 0.55; EXPRESSED IN PLACENTA, SIGNAL = 0.87; EXPRESSED IN ADULT LIVER, SIGNAL = 1.6; EXPRESSED IN HELA, SIGNAL = 0.48; NT HIT: M19480.1, EVALUE 1.00e-128; EST_HUMAN HIT: BF223132.1, EVALUE 1.00e-127; SWISSPROT HIT: P19883, EVALUE 1.00e-42
gaagcaaagtcctgtgaagatatccagtgcactggtgggaaaaaatgtttatgggatttcaaggttgggagaggccggtgttccctctgtgatgagctgtgccctgacagtaagtcggatgagcctgtctgtgccagtgacaatgccacttatgccagcgagtgtgccatgaaggaagctgcctgctcctcaggtgtgctactggaagtaaagcactccggatcttgcaact

SEQ ID NO: 18765 - DNA, 186 bp, Homo sapiens
  MAP TO AC002325.1; EXPRESSED IN ADULT LIVER, SIGNAL = 3.5; EXPRESSED IN HEART, SIGNAL = 5.2; EXPRESSED IN BRAIN, SIGNAL =   4; EXPRESSED IN PLACENTA, SIGNAL = 4.3; NT HIT: Y17803.1, EVALUE 1.00e-100; EST_HUMAN HIT: BF206274.1, EVALUE 1.00e-100; SWISSPROT HIT: O88813, EVALUE 2.20e-01
cggccatcatgtttgctgccaacctgactctggggctgtacatccactttggccccaggcctctgagccccaacagcactgcgggcctggaaagcgagtcctggggggacttggcgcagcccctggcagcacccgctggctacctcaccctggtgcccctgctggccaccatgctcttcatcatgg

SEQ ID NO: 18766 - DNA, 164 bp, Homo sapiens
  MAP TO AC020728.4; EXPRESSED IN BONE MARROW, SIGNAL = 1.4; EXPRESSED IN ADULT LIVER, SIGNAL = 1.2; EXPRESSED IN HEART, SIGNAL = 1.8; EXPRESSED IN BRAIN, SIGNAL =   1; EXPRESSED IN LUNG, SIGNAL =   2; EXPRESSED IN HELA, SIGNAL = 2.9; SWISSPROT HIT: P42285, EVALUE 1.00e-20; NT HIT: gi14721268, EVALUE 2.00e-87; EST_HUMAN HIT: BG290730.1, EVALUE 2.00e-87
attgcaatagatattaaatctgcaaagcgagaactgaagaaagcaagaacagtcctacaaatggatgaactcaaatgtcgcaaacgtgttttaagaaggttgggatttgctacttcttctgatgtaatagagatgaaaggacgagtggcttgtgagataagcag

SEQ ID NO: 18767 - DNA, 394 bp, Homo sapiens
  MAP TO AC012156.14; EXPRESSED IN PLACENTA, SIGNAL = 1.4; EXPRESSED IN ADULT LIVER, SIGNAL = 1.4; EXPRESSED IN HEART, SIGNAL = 1.7; EXPRESSED IN BRAIN, SIGNAL = 1.4; SWISSPROT HIT: P21414, EVALUE 3.90e-01; EST_HUMAN HIT: BI031398.1, EVALUE 3.50e-02
ctccttgcttatcgccttcttcttcaccctccttgtcacgaccctgtcagaagctctgataaccctccaagaagaccaagtccaagagagcagaccaggaaccaggactcctgggtttcagccccagcaacgccactgtctgcacctatgcaactaacccctacccagttcacatcacatgaaagcccagcagagcccccaaagagatgttcagaagtcactgctgctgctacttctacaaggcaaacaaaggagagcccccatccctcagaacctgtttgctgggatccacctcaggcagcagaacagggacatggaccaggctgcctggcagggcaccacggagggctggggaaatgggaatatagatgccatgatgatcatattaatgagg

SEQ ID NO: 18768 - DNA, 463 bp, Homo sapiens
  MAP TO AC024076.4; EXPRESSED IN BRAIN, SIGNAL = 1.4; EXPRESSED IN HELA, SIGNAL =   2; EXPRESSED IN BONE MARROW, SIGNAL = 1.7; EXPRESSED IN ADULT LIVER, SIGNAL = 1.5; EXPRESSED IN HEART, SIGNAL = 2.4; SWISSPROT HIT: O95076, EVALUE 6.60e-01; NT HIT: gi15301958, EVALUE 1.00e-108; EST_HUMAN HIT: AI568341.1, EVALUE 1.00e-108
ttagtttctttcctttttttttttttttttggttggttgtttttttggtctttcctcccttgtcactcctgctctgaggaccctctgcgtccccaccactggcctcctcgccctcttcccaggcaagggaccaaggcagggaccagaggaatgggaggggaggcatggctggccctcactcaggtttggaccctgcctcgggcccccctggacctccaggggtctgtgctgccgtctcgctgcaagtggaggaggaggaggatgaggatgaagaggatgaggaggagaggccaggagacttgctggagatggaggctgccacagccgcagccgctgctgagaccaggcccacaccaggcggggtgctgagcaggggcagcccagcatgattcaagaagagcggcgaggtcaccaggccagggctccccggggctgcaccggctgcccccagcaccagattccc

SEQ ID NO: 18769 - DNA, 154 bp, Homo sapiens
  MAP TO AC012083.6; EXPRESSED IN BONE MARROW, SIGNAL = 1.2; EXPRESSED IN PLACENTA, SIGNAL = 1.4; EXPRESSED IN ADULT LIVER, SIGNAL = 1.3; EXPRESSED IN HEART, SIGNAL = 1.4; EXPRESSED IN LUNG, SIGNAL = 1.5; SWISSPROT HIT: P54868, EVALUE 3.40e+00; NT HIT: AF125348.1, EVALUE 9.00e-09; EST_HUMAN HIT: BG342121.1, EVALUE 2.00e-81
tggttgttggatagaagccagtctcagttcctcgccacatgagcctctccacaaggcacctctcaacatggcagctgtcttcccacagcaacaagaaactctgacactgccggtaattcattctttgccattgtggttgaaatactccatccat

SEQ ID NO: 18770 - DNA, 276 bp, Homo sapiens
  MAP TO AC004204.1; EXPRESSED IN BONE MARROW, SIGNAL =   1; EXPRESSED IN PLACENTA, SIGNAL = 1.1; EXPRESSED IN ADULT LIVER, SIGNAL = 1.1; EXPRESSED IN BRAIN, SIGNAL =   1; SWISSPROT HIT: P30509, EVALUE 2.00e-53; NT HIT: Z15144.1, EVALUE 0.00e+00; EST_HUMAN HIT: BF854422.1, EVALUE 0.00e+00
aacacccaaagacacacgtgacccaccatcccgtctctgaccatgaggccaccctgaggtgctgggccctgggcttctaccctgcggagatcacactgacctggcagcgggatggcgaggaccaaactcaggacaccgagcttgtggagaccaggccagcaggagatggaaccttccagaagtgggcagctgtggtggtgccttctggagaagagcagagatacacgtgccatgtgcagcacgaggggctgccagagcccctcaccctgagatggg

SEQ ID NO: 18771 - DNA, 383 bp, Homo sapiens
  MAP TO AC002051.2; EXPRESSED IN LUNG, SIGNAL = 3.6; EXPRESSED IN HELA, SIGNAL =   2; EXPRESSED IN FETAL LIVER, SIGNAL = 2.8; EXPRESSED IN ADULT LIVER, SIGNAL = 1.2; SWISSPROT HIT: Q9Y2N3, EVALUE 4.00e-07; NT HIT: gi14777543, EVALUE 0.00e+00; EST_HUMAN HIT: AL042278.1, EVALUE 0.00e+00
tgtctttgaggaactgagggtcagctggcagtgggatgaggctggccccctcctccgctttagccccggcaagcctcccgtggagctgtaggagctggagatggcatttcggttggtgcaggagctcgtccaggaggtctgggatgtctggttatatctgatttctgacctctgggcatggaggtctgtctgcagaggcccgggcccgggcacaaagggagagaggcctccattgtcccgcaggggccgaaatgcagacggtgcatccccggtgacctcggggacccttctctgatcaccaggattctcttggactctagggtccttgtcctgctcaggcatccctgccccgctctccttgagggccctcaacactatcttcc

SEQ ID NO: 18772 - DNA, 369 bp, Homo sapiens
  MAP TO AC005864.1; EXPRESSED IN BONE MARROW, SIGNAL = 0.74; EXPRESSED IN PLACENTA, SIGNAL = 0.94; EXPRESSED IN HEART, SIGNAL = 1.3; EXPRESSED IN ADULT LIVER, SIGNAL = 0.94; EXPRESSED IN LUNG, SIGNAL =   1; EXPRESSED IN HELA, SIGNAL = 0.98; EXPRESSED IN FETAL LIVER, SIGNAL = 1.1; EXPRESSED IN BRAIN, SIGNAL = 1.2; NT HIT: gi8850216, EVALUE 1.40e+00; EST_HUMAN HIT: BE825946.1, EVALUE 1.30e-01; SWISSPROT HIT: P81782, EVALUE 8.60e+00
atgtttgtctcatttatcaagaaagcaacgcagtcccagaagcccctggcaggtacctcgttctgtctcatcggtcagagctgtgtgatatcagtacctggaaaaatgagtatttactttttcaaccaatgtagtggaggtagacaaggcacaaaagaattaagagtgggtgttagttacaagccttcagtgactgccacattgctagtttccaatcgttactctaacacatctcagactaacatgtttacactgcctctggggcccactcgctgcataattaagcagacgctgggaatacagcacttgctgtacacccatgctaagtgccgggtgaacagtgataagcaagacaaccacggtccttga

SEQ ID NO: 18773 - DNA, 197 bp, Homo sapiens
  MAP TO AC020908.5; EXPRESSED IN BONE MARROW, SIGNAL =  12; EXPRESSED IN PLACENTA, SIGNAL = 7.7; EXPRESSED IN ADULT LIVER, SIGNAL = 9.2; EXPRESSED IN HEART, SIGNAL =  17; EXPRESSED IN BRAIN, SIGNAL = 7.8; EXPRESSED IN LUNG, SIGNAL =  13; EXPRESSED IN HELA, SIGNAL =  29; NT HIT: gi14785824, EVALUE 7.00e-75; EST_HUMAN HIT: BE002990.1, EVALUE 1.00e-104; SWISSPROT HIT: O29048, EVALUE 2.90e-01
acgccctgcagcatgaactggtgaccactcagcgcctcctgggagaacttgatgttggtgattcggaagaaaatgtgcaggtgctggacttactgagcgaactcaaggacgtgacggcgaaaaaggaccttgagctccgaaggtacctcggaaaatgctttaagaaagaggtggcaccctgtttgctcagggctgtt

SEQ ID NO: 18774 - DNA, 498 bp, Homo sapiens
  MAP TO AC009123.6; EXPRESSED IN ADULT LIVER, SIGNAL = 0.88; EXPRESSED IN BRAIN, SIGNAL =   1; EXPRESSED IN HELA, SIGNAL = 0.77; EXPRESSED IN PLACENTA, SIGNAL = 0.72; EST_HUMAN HIT: BI038627.1, EVALUE 0.00e+00; SWISSPROT HIT: P13627, EVALUE 1.20e-02
gggagatgacatcttcagatgatggtgagaatgtgcccgccagtgcggaaggcaaggaggagcctcccggggacagagaaacaaggcagaagatggagctatttgttaaggaaagctttgaggccaaggacgagctctgcccggaaaagccaagtggagaggagccgcctgtggaggctaaaagagaggatggaggtccagagccagaggggaccctcccagctgagaccctgctactgtcgtcacctgtggaggttaaaggagaggacggagatggagagccagaggggaccctcccagctgaggccccaccacccccgccacctgtggaggttaaaggagaggatggagatcaagagccagaggggaccctcccagctgagaccctgctactgtcaccgcctgtgaaggttaaaggagaggatggagatcgagagccagaggggaccctcccagctgaggccccaccaccaccgcccctgggagctgccagggaag

SEQ ID NO: 18775 - DNA, 118 bp, Homo sapiens
  MAP TO AC010613.5; EXPRESSED IN LUNG, SIGNAL = 1.2; EXPRESSED IN FETAL LIVER, SIGNAL = 0.55; EXPRESSED IN BRAIN, SIGNAL = 0.93; EXPRESSED IN BONE MARROW, SIGNAL = 0.89; EXPRESSED IN PLACENTA, SIGNAL = 0.84; EXPRESSED IN ADULT LIVER, SIGNAL = 0.75; NT HIT: AF230707.1, EVALUE 9.80e-02; EST_HUMAN HIT: BG189159.1, EVALUE 5.70e-01
atgaggcttcttggaggaagtggtaaactgcataatgagggatataaaattgcagaaaggcaagaggcatttgagaagggagattatacaataagaatgaagaatatcaagggatggg

SEQ ID NO: 18776 - DNA, 200 bp, Homo sapiens
  MAP TO AC010285.4; EXPRESSED IN BONE MARROW, SIGNAL = 1.5; EXPRESSED IN PLACENTA, SIGNAL = 2.7; EXPRESSED IN HEART, SIGNAL = 2.9; EXPRESSED IN ADULT LIVER, SIGNAL = 3.2; EXPRESSED IN LUNG, SIGNAL = 0.78; EXPRESSED IN FETAL LIVER, SIGNAL = 1.9; EXPRESSED IN BRAIN, SIGNAL = 2.6; SWISSPROT HIT: P51564, EVALUE 4.20e+00; NT HIT: AE004310.1, EVALUE 1.80e-01
gccaagtacccaaggcactggtcctgaccacaggcacggccgccggggcttccccagaagctagacatgccaggctccagatgtgtgtgatgaacgcaaagtgggctcttcccatcagcgatgaggatgctgacagccttttacactctaagactatactgctcctttgccacttgcattacactgctgattcattctaa

SEQ ID NO: 18777 - DNA, 550 bp, Homo sapiens
  MAP TO AC008546.5; EXPRESSED IN BONE MARROW, SIGNAL = 0.94; EXPRESSED IN HEART, SIGNAL = 1.8; EXPRESSED IN ADULT LIVER, SIGNAL = 1.2; EXPRESSED IN LUNG, SIGNAL = 0.54; SWISSPROT HIT: P11269, EVALUE 3.00e-03; NT HIT: AJ278581.1, EVALUE 0.00e+00; EST_HUMAN HIT: AV730914.1, EVALUE 0.00e+00
ccaggtctgccttgatctgctttaaatcagagagggagaaggggacatgtacctgggttgggccaaattcccctccccctacagcttgaaggggacataaccgatagcctgggggtttttgtggtcctttggagatttcttggcttatttccttctgggcaggggagatttgaggaggcttatcattaataggaaggggatctatagggagcctaagatacgggtgtaagctgagaggtcctcctgtgggatgtaaattgcaagctttgcatagttgtgtattttccttcaatgaaaagaaagcttggacataaggtatttcactccatttgccttccctcttacagaaaaggtcaaactgcaggatagtattgtaatttgtacttccctcaggtggccatttttccccatcagagagagaatattggggcccggctgtagggcagaaaaaaatgagccacctctttttcagggtttgtgggtcaaattggtcccaatggcttaggacgcatttcaagggtgagcctgttgatgcctgagtgtttcccat

SEQ ID NO: 18778 - DNA, 200 bp, Homo sapiens
  MAP TO AC002469.7; EXPRESSED IN HELA, SIGNAL = 1.5; EXPRESSED IN FETAL LIVER, SIGNAL =  22; EXPRESSED IN BRAIN, SIGNAL = 0.85; EXPRESSED IN BONE MARROW, SIGNAL = 0.41; EXPRESSED IN PLACENTA, SIGNAL = 0.57; EXPRESSED IN ADULT LIVER, SIGNAL =  26; SWISSPROT HIT: P05062, EVALUE 9.00e-26; NT HIT: gi14738256, EVALUE 1.00e-109; EST_HUMAN HIT: AF075378.1, EVALUE 1.00e-108
catggcccgcttcataaaagcctcctgggttgcctccttgtttgcagccttgccaccccaggcagccagtgcactggcctgcagggcccgtccataagagaaacttagtttccagggctttggtagagggcaaaggttgatagcattgaggttgagagtggcatcctcttcactcatgccaccagacaaaaagcagatgc

SEQ ID NO: 18779 - DNA, 447 bp, Homo sapiens
  MAP TO AC018557.5; EXPRESSED IN ADULT LIVER, SIGNAL = 1.9; EXPRESSED IN HEART, SIGNAL = 2.2; EXPRESSED IN PLACENTA, SIGNAL = 1.3; EXPRESSED IN LUNG, SIGNAL = 2.8; EXPRESSED IN BRAIN, SIGNAL = 2.1; EXPRESSED IN HELA, SIGNAL = 2.5; EXPRESSED IN BONE MARROW, SIGNAL = 1.7; SWISSPROT HIT: Q20168, EVALUE 4.50e-01; NT HIT: gi15316865, EVALUE 1.00e-50; EST_HUMAN HIT: BI464188.1, EVALUE 1.00e-128
cagctctccgctcaccagtctcaggatcttcaacattccagtgggcgagaaggagaaacgtttgaggctgtccctgaatttgtacgggactttggctcggccctccacgcgctctttgatcgccatctcatttaagagtttggattcagtgtgtgcagagggcgtggggggtgggagtgtgggctttgggggtgggcgtgtggtggctttccttgagggtgcggtgccctcactgccttggggacgtgcggcggctgcggactgcgcactgcgaattgagactgcggggtgcttccggggtgcggtcttcgctgagatgttgcgctgtgccttgggtacagaactcactacgctgccgctacttgccagggctgcggcagtctccggttgtttcaagttccctgaaggtgcctcggatgactcaggtttggcgtgttcaggatccat

SEQ ID NO: 18780 - DNA, 457 bp, Homo sapiens
  MAP TO AL121674.12; EXPRESSED IN FETAL LIVER, SIGNAL = 0.97; EXPRESSED IN BONE MARROW, SIGNAL = 0.97; EXPRESSED IN PLACENTA, SIGNAL = 0.79; EXPRESSED IN ADULT LIVER, SIGNAL = 0.9; NT HIT: gi14779133, EVALUE 6.70e+00; EST_HUMAN HIT: BE784070.1, EVALUE 0.00e+00; SWISSPROT HIT: Q08696, EVALUE 4.00e+00
ctggccttcctggacttcgtcctggctgcagagtcagtgcagctcctcttctctttggcctccttggtgcccgaggcctcccggggcttccgtgccttctttgccccatctttttgcttcggctccttgtgctccttggccttcttcggctccttggcctttctgggttcctttggctctttcggttctcgtttcctctttggcttgggctctctgtccttgcttccctttgctgcaccctcttggtctcctggctcctttttcttccgtttcttcttcactccagtacctcctcctccactgtcctccatcccattatgggatgtcattttcctaggaaaaagggtagcagcttcctcttcagcagtatacaggtccttctgaggcagacagtgactagcaacatcttcaattttctcttcttgatcagtgctgcagtcaaatggggatggagatt

SEQ ID NO: 18781 - DNA, 168 bp, Homo sapiens
  MAP TO AC003110.1; EXPRESSED IN ADULT LIVER, SIGNAL = 0.51; EXPRESSED IN PLACENTA, SIGNAL = 0.4; EST_HUMAN HIT: T85142.1, EVALUE 5.50e-02; SWISSPROT HIT: P06333, EVALUE 2.00e-03
caggttgattgtgtatgtgattgtgtgtggcccattgtggctgtgcatggctgggtgtggttgtgcatggctgggtgtggttgtgtacggctgggtgtagttgtgcatggctggatgtcgttgtacatggctgagtgtggttgtgtatggctgggtgtggttgtgcat

SEQ ID NO: 18782 - DNA, 134 bp, Homo sapiens
  MAP TO AC009145.4; EXPRESSED IN BRAIN, SIGNAL = 1.4; EXPRESSED IN HELA, SIGNAL = 1.4; EXPRESSED IN BONE MARROW, SIGNAL = 0.82; EXPRESSED IN PLACENTA, SIGNAL = 1.5; EXPRESSED IN ADULT LIVER, SIGNAL = 1.5; SWISSPROT HIT: Q03721, EVALUE 3.50e+00; EST_HUMAN HIT: T05147.1, EVALUE 6.60e-01
aaatgcaaggtgagagaaccgagcagccccaggaaaagcaaacactgaaccccaccgttgtctgtagggaagaatgtggatttcgaggagaacttggaaataaaggtggcaattcgcttgcaggatttaaacat

SEQ ID NO: 18783 - DNA, 144 bp, Homo sapiens
  MAP TO AC012315.4; EXPRESSED IN BONE MARROW, SIGNAL =   3; EXPRESSED IN PLACENTA, SIGNAL = 1.8; EXPRESSED IN ADULT LIVER, SIGNAL = 2.3; EXPRESSED IN BRAIN, SIGNAL = 2.7; EXPRESSED IN FETAL LIVER, SIGNAL = 2.2; SWISSPROT HIT: Q9UPZ3, EVALUE 5.20e-01; NT HIT: AL163280.2, EVALUE 2.00e-40; EST_HUMAN HIT: H44555.1, EVALUE 2.00e-53
atggccggggaggcctcagaatcatggtgggaggtgaaagacacttcttacatggtggcggcaagagaaaatgaggaagatgcaaaagtggaaacccctgataaaaccatcagatcttgtgagacttattcaccaccacgagaa

SEQ ID NO: 18784 - DNA, 159 bp, Homo sapiens
  MAP TO AF235098.1; EXPRESSED IN BONE MARROW, SIGNAL =   6; EXPRESSED IN ADULT LIVER, SIGNAL = 4.5; EXPRESSED IN PLACENTA, SIGNAL = 5.5; EXPRESSED IN HEART, SIGNAL = 5.9; EXPRESSED IN LUNG, SIGNAL = 3.1; EXPRESSED IN FETAL LIVER, SIGNAL =   5
ttaaaaggacctgaaatggtcttttctagtgtgcctcttcttcttcttcttcttcttcttgttcttcttcttcttcttcttcttcttcttcttcttcttcttcttcttcttcttcttcttcttcttcttcttcttctttttcagagacagggtttcatt

SEQ ID NO: 18785 - DNA, 168 bp, Homo sapiens
  MAP TO AC010163.7; EXPRESSED IN BRAIN, SIGNAL = 1.5; EXPRESSED IN LUNG, SIGNAL = 1.5; EXPRESSED IN BONE MARROW, SIGNAL = 1.6; EXPRESSED IN PLACENTA, SIGNAL = 0.89; EXPRESSED IN ADULT LIVER, SIGNAL = 1.3
ctactccctctcttccttcttctcctcctctgcctcctctttcttctccttttcctccttctctttctccttctcctcttctcttgctcctttccttctgatttttcccttcttttctttttcctcctccttttcctcctttcccctctcctccttctttgtccccat

SEQ ID NO: 18786 - DNA, 178 bp, Homo sapiens
  MAP TO AL121776.19; EXPRESSED IN FETAL LIVER, SIGNAL = 0.84; EXPRESSED IN ADULT LIVER, SIGNAL = 0.9; EST_HUMAN HIT: BI765827.1, EVALUE 1.00e-95; SWISSPROT HIT: O00167, EVALUE 4.00e-13; NT HIT: gi14786193, EVALUE 8.00e-96
gactatccttcctaccccggcttcccccagagccagtacccccagtattacggctcatcctacaaccctccctacgtcccggccagcagcatctgcccttcgcccctctccacgtccacctacgtcctccaggaggcatctcacaacgtccccaaccagagttccgagtcacttgctg

SEQ ID NO: 18787 - DNA, 238 bp, Homo sapiens
  MAP TO AC022149.3; EXPRESSED IN BRAIN, SIGNAL = 1.2; EXPRESSED IN BONE MARROW, SIGNAL = 1.8; EXPRESSED IN PLACENTA, SIGNAL = 1.3; EXPRESSED IN ADULT LIVER, SIGNAL = 1.2; EXPRESSED IN HEART, SIGNAL = 1.7; EXPRESSED IN LUNG, SIGNAL =   2; EST_HUMAN HIT: AW403498.1, EVALUE 2.00e-89; SWISSPROT HIT: P29776, EVALUE 1.10e+00; NT HIT: gi14768139, EVALUE 1.00e-109
cttggggcagaaagggcatcctctgagacactgtcagtaccttgggttcagttcgatcaatccccacgaggaagaggaggtgggccaggaagaggcagagcgagagctgcagatgcagtgaggtgctggtgttccggatggctttacacaggagaaaagtgagggccgccaggaggaggcacagcagagagacgctcagccccacgtaggtgatgacagtcagcacgggatcctcctc

SEQ ID NO: 18788 - DNA, 134 bp, Homo sapiens
  MAP TO AC016626.4; EXPRESSED IN BRAIN, SIGNAL = 0.88; EXPRESSED IN LUNG, SIGNAL = 0.67; EXPRESSED IN PLACENTA, SIGNAL = 1.3; EXPRESSED IN ADULT LIVER, SIGNAL = 0.96; EXPRESSED IN HEART, SIGNAL = 1.4; EST_HUMAN HIT: BG720326.1, EVALUE 7.00e-41; NT HIT: gi7949166, EVALUE 2.00e-03
caacaatcaaagctacatctgtgacacaacaggacactgctatgggcagtctcagtgttgtaactactactatgaacattggtggttctggctggcgtggaccatcaccatcatcctgagctgctgctgtgtct

SEQ ID NO: 18789 - DNA, 125 bp, Homo sapiens
  MAP TO AL023801.1; EXPRESSED IN LUNG, SIGNAL = 2.3; EXPRESSED IN FETAL LIVER, SIGNAL = 4.4; EXPRESSED IN PLACENTA, SIGNAL = 2.6; EXPRESSED IN BONE MARROW, SIGNAL = 2.4; EXPRESSED IN ADULT LIVER, SIGNAL = 2.6; EXPRESSED IN HEART, SIGNAL = 3.4; NT HIT: gi14779492, EVALUE 2.00e-64; EST_HUMAN HIT: AI214482.1, EVALUE 8.00e-62; SWISSPROT HIT: Q04660, EVALUE 7.80e+00
aggtctcgttggagaatcaacaagccaaaaattccaaaaaggaacgtttgctaggttctgcatcatctgaagatatctggagaaactactccttggatgaaattgagaggaacttttgtctacaa

SEQ ID NO: 18790 - DNA, 129 bp, Homo sapiens
  MAP TO AF196972.1; EXPRESSED IN PLACENTA, SIGNAL = 0.76; EXPRESSED IN ADULT LIVER, SIGNAL = 0.83; EXPRESSED IN LUNG, SIGNAL = 1.7; EXPRESSED IN FETAL LIVER, SIGNAL =   1; EXPRESSED IN BRAIN, SIGNAL = 1.7; NT HIT: gi14759602, EVALUE 1.00e-62; EST_HUMAN HIT: BE906545.1, EVALUE 2.00e-62; SWISSPROT HIT: Q9UET6, EVALUE 3.00e-18
atgggacggacgtcaaaggacaagcgggatgtctactaccgcctggccaaggagaatggctggcgtgctcgcagcgccttcaaactgctacaactggataaggaattccaactcttccaaggtccctga

SEQ ID NO: 18791 - DNA, 153 bp, Homo sapiens
  MAP TO AL109767.3; EXPRESSED IN BRAIN, SIGNAL = 2.3; EXPRESSED IN HELA, SIGNAL = 2.4; EXPRESSED IN ADULT LIVER, SIGNAL = 2.3; EXPRESSED IN PLACENTA, SIGNAL = 2.5; EXPRESSED IN HEART, SIGNAL = 1.9; EXPRESSED IN FETAL LIVER, SIGNAL = 3.1; SWISSPROT HIT: P13983, EVALUE 8.80e-01; NT HIT: gi7657147, EVALUE 3.40e-02; EST_HUMAN HIT: BG256699.1, EVALUE 1.30e-02
cttcttgagggtcttggtgctgccacctgaccgtgaggcctctgtgcagaaccggccttgtagggcgggaagaggtgggaggaggggtgactgactggcttgtgacttgtggtgggggttgcaggttgaaacaataagaatgaggagcggcat

SEQ ID NO: 18792 - DNA, 157 bp, Homo sapiens
  MAP TO AC007096.3; EXPRESSED IN BRAIN, SIGNAL = 1.9; EXPRESSED IN PLACENTA, SIGNAL = 2.2; EXPRESSED IN HEART, SIGNAL = 3.4; EXPRESSED IN ADULT LIVER, SIGNAL = 1.9; SWISSPROT HIT: P42660, EVALUE 2.00e-03; NT HIT: AF106704.2, EVALUE 2.00e-83; EST_HUMAN HIT: AL552903.1, EVALUE 4.00e-83
ctttttggatcttcccagcttcaatgtaaggggtgagaaataatggctgtcctgagtctcccttaggtggcatggaaacacttctgtatagggagcgaaacagcccatcacaggggccaggcatcaacaggaccagcgaaacaatcaccttccacat

SEQ ID NO: 18793 - DNA, 208 bp, Homo sapiens
  MAP TO AC004209.1; EXPRESSED IN ADULT LIVER, SIGNAL = 0.54; EXPRESSED IN PLACENTA, SIGNAL = 0.63; SWISSPROT HIT: P36915, EVALUE 4.00e-35; NT HIT: gi15304504, EVALUE 1.00e-111; EST_HUMAN HIT: AL538485.1, EVALUE 1.00e-111
gttgtgaatttcccgccagcactttatgagtatgtgactggagaacttggactggccctggtgctggttttgaacaaggtggatctggccccgccagctcttgtggttgcctggaagcattatttccatcaacactatccccagctccacgtcgtccttttcacctcttttcctcgggacccccgcaccccacaggaccctagtagtg

SEQ ID NO: 18794 - DNA, 255 bp, Homo sapiens
  MAP TO AC008983.6; EXPRESSED IN PLACENTA, SIGNAL = 0.76; EXPRESSED IN ADULT LIVER, SIGNAL = 0.77; EXPRESSED IN BRAIN, SIGNAL = 0.76; EXPRESSED IN BONE MARROW, SIGNAL = 0.67; EST_HUMAN HIT: BF365485.1, EVALUE 3.00e-23; SWISSPROT HIT: O88553, EVALUE 6.00e-26; NT HIT: gi14768148, EVALUE 0.00e+00
gtggctcctgagggatgatggctgattgaaggctttcccacaatctttacactcgtaggcttctctcctgtgtggtttctctggtgcaaaatcaggttaaagttcctcgtgaaggttttcccacactgactacattcaaatggcttctctccggtatgggttctcatgtgtcgccggagattcgaggaatatttgaaggcttgcccacattcttgacagtcaaagcacttctctgcagtatgagtcttctcatgc

SEQ ID NO: 18795 - DNA, 86 bp, Homo sapiens
  MAP TO AF241735.1; EXPRESSED IN HEART, SIGNAL = 3.5; EXPRESSED IN ADULT LIVER, SIGNAL = 1.5; EXPRESSED IN BRAIN, SIGNAL = 1.6; EST_HUMAN HIT: AA807966.1, EVALUE 3.90e-01; NT HIT: gi14773644, EVALUE 2.70e-01
aaggctgtctccttgtagatggggttaacgaacagaagttcccaggccactggctgcagggtgcgtttgtctcccaggtcttgcat

SEQ ID NO: 18796 - DNA, 156 bp, Homo sapiens
  MAP TO AC010499.4; EXPRESSED IN FETAL LIVER, SIGNAL = 0.55; EXPRESSED IN ADULT LIVER, SIGNAL = 0.64; EST_HUMAN HIT: BF213286.1, EVALUE 5.10e-02
tggtcctgcctcttctggtttgatcaccttttcttccgccttctcctcggttgtccttcttctcttgttcagaatgccctgtactatcttctgtgcaggtctaggtctctgtagttgttcattggccgaagtagtttctttttcctcaaattcctt

SEQ ID NO: 18797 - DNA, 135 bp, Homo sapiens
  MAP TO AC005576.1; EXPRESSED IN BRAIN, SIGNAL = 1.5; EXPRESSED IN BONE MARROW, SIGNAL = 1.3; EXPRESSED IN PLACENTA, SIGNAL = 1.1; EXPRESSED IN ADULT LIVER, SIGNAL = 1.3; EXPRESSED IN LUNG, SIGNAL = 1.9; SWISSPROT HIT: P74217, EVALUE 3.50e+00; EST_HUMAN HIT: AA248816.1, EVALUE 5.00e-11; NT HIT: AF280107.1, EVALUE 1.00e-10
ctggggagtccgtctggtattgccaatgggaatcctctcggggaactgccctggtgccctcttggaagcctggctcatgaagccggtgggtatctgcgtaggactgggctagaaagtaaactctttcttgttcat

SEQ ID NO: 18798 - DNA, 378 bp, Homo sapiens
  MAP TO AC019106.3; EXPRESSED IN BRAIN, SIGNAL = 1.4; EXPRESSED IN ADULT LIVER, SIGNAL = 1.4; NT HIT: U72490.1, EVALUE 3.50e-01; SWISSPROT HIT: P26846, EVALUE 4.00e+00; EST_HUMAN HIT: BF507412.1, EVALUE 3.30e-02
tcatagagcaggaacattttctgttttgatcactgatgagtccctaacatctagccaagtttttggcacatcatagttgctcaataatatctgttcaatgaatatgaatttagtcactattttcacgcatacaccgatgcctactgttgtctggtcttcccctcgcagccgtgtactccgcctctcttctttctcaccacatcccacaattcccatcccactagcagctttcttcacaacaatgaggttacatacttgattaaggaaccatctcttatggatctttctcaggtgcttagtgtgacaccatgtgtggctgtgccctcttagaggtgagagctgagctcctgatttggcttctttatgcccttccttcat

SEQ ID NO: 18799 - DNA, 149 bp, Homo sapiens
  MAP TO AC008994.3; EXPRESSED IN LUNG, SIGNAL = 3.1; EXPRESSED IN BRAIN, SIGNAL = 5.8; EXPRESSED IN BONE MARROW, SIGNAL = 4.3; EXPRESSED IN PLACENTA, SIGNAL = 7.1; EXPRESSED IN HEART, SIGNAL = 6.4; EXPRESSED IN ADULT LIVER, SIGNAL = 6.2; NT HIT: U55927.1, EVALUE 3.30e-02; SWISSPROT HIT: P00520, EVALUE 3.00e-01; EST_HUMAN HIT: BF965294.1, EVALUE 1.90e-01
gtctcaccttgattgtcctggcatgggggccttccatggcacagaccagggcaatgctgtggtccctggctcagggactgtctttgccccacggggaatgctgtgagggggtgcctggagtcccagcgttacgcattgaccagcgcatg

SEQ ID NO: 18800 - DNA, 186 bp, Homo sapiens
  MAP TO AC004791.1; EXPRESSED IN ADULT LIVER, SIGNAL = 1.8; EXPRESSED IN HEART, SIGNAL = 1.9; EXPRESSED IN HELA, SIGNAL = 0.77; EXPRESSED IN BRAIN, SIGNAL = 0.85; EXPRESSED IN PLACENTA, SIGNAL = 4.1; NT HIT: D26480.1, EVALUE 2.00e-22; SWISSPROT HIT: P78329, EVALUE 3.00e-13; EST_HUMAN HIT: AV645396.1, EVALUE 3.00e-22
ctaaagtccgccctccgcatgcatgatcagctctggcttcctgccgggctccatgtggtgccgcaggaagcggaagcccagcagcgtgagtgccaggaccaccttcatctcggccacggcgaacacctgccccatgcagatcctgcgggcagatgagaggactctgactgtgcccaagacccgcat

SEQ ID NO: 18801 - DNA, 170 bp, Homo sapiens
  MAP TO AC005327.1; EXPRESSED IN ADULT LIVER, SIGNAL = 2.5; EXPRESSED IN LUNG, SIGNAL = 4.6; EXPRESSED IN BRAIN, SIGNAL = 1.9; EXPRESSED IN BONE MARROW, SIGNAL = 2.8; EXPRESSED IN PLACENTA, SIGNAL = 1.5; NT HIT: AF114491.1, EVALUE 7.00e-16; SWISSPROT HIT: P52966, EVALUE 7.50e+00; EST_HUMAN HIT: BG721006.1, EVALUE 1.00e-15
accatgtggctttctccatcgccggccccacagacaccagcggcgcctcccgtttctcagacgcatccaaggggtcccgctggagcttcctcgctaccacccccagcggggccccaaagtacttaccgagaaagacgagaaagacgcggcctcccatggttccagctgag

SEQ ID NO: 18802 - DNA, 173 bp, Homo sapiens
  MAP TO AC008795.5; EXPRESSED IN BONE MARROW, SIGNAL = 1.3; EXPRESSED IN HEART, SIGNAL = 2.6; EXPRESSED IN ADULT LIVER, SIGNAL = 1.1; SWISSPROT HIT: P78695, EVALUE 1.10e+00; EST_HUMAN HIT: BG390661.1, EVALUE 1.00e-92; NT HIT: AF117258.1, EVALUE 6.00e-01
aattatgatgacaatttcaatgtaaatggacctggagaaggagtaaaggttgatccagaagatactaacttaaatcaagacagtgccaaagaattggaagatagtccccaggaaaatgtcagtgtcacagagatcattaaaccatgtgatgatccaaaaagtgaagctaaaag

SEQ ID NO: 18803 - DNA, 222 bp, Homo sapiens
  MAP TO AC004181.1; EXPRESSED IN PLACENTA, SIGNAL = 0.73; EXPRESSED IN ADULT LIVER, SIGNAL = 1.1; EXPRESSED IN HEART, SIGNAL = 1.5; EXPRESSED IN FETAL LIVER, SIGNAL = 1.2; EXPRESSED IN BRAIN, SIGNAL = 1.2; SWISSPROT HIT: O62732, EVALUE 1.20e-01; EST_HUMAN HIT: AU143330.1, EVALUE 1.00e-122; NT HIT: gi14782292, EVALUE 1.00e-122
cttcaaacctccccatgacttcctgccactcgtcctccagctcaccctggagcttctgtctccattcccgctccttggaggcatcatcttcttcctcctcttcagcagaatcccaggggggtccccagcccaaaatttggccaggggtctccccatccttattctttattcccatggcggagggacagcggcttagcagcgggaggaagaaatcggtgtagg

SEQ ID NO: 18804 - DNA, 169 bp, Homo sapiens
  MAP TO AC022336.12; EXPRESSED IN BONE MARROW, SIGNAL = 2.2; EXPRESSED IN ADULT LIVER, SIGNAL = 3.3; EXPRESSED IN PLACENTA, SIGNAL = 4.5; EXPRESSED IN BRAIN, SIGNAL = 4.7; SWISSPROT HIT: O70309, EVALUE 4.00e-28; EST_HUMAN HIT: BG328621.1, EVALUE 3.00e-90; NT HIT: J05633.1, EVALUE 2.00e-90
cttgcagacggctgcctggagtactgcatcaaagcccccctcaggggcatctcggttccgggacaccctctgtttccgaacttcctcattgaagctgtccactctgtctgtgagaggcagcagatggcggaacccaaaggaggggacgcaatttggaaacaacttgtaa

SEQ ID NO: 18805 - DNA, 231 bp, Homo sapiens
  MAP TO AC009482.4; EXPRESSED IN HELA, SIGNAL = 1.3; EXPRESSED IN PLACENTA, SIGNAL = 1.4; EXPRESSED IN HEART, SIGNAL = 2.1; EXPRESSED IN ADULT LIVER, SIGNAL = 0.74; EXPRESSED IN FETAL LIVER, SIGNAL = 3.9; EXPRESSED IN LUNG, SIGNAL = 1.2; SWISSPROT HIT: Q9PD94, EVALUE 4.10e-01; EST_HUMAN HIT: Z20530.1, EVALUE 7.80e-02
ctggggcccccttcttctcctcctgggggcaccattatggtctgctcgttcataaccccttcactcagttcaatcgctatttcgccagacttcagatgtactaaggcagtcaattcactctcatgagatgaaagcatctgtatttgaacaggctgagataccaagtttctttctttcattttaaagttccaagcagaattattatgcccatcacaggatgaccagtatggc

SEQ ID NO: 18806 - DNA, 359 bp, Homo sapiens
  MAP TO AC011525.4; EXPRESSED IN ADULT LIVER, SIGNAL =   1; EXPRESSED IN HEART, SIGNAL = 1.1; EXPRESSED IN FETAL LIVER, SIGNAL = 0.95; EXPRESSED IN HELA, SIGNAL = 0.76; NT HIT: gi16166716, EVALUE 3.40e-01; SWISSPROT HIT: P34340, EVALUE 4.90e-02; EST_HUMAN HIT: BF572330.1, EVALUE 3.20e-02
cctctttgccaccaagaaaggaagagagatattaagaactaagaacggggcgctgttctcccacttccaccacctctatccatcaccatctgacaaaggctccagcacacgcttcgagaaaaatattgagaagaaaaagaacctagaaacagggcaatttggagaggccttcggggagccaggggtgcccaagcggcccactcgccagctgcaattaacaagaggacttgtcagggaagagggggaagctgggcgtgggatttccaggacacaactcacaggccatcagccggagagagcatcctgggggctgctggctggtcctctgccctctcccggctccagccctcctcagacca

SEQ ID NO: 18807 - DNA, 243 bp, Homo sapiens
  MAP TO AC006127.1; EXPRESSED IN BRAIN, SIGNAL = 1.9; EXPRESSED IN HELA, SIGNAL = 4.3; EXPRESSED IN BONE MARROW, SIGNAL = 1.5; EXPRESSED IN PLACENTA, SIGNAL = 1.6; EXPRESSED IN HEART, SIGNAL = 2.2; EXPRESSED IN ADULT LIVER, SIGNAL = 1.1; EXPRESSED IN LUNG, SIGNAL = 2.8; EXPRESSED IN FETAL LIVER, SIGNAL = 2.1; NT HIT: gi4507072, EVALUE 0.00e+00; SWISSPROT HIT: P51532, EVALUE 2.00e-45; EST_HUMAN HIT: BI768577.1, EVALUE 0.00e+00
atccgttggaagtacatgattgtggacgaaggtcaccgcatgaagaaccaccactgcaagctgacgcaggtgctcaacacgcactatgtggcaccccgccgcctgctgctgacgggcacaccgctgcagaacaagcttcccgagctctgggcgctgctcaacttcctgctgcccaccatcttcaagagctgcagcaccttcgagcagtggtttaacgcaccctttgccatgaccggggaaaag

SEQ ID NO: 18808 - DNA, 298 bp, Homo sapiens
  MAP TO AC010646.4; EXPRESSED IN ADULT LIVER, SIGNAL = 1.3; SWISSPROT HIT: P49918, EVALUE 7.00e-03; EST_HUMAN HIT: W26021.1, EVALUE 1.00e-128; NT HIT: gi13375755, EVALUE 2.00e-88
gccatgtgtcacggcgcccagccaaccgagaggagaaagagtcctggaaatctggacccagtgggtgtcccagaggcttgggtcgggccactcagaagggctgcggggcagggctttctccctagtgctgacctggctttggggtgggggcagggagctcagcagggcctccagctgcctgagctttgcctgtgcacaccccacctcgtgctggagctccaagaactctccgtactggtcctggaacactgcgacatagcggctccgttccctctcactgctcactggcgggtactta

SEQ ID NO: 18809 - DNA, 177 bp, Homo sapiens
  MAP TO AL121886.22; EXPRESSED IN FETAL LIVER, SIGNAL = 0.78; EXPRESSED IN BONE MARROW, SIGNAL = 1.1; EXPRESSED IN ADULT LIVER, SIGNAL = 0.94; EXPRESSED IN BRAIN, SIGNAL = 0.84; SWISSPROT HIT: P12272, EVALUE 3.30e+00; EST_HUMAN HIT: AA237086.1, EVALUE 2.00e-82; NT HIT: gi7705768, EVALUE 1.00e-82
atttctgactacatgatgctgccctacacagccaccctatcaaagcggaatcgagagtgtctccaggagagtgatgagatcccaagggactttaccaccctcttcgacctgtccatcttccagctggataccacctccttccacagcgtcatcgagtcagtacctgtgggcctctga

SEQ ID NO: 18810 - DNA, 194 bp, Homo sapiens
  MAP TO AC010203.13; EXPRESSED IN HEART, SIGNAL =   2; EXPRESSED IN ADULT LIVER, SIGNAL = 1.9; EXPRESSED IN BRAIN, SIGNAL = 1.9; EXPRESSED IN BONE MARROW, SIGNAL = 1.6; EXPRESSED IN PLACENTA, SIGNAL = 1.9; SWISSPROT HIT: P13259, EVALUE 1.90e+00; EST_HUMAN HIT: AJ239404.1, EVALUE 2.00e-51; NT HIT: gi14754096, EVALUE 1.00e-105
ttccatctcccaacctctatagccagctgaatgcactacagtttactgtggatgaaagaagcattctatggttaaatcaatttctgttggatttaaaacagagtcttaatcagttcatggctgtgtacaagttgaatgacaattcaaaatctgacgagcatgttgatgttcgagttgatggcttaatgctaaag

SEQ ID NO: 18811 - DNA, 79 bp, Homo sapiens
  MAP TO AL031590.2; EXPRESSED IN BRAIN, SIGNAL = 1.6; EXPRESSED IN LUNG, SIGNAL = 1.5; EXPRESSED IN HELA, SIGNAL = 1.6; EXPRESSED IN BONE MARROW, SIGNAL = 1.6; EXPRESSED IN PLACENTA, SIGNAL = 1.4; EXPRESSED IN HEART, SIGNAL = 1.9; EXPRESSED IN ADULT LIVER, SIGNAL = 1.4; SWISSPROT HIT: P05554, EVALUE 4.80e+00; EST_HUMAN HIT: BF762618.1, EVALUE 6.00e-03
tcatctggcatacacggggtgggggctgccttccttccccaggtcctcctgcagctggagagaggaaaggagggcgggg

SEQ ID NO: 18812 - DNA, 189 bp, Homo sapiens
  MAP TO AC009509.7; EXPRESSED IN BONE MARROW, SIGNAL = 1.6; EXPRESSED IN PLACENTA, SIGNAL = 2.3; EXPRESSED IN ADULT LIVER, SIGNAL = 2.2; EXPRESSED IN FETAL LIVER, SIGNAL = 1.5; EXPRESSED IN LUNG, SIGNAL =   2; EXPRESSED IN BRAIN, SIGNAL = 1.9; EXPRESSED IN HELA, SIGNAL = 2.2; SWISSPROT HIT: P39533, EVALUE 5.60e+00; EST_HUMAN HIT: BG760715.1, EVALUE 1.00e-102; NT HIT: AB033056.1, EVALUE 1.00e-102
gttctagagcctcgttttaacgtagaaacaatggctcagttattgaacatcccacccaataagactttgctgcgaagacatttggccactcatttcaaccttctgattggggctgaggcacagcaccagaagcgagatgccatggagctgccggattatgtacttctaacagctactgccaaagtgaag

SEQ ID NO: 18813 - DNA, 133 bp, Homo sapiens
  MAP TO AC008624.5; EXPRESSED IN HELA, SIGNAL = 0.5; EXPRESSED IN PLACENTA, SIGNAL = 0.51; EXPRESSED IN ADULT LIVER, SIGNAL = 0.72; EXPRESSED IN FETAL LIVER, SIGNAL = 0.49; SWISSPROT HIT: Q58442, EVALUE 7.80e+00; NT HIT: AF414111.1, EVALUE 7.00e+00
catccagggagtaaccaaggccataacttggtgccacatatccaagaagttttgtttgaggccaaccaatatgtttctggatgcattgctcattctgtaccatgccagtcagtacttggtaatattttcccat

SEQ ID NO: 18814 - DNA, 169 bp, Homo sapiens
  MAP TO AC005789.1; EXPRESSED IN LUNG, SIGNAL = 5.7; EXPRESSED IN FETAL LIVER, SIGNAL = 3.1; EXPRESSED IN BRAIN, SIGNAL = 5.4; EXPRESSED IN BONE MARROW, SIGNAL =   5; EXPRESSED IN PLACENTA, SIGNAL = 4.4; EXPRESSED IN HEART, SIGNAL =   7; EXPRESSED IN ADULT LIVER, SIGNAL = 4.7; EST_HUMAN HIT: BF983829.1, EVALUE 3.00e-90; SWISSPROT HIT: P50551, EVALUE 3.00e-04
acaaccttggagtgtacactgaagccaggcttggtttacaacaaggtgaatcccatctttcaccactggagcctgggtgactgcaagtttggactgacgtttcagagccctgcagaggctgatgagttccagaagagcctgctggctgcgctggccgcactgggtcgag

SEQ ID NO: 18815 - DNA, 231 bp, Homo sapiens
  MAP TO AC009004.5; EXPRESSED IN PLACENTA, SIGNAL = 1.7; EXPRESSED IN ADULT LIVER, SIGNAL = 1.5; EXPRESSED IN FETAL LIVER, SIGNAL = 2.8; NT HIT: gi14758173, EVALUE 1.00e-127; EST_HUMAN HIT: BI871086.1, EVALUE 1.00e-127; SWISSPROT HIT: P25685, EVALUE 2.00e-39
ctatattggaagaacctgctcaagtacggttcttgatgtctggggaatcctttcggggaagatcacttcaaactcaataatgaggtccccacgtttctcgggtgttttggggagggggaggccttctccaggaacttttcgccgcatgccaggcctgataacatctttgaatacgacgggtatcgtcctgccgtccagagtggggacgttcactgtgcagccacacagagc

SEQ ID NO: 18816 - DNA, 273 bp, Homo sapiens
  MAP TO AC004753.1; EXPRESSED IN PLACENTA, SIGNAL = 0.64; EXPRESSED IN ADULT LIVER, SIGNAL =   1; EXPRESSED IN HEART, SIGNAL = 0.95; EXPRESSED IN HELA, SIGNAL = 0.93; SWISSPROT HIT: P08563, EVALUE 6.60e+00; NT HIT: AJ132478.2, EVALUE 6.40e-02; EST_HUMAN HIT: BF763844.1, EVALUE 2.40e-02
agggtccattgcaagcaagtggagaatcagccacatgccatgtactacgtggcaggggtggcagcccgagccctgagatcggagagcctatcccatgtgacgcatgtcagccacacatcacccaggcctgcgatgaaggacaagcgcacgctccgctctgatgacacgcgcagctggcacggacccaggagggatcatggacgtgaggagacgtcagtgtccaaagagggcccatcagcccagagaaagttgacacagaatcatgaaacataa

SEQ ID NO: 18817 - DNA, 136 bp, Homo sapiens
  MAP TO AC004191.1; EXPRESSED IN ADULT LIVER, SIGNAL = 2.1; EXPRESSED IN LUNG, SIGNAL = 1.8; EXPRESSED IN BRAIN, SIGNAL =   3; EXPRESSED IN PLACENTA, SIGNAL = 2.5; EXPRESSED IN BONE MARROW, SIGNAL = 1.7; EST_HUMAN HIT: AL119158.1, EVALUE 5.00e-57; SWISSPROT HIT: P49245, EVALUE 1.50e+00; NT HIT: AL163227.2, EVALUE 1.00e-56
atgtgggaaagtttggaacctcctaaagacttgttgaatgcctttgacaaaaatgctgatggtgatatgaacaataaggtccaggctgaggtggtctcagatggagatgaggaacttgttgggaactggagcaaag

SEQ ID NO: 18818 - DNA, 123 bp, Homo sapiens
  MAP TO AC010238.4; EXPRESSED IN BRAIN, SIGNAL = 1.7; EXPRESSED IN HELA, SIGNAL = 2.1; EXPRESSED IN BONE MARROW, SIGNAL = 1.5; EXPRESSED IN PLACENTA, SIGNAL =   2; EXPRESSED IN HEART, SIGNAL = 1.6; EXPRESSED IN ADULT LIVER, SIGNAL =   2; EST_HUMAN HIT: BE779050.1, EVALUE 6.00e-01; SWISSPROT HIT: Q12024, EVALUE 3.50e+00
agcccaggtatgggggaggaaggatcctgccgctgaactctacacccagggctcgggatgtgttgaccccttcttcttgcagcttggagaaagttgccacactgtctgggggcagtttggaac

SEQ ID NO: 18819 - DNA, 169 bp, Homo sapiens
  MAP TO AC002083.1; EXPRESSED IN ADULT LIVER, SIGNAL = 0.94; EXPRESSED IN PLACENTA, SIGNAL = 0.99; EST_HUMAN HIT: BE782752.1, EVALUE 2.20e-01; SWISSPROT HIT: O00222, EVALUE 7.00e-22; NT HIT: AJ236921.1, EVALUE 5.00e-69
gatgaagctgattggtccagtggccgatgactttgtactctgtgcttttgttggttatttgatactggaagatatcataacgtccaggagcatctccgttttcattaaaagtgacaggagtgccagcactgcctataaagatttagaaaacaatgttaataaagtttta

SEQ ID NO: 18820 - DNA, 172 bp, Homo sapiens
  MAP TO AC004939.1; EXPRESSED IN HELA, SIGNAL = 0.74; EXPRESSED IN BRAIN, SIGNAL = 0.72; EXPRESSED IN ADULT LIVER, SIGNAL = 0.61; EST_HUMAN HIT: BF434645.1, EVALUE 4.00e-92; SWISSPROT HIT: P53004, EVALUE 1.00e-25; NT HIT: gi14747482, EVALUE 3.00e-92
cttttcttctctgtctccagacacactgtcattttcatatactgatcttcctttcgctcttccaaagtggcagacacaagagaaagctccccaaagagggagaccagccaggtcaggcgagagatgccgctgaatgcagggaagccaaaccgctcttcttccaacgggccag

SEQ ID NO: 18821 - DNA, 153 bp, Homo sapiens
  MAP TO AC035142.2; EXPRESSED IN BONE MARROW, SIGNAL = 1.4; EXPRESSED IN ADULT LIVER, SIGNAL = 1.2; EXPRESSED IN LUNG, SIGNAL = 1.1; EXPRESSED IN FETAL LIVER, SIGNAL = 1.6; EXPRESSED IN HELA, SIGNAL = 1.2; EXPRESSED IN BRAIN, SIGNAL = 1.4; EST_HUMAN HIT: AW951210.1, EVALUE 8.00e-81; SWISSPROT HIT: P20936, EVALUE 9.00e-24; NT HIT: M23612.1, EVALUE 6.00e-81
gtggtatcacggaaaacttgacagaacgatagcagaagaacgcctcaggcaggcagggaagtctggcagttatcttataagagagagtgatcggaggccagggtcctttgtactttcatttcttagccagatgaatgttgtcaaccattttag

SEQ ID NO: 18822 - DNA, 209 bp, Homo sapiens
  MAP TO AC008639.6; EXPRESSED IN BONE MARROW, SIGNAL = 1.3; EXPRESSED IN PLACENTA, SIGNAL = 1.4; EXPRESSED IN HEART, SIGNAL = 2.9; EXPRESSED IN ADULT LIVER, SIGNAL = 1.6; NT HIT: AL163282.2, EVALUE 6.00e-51; EST_HUMAN HIT: BG108072.1, EVALUE 9.00e-57; SWISSPROT HIT: P08366, EVALUE 1.40e+00
cactgccgcaaacttctgcctggatatctgggcatttccatacatcctctgaaatctaggcggaggttcccaaacctcaattcttgatttctgtgcacccacaggctcaacaccatgtggaagctgccaaggctttgggcttgcaccctctgaagtgacagcctgagctctatgttggctccttttagccacagctggagctgaagcag

SEQ ID NO: 18823 - DNA, 199 bp, Homo sapiens
  MAP TO AL121919.19; EXPRESSED IN BONE MARROW, SIGNAL = 0.92; EXPRESSED IN PLACENTA, SIGNAL = 0.77; EXPRESSED IN ADULT LIVER, SIGNAL = 0.9; EXPRESSED IN FETAL LIVER, SIGNAL = 0.94; SWISSPROT HIT: P01212, EVALUE 2.50e+00; NT HIT: U29907.1, EVALUE 7.00e-01; EST_HUMAN HIT: BG002258.1, EVALUE 2.60e-01
cgaaattgcccattgggctgtgcttgatactgccacgccccatggagggcatctcagggctaaatgctggtctgtaccaccaggacaagaggatgtctcccccatgcaaaggccaggggaccatgcaactctctgctttctcgttgggccgtcctgtgacaggcacaggtgccatcgatatcacctctgtgctctccag

SEQ ID NO: 18824 - DNA, 235 bp, Homo sapiens
  MAP TO AC012000.3; EXPRESSED IN ADULT LIVER, SIGNAL = 1.5; EXPRESSED IN BRAIN, SIGNAL = 1.3; EXPRESSED IN HELA, SIGNAL = 1.4; SWISSPROT HIT: P97857, EVALUE 2.10e-02; NT HIT: gi14721097, EVALUE 1.00e-129; EST_HUMAN HIT: BG461374.1, EVALUE 1.20e+00
cttttggtcattacttgtcccacgtgactcttgacacagaagactctccgagtctgaatgcctacaccacacgtggcttctccattccagccaatggttgcattaagggcagttaccaatgtgtcctcagaacaagggccccaaggcgatgtctcccagtgaagctgcatacaggaatggtcattacacaaacgatgctcttggagagcctgactagggggacatggctttccac

SEQ ID NO: 18825 - DNA, 90 bp, Homo sapiens
  MAP TO AC004239.1; EXPRESSED IN HEART, SIGNAL =   1; EXPRESSED IN ADULT LIVER, SIGNAL = 0.63; EXPRESSED IN BRAIN, SIGNAL = 0.69; EST_HUMAN HIT: BE410898.1, EVALUE 1.00e-01; NT HIT: X77576.1, EVALUE 1.10e+00
gaagtacgtgttcagaggcaaaaagtgagctgtgggaagacagatgctcccagacatccatttcccaaccattgcttcctgaacatcaag

SEQ ID NO: 18826 - DNA, 271 bp, Homo sapiens
  MAP TO AC011311.11; EXPRESSED IN BONE MARROW, SIGNAL = 0.48; EXPRESSED IN ADULT LIVER, SIGNAL = 0.61; EXPRESSED IN HELA, SIGNAL = 0.47; EXPRESSED IN BRAIN, SIGNAL = 0.52; EXPRESSED IN LUNG, SIGNAL = 0.55; EST_HUMAN HIT: BF827670.1, EVALUE 9.20e-02; SWISSPROT HIT: Q9P2K6, EVALUE 3.00e-06; NT HIT: gi14732031, EVALUE 6.30e-02
ctgaggggtccagcctccaattacataaagtttattattcactgtcactacagcatgacatgccaattgcagtggaaggggagacacccttttccaattgtcccgttctacagagtacttatcaacacagtttgtaataagatactggtttttaattttcatctgtcctcctataacataaaggtcattatgaatactgcccagagcatagagttctcgaaattcagctgtgcataacttttcccaaaactggtttcctctatcatgatac

SEQ ID NO: 18827 - DNA, 288 bp, Homo sapiens
  MAP TO AJ009613.3; EXPRESSED IN ADULT LIVER, SIGNAL = 1.2; EXPRESSED IN BRAIN, SIGNAL = 1.4; EXPRESSED IN PLACENTA, SIGNAL = 1.3; EST_HUMAN HIT: BG491339.1, EVALUE 0.00e+00; SWISSPROT HIT: O83325, EVALUE 2.20e-01; NT HIT: gi13374568, EVALUE 2.60e-01
gcctgttgcagtctccaaggcaccatgaatgccatcgtggctctctgccacttctgcgagctccacggcccccgcactctcttctgcacggaggtgctgcacgccccacttcctcaaggggatgggaatgaggacagtcctggccagggtgagcaggcggaagaagaggaaggtggcattcagatgaacagtcggatgcgtgcgcacagccccgcagagggggccagcgtcgagtccagcagcccggggcccaaaaagtcggacatgtgcgaggcaagtgtctttggg

SEQ ID NO: 18828 - DNA, 404 bp, Homo sapiens
  MAP TO AC004091.1; EXPRESSED IN BRAIN, SIGNAL = 3.2; EXPRESSED IN BONE MARROW, SIGNAL = 1.1; EXPRESSED IN ADULT LIVER, SIGNAL = 2.4; EST_HUMAN HIT: BF891860.1, EVALUE 1.00e-60; SWISSPROT HIT: O02705, EVALUE 4.40e+00; NT HIT: AL163303.2, EVALUE 4.00e-47
cttggccccttttagccatggctggagcacctgggatgcagggtaccaagtccctacgctgcacacagtagggagaccctgggtctggcctgaaaaaccattttttccttctaggcctctgggcctgtggtgggaggggctgctgcaaaggtctctggcatgttctggagacattttccccattgctgtggtgataaacattcagctcctcgttactcatgcaaatttctgcagcaggcttgaatttctccccagaaaatcgttttttcttttctattgcatcatcagactgcaaattttccaaacttgtatgttcttcttcctcctgaacactttgcagcttagaaatttctaccaccagatatcctaattcatctctctcaagttcaaagttccacagattc

SEQ ID NO: 18829 - DNA, 241 bp, Homo sapiens
  MAP TO AL121928.13; EXPRESSED IN BONE MARROW, SIGNAL =   1; EXPRESSED IN ADULT LIVER, SIGNAL = 0.96; NT HIT: gi14746263, EVALUE 0.00e+00; EST_HUMAN HIT: BF803270.1, EVALUE 1.00e-130; SWISSPROT HIT: Q92538, EVALUE 2.00e-33
gttgggaaggatgacgttgataactccaagccagggcccagccgcccaggcccttcacccctgatcaatcaatacagcctaacagtgggactggatttggggccacacgacactaagtctctgcttaagtgtgtggaatcgctgtccttcattgtgcgtgatgctgcccacatcacacctgacaactttgagctctgcgtcaagactctccggatctttgtggaggccagtctgaatggcg

SEQ ID NO: 18830 - DNA, 259 bp, Homo sapiens
  MAP TO AC023818.3; EXPRESSED IN ADULT LIVER, SIGNAL = 1.9; EXPRESSED IN LUNG, SIGNAL =   2; EXPRESSED IN BRAIN, SIGNAL = 1.7; EXPRESSED IN BONE MARROW, SIGNAL =   1; EXPRESSED IN PLACENTA, SIGNAL = 1.4; NT HIT: gi14777715, EVALUE 0.00e+00; EST_HUMAN HIT: BE895254.1, EVALUE 0.00e+00; SWISSPROT HIT: P36774, EVALUE 1.00e-28
accgcctggacattagggcagcccggattcttctggataatgaccattacgccatggaaaaattgaagaaaagagtactggaatacttggctgtcagacagctcaaaaataacctgaagggcccaatcctatgctttgttggccctcctggagttggtaaaacaagtgtgggaagatcagtggccaagactctaggtcgagagttccacaggattgcacttggaggagtatgtgatcagtctgacattcgaggacacag

SEQ ID NO: 18831 - DNA, 117 bp, Homo sapiens
  MAP TO AC010267.5; EXPRESSED IN LUNG, SIGNAL = 1.6; EXPRESSED IN BRAIN, SIGNAL =   4; EXPRESSED IN BONE MARROW, SIGNAL =   3; EXPRESSED IN PLACENTA, SIGNAL = 3.6; EXPRESSED IN HEART, SIGNAL = 3.6; EXPRESSED IN ADULT LIVER, SIGNAL = 3.9; SWISSPROT HIT: P43894, EVALUE 6.00e+00; NT HIT: AL163303.2, EVALUE 4.00e-10; EST_HUMAN HIT: BF736370.1, EVALUE 2.00e-19
atgaatgagtttgagaggtccaagactttagtggaagaagtatttgcagatgtggtggaaatggaaagagaactaaaattagaagtggagactaatgatgggactgaattgctgtaa

SEQ ID NO: 18832 - DNA, 132 bp, Homo sapiens
  MAP TO AC004398.1; EXPRESSED IN ADULT LIVER, SIGNAL = 0.51; EXPRESSED IN HEART, SIGNAL =   1; EXPRESSED IN BRAIN, SIGNAL = 0.44; EXPRESSED IN HELA, SIGNAL = 0.81; NT HIT: AL161513.2, EVALUE 6.90e+00
atggtagagaaagcttttattgttttagtgaatgcatatatcatcataatcagaatgttcatggaaataatcagccttaaaggaaataagaggaagaaacttagtatcatgctattggacactggagataag

SEQ ID NO: 18833 - DNA, 248 bp, Homo sapiens
  MAP TO AC020894.3; EXPRESSED IN BRAIN, SIGNAL =   2; EXPRESSED IN BONE MARROW, SIGNAL = 1.7; EXPRESSED IN ADULT LIVER, SIGNAL = 2.1; EXPRESSED IN PLACENTA, SIGNAL = 1.9; EST_HUMAN HIT: AA664974.1, EVALUE 0.00e+00; SWISSPROT HIT: P54136, EVALUE 1.00e-42; NT HIT: gi15149475, EVALUE 0.00e+00
gtctattgcacgtctggccaatattgatgaagaaatgctccaaaaagctgctcgagaaaccaagattcttttggatcatgagaaggaatggaaactaggccggtgcattttacggttccctgagattctgcaaaagattttagatgacttatttctccacactctctgtgattatatatatgagctggcaactgctttcacagagttctatgatagctgctactgtgtggagaaagatagacagactg

SEQ ID NO: 18834 - DNA, 157 bp, Homo sapiens
  MAP TO AC004711.1; EXPRESSED IN BRAIN, SIGNAL = 0.71; EXPRESSED IN PLACENTA, SIGNAL = 0.67; EXPRESSED IN ADULT LIVER, SIGNAL = 0.47; EST_HUMAN HIT: AI205812.1, EVALUE 4.00e-83; SWISSPROT HIT: P34413, EVALUE 2.60e-02; NT HIT: gi14749579, EVALUE 2.00e-83
tcattcttttacaacttctaggactttgtaaacactgttctggaatacagtggtgaagtgaggtttggaatccttcaccaagaggttacataagggagttttcccagcattggcaggatcttctacatcccaaatttcaggcatactgcaaccaggc

SEQ ID NO: 18835 - DNA, 109 bp, Homo sapiens
  MAP TO AF061032.1; EXPRESSED IN HELA, SIGNAL = 1.7; EXPRESSED IN BRAIN, SIGNAL = 1.8; EXPRESSED IN BONE MARROW, SIGNAL = 1.8; EXPRESSED IN PLACENTA, SIGNAL = 2.9; EXPRESSED IN ADULT LIVER, SIGNAL = 1.5; EXPRESSED IN FETAL LIVER, SIGNAL = 1.8; EST_HUMAN HIT: BE293302.1, EVALUE 5.20e-01; SWISSPROT HIT: P42418, EVALUE 8.00e+00; NT HIT: AY032863.1, EVALUE 3.50e-01
ctacccatccacatcactgacagtcttctccttgctgctcaaaagaacagcttcccatttctggaggcacatacaggcagcatacctgtcctcagaggactttttggaa

SEQ ID NO: 18836 - DNA, 347 bp, Homo sapiens
  MAP TO AC004151.1; EXPRESSED IN LUNG, SIGNAL = 4.8; EXPRESSED IN HELA, SIGNAL = 3.6; EXPRESSED IN FETAL LIVER, SIGNAL = 1.8; EXPRESSED IN BRAIN, SIGNAL = 1.3; EXPRESSED IN ADULT LIVER, SIGNAL = 1.7; EST_HUMAN HIT: AL570030.1, EVALUE 0.00e+00; SWISSPROT HIT: Q04660, EVALUE 1.50e+00; NT HIT: gi14765643, EVALUE 0.00e+00
aatcccgagttgtgtccaacgattcggactcggacctagaggaggcctccgagctgctgtcctcatcggaggccagtgccctgggccacctcagcttcctggagcagcagcagagcgaggccagcctagaggtggcttctggcagccacagcggcagtgaggagcagctggaggccacagcccgggaggacggggacggggacgaggacggcccggcccagcagctctcaggattcaacaccaaccagtccaacaacgtgctgcaggccccactgccccccatgaggctccgtggcgggcggatgacactgggctcctgcagggaaaggcagccggaattcgtgtga

SEQ ID NO: 18837 - DNA, 208 bp, Homo sapiens
  MAP TO AL121612.3; EXPRESSED IN ADULT LIVER, SIGNAL = 0.76; EXPRESSED IN BRAIN, SIGNAL = 0.73; EXPRESSED IN FETAL LIVER, SIGNAL = 0.61; EXPRESSED IN PLACENTA, SIGNAL = 0.75; EST_HUMAN HIT: AW247767.1, EVALUE 4.30e+00; SWISSPROT HIT: P52979, EVALUE 1.40e+00
tcatccaggtggaggtatgtaagcaagacctggaggtgggacgggcacaccaggcaggaggcacagctggaggaagagcaggagatgctcaacaattggcagaaactgcaatccagtcagagcttggggtgtgcagggaggtgggagagaggccacaccaggcaaggttgcaggagtcaagactttgtcttggagacctctaagggtc

SEQ ID NO: 18838 - DNA, 146 bp, Homo sapiens
  MAP TO AC022163.3; EXPRESSED IN PLACENTA, SIGNAL = 2.8; EXPRESSED IN ADULT LIVER, SIGNAL = 2.8; EXPRESSED IN HEART, SIGNAL = 3.7; EXPRESSED IN LUNG, SIGNAL = 3.8; EXPRESSED IN HELA, SIGNAL = 4.3; SWISSPROT HIT: P27512, EVALUE 2.60e+00; NT HIT: gi15302005, EVALUE 2.00e+00
gagaatcttgctggggctgatgccttcctttgagcctccacagtgccacctaagagaccaggtgtgttctctgcagctttcatagtcattaggggtgcagtgagtgtgtccgcaagcagtaagaaagtcagtctttgagttcccat

SEQ ID NO: 18839 - DNA, 217 bp, Homo sapiens
  MAP TO AC010387.4; EXPRESSED IN HELA, SIGNAL = 1.1; EXPRESSED IN BRAIN, SIGNAL = 1.5; EXPRESSED IN ADULT LIVER, SIGNAL = 1.2; EXPRESSED IN FETAL LIVER, SIGNAL = 1.1; NT HIT: AB008681.1, EVALUE 9.00e-47; EST_HUMAN HIT: AA663213.1, EVALUE 2.00e-48; SWISSPROT HIT: P48056, EVALUE 2.90e+00
cagtagggaatttgtccctttgttcagctgtcattctatcatttactggacgatgataccaggtatctccaaactcttgggctgcagctaaagccacattattttcattaaaggccagggtttgatctaacaatagcatgacatctctccaagtgagatgtaggacatctatgtacctatcaggatcatctgaaaactttcccaggtctacctggat

SEQ ID NO: 18840 - DNA, 302 bp, Homo sapiens
  MAP TO AC020893.4; EXPRESSED IN BONE MARROW, SIGNAL = 1.8; EXPRESSED IN PLACENTA, SIGNAL =   1; EXPRESSED IN ADULT LIVER, SIGNAL = 1.4; EXPRESSED IN HEART, SIGNAL = 2.6; EXPRESSED IN BRAIN, SIGNAL = 1.2; SWISSPROT HIT: Q62877, EVALUE 2.00e-45; NT HIT: gi13650805, EVALUE 0.00e+00; EST_HUMAN HIT: BF898019.1, EVALUE 0.00e+00
tgaagaaattggatgctcattttctgttctacatccaccttctccaaaaccttaacaaattctgtgagagatatggcactgtccccatcctgatcagcctcttgaatggtcctgtctgcgatgctgccgagctgctcatctgagatatttactctgaccattaagtgtagcacctgtatcagctcaccacgggagagcttatcatctttatcgaaatcatatagtcgaaaagcaaactgcagtttgttgcttcggctgttgagtggttcgggtccattcacatctttgctcttttcattatc

SEQ ID NO: 18841 - DNA, 169 bp, Homo sapiens
  MAP TO AC010276.5; EXPRESSED IN BRAIN, SIGNAL = 1.8; EXPRESSED IN HELA, SIGNAL = 1.5; EXPRESSED IN PLACENTA, SIGNAL = 1.6; EXPRESSED IN ADULT LIVER, SIGNAL = 1.8; NT HIT: gi6755111, EVALUE 1.50e-01; EST_HUMAN HIT: AI914316.1, EVALUE 8.60e-01
ctgcggcgtctgcagtccagcaggttgtatgtgactaaatggataagctctagctagagagctcagaaacttcagagaaggaggagcccacttattgctctggggtgcagagaagacttcacagaagatataaaacgtaagattagccttgctgctgagcagatttact

SEQ ID NO: 18842 - DNA, 103 bp, Homo sapiens
  MAP TO AC009123.6; EXPRESSED IN PLACENTA, SIGNAL = 1.7; EXPRESSED IN HEART, SIGNAL = 1.4; EXPRESSED IN ADULT LIVER, SIGNAL = 2.1; EXPRESSED IN LUNG, SIGNAL = 0.59; EXPRESSED IN BRAIN, SIGNAL =   2; EST_HUMAN HIT: AL582273.1, EVALUE 1.20e-01; NT HIT: Y13987.1, EVALUE 3.30e-01
ctctggcaaccacgtcgacaatacaacacgaaaatggctcgccgtaaagggccgttttctctttgccttcagctggaagatgtccacctttggctatagtcat

SEQ ID NO: 18843 - DNA, 189 bp, Homo sapiens
  MAP TO AC004755.1; EXPRESSED IN BRAIN, SIGNAL = 2.3; EXPRESSED IN BONE MARROW, SIGNAL = 2.1; EXPRESSED IN PLACENTA, SIGNAL =   2; EXPRESSED IN ADULT LIVER, SIGNAL = 1.9; EST_HUMAN HIT: BF307709.1, EVALUE 3.00e-04; SWISSPROT HIT: O60423, EVALUE 8.00e-29; NT HIT: gi15294793, EVALUE 2.00e-04
ccagcaccgacatccgtttgcgcgtgctgttgaagtccattatggccaggacctggtagacccgttcctcccccagctccatgatcgtgacggtgtcctgggtgcgggacaggaacacgtagccgaagttccgggctgcggtgaccagcgccccctcgtcgggggaggccgcctggtacaacagctggt

SEQ ID NO: 18844 - DNA, 364 bp, Homo sapiens
  MAP TO AC007559.3; EXPRESSED IN ADULT LIVER, SIGNAL =   3; EXPRESSED IN FETAL LIVER, SIGNAL = 3.6; EXPRESSED IN PLACENTA, SIGNAL =   3; EST_HUMAN HIT: BG028830.1, EVALUE 8.00e-40; SWISSPROT HIT: P97691, EVALUE 3.50e+00; NT HIT: AL163227.2, EVALUE 6.00e-40
atggacaatgaagtccaggctgaggtggtctcagaaggagatggggaacttgttggaaaccagagtaaaggtcactcttgctatgcaaagagactggcagcattttgcccctggaccagagatctgtggaactttgaacctgagagagatgatttagggtatctggagaaagaaatttctaagcagcaaagggttcaagatgaagcagagcataagagtttacaaaatttgcagcctgatgatgcaatagaaaagaaaaacccattttctagggagacattcaagcctgctgcagaaatttgcataagtaacaaagagccaaatgttaatcatgaaaacaatgggaaaaatgtctccagggcat

SEQ ID NO: 18845 - DNA, 172 bp, Homo sapiens
  MAP TO AC006154.1; EXPRESSED IN BONE MARROW, SIGNAL = 0.67; EXPRESSED IN ADULT LIVER, SIGNAL = 0.76; EXPRESSED IN BRAIN, SIGNAL = 0.79; EST_HUMAN HIT: BG772586.1, EVALUE 3.00e-13; SWISSPROT HIT: P21439, EVALUE 1.00e-26; NT HIT: gi14739702, EVALUE 3.00e-92
ctttgcccaaacggctgcagagagtcctagaatagggctgatggccattatcacaagggtgagcttccatcctctgatgaatcccactatgaatcctgcaaaaaacgtggctactgcttgaaagaacattccaaccttgtcaccaattccttcactgattttggagatgtca

SEQ ID NO: 18846 - DNA, 186 bp, Homo sapiens
  MAP TO AC022424.3; EXPRESSED IN ADULT LIVER, SIGNAL = 1.4; EXPRESSED IN LUNG, SIGNAL = 1.9; EXPRESSED IN HELA, SIGNAL = 2.4; EXPRESSED IN FETAL LIVER, SIGNAL = 2.4; NT HIT: AL163246.2, EVALUE 2.00e-41; EST_HUMAN HIT: BF943509.1, EVALUE 2.00e-42; SWISSPROT HIT: Q89662, EVALUE 1.90e+00
agggaggaatgctgccaccaagagacacgacaatgattccattaaactggaagttaagattgccacctggacacttcgggctcctcctgcctctaaatcaacaggctaagaaggtagttacagtgttggctggggtgactgacccggactatcaagacaaaatcagtctactactccaaaacagag

SEQ ID NO: 18847 - DNA, 141 bp, Homo sapiens
  MAP TO AC005796.1; EXPRESSED IN BRAIN, SIGNAL = 2.5; EXPRESSED IN FETAL LIVER, SIGNAL = 1.4; EXPRESSED IN BONE MARROW, SIGNAL = 2.1; EXPRESSED IN ADULT LIVER, SIGNAL = 2.3; NT HIT: gi14766220, EVALUE 7.00e-74; SWISSPROT HIT: Q92911, EVALUE 1.00e-22; EST_HUMAN HIT: BF968326.1, EVALUE 1.80e-01
ctttaaccctgacccgaggagccgctatacattctggacttttgtggtgggtggcacgttggtgtggctctccatgtatggcgtgaaccaggcgcaggtgcagcgctacgtggcttgccgcacagagaagcaggccaagct

SEQ ID NO: 18848 - DNA, 175 bp, Homo sapiens
  MAP TO AC010398.6; EXPRESSED IN ADULT LIVER, SIGNAL = 0.72; EXPRESSED IN BRAIN, SIGNAL = 0.51; NT HIT: AF081020.1, EVALUE 6.10e-01; SWISSPROT HIT: P32997, EVALUE 1.50e+00
ctttgtgggaactgacatttgtactgattggcttgtaggtagtagtataaacaaaatggataatataagaatctctaccactgcaaactcagatataattgagggaagagagaaaatatttccagtatgtgtagaagccaaaattggagcacaattccaacatagaccttcagac

SEQ ID NO: 18849 - DNA, 389 bp, Homo sapiens
  MAP TO AL031719.10; EXPRESSED IN PLACENTA, SIGNAL = 2.9; EXPRESSED IN ADULT LIVER, SIGNAL = 3.5; EXPRESSED IN BRAIN, SIGNAL = 2.7; EXPRESSED IN LUNG, SIGNAL = 3.3; SWISSPROT HIT: Q9H3T3, EVALUE 5.60e-02; NT HIT: gi14774693, EVALUE 0.00e+00; EST_HUMAN HIT: BF514595.1, EVALUE 0.00e+00
tgggacttggctttctccggataagcggcggcaccggcgtcagcgatgaccgtgcagagactcgtggccgcggccgtgctggtggccctggtctcactcatcctcaacaacgtggcggccttcacctccaactgggtgtgccagacgctggaggatgggcgcaggcgcagcgtggggctgtggaggtcctgctggctggtggacaggacccggggagggccgagccctggggccagagccggccaggtggacgcacatgactgtgaggcgctgggctggggctccgaggcagccggcttccaggagtcccgaggcaccgtcaaacgtaagtccaattgttttcctgatgccttcagcgtggccgaggctcgagggcacatgggagatgt

SEQ ID NO: 18850 - DNA, 139 bp, Homo sapiens
  MAP TO AC011452.5; EXPRESSED IN ADULT LIVER, SIGNAL = 3.5; EXPRESSED IN FETAL LIVER, SIGNAL = 3.1; EXPRESSED IN HELA, SIGNAL = 2.4; EXPRESSED IN PLACENTA, SIGNAL = 3.4; SWISSPROT HIT: Q57859, EVALUE 2.30e-01; NT HIT: gi11424606, EVALUE 1.00e-72; EST_HUMAN HIT: W05843.1, EVALUE 2.00e-72
atgatctccttctgtccagactgtggcaaaagtatccaagcggcattcaaattctgcccctactgtggaaattctttgcctgtagaggagcatgtagggtcccagacctttgtcaatccacatgtgtcatccttccaag

SEQ ID NO: 18851 - DNA, 166 bp, Homo sapiens
  MAP TO AC020908.5; EXPRESSED IN BONE MARROW, SIGNAL =   7; EXPRESSED IN PLACENTA, SIGNAL = 1.7; EXPRESSED IN ADULT LIVER, SIGNAL = 1.9; EXPRESSED IN BRAIN, SIGNAL = 1.7; EST_HUMAN HIT: BI223653.1, EVALUE 2.00e-84; SWISSPROT HIT: P08120, EVALUE 1.10e+00; NT HIT: gi15302739, EVALUE 2.00e-84
atggagaacaatcttgctgagtttgaaagaagggcagaaaagaatttattaataatgtgtaaggagaaggagaagctacagaaaaaggcccacgagctgaagcgcaggcttctcctctctcagaggaagcgggagctggcagatgtcctggatgcccaggtcagtt

SEQ ID NO: 18852 - DNA, 224 bp, Homo sapiens
  MAP TO AL031843.2; EXPRESSED IN PLACENTA, SIGNAL = 1.1; EXPRESSED IN ADULT LIVER, SIGNAL = 0.87; EXPRESSED IN BRAIN, SIGNAL = 0.97; EXPRESSED IN BONE MARROW, SIGNAL = 1.9; EST_HUMAN HIT: BI463836.1, EVALUE 1.00e-123; SWISSPROT HIT: Q08877, EVALUE 3.80e-01; NT HIT: gi14779481, EVALUE 1.00e-123
ctgttcgtccgtcaggatttggacgcggcgattacaaatggccctaaactcctctctggagatggtgttcgttttcatggtgtcaaaattctcaaactcctgggtgatggcatggtaatgggaagtcactgctttgtggaggcgagccaggatgtctctgtcggctgtggccttgggagaggtaggcggcgggcctttgggcattttctcagcccactcatcag

SEQ ID NO: 18853 - DNA, 182 bp, Homo sapiens
  MAP TO AC018757.4; EXPRESSED IN BONE MARROW, SIGNAL = 1.3; EXPRESSED IN PLACENTA, SIGNAL = 0.95; EXPRESSED IN ADULT LIVER, SIGNAL = 0.8; EXPRESSED IN LUNG, SIGNAL = 0.73; EST_HUMAN HIT: AW505249.1, EVALUE 4.00e-03; SWISSPROT HIT: P42703, EVALUE 2.50e+00; NT HIT: gi15920163, EVALUE 6.40e-01
acatttggatgtgaaacagtgtcgcaaacttgtctgcaatcaaaatcgtgattttccccaaaattgctcttcccaaagtcatctccattcctgcagatggcaactccatctccccagctgctctggccaaaaaccttggcattatccttggcttctctcttattctcatatccacattcttg

SEQ ID NO: 18854 - DNA, 157 bp, Homo sapiens
  MAP TO AC010320.7; EXPRESSED IN BRAIN, SIGNAL = 3.5; EXPRESSED IN HELA, SIGNAL = 4.1; EXPRESSED IN PLACENTA, SIGNAL =   3; EXPRESSED IN ADULT LIVER, SIGNAL = 3.7; EXPRESSED IN FETAL LIVER, SIGNAL = 2.9; NT HIT: D26607.1, EVALUE 1.40e-01; EST_HUMAN HIT: AW813512.1, EVALUE 3.00e-74; SWISSPROT HIT: P06724, EVALUE 3.40e+00
ttccatcatctcgattccttcattctgcctgtttctgaacttgacataaatggtgtgttttcttgattttggctcctcactcaacatggtatctgtgagagtcacctgttgctgcttatagcaggcatttgtttcgtcactgctgaatagttttcca

SEQ ID NO: 18855 - DNA, 111 bp, Homo sapiens
  MAP TO AC020663.1; EXPRESSED IN FETAL LIVER, SIGNAL = 3.6; EXPRESSED IN BONE MARROW, SIGNAL = 2.1; EXPRESSED IN PLACENTA, SIGNAL = 1.9; EXPRESSED IN ADULT LIVER, SIGNAL = 1.9; EXPRESSED IN HEART, SIGNAL = 3.1; EXPRESSED IN LUNG, SIGNAL = 2.6; EXPRESSED IN HELA, SIGNAL = 4.2; NT HIT: AF338230.1, EVALUE 3.60e-01; EST_HUMAN HIT: BG334970.1, EVALUE 7.00e-56; SWISSPROT HIT: P45382, EVALUE 2.70e+00
gtccttggccgccttgggatccgacacgcaggcgaaagtgatgtcgcaggttgagacgacttcagcgggggttcttcccagacgggccccctcctggatgaacaaatcaca

SEQ ID NO: 18856 - DNA, 90 bp, Homo sapiens
  MAP TO AC003960.1; EXPRESSED IN ADULT LIVER, SIGNAL = 0.43; EXPRESSED IN BONE MARROW, SIGNAL = 0.49; NT HIT: AF070933.1, EVALUE 2.80e-01; EST_HUMAN HIT: BF870494.1, EVALUE 4.10e-01
attcataatgaagcagcccagaagaaagaggaggaagaaaaggaagataaggagaatgagtatcttaaggaaaataatagcaaagtataa

SEQ ID NO: 18857 - DNA, 142 bp, Homo sapiens
  MAP TO AC025167.4; EXPRESSED IN LUNG, SIGNAL = 0.99; EXPRESSED IN BONE MARROW, SIGNAL = 0.74; EXPRESSED IN PLACENTA, SIGNAL = 1.7; EXPRESSED IN ADULT LIVER, SIGNAL = 1.1; EXPRESSED IN HEART, SIGNAL = 1.9; NT HIT: gi7662217, EVALUE 4.80e-01; SWISSPROT HIT: O35973, EVALUE 5.90e+00
atttcctccttggcctgaaggagaaggaaatggatcaggtctgggaggggagactttgcagagcccagaaggttgtcatgcaggaggggagctgtctgaagaggctgggaatgctggcctacggggaaggcatgtgtggagt

SEQ ID NO: 18858 - DNA, 407 bp, Homo sapiens
  MAP TO AC009286.31; EXPRESSED IN ADULT LIVER, SIGNAL = 0.95; EXPRESSED IN BRAIN, SIGNAL =   1; EXPRESSED IN BONE MARROW, SIGNAL = 1.3; EXPRESSED IN PLACENTA, SIGNAL = 0.65; SWISSPROT HIT: P12018, EVALUE 3.00e-29; NT HIT: AF216776.1, EVALUE 0.00e+00; EST_HUMAN HIT: BI521576.1, EVALUE 0.00e+00
ttacaatttgaaaattgtcacagaacaagagtgagagcagggtgaggtttttgtcccacttccccatgtgtgtgtgtcactgtgagaagtgctgctgtaccaaatggcacagtaatagtcagcctcatcttcagactggagcccagagatgagtaaaaggcctgcattggttgaagcatctttggatccagagaagcggctggggactccagagccctgctgcttatctgagtctgatttgtacctcaggagataccggggaagactccctggcttctgctggtaccagtatatcctgtaggtaccaacattgatgccactgcgcaaggtgcaggtgaatctggctgatgctccaggagatgctgagagggaggttggctgagtcagcacaggctgcgagagggaac

SEQ ID NO: 18859 - DNA, 283 bp, Homo sapiens
  MAP TO AC005903.3; EXPRESSED IN BONE MARROW, SIGNAL = 1.1; EXPRESSED IN PLACENTA, SIGNAL = 0.78; EXPRESSED IN ADULT LIVER, SIGNAL = 0.74; EXPRESSED IN LUNG, SIGNAL =   1; EXPRESSED IN BRAIN, SIGNAL = 0.98; EXPRESSED IN HELA, SIGNAL = 1.3; SWISSPROT HIT: P25114, EVALUE 1.00e-35; NT HIT: gi14736264, EVALUE 1.00e-113; EST_HUMAN HIT: AL038786.1, EVALUE 1.00e-113
tcacacatgcatatacccagccacgcagggtacaaatgcaggcccgtgtgcgcacgcagggacacatgcactgacctccctgccccgaggggacagtcctgggtccccgccaatccggcccttgaggttgagctcgctctccccgtgccggcagaggtagatggagcggggggtcacgtggatgttcatgaggtaatatacgatgcggctctggatgtggtcagccacacggttcaccacgtagctctggcccacatccatgatcttgatataggacaggtcc

SEQ ID NO: 18860 - DNA, 118 bp, Homo sapiens
  MAP TO AF207550.1; EXPRESSED IN FETAL LIVER, SIGNAL = 1.6; EXPRESSED IN HELA, SIGNAL = 1.7; EXPRESSED IN BONE MARROW, SIGNAL = 1.2; EXPRESSED IN PLACENTA, SIGNAL = 1.5; EXPRESSED IN HEART, SIGNAL = 1.1; EXPRESSED IN ADULT LIVER, SIGNAL = 1.3; EST_HUMAN HIT: BI869386.1, EVALUE 5.00e-60; SWISSPROT HIT: Q64092, EVALUE 5.00e-16; NT HIT: gi16171650, EVALUE 3.00e-60
cagagatctcccgtttgatgttgggcagctcagctgggcaggagttgctgacagtgatggctggtgtggccacgccttgactactgtacacatcaagcagattccctgacacaggcag

SEQ ID NO: 18861 - DNA, 111 bp, Homo sapiens
  MAP TO AL117257.1; EXPRESSED IN BRAIN, SIGNAL = 3.1; EXPRESSED IN BONE MARROW, SIGNAL = 3.3; EXPRESSED IN ADULT LIVER, SIGNAL = 3.2; EXPRESSED IN PLACENTA, SIGNAL = 3.4; EXPRESSED IN FETAL LIVER, SIGNAL = 2.9; EST_HUMAN HIT: BF026381.1, EVALUE 7.00e-56; NT HIT: Z99770.1, EVALUE 1.40e+00
cttaatctgacattctgggtccatctccccgactggactagaaggttcttcagggtgtgaactttgtgttttacaccttcacatttggccagttcctggtaccagacggtc

SEQ ID NO: 18862 - DNA, 135 bp, Homo sapiens
  MAP TO AC064878.7; EXPRESSED IN BRAIN, SIGNAL = 0.46; EXPRESSED IN ADULT LIVER, SIGNAL = 0.45; EST_HUMAN HIT: BI767509.1, EVALUE 1.10e-02; SWISSPROT HIT: P53935, EVALUE 4.00e-01; NT HIT: AF123266.2, EVALUE 4.50e-01
gtgattcacacatccattgtgcagaggcagaggaaaagagagaaggagagtgagggcgccggcacacagacgaggtggaaggaggattccaagcttctgaaagaaggggtcccggagcgtcgaaagaaacagtag

SEQ ID NO: 18863 - DNA, 176 bp, Homo sapiens
  MAP TO AF131215.1; EXPRESSED IN ADULT LIVER, SIGNAL = 2.3; EXPRESSED IN FETAL LIVER, SIGNAL = 1.6; EXPRESSED IN BONE MARROW, SIGNAL = 2.3; NT HIT: AL161547.2, EVALUE 1.00e-02; EST_HUMAN HIT: AW737060.1, EVALUE 1.00e-55; SWISSPROT HIT: P03474, EVALUE 4.30e+00
acctctggggtggcatcaacgtcagcattgtcaatgtcatcatcagcatcatcatttctgaggctccaagattcccaagttacttacccaaagcccaggcctgcctgcaccttccctctcctctcctgcagactgactgctgcttctttaaaacacagaatgccactaaaaaatag

SEQ ID NO: 18864 - DNA, 145 bp, Homo sapiens
  MAP TO AC004258.1; EXPRESSED IN BONE MARROW, SIGNAL = 0.4; EXPRESSED IN PLACENTA, SIGNAL = 0.49; EXPRESSED IN ADULT LIVER, SIGNAL = 0.45; EXPRESSED IN HELA, SIGNAL = 0.43; NT HIT: AF377339.1, EVALUE 1.90e+00; EST_HUMAN HIT: BF736132.1, EVALUE 7.30e-01; SWISSPROT HIT: Q21184, EVALUE 6.80e-01
cttctgattggaaatctgcagccttgggggcactgggtgggcgcttgcccacactgggcatctctgggcttcggccaccctcccggggttccccacggacccagtggccctcgggtgtgggcagcagccgggttcccctcaaaca

SEQ ID NO: 18865 - DNA, 137 bp, Homo sapiens
  MAP TO AC022163.3; EXPRESSED IN LUNG, SIGNAL = 1.6; EXPRESSED IN BONE MARROW, SIGNAL = 2.7; EXPRESSED IN PLACENTA, SIGNAL = 2.6; EXPRESSED IN ADULT LIVER, SIGNAL = 2.1; EXPRESSED IN HEART, SIGNAL = 1.9; SWISSPROT HIT: P00149, EVALUE 7.70e+00; NT HIT: AF003529.1, EVALUE 1.20e-01; EST_HUMAN HIT: AA132881.1, EVALUE 6.80e-01
ccttgtgttttcctccagtgatgaggggttggatggggtagggctcagggcctgcagcataaatggcagtttgacaaagagatcttgtacctgacccttggtgtcccagacaccagacattccagatctgaaaacat

SEQ ID NO: 18866 - DNA, 216 bp, Homo sapiens
  MAP TO AC002133.1; EXPRESSED IN ADULT LIVER, SIGNAL = 0.73; SWISSPROT HIT: P21803, EVALUE 5.30e-02; NT HIT: gi14767198, EVALUE 1.00e-118; EST_HUMAN HIT: BI258460.1, EVALUE 2.90e-01
ctctagcagggtccccttccaggcggtacctcgggaagcctgggatcctggggtcggggcccaggagcagcccatctttggcccattgcaccgcactgccaggggtgctgaccccacaacgcagctccactgaggccccctccaccaccgtcaggttttcaggcagggcccagaagccccggggaacggaggcaggaatcgccaactgcgccaggc

SEQ ID NO: 18867 - DNA, 126 bp, Homo sapiens
  MAP TO AC005937.1; EXPRESSED IN ADULT LIVER, SIGNAL = 4.5; EXPRESSED IN LUNG, SIGNAL = 6.5; EXPRESSED IN BRAIN, SIGNAL = 4.4; EXPRESSED IN HELA, SIGNAL = 3.8; EXPRESSED IN BONE MARROW, SIGNAL = 4.8; EXPRESSED IN PLACENTA, SIGNAL = 2.4; SWISSPROT HIT: Q04462, EVALUE 5.00e-05; NT HIT: gi15304389, EVALUE 6.00e-65; EST_HUMAN HIT: BG762404.1, EVALUE 9.00e-65
cttgctgaagggcagctgccctgtgagctgggtccccaacatgaccatgcggcccacccagaacagcagaaggtcgctgcccgtttccaaaagtgacagggggtagaaacgagcaaggtctggggt

SEQ ID NO: 18868 - DNA, 508 bp, Homo sapiens
  MAP TO AC025447.3; EXPRESSED IN PLACENTA, SIGNAL = 2.8; EXPRESSED IN ADULT LIVER, SIGNAL = 1.7; EXPRESSED IN HEART, SIGNAL = 2.7; EXPRESSED IN LUNG, SIGNAL = 1.3; EXPRESSED IN HELA, SIGNAL = 2.4; EXPRESSED IN BONE MARROW, SIGNAL = 1.6; EST_HUMAN HIT: AW139414.1, EVALUE 0.00e+00; SWISSPROT HIT: P16471, EVALUE 1.00e-101; NT HIT: AF091870.1, EVALUE 0.00e+00
ctgcttcattcaacagagtggccggtgcacctgcagggcccacagccagctcacacacatcagtaatattgtggtaagaggatctggggttgtgctggctgggctgtggtaagggccatgttgaacatttggatccaccagcatgaaaataggggattttgccttccatgcttatgcactgggggtcccaggtgtgggttgtttcaggattctctggcttctcaatgacctcaggatcatagaatgtggagggattggcctggggttcctcacacttttcagacaaaagggaagggctgtcacagctcccccggcctgagtcagtgtcaggatccaggtatgtgggtttcataccttgacttgggtgttcttttgaatggactgacattagatgctggtcctcactatcatctacttctaaatactccaccagcaagtcctcatagtcagaagtgggaggaaagtcttggcatcccaaggcactcagtagttcttcagacttgccctt

SEQ ID NO: 18869 - DNA, 238 bp, Homo sapiens
  MAP TO AF172277.1; EXPRESSED IN BONE MARROW, SIGNAL = 1.3; EXPRESSED IN PLACENTA, SIGNAL = 1.7; EXPRESSED IN ADULT LIVER, SIGNAL = 1.3; EXPRESSED IN HEART, SIGNAL = 1.2; EXPRESSED IN BRAIN, SIGNAL = 1.6; EXPRESSED IN HELA, SIGNAL = 1.2; EXPRESSED IN LUNG, SIGNAL = 0.95; EST_HUMAN HIT: AU130055.1, EVALUE 0.00e+00; SWISSPROT HIT: P35331, EVALUE 6.00e-41; NT HIT: gi14752250, EVALUE 0.00e+00
tgatgcagaagaccacaagcctttgaaaaaaggaagtcgaactccttcagacaggactgtgaaaaaagaagatagtgacgacagcctagttgactatggagaaggggttaatggccagttcaatgaggatggctcctttattggacaatacagtggtaagaaagagaaagagccggctgaaggaaacgaaagctcagaggcaccttctcctgtcaacgccatgaattcctttgtttaa

SEQ ID NO: 18870 - DNA, 127 bp, Homo sapiens
  MAP TO AC069278.1; EXPRESSED IN HEART, SIGNAL = 3.3; EXPRESSED IN BRAIN, SIGNAL = 2.4; EXPRESSED IN LUNG, SIGNAL = 2.3; EXPRESSED IN HELA, SIGNAL =   3; EXPRESSED IN FETAL LIVER, SIGNAL =   5; EXPRESSED IN BONE MARROW, SIGNAL = 3.8; EXPRESSED IN PLACENTA, SIGNAL = 3.9; EXPRESSED IN ADULT LIVER, SIGNAL = 3.6; EST_HUMAN HIT: AU143397.1, EVALUE 2.00e-65; SWISSPROT HIT: Q9UK13, EVALUE 4.00e-06; NT HIT: gi14755763, EVALUE 2.00e-65
cccaagagactaggtccctgtggttctccaggatcacatctctgtccagggtcctctgagcagggttccaagtaccctgttcctcccgtgtgaagtccacagtcacaattttgaagttcactccttc

SEQ ID NO: 18871 - DNA, 172 bp, Homo sapiens
  MAP TO AC026743.3; EXPRESSED IN HEART, SIGNAL = 6.3; EXPRESSED IN ADULT LIVER, SIGNAL = 5.3; EXPRESSED IN LUNG, SIGNAL = 7.6; EXPRESSED IN FETAL LIVER, SIGNAL =  11; EXPRESSED IN BONE MARROW, SIGNAL = 3.5; EXPRESSED IN PLACENTA, SIGNAL =  10; NT HIT: M28587.1, EVALUE 2.40e+00; EST_HUMAN HIT: AA533333.1, EVALUE 2.20e-01
cttcatgcgtgtactgagcattgcttcctggggaaatacgatgtgttgagacagtgtccctagtgtcaaggctggggacattgacagtgttgacattggggacattatctccacatgttgtattgaggggaaggttcagggcagttgaggcaggcaccccagactgggccat

SEQ ID NO: 18872 - DNA, 297 bp, Homo sapiens
  MAP TO AL078614.2; EXPRESSED IN FETAL LIVER, SIGNAL =   1; EXPRESSED IN BONE MARROW, SIGNAL = 0.76; EXPRESSED IN PLACENTA, SIGNAL = 0.78; EXPRESSED IN HEART, SIGNAL = 0.96; EXPRESSED IN ADULT LIVER, SIGNAL = 0.64; EST_HUMAN HIT: AF109301.1, EVALUE 1.00e-117; SWISSPROT HIT: P12882, EVALUE 9.00e-01; NT HIT: AL163204.2, EVALUE 0.00e+00
atttaaaaaactaacctgtaaatggatttcttctaatttttctactgcctgcattgccttttcatctagctccaatttatattcttgtagtttactaagttctaccctattgttttccatatgtgtcttaagatttaatatttcttctttcaacatctttttatcctcctcaagtttttcacattgctgttgtacttttttcatagataaaaactcctgttgaagaacttgattgtctttagccaaattgacacattttgaagataaagcttccttctctgcggtaagatcatcaaa

SEQ ID NO: 18873 - DNA, 324 bp, Homo sapiens
  MAP TO AF020515.1; EXPRESSED IN BONE MARROW, SIGNAL = 1.2; EXPRESSED IN ADULT LIVER, SIGNAL =   1; EXPRESSED IN BRAIN, SIGNAL = 1.3; EXPRESSED IN LUNG, SIGNAL = 1.3; EXPRESSED IN FETAL LIVER, SIGNAL = 0.99; EST_HUMAN HIT: H95531.1, EVALUE 3.00e-11; SWISSPROT HIT: P56093, EVALUE 1.20e-01; NT HIT: AF055066.1, EVALUE 5.00e-06
ccaagcagaagacagctaaacttctgacattggcggtctcactgctagcccctagaaggacctgctacagtcagcaggacctgctgcagtcagcagcacctgccaagaagatattcttactcccctttatggtgaggacaactgtgtgtgagatgagggatgaggcatggccggcccacatcattccatctgtggagacaaaagtgactccatcttggatgctaatcgccatgttgactctgtttagccaccgccctgagaatgttgatgtcatcgtgcatatcattggctatggcgaatatagcgtcctcgacagtcctggag

SEQ ID NO: 18874 - DNA, 86 bp, Homo sapiens
  MAP TO AL022317.1; EXPRESSED IN HEART, SIGNAL = 1.5; EXPRESSED IN ADULT LIVER, SIGNAL = 2.5; EXPRESSED IN FETAL LIVER, SIGNAL = 1.6; EXPRESSED IN LUNG, SIGNAL = 3.4; EXPRESSED IN BRAIN, SIGNAL = 1.7; EXPRESSED IN BONE MARROW, SIGNAL =   3; EXPRESSED IN PLACENTA, SIGNAL = 1.8; EST_HUMAN HIT: BI819381.1, EVALUE 9.80e-02; SWISSPROT HIT: P19235, EVALUE 8.10e+00; NT HIT: AE004934.1, EVALUE 2.70e-01
tctgcacagggctcttccaggaaggccagcatggcctccaccaaatacactggcattggcaagagcctctctggcctgggaccaca

SEQ ID NO: 18875 - DNA, 85 bp, Homo sapiens
  MAP TO AC006277.1; EXPRESSED IN BRAIN, SIGNAL = 1.4; EXPRESSED IN BONE MARROW, SIGNAL = 2.4; EXPRESSED IN PLACENTA, SIGNAL = 1.1; EXPRESSED IN ADULT LIVER, SIGNAL = 1.6; NT HIT: D87917.1, EVALUE 6.60e-02
agcctttgtcactgggctggaagagcagttgggaaaattcggtgataaatgcatagcccggggctgggaccatcaaggggaccca

SEQ ID NO: 18876 - DNA, 160 bp, Homo sapiens
  MAP TO AF024534.1; EXPRESSED IN BONE MARROW, SIGNAL = 1.8; EXPRESSED IN PLACENTA, SIGNAL = 1.8; EXPRESSED IN HEART, SIGNAL = 2.3; EXPRESSED IN ADULT LIVER, SIGNAL = 2.1; EXPRESSED IN FETAL LIVER, SIGNAL = 1.8; EXPRESSED IN LUNG, SIGNAL = 2.2; EST_HUMAN HIT: W31303.1, EVALUE 5.20e-02; SWISSPROT HIT: P96921, EVALUE 5.80e+00
ttggacgtgcctccttgggaccatggagcaggtttcggaaggatagaactctcattgtcaggcctgtccagcaccctgggctgtccccaggagtagacttgcccgtcacagacaggatgggccacatccaggactctggcatccaacgtgacgtgcagcc

SEQ ID NO: 18877 - DNA, 112 bp, Homo sapiens
  MAP TO AC004235.1; EXPRESSED IN BONE MARROW, SIGNAL = 1.1; EXPRESSED IN ADULT LIVER, SIGNAL = 0.99; NT HIT: D76434.1, EVALUE 3.60e-01; EST_HUMAN HIT: BE548877.1, EVALUE 5.40e-01; SWISSPROT HIT: Q47851, EVALUE 2.70e+00
tcataaggtgggccccattccccagtggtcccagcctagcctcctgtcccacctcctctgccaagacagagtggcacaggacccctgtcgctcaggccagcaggtgtgtctc

SEQ ID NO: 18878 - DNA, 157 bp, Homo sapiens
  MAP TO AC005211.1; EXPRESSED IN PLACENTA, SIGNAL =   1; EXPRESSED IN ADULT LIVER, SIGNAL = 3.1; EXPRESSED IN HEART, SIGNAL = 1.3; EXPRESSED IN HELA, SIGNAL = 1.6; EXPRESSED IN FETAL LIVER, SIGNAL =   2; EST_HUMAN HIT: BF513767.1, EVALUE 6.00e-14
cccgccagagcttgagcccctggtgcccctttcctgctgtgcagctgcggccgccagcgcatcaggggttaatgtctggctggtgccggcttcagcagcagcagcagcaacagcagcaacagacagtggtgccagtaactcagaggctgaaatgtga

SEQ ID NO: 18879 - DNA, 147 bp, Homo sapiens
  MAP TO AL022343.6; EXPRESSED IN FETAL LIVER, SIGNAL = 9.7; EXPRESSED IN PLACENTA, SIGNAL = 3.4; EXPRESSED IN ADULT LIVER, SIGNAL =  10; EST_HUMAN HIT: BG765124.1, EVALUE 2.90e+00; NT HIT: AF148099.1, EVALUE 2.00e+00
catttattttgtctaaacctctgaattgaagcaacacaagtgaaaacattaccaggtaacacactgaatacattatctcgaatttagccattatgggtttattcacccccttgcaaattcgcagaaacagcccctcagagtccccct

SEQ ID NO: 18880 - DNA, 312 bp, Homo sapiens
  MAP TO AC035149.2; EXPRESSED IN BRAIN, SIGNAL = 0.56; EXPRESSED IN FETAL LIVER, SIGNAL = 0.39; EXPRESSED IN BONE MARROW, SIGNAL = 0.51; EXPRESSED IN PLACENTA, SIGNAL = 0.53; EXPRESSED IN ADULT LIVER, SIGNAL = 0.53; EST_HUMAN HIT: BF683816.1, EVALUE 1.10e-01; SWISSPROT HIT: P75955, EVALUE 1.50e-01; NT HIT: AF092539.1, EVALUE 7.30e-02
aatccgaggagaaggaactgccccactgaccagagtgacaatgcccataggactgaaggggtaagagcaacagaaacggaatgcttgaaaggagcagaaacagtgtatggcagcagcaaatatgtgtcagatagaaagacaaagggaaagggacacaaagaagtattcacaatggagcaacacacatgtagtgtgttttataatgctggaaaaattctgtacctttcccatctcacagagaaaagagaacacaaaggaagatggataaaaaaaaaaaatgatgcagccactgggccggttatctctggctag

SEQ ID NO: 18881 - DNA, 130 bp, Homo sapiens
  MAP TO AC005784.1; EXPRESSED IN ADULT LIVER, SIGNAL = 2.3; EXPRESSED IN LUNG, SIGNAL = 2.1; EXPRESSED IN BONE MARROW, SIGNAL = 2.3; EXPRESSED IN PLACENTA, SIGNAL = 1.4; SWISSPROT HIT: P22305, EVALUE 4.00e-01; NT HIT: U21916.1, EVALUE 4.30e-01
cctccacctcccactgtggtggcactgaaaagcccgctgtcgctgcacgtcccacacttagggtgcacttctggacttctgcttggtttagtcccactaccaagagcgcgtggttccccttgttttccat

SEQ ID NO: 18882 - DNA, 79 bp, Homo sapiens
  MAP TO AC018359.7; EXPRESSED IN HEART, SIGNAL = 2.1; EXPRESSED IN ADULT LIVER, SIGNAL = 2.1; EXPRESSED IN LUNG, SIGNAL =   2; NT HIT: gi7706352, EVALUE 2.40e-01
gtttattgattgtgacaaatgtaacgttctggtacaggaggatgatggtgagaaggctcgtcatgttttggggcagtgg

SEQ ID NO: 18883 - DNA, 155 bp, Homo sapiens
  MAP TO AF031076.1; EXPRESSED IN PLACENTA, SIGNAL = 1.1; EXPRESSED IN HEART, SIGNAL = 1.4; EXPRESSED IN ADULT LIVER, SIGNAL =   1; EXPRESSED IN FETAL LIVER, SIGNAL = 0.97; EXPRESSED IN LUNG, SIGNAL =   1; SWISSPROT HIT: Q64336, EVALUE 5.80e+00; EST_HUMAN HIT: W37985.1, EVALUE 1.30e-02; NT HIT: AJ400877.1, EVALUE 9.00e-03
ctcccagatttaacaacatgaaggtcatcactggagacctcatggagcagcttggcagagctgtggcagcaaaggaacaactggagaaggttgaagagggtgtggagacagggactggagtcttgctggtaaaggaaaacagagatgctagacag

SEQ ID NO: 18884 - DNA, 148 bp, Homo sapiens
  MAP TO AC006128.1; EXPRESSED IN BONE MARROW, SIGNAL = 0.99; EXPRESSED IN ADULT LIVER, SIGNAL = 0.98; EXPRESSED IN PLACENTA, SIGNAL = 0.78; EXPRESSED IN LUNG, SIGNAL = 0.65; EXPRESSED IN HELA, SIGNAL = 0.85; EXPRESSED IN FETAL LIVER, SIGNAL = 0.54; SWISSPROT HIT: P36343, EVALUE 6.80e-01; EST_HUMAN HIT: BI116215.1, EVALUE 1.90e-01
gcagcccaggaggtggggcttcaccggcaggcgcagagagctgcctctgcgtggtggacagccaggaagacttgatgacaggaccaatcgtgggcacctcccatcaggtgatcccctgtctatccaagatgcttccaactaccactga

SEQ ID NO: 18885 - DNA, 187 bp, Homo sapiens
  MAP TO AD000684.1; EXPRESSED IN ADULT LIVER, SIGNAL = 3.4; EXPRESSED IN FETAL LIVER, SIGNAL = 2.7; EXPRESSED IN BONE MARROW, SIGNAL =   4; EXPRESSED IN BRAIN, SIGNAL = 3.9; SWISSPROT HIT: P11871, EVALUE 8.50e-01; EST_HUMAN HIT: BI037543.1, EVALUE 2.00e-45; NT HIT: Y07661.1, EVALUE 1.00e-101
atatggcaatgcagcagatgataggacagacaaggtctcagctctctgtgcgcgttctggtgggagagatgggagtcacacagccgcatcaggcagtgcaggcagtcacaggcaggagaggaaagctggggaagaaggtggcgggtgatggcggcatggtagtgtgctctgaagggctcttcgagag

SEQ ID NO: 18886 - DNA, 117 bp, Homo sapiens
  MAP TO AC026431.2; EXPRESSED IN HEART, SIGNAL = 1.9; EXPRESSED IN PLACENTA, SIGNAL =   2; EXPRESSED IN BRAIN, SIGNAL = 2.2; EXPRESSED IN ADULT LIVER, SIGNAL =   2; NT HIT: AB007172.1, EVALUE 3.80e-01; SWISSPROT HIT: P15753, EVALUE 6.00e+00
ctcatgcttttggtccttaagccaaagccctgcccatctccaagagagtttctctatgcttttagattctcctctttttacagtgacttgaccttgcagaattcttggctgtcccag

SEQ ID NO: 18887 - DNA, 186 bp, Homo sapiens
  MAP TO AC018452.11; EXPRESSED IN HEART, SIGNAL = 1.1; EXPRESSED IN ADULT LIVER, SIGNAL =   1; EXPRESSED IN HELA, SIGNAL = 0.97; EXPRESSED IN BRAIN, SIGNAL =   1; EXPRESSED IN PLACENTA, SIGNAL = 0.99; NT HIT: gi14730577, EVALUE 1.00e-100; EST_HUMAN HIT: AV758091.1, EVALUE 1.00e-100; SWISSPROT HIT: P10815, EVALUE 5.60e+00
gaattaagaaaggaactagatattcttctgcaagagaagattgaaagtcctcatcctgtagactggaatgacactaaatccagagactgtgcagtactgtcagctattatagacttgatcaaaacacaggaaaaggcaactcccaggaactttccgccacgattccaggatggatattacagctga

SEQ ID NO: 18888 - DNA, 211 bp, Homo sapiens
  MAP TO AC006133.1; EXPRESSED IN PLACENTA, SIGNAL = 3.7; EXPRESSED IN ADULT LIVER, SIGNAL = 1.1; EXPRESSED IN HEART, SIGNAL = 1.3; EXPRESSED IN BRAIN, SIGNAL = 1.1; EXPRESSED IN LUNG, SIGNAL = 0.96; NT HIT: gi11425973, EVALUE 1.00e-115; EST_HUMAN HIT: BG622537.1, EVALUE 1.00e-115; SWISSPROT HIT: P97400, EVALUE 9.00e-17
caaggacccacagctggaggtgaatttctacactgggatggatgaggactcagatattgctttccaattccgactgcactttggtcatcctgcaatcatgaacagttgtgtgtttggcatatggagatatgaggagaaatgctactatttaccctttgaagatggcaaaccatttgagctgtgcatctatgtgcgtcacaaggaatacaag

SEQ ID NO: 18889 - DNA, 144 bp, Homo sapiens
  MAP TO AC034103.5; EXPRESSED IN BRAIN, SIGNAL = 2.8; EXPRESSED IN LUNG, SIGNAL = 2.2; EXPRESSED IN BONE MARROW, SIGNAL = 2.2; EXPRESSED IN PLACENTA, SIGNAL = 2.8; EXPRESSED IN HEART, SIGNAL = 3.3; EXPRESSED IN ADULT LIVER, SIGNAL = 2.4; EXPRESSED IN FETAL LIVER, SIGNAL = 3.1; EST_HUMAN HIT: BF950638.1, EVALUE 1.00e-11; SWISSPROT HIT: P27715, EVALUE 2.00e-06; NT HIT: U75361.1, EVALUE 2.00e-37
ctttgcaaatcttctcattaagtgagataatgcttcaggattagggcattccagtttcttaataatttcaaagctctgattcagctgagcaaagacatcaaccacggagcaagaaaagagagcatgctcagatgtctgctggaa

SEQ ID NO: 18890 - DNA, 160 bp, Homo sapiens
  MAP TO AC020914.6; EXPRESSED IN BONE MARROW, SIGNAL = 2.4; EXPRESSED IN PLACENTA, SIGNAL = 1.8; EXPRESSED IN ADULT LIVER, SIGNAL = 1.7; EXPRESSED IN LUNG, SIGNAL = 3.1; SWISSPROT HIT: P43151, EVALUE 9.90e+00; EST_HUMAN HIT: AA347812.1, EVALUE 2.10e-01; NT HIT: gi14731634, EVALUE 2.20e+00
cattagcctctcattatctgaacctagttggaagctggctaataaagatgcctgataaatgtggtctggcagaggaagtatctggagtacatagcaatgtagaggaggtgcaaggaaaggttctgagagcagagcagtcatggacggtccatccaaccat

SEQ ID NO: 18891 - DNA, 185 bp, Homo sapiens
  MAP TO AC005264.1; EXPRESSED IN FETAL LIVER, SIGNAL = 1.3; EXPRESSED IN ADULT LIVER, SIGNAL = 1.8; EXPRESSED IN PLACENTA, SIGNAL = 1.7; EXPRESSED IN HEART, SIGNAL = 1.5; EST_HUMAN HIT: AL552908.1, EVALUE 1.00e-100; SWISSPROT HIT: P30679, EVALUE 1.00e-29; NT HIT: gi4504038, EVALUE 1.00e-100
gcccaggcgagagcgggaagagcaccttcatcaagcagatgcggatcatccacggcgccggctactcggaggaggagcgcaagggcttccggcccctggtctaccagaacatcttcgtgtccatgcgggccatgatcgaggccatggagcggctgcagattccattcagcaggcccgagagcaag

SEQ ID NO: 18892 - DNA, 283 bp, Homo sapiens
  MAP TO AC004205.1; EXPRESSED IN BONE MARROW, SIGNAL = 0.68; EXPRESSED IN ADULT LIVER, SIGNAL = 0.46; SWISSPROT HIT: P30388, EVALUE 1.00e-10; NT HIT: U59645.1, EVALUE 1.00e+00
gtccagagtaccgcacctgcagatgctgctgtctggctgggtggtggctccggacaggagcttcctcgaaggacactttaagtccgcctacgacaaggagatttcatgtccctgaacgaggacctgcagacctggacagcggctcaaagagtggcttggaggatccatcacacctgggagaggttctggaccgcggaggccacaagggaagccccgatgggtcactgcactaggtggctgctcagacacctggagcatggcaaggagatgatgctgccggcag

SEQ ID NO: 18893 - DNA, 349 bp, Homo sapiens
  MAP TO AC026711.3; EXPRESSED IN BRAIN, SIGNAL = 2.8; EXPRESSED IN LUNG, SIGNAL = 1.4; EXPRESSED IN ADULT LIVER, SIGNAL = 2.5; EXPRESSED IN HEART, SIGNAL = 2.1; NT HIT: AJ005160.1, EVALUE 1.30e+00; EST_HUMAN HIT: AI522119.1, EVALUE 4.80e-01; SWISSPROT HIT: O60610, EVALUE 1.20e+00
gagaagcaggatcagtaaaagcagcacttataaaatggaaaccttcagcagcctaggcagggccttcctggatggaactggtgaggggtcaggtttaagacctgctgatttagacagtccaccttctggctttggaatcctcattaaaattgccctgcgaaccctgggcttcccactcctttgccctgcaatgttgcttctgtcgtgtggctgcactgctaacaccttcattacgttctgtcgcactagattgcatcatggctgggttcttctccccttcctctacccaggccctttggcaggtaacttcacagagtcctttgaccctggatccagcagcttcttccct

SEQ ID NO: 18894 - DNA, 399 bp, Homo sapiens
  MAP TO AC016651.5; EXPRESSED IN HEART, SIGNAL = 1.3; EXPRESSED IN ADULT LIVER, SIGNAL = 1.6; EXPRESSED IN BONE MARROW, SIGNAL = 1.5; EXPRESSED IN BRAIN, SIGNAL = 1.2; EXPRESSED IN PLACENTA, SIGNAL = 1.4; NT HIT: AL163209.2, EVALUE 1.00e-112; EST_HUMAN HIT: AI452907.1, EVALUE 1.00e-106; SWISSPROT HIT: P70213, EVALUE 4.00e-27
ctcagggagttaaaggtttatttgcttggttagcggacattcggactaaaagatggcccactgtgaacaagctggaaatgcctgatctcccttggtttaatgtagaggaagggatcaaaaggcttagagagattgggatggtggagtggattagtcactttagatgtactcatcccagctggaagggtccagaagatatacccttgaccaatgccttgcaaaatagattcgtgagggcagcacctgcatctctgaagagccttgtaattgctcttctctgtatgtcagatgcaacagcgggaactgcagtcactcaattacaaaatttaaatacaatgggaataattggatcccgaggtgtcagggaccaagtggtagcactcaaccatcaaaggcaag

SEQ ID NO: 18895 - DNA, 390 bp, Homo sapiens
  MAP TO AF050737.1; EXPRESSED IN ADULT LIVER, SIGNAL = 1.2; EXPRESSED IN LUNG, SIGNAL = 1.1; EXPRESSED IN FETAL LIVER, SIGNAL = 0.94; NT HIT: AF050737.1, EVALUE 0.00e+00; EST_HUMAN HIT: BF437994.1, EVALUE 0.00e+00; SWISSPROT HIT: P52702, EVALUE 1.00e-41
gagttggtcttcttcctggagacctctgcaagaggccctctcactgacaccttgtgtccatttttcctggccagagcctggccacccagtggctccaccgccctgatggatccactgaatctgtcctggtatgatgatgatctggagaggcagaactggagccggcccttcaacgggtcagacgggaaggcggacagaccccactacaactactatgccacactgctcaccctgctcatcgctgtcatcgtcttcggcaacgtgctggtgtgcatggctgtgtcccgcgagaaggcgctgcagaccaccaccaactacctgatcgtcagcctcgcagtggccgacctcctcgtcgccacactggtcatgccctgggttgtctacctggag

SEQ ID NO: 18896 - DNA, 104 bp, Homo sapiens
  MAP TO AF015721.1; EXPRESSED IN ADULT LIVER, SIGNAL = 0.86; EXPRESSED IN BRAIN, SIGNAL = 0.81; EXPRESSED IN LUNG, SIGNAL = 1.3; EXPRESSED IN FETAL LIVER, SIGNAL = 0.71; EXPRESSED IN BONE MARROW, SIGNAL = 0.66; EXPRESSED IN PLACENTA, SIGNAL = 0.9; SWISSPROT HIT: Q9JLV5, EVALUE 4.70e+00; NT HIT: AL163267.2, EVALUE 6.00e-52; EST_HUMAN HIT: AI953700.1, EVALUE 1.20e-01
cttggatccctctcgtggttccacttggttcttgccttctccatcctgaggtaccagttcttgaccctggtccgtatttctggtcccgtgtggttcccatcttt

SEQ ID NO: 18897 - DNA, 281 bp, Homo sapiens
  MAP TO AC025182.2; EXPRESSED IN BRAIN, SIGNAL = 2.1; EXPRESSED IN LUNG, SIGNAL = 0.96; EXPRESSED IN PLACENTA, SIGNAL = 2.2; EXPRESSED IN ADULT LIVER, SIGNAL =   2; EXPRESSED IN HEART, SIGNAL = 2.2; EST_HUMAN HIT: BG914193.1, EVALUE 3.00e-11; SWISSPROT HIT: P03360, EVALUE 1.00e-05; NT HIT: AJ298105.1, EVALUE 2.00e-08
aagaagtagcagtaatgcattgtaaaggacatcagaaaggatcggatgaaatagctgagggaaataagttagccaaccaggcagccaagtcagcagcacgaaagcctcagagtgccaacacccttgaagcccctctaatctgggaaggctccatcagggaaataaacttcagtattctcctgcagaaacagaatgggccatttctcgcagattcactttccagccatcaggatggttgcagtcagaggatggcaagctccatttgccagcctccaaccagt

SEQ ID NO: 18898 - DNA, 143 bp, Homo sapiens
  MAP TO AC026743.3; EXPRESSED IN BONE MARROW, SIGNAL = 2.3; EXPRESSED IN PLACENTA, SIGNAL = 2.7; EXPRESSED IN ADULT LIVER, SIGNAL = 2.6; EXPRESSED IN BRAIN, SIGNAL = 2.7; EXPRESSED IN LUNG, SIGNAL = 3.3; EXPRESSED IN FETAL LIVER, SIGNAL = 2.1; EST_HUMAN HIT: AW295798.1, EVALUE 7.10e-01; SWISSPROT HIT: P45064, EVALUE 5.90e+00; NT HIT: AF155142.1, EVALUE 8.00e-03
tcaaacccccttgcaaagccctggcttcagccagtgaacgtgacatgctgagatgcgctgatgcccaggagtgggaagcagcccggcagagtcaggccagtaaaggaaccctgagaaaatcaaccagaaacgtgtggacactg

SEQ ID NO: 18899 - DNA, 158 bp, Homo sapiens
  MAP TO AC010613.5; EXPRESSED IN ADULT LIVER, SIGNAL = 1.1; EXPRESSED IN HELA, SIGNAL = 0.74; EXPRESSED IN LUNG, SIGNAL = 0.51; EXPRESSED IN BONE MARROW, SIGNAL =   1; EST_HUMAN HIT: BF694396.1, EVALUE 8.00e-01; SWISSPROT HIT: P02444, EVALUE 8.70e-01; NT HIT: AE008399.1, EVALUE 1.40e-01
tcatctttctgcctggaaagcatcttctgtagaaatccgcattgcttttgctctcacttcaggatctggttggaagtcttttactacatccagcccacctgctgccatgatttttatgtcccttaccctgcttttcgctttgcagcatttgtcgctac

SEQ ID NO: 18900 - DNA, 141 bp, Homo sapiens
  MAP TO AC005795.1; EXPRESSED IN LUNG, SIGNAL = 1.3; EXPRESSED IN BONE MARROW, SIGNAL = 1.9; EXPRESSED IN ADULT LIVER, SIGNAL = 0.97; EXPRESSED IN HEART, SIGNAL = 2.1; EXPRESSED IN BRAIN, SIGNAL = 0.45; NT HIT: gi13937343, EVALUE 1.00e-04; EST_HUMAN HIT: BF829514.1, EVALUE 5.00e-05; SWISSPROT HIT: P21139, EVALUE 5.90e+00
atgaggagtaatatcaccctctcccgacctggatattacgaaccatgtcacaggagggtgtacatgccccgagatatggggagtaacattaccctctcctcccctggatattacaaaccatgttacaacccccgtgatatg

SEQ ID NO: 18901 - DNA, 107 bp, Homo sapiens
  MAP TO AF067846.1; EXPRESSED IN HEART, SIGNAL = 6.3; EXPRESSED IN ADULT LIVER, SIGNAL = 1.7; EXPRESSED IN LUNG, SIGNAL = 2.8; EXPRESSED IN PLACENTA, SIGNAL = 3.2; NT HIT: AP003002.2, EVALUE 1.40e+00; EST_HUMAN HIT: AU131221.1, EVALUE 2.00e+00; SWISSPROT HIT: P18802, EVALUE 2.10e+00
tgttggcagtcgatcattggatttatacggtttggcattgatcttggagaaggccagtttggtgcccacgtcaaacatgcccaatattctattgtccatgtgactcc

SEQ ID NO: 18902 - DNA, 493 bp, Homo sapiens
  MAP TO AF020800.1; EXPRESSED IN HEART, SIGNAL = 2.2; EXPRESSED IN BRAIN, SIGNAL = 1.7; EXPRESSED IN FETAL LIVER, SIGNAL = 1.5; EXPRESSED IN BONE MARROW, SIGNAL = 1.2; EXPRESSED IN PLACENTA, SIGNAL = 1.5; EXPRESSED IN ADULT LIVER, SIGNAL = 1.3; SWISSPROT HIT: Q9UGI0, EVALUE 2.00e+00; NT HIT: AJ229042.1, EVALUE 0.00e+00; EST_HUMAN HIT: AA167573.1, EVALUE 6.90e-01
atggcaaaggaccagccactcattttaggactgccgctccatacaggatttgggatgcaacctccatacctagcagataattgggctgcggccacctacggagtcatttcaccagtgacaactgcccactgtgtgactaccagtgatatgattcatctggttttaaatcttctgctgaggtctcccgccccttgccagatcacagaagtgggttcttggcaaggactcagttacagcagaggagccagtgcccacagccccaagcggccctggttcatgggtcttctgcggggttccatgctctcctgtgtctcttcttcatgttgttacaatgtcaccaaagagtttgtccaaggtaaccttaaagaaactgtaatttcttgtcgtgaaaagagcactgggcaagaagttaagggatcagagttctggagagcaggaatcataagccttgcccttggacttgccttacagagttgccgtgagcaacgaacag

SEQ ID NO: 18903 - DNA, 103 bp, Homo sapiens
  MAP TO AC026796.2; EXPRESSED IN PLACENTA, SIGNAL = 3.1; EXPRESSED IN ADULT LIVER, SIGNAL = 2.8; EXPRESSED IN HEART, SIGNAL =   2; EXPRESSED IN BRAIN, SIGNAL = 2.7; SWISSPROT HIT: P55963, EVALUE 3.60e+00; EST_HUMAN HIT: BG291371.1, EVALUE 4.80e-01
tctcttggctgcagttgcagagaccagctggggctgtcttggcagtcacagcagtggcagcacaagctgtaatggccacattggctggggtcccatcataagc

SEQ ID NO: 18904 - DNA, 310 bp, Homo sapiens
  MAP TO AC016830.5; EXPRESSED IN HEART, SIGNAL = 2.4; EXPRESSED IN ADULT LIVER, SIGNAL = 1.4; EST_HUMAN HIT: BG331611.1, EVALUE 4.20e-01; SWISSPROT HIT: P28217, EVALUE 3.70e+00; NT HIT: D10087.1, EVALUE 1.10e+00
cttctggattgattttgttttctctgatatcactgaacttaattaaccctctgatccctgtgtttcctgtgaagtggaaactgaatctacagggctcagtgatgagggctgagtatttttgagaagaagtcctcactggtggtgtgtgtgtcacattgcgtcccatcaggaggtcctcgatgtcgggttggcccacagttagcgatgctgagattgatcgcggccttaggctggtgaccctggtagttacgtccccccttgtgactataacagtggttctttggctctcggcgaagatccagttccccat

SEQ ID NO: 18905 - DNA, 151 bp, Homo sapiens
  MAP TO AC005266.1; EXPRESSED IN LUNG, SIGNAL =   2; EXPRESSED IN BRAIN, SIGNAL = 1.2; EXPRESSED IN PLACENTA, SIGNAL =   1; EXPRESSED IN HEART, SIGNAL =   1; EXPRESSED IN ADULT LIVER, SIGNAL = 1.3; EXPRESSED IN FETAL LIVER, SIGNAL = 0.72; SWISSPROT HIT: P05152, EVALUE 1.50e+00; NT HIT: AF222766.1, EVALUE 2.00e+00
atgaagccacaaggccactggcaaggagatcctgacataacaaccatatggtccaggaagctctctccatcccccactggcaagggggggaacccatcacacaagcagacagcctgggaagtgcgctctgtctatcagagacccttcccca

SEQ ID NO: 18906 - DNA, 240 bp, Homo sapiens
  MAP TO AC005575.1; EXPRESSED IN BONE MARROW, SIGNAL = 5.7; EXPRESSED IN PLACENTA, SIGNAL = 8.7; EXPRESSED IN ADULT LIVER, SIGNAL = 6.1; EXPRESSED IN HEART, SIGNAL = 7.3; EXPRESSED IN BRAIN, SIGNAL = 6.6; SWISSPROT HIT: P57071, EVALUE 7.60e-01
ctaatcgcagctcagatcagcgagctccggaggctccacacattggggccgaactccacccagggtgcctgccacttttgggtaggggggcgggtggggggcagcctgctctctcaccaggccaggcagcagcggggacttccagatcctcaaggattctccagaccgttgtctggagacccagagttttttcctctccagcttctggggcaacttggtggggcagaggggtggccccac

SEQ ID NO: 18907 - DNA, 123 bp, Homo sapiens
  MAP TO AF131216.1; EXPRESSED IN ADULT LIVER, SIGNAL = 0.83; EXPRESSED IN BRAIN, SIGNAL = 0.86; SWISSPROT HIT: P48875, EVALUE 2.70e+00; NT HIT: U40602.1, EVALUE 6.30e+00; EST_HUMAN HIT: AW737055.1, EVALUE 6.00e-32
gtctacagtgctcctacccaccattaaacttgtacgaccatctggaaacagtgtctgtgtttgtgtactttgtactaagagatatctatgagtatcttgtattcatagaaggagaagaggagg

SEQ ID NO: 18908 - DNA, 151 bp, Homo sapiens
  MAP TO AC025447.3; EXPRESSED IN BONE MARROW, SIGNAL = 1.1; EXPRESSED IN ADULT LIVER, SIGNAL = 1.2; EXPRESSED IN HEART, SIGNAL = 1.7; EXPRESSED IN HELA, SIGNAL = 1.9; EXPRESSED IN BRAIN, SIGNAL = 1.3; SWISSPROT HIT: P36816, EVALUE 2.60e+00; NT HIT: X97268.1, EVALUE 2.00e+00
acttccatgtccatatgtgcaacccagcaaactcacttctcactgcccttattgccacaactcccagaatctttatgtccacccttctgcaaccattcatacccatggccaatgccatgagcctcctcttcaccaggaacaactcaatttc

SEQ ID NO: 18909 - DNA, 191 bp, Homo sapiens
  MAP TO AC068499.1; EXPRESSED IN BRAIN, SIGNAL =  10; EXPRESSED IN FETAL LIVER, SIGNAL = 4.1; EXPRESSED IN BONE MARROW, SIGNAL = 5.9; EXPRESSED IN PLACENTA, SIGNAL = 5.2; EXPRESSED IN ADULT LIVER, SIGNAL = 6.2; EXPRESSED IN HEART, SIGNAL = 6.3; SWISSPROT HIT: P20336, EVALUE 2.00e-31; NT HIT: AF157809.1, EVALUE 1.00e-103; EST_HUMAN HIT: AL534649.1, EVALUE 1.00e-103
tcagcaggcgcagtcctggtgcggtggcacctgctggtcactgagctgtgggccctgcttggcgcctgtgaccgcagggtccgccgtgtccaacgactcggacatcttctcgcagatgacatccaccaggcgctcaaaggtctgcttgacgttaatgttgtccttggcgcttgcctcaaagaactcgaacc

SEQ ID NO: 18910 - DNA, 123 bp, Homo sapiens
  MAP TO AC020954.6; EXPRESSED IN BRAIN, SIGNAL = 0.92; EXPRESSED IN FETAL LIVER, SIGNAL = 0.4; EXPRESSED IN BONE MARROW, SIGNAL = 1.2; EXPRESSED IN PLACENTA, SIGNAL = 0.71; EXPRESSED IN ADULT LIVER, SIGNAL = 0.95; SWISSPROT HIT: Q14657, EVALUE 1.60e+00; NT HIT: gi14759046, EVALUE 3.00e-39; EST_HUMAN HIT: BI821444.1, EVALUE 1.00e-32
gtgtggtctgggaaggctggggcggtggcaaggtggagggcgggggtgacagcagcccggagccgcggagcctcagcttccgcctggacccagcctcgtgggagccccgcgggtcctgcccag

SEQ ID NO: 18911 - DNA, 191 bp, Homo sapiens
  MAP TO AL117256.1; EXPRESSED IN BONE MARROW, SIGNAL = 0.69; EXPRESSED IN PLACENTA, SIGNAL = 1.4; EXPRESSED IN ADULT LIVER, SIGNAL = 1.4; EXPRESSED IN HEART, SIGNAL = 1.9; EXPRESSED IN BRAIN, SIGNAL = 1.2; EXPRESSED IN LUNG, SIGNAL = 1.4; EXPRESSED IN FETAL LIVER, SIGNAL =   1; EST_HUMAN HIT: AA345220.1, EVALUE 1.60e-02; SWISSPROT HIT: P55103, EVALUE 4.30e+00; NT HIT: AJ277661.1, EVALUE 4.30e-02
ttatgtaacgtgacagaaatacgccacagctggctgctgtcggacacctttggggcctcccagaacctgctggtctgcaggacacaaggcaagagccttgttccgtaagctaggtgccagcgcggccactgtatcaccttgtgactttgggcaagttaccttgttgcccagggcttcagtttcatcatctg

SEQ ID NO: 18912 - DNA, 184 bp, Homo sapiens
  MAP TO AF015723.1; EXPRESSED IN FETAL LIVER, SIGNAL =   1; EXPRESSED IN LUNG, SIGNAL = 0.71; EXPRESSED IN PLACENTA, SIGNAL =   1; EXPRESSED IN HEART, SIGNAL = 1.1; EXPRESSED IN ADULT LIVER, SIGNAL = 0.74; EST_HUMAN HIT: R28341.1, EVALUE 6.10e-02; SWISSPROT HIT: P14984, EVALUE 7.40e+00; NT HIT: AL163268.2, EVALUE 2.00e-99
gatccaagtaaattctagtgggcaagaggaagagaagagaaactacaacatcattatcttactgctggaggcagcagattacggacccctgactgtgatgtgtcaaatgcactgtgtgacaaccaagaccctacacatctggggggcacttcaggattcctccaggcggcagttgctggcctag

SEQ ID NO: 18913 - DNA, 199 bp, Homo sapiens
  MAP TO AC011738.4; EXPRESSED IN BONE MARROW, SIGNAL = 0.79; EXPRESSED IN PLACENTA, SIGNAL = 0.52; EXPRESSED IN ADULT LIVER, SIGNAL = 0.79; EXPRESSED IN BRAIN, SIGNAL = 1.1; NT HIT: AB002320.1, EVALUE 1.00e-108; EST_HUMAN HIT: AL566180.1, EVALUE 3.00e-84; SWISSPROT HIT: P46934, EVALUE 5.00e-16
ctggggagagaagtaattttcccccatttctctatgcagaagcgccgaagcccattgctcccacggagggctgcgaagccttcgtagggcacgctggatgttcccgtgacaaactgcagtaatctcagcctctgctcattattgaagcgctccaccgcagcccagaaccagcggatcacaagatgcccatcgtggtaac

SEQ ID NO: 18914 - DNA, 197 bp, Homo sapiens
  MAP TO AC011526.6; EXPRESSED IN BONE MARROW, SIGNAL = 1.2; EXPRESSED IN ADULT LIVER, SIGNAL = 1.4; EXPRESSED IN HEART, SIGNAL = 1.3; NT HIT: gi11424053, EVALUE 1.00e-107; EST_HUMAN HIT: AL528866.1, EVALUE 1.00e-107; SWISSPROT HIT: P20908, EVALUE 8.40e-01
tccctgcgcctggtcgcccccatgtggaatgggcgtatcaggggcatccatcgcctgggtgcggcagtggccccagagggcaatcagaagaagaaaaggacaatactccagttcctgaccaactatttctacgatgtggaggctctgagggattacttgctccaaagggagatgtacaaggtgcatgagaaaaatcg

SEQ ID NO: 18915 - DNA, 166 bp, Homo sapiens
  MAP TO AC069278.1; EXPRESSED IN BRAIN, SIGNAL = 3.1; EXPRESSED IN FETAL LIVER, SIGNAL = 4.5; EXPRESSED IN BONE MARROW, SIGNAL = 3.7; EXPRESSED IN PLACENTA, SIGNAL = 3.5; EXPRESSED IN ADULT LIVER, SIGNAL = 3.5; EXPRESSED IN HEART, SIGNAL = 3.9; EXPRESSED IN LUNG, SIGNAL = 3.8; SWISSPROT HIT: P25574, EVALUE 2.60e+00; EST_HUMAN HIT: BF183316.1, EVALUE 8.50e-01
aatgagactgataaaattcacacaccaccaaggaccttgatctatttgttgcttctggagaaaagtcaatgtttatccaatgttctggataaaccagtgttaatggaatcatgggagaactttgattttgttggaagttacaacagccaacacttatgggtatata

SEQ ID NO: 18916 - DNA, 153 bp, Homo sapiens
  MAP TO AC020633.3; EXPRESSED IN BONE MARROW, SIGNAL = 1.1; EXPRESSED IN PLACENTA, SIGNAL = 1.8; EXPRESSED IN HEART, SIGNAL = 1.8; EXPRESSED IN ADULT LIVER, SIGNAL = 1.3; EXPRESSED IN FETAL LIVER, SIGNAL = 1.4; SWISSPROT HIT: P15309, EVALUE 1.00e-24; NT HIT: gi14720822, EVALUE 6.00e-81; EST_HUMAN HIT: BF678985.1, EVALUE 8.00e-81
ctgatcttcagaaagaggaactgtgtgcaccgggatgggctgccagagtaggataggattccagatgctgacaccttctgggggaaacagggctgccaggtttgtcatagcactcatcaaagtccggtcaacgtctgtgcttcgaatataaac

SEQ ID NO: 18917 - DNA, 157 bp, Homo sapiens
  MAP TO AC004751.1; EXPRESSED IN HEART, SIGNAL = 1.5; EXPRESSED IN ADULT LIVER, SIGNAL = 1.8; EXPRESSED IN FETAL LIVER, SIGNAL = 0.84; EXPRESSED IN BONE MARROW, SIGNAL = 1.3; SWISSPROT HIT: Q00782, EVALUE 4.40e+00; NT HIT: gi12084824, EVALUE 5.40e-01; EST_HUMAN HIT: BG954869.1, EVALUE 3.00e-62
ctggggtgcaagtggagcaccctgtgggcatcatgagggtgtcaggaaagccttctggtaactgaaacgcagtccattctgtgtcccccagattctgagttttcagcacctgacagtggcgggggatggcagacacacctgtgggtgctggagacat

SEQ ID NO: 18918 - DNA, 235 bp, Homo sapiens
  MAP TO AC008449.4; EXPRESSED IN BRAIN, SIGNAL =   1; EXPRESSED IN LUNG, SIGNAL = 1.3; EXPRESSED IN BONE MARROW, SIGNAL = 0.91; EXPRESSED IN ADULT LIVER, SIGNAL = 1.3; EXPRESSED IN HEART, SIGNAL = 1.9; SWISSPROT HIT: P16336, EVALUE 8.20e+00; NT HIT: gi14757818, EVALUE 1.40e-02; EST_HUMAN HIT: BG680601.1, EVALUE 2.00e-02
tggcttgggagcctttgaaataatcaggagtcagtactatgaacatactcattgtgacatatgaggaaactgaggctctcttagcgtgacagtaaagcttgcgtttgacgtcagaaagaactttctgactatccacggccccgggcacaatgcctggcatgtagtaatcgctcattgaggatttactgacacgaatgaatgtaaagaaggtcgaactcaggaccgtttggtaact

SEQ ID NO: 18919 - DNA, 184 bp, Homo sapiens
  MAP TO AL117330.6; EXPRESSED IN ADULT LIVER, SIGNAL = 1.1; EXPRESSED IN LUNG, SIGNAL = 0.88; EXPRESSED IN BONE MARROW, SIGNAL = 1.2; EXPRESSED IN PLACENTA, SIGNAL = 1.4; SWISSPROT HIT: O96017, EVALUE 1.00e-04; NT HIT: gi14778014, EVALUE 2.00e-99; EST_HUMAN HIT: BF796510.1, EVALUE 3.00e-99
caagattggcaaatccatcctgaagggcccataatcgagcccagggggcaggggtaggctcctcaggttcttggtcctcaggttcttggtcctcaggaatagaatagagttcctgagtggacactgtctctaaggagctcagtgtcccagagctggagtgagaggactggctggagtttggcat

SEQ ID NO: 18920 - DNA, 186 bp, Homo sapiens
  MAP TO AC027307.3; EXPRESSED IN ADULT LIVER, SIGNAL = 4.4; EXPRESSED IN HEART, SIGNAL = 3.6; EXPRESSED IN BRAIN, SIGNAL = 4.7; EXPRESSED IN LUNG, SIGNAL = 7.1; EXPRESSED IN BONE MARROW, SIGNAL =   4; EXPRESSED IN PLACENTA, SIGNAL = 3.5; EST_HUMAN HIT: BI827807.1, EVALUE 1.00e-55; SWISSPROT HIT: P10323, EVALUE 3.30e-02; NT HIT: AE001989.1, EVALUE 1.70e-01
gtgagcttcagtggagtcccggcccaactggtgctgagtggcgagggtgagggtttgcagctcaccctctgggagcaggggtcccctggcacctcctactccctggacgtcccgcggagccacggctgcgcccccaccaccggacagcaccttcaccacgccctccgcatgctgcagagtatctag

SEQ ID NO: 18921 - DNA, 138 bp, Homo sapiens
  MAP TO AC022517.1; EXPRESSED IN BONE MARROW, SIGNAL = 3.9; EXPRESSED IN PLACENTA, SIGNAL = 3.9; EXPRESSED IN HEART, SIGNAL = 4.1; EXPRESSED IN ADULT LIVER, SIGNAL = 3.8; EST_HUMAN HIT: AI657032.1, EVALUE 7.00e-72; SWISSPROT HIT: P39956, EVALUE 8.00e-12; NT HIT: AB020683.2, EVALUE 5.00e-72
ctgagtggccactttgccgtagtcaatccaccgcagggtggcgaagttggtagattctgcgcagttgaacccgtgattgaagccggcgtggtagccgtagggaaatgtgatcatgaattccccggcctcctgcgtgat

SEQ ID NO: 18922 - DNA, 287 bp, Homo sapiens
  MAP TO AC037199.1; EXPRESSED IN LUNG, SIGNAL = 1.4; EXPRESSED IN BONE MARROW, SIGNAL = 1.8; EXPRESSED IN PLACENTA, SIGNAL = 1.2; EXPRESSED IN ADULT LIVER, SIGNAL = 1.2; EXPRESSED IN HEART, SIGNAL =   1; EST_HUMAN HIT: BE771008.1, EVALUE 0.00e+00; SWISSPROT HIT: P20151, EVALUE 1.00e-52; NT HIT: gi16175924, EVALUE 0.00e+00
gaatagccaggtctggctgggtcggcacaacctgtttgagcctgaagacacaggccagagggtccctgtcagccacagcttcccacacccgctctacaatatgagccttctgaagcatcaaagccttagaccagatgaagactccagccatgacctcatgctgctccgcctgtcagagcctgccaagatcacagatgttgtgaaggtcctgggcctgcccacccaggagccagcactggggaccacctgctacgcctcaggctggggcagcatcgaaccagaggagt

SEQ ID NO: 18923 - DNA, 281 bp, Homo sapiens
  MAP TO AC021689.3; EXPRESSED IN HEART, SIGNAL = 1.1; EXPRESSED IN LUNG, SIGNAL = 1.1; EXPRESSED IN FETAL LIVER, SIGNAL =   1; EXPRESSED IN BONE MARROW, SIGNAL = 1.6; EXPRESSED IN PLACENTA, SIGNAL =   1; EXPRESSED IN ADULT LIVER, SIGNAL = 1.6; NT HIT: gi16160877, EVALUE 0.00e+00; EST_HUMAN HIT: AW104003.1, EVALUE 0.00e+00; SWISSPROT HIT: P32456, EVALUE 3.00e-28
cacaagcttcttctggaattcatggttttcatccttgaaggagtgctccatgaagactgcaatggcttccctctcacaggctgcatgcacgtccagcagctcctggagcgtgtctgtggggagcctcagttgctgggccatctgctggctatagtggtcggctgccctctgcacagccgctgggttctcaagctgggccagtgctgtcactgcattctccagacaaggtactgctccactgttgatggcatctacataagtcaccaccagagtccccagcc

SEQ ID NO: 18924 - DNA, 175 bp, Homo sapiens
  MAP TO AF045449.1; EXPRESSED IN BRAIN, SIGNAL = 1.5; EXPRESSED IN BONE MARROW, SIGNAL = 1.5; EXPRESSED IN PLACENTA, SIGNAL = 1.6; EXPRESSED IN ADULT LIVER, SIGNAL = 1.4; EXPRESSED IN HEART, SIGNAL = 1.2; SWISSPROT HIT: P13983, EVALUE 1.30e-01; NT HIT: AL163281.2, EVALUE 5.00e-94; EST_HUMAN HIT: BF527610.1, EVALUE 9.00e-01
ctacatgagttgtgggggcaggggcttacggggctcctgtgggacaggcatagtcacgtgacttggagctggaggcatgtagtcagcaggtcgggctctcccagcaaatcctcttaggtcacagattccacccggttcatgtgttagacgtgcactcacatgggtgccacctttc

SEQ ID NO: 18925 - DNA, 189 bp, Homo sapiens
  MAP TO AC006273.1; EXPRESSED IN LUNG, SIGNAL = 3.1; EXPRESSED IN ADULT LIVER, SIGNAL = 3.9; EXPRESSED IN HEART, SIGNAL = 3.5; SWISSPROT HIT: O00178, EVALUE 1.50e-02; EST_HUMAN HIT: AA746125.1, EVALUE 2.50e-01
cgaggccttcctgaccctcccgggcccttcctgcctttctctctggctgcggctgtttcctgcggggctggctgcagctcccggcggcgccctgtcctgtacctgtttcatgtccatcgtcggcaacccctggcttctaacacagctcattgcccgcaggacctcccagcaggagcagggacccagtag

SEQ ID NO: 18926 - DNA, 232 bp, Homo sapiens
  MAP TO AC004760.1; EXPRESSED IN HEART, SIGNAL = 1.2; EXPRESSED IN ADULT LIVER, SIGNAL =   1; EXPRESSED IN PLACENTA, SIGNAL = 0.83; SWISSPROT HIT: Q9V407, EVALUE 7.90e+00; NT HIT: AF048728.1, EVALUE 3.30e+00; EST_HUMAN HIT: BI045648.1, EVALUE 1.00e-110
cggagaggctggggctgcggttgtggttgtggcggcgtgggtggtggctgggaactgtggcccaggcttagcggccgcccggaggcttttcttcccggagactgaggtgggcggctcagcgttggccccacacattcgaggctcacaggtgattgtcgctcacacagttagggtcgtcagttggtctgaaactgcatttggcccactcctccatcctccctgtccgtcgtag

SEQ ID NO: 18927 - DNA, 193 bp, Homo sapiens
  MAP TO AC013559.2; EXPRESSED IN ADULT LIVER, SIGNAL = 1.4; EXPRESSED IN LUNG, SIGNAL = 1.6; EXPRESSED IN BRAIN, SIGNAL = 1.3; EXPRESSED IN PLACENTA, SIGNAL = 1.1; SWISSPROT HIT: P54788, EVALUE 1.50e+00; NT HIT: U32474.1, EVALUE 6.80e-01
aaaggtccctatgctgaaaaaggggacctttaccaagagcaaactgttcgtcagctaaatgtggaaaatgaattgttccttgctccagagcaagcagatgtgcaaccagttgcctccgggatccacaagagatggctcatggaaattcagacaggatcccagattgggcaagaatgcatggactgcgacagtt

SEQ ID NO: 18928 - DNA, 234 bp, Homo sapiens
  MAP TO AB000876.1; EXPRESSED IN FETAL LIVER, SIGNAL = 1.8; EXPRESSED IN LUNG, SIGNAL = 1.6; EXPRESSED IN PLACENTA, SIGNAL = 1.6; EXPRESSED IN ADULT LIVER, SIGNAL = 1.1; NT HIT: gi14782289, EVALUE 1.00e-116; SWISSPROT HIT: Q13838, EVALUE 8.00e-36; EST_HUMAN HIT: BF525785.1, EVALUE 1.00e-117
ttatggcagagaacgatgtggacaatgagctcttggactatgaagatgatgaggtggagacagcagctgggggagatggggctgaggcccctgccaagaaggatgtcaagggctcctatgtctccatccacagctctggctttcgtgacttcctgctcaagccagagttgctccgggccattgtcgactgtggctttgagcatccgtcagaaggtaaattttctcttgggcatg

SEQ ID NO: 18929 - DNA, 215 bp, Homo sapiens
  MAP TO AC025760.2; EXPRESSED IN PLACENTA, SIGNAL = 3.3; EXPRESSED IN ADULT LIVER, SIGNAL =   3; EXPRESSED IN HEART, SIGNAL = 2.7; EXPRESSED IN HELA, SIGNAL = 2.8; EXPRESSED IN BRAIN, SIGNAL = 2.9; SWISSPROT HIT: P54741, EVALUE 9.90e-01; EST_HUMAN HIT: BF896393.1, EVALUE 2.80e-01
gagaaaggaagatggaggaaacccttatcctcatttgcaaaaacgttgttcacatcacttccaatcacatctcagtgcaggaactcaatcacagagccagagtgcactgcaggcaagtcttaggctgcatggccatggtcctgctacaattcgtgcccctagtcctgaccgttccttgccctccccttcacactaagacaaccctgttcccagta

SEQ ID NO: 18930 - DNA, 200 bp, Homo sapiens
  MAP TO AD000671.1; EXPRESSED IN BRAIN, SIGNAL = 5.2; EXPRESSED IN BONE MARROW, SIGNAL = 5.3; EXPRESSED IN PLACENTA, SIGNAL = 6.6; EXPRESSED IN ADULT LIVER, SIGNAL = 5.8; EXPRESSED IN LUNG, SIGNAL = 7.1; EST_HUMAN HIT: BF763960.1, EVALUE 2.00e-33; SWISSPROT HIT: O70191, EVALUE 8.40e-01
aattgagaccatggttgaagaaggcaaaacagcccaagcacttggccagagttcagctaaggatcgggagcgggaggtgggcgagcagcgtggaggtgcttggtgtgagggccaagacagcggagccatggatggcagggaagggcaggctgggatggaaaaggcagtgggaagaggcctggtggctggttttgaactgg

SEQ ID NO: 18931 - DNA, 148 bp, Homo sapiens
  MAP TO AC022073.13; EXPRESSED IN BRAIN, SIGNAL = 0.96; EXPRESSED IN PLACENTA, SIGNAL = 0.96; EXPRESSED IN ADULT LIVER, SIGNAL = 1.1; EST_HUMAN HIT: BG570053.1, EVALUE 8.00e-78; NT HIT: gi15305555, EVALUE 5.00e-78; SWISSPROT HIT: P00882, EVALUE 5.00e-03
gctgcttggctcctgaaagctgttacctttatagatcttactacactttcaggtgatgatacatcttccaacattcaaaggctctgttataaagccaaatacccaatccgggaagatctcttaaaagctttaaatatgcatgataaag

SEQ ID NO: 18932 - DNA, 486 bp, Homo sapiens
  MAP TO AC020728.4; EXPRESSED IN BONE MARROW, SIGNAL = 0.93; EXPRESSED IN PLACENTA, SIGNAL = 0.82; EXPRESSED IN HEART, SIGNAL = 1.4; EXPRESSED IN ADULT LIVER, SIGNAL = 0.89; EXPRESSED IN FETAL LIVER, SIGNAL = 0.73; EST_HUMAN HIT: BI828887.1, EVALUE 0.00e+00; NT HIT: gi14721281, EVALUE 0.00e+00; SWISSPROT HIT: P22674, EVALUE 6.00e-36
ttatttcgagctcgggggcaggctgcacttctcgcagatctgaacgggcagcatgtgagtcaaggaagtactgtttatggccaccagcagctgcaacttgcccatacagtcctccagcgccgcctccgggtggtctcccagtcgcaagtccacgggccgcgagacccgcagcatgcggtccgccagcgccaggcagcagatcgccaggagggaaggggagtagctggtgaaggcatagtcggccagactcagctctgccaccccccgcgccagggcttgcgcttccagagcttcggaggcctcagcctgccccgcctccacgcgagcgtgcgtgaaatgctccaggaagaagctaatggtgggcgcacccagggtgaagtgcagcttgtgcagcacgatgcactcgaggttgcagagctgctgccgggagaaggcgccgcagcagagggccagaagctgcttcacgcgcggcgggtgcacctccac

SEQ ID NO: 18933 - DNA, 136 bp, Homo sapiens
  MAP TO AC025816.1; EXPRESSED IN ADULT LIVER, SIGNAL = 1.8; EXPRESSED IN HEART, SIGNAL = 1.9; EXPRESSED IN LUNG, SIGNAL = 3.4; EXPRESSED IN BRAIN, SIGNAL = 3.1; EXPRESSED IN PLACENTA, SIGNAL = 2.1; SWISSPROT HIT: Q04956, EVALUE 5.90e+00; EST_HUMAN HIT: BF962259.1, EVALUE 1.00e-70; NT HIT: gi16161536, EVALUE 7.00e-71
gaagaactgtaggaatagtcacagcttgacaaccgaacacaacctgagtgtgctgagaactcatggcgttgaccacctgagctataatgagctatgccaactcttgtttcagaacgacccctggcttttgccagaa

SEQ ID NO: 18934 - DNA, 134 bp, Homo sapiens
  MAP TO AC025761.3; EXPRESSED IN ADULT LIVER, SIGNAL = 5.1; EXPRESSED IN PLACENTA, SIGNAL = 4.1; EXPRESSED IN HEART, SIGNAL = 3.6; EXPRESSED IN BRAIN, SIGNAL = 5.3; EST_HUMAN HIT: BG912415.1, EVALUE 4.00e-27; NT HIT: AJ251835.1, EVALUE 4.50e-01
atggaattatcttggaaagacctgtggacaagcttcttatctaatggagtaaactcctatgacatacaccaacatagtcaccatctggtgactccacagtgcttcaaaggagagaaacaggaagcagagttcat

SEQ ID NO: 18935 - DNA, 157 bp, Homo sapiens
  MAP TO AC005615.1; EXPRESSED IN HELA, SIGNAL = 2.8; EXPRESSED IN BRAIN, SIGNAL =   2; EXPRESSED IN BONE MARROW, SIGNAL = 1.9; EXPRESSED IN PLACENTA, SIGNAL =   2; EXPRESSED IN ADULT LIVER, SIGNAL =   2; EXPRESSED IN HEART, SIGNAL = 2.4; NT HIT: Z18950.1, EVALUE 2.10e+00; SWISSPROT HIT: P54635, EVALUE 2.00e+00; EST_HUMAN HIT: BG250629.1, EVALUE 2.00e-01
ggtaagatgggtctgggaaccaaagagcggatgcaagaggtcctgcttaccctcatgctcatctgcccacttggagaacatgtgcttcttgttcccacagacctgggctctgaggatttggaaatcctgcttcccacatgagctatgcgtctatcaa

SEQ ID NO: 18936 - DNA, 126 bp, Homo sapiens
  MAP TO AF053936.1; EXPRESSED IN BONE MARROW, SIGNAL = 0.73; EXPRESSED IN PLACENTA, SIGNAL = 1.1; EXPRESSED IN ADULT LIVER, SIGNAL = 1.1; EXPRESSED IN HEART, SIGNAL =   1; EXPRESSED IN BRAIN, SIGNAL = 0.97; EXPRESSED IN LUNG, SIGNAL = 1.2; NT HIT: AL161551.2, EVALUE 4.20e-01; EST_HUMAN HIT: BG203406.1, EVALUE 9.60e+00
ctgatgacaagtaatttgcttctttctttagtcctgcttttacctctggccatgaagaatcctgctttccactggtgagttcagaaatttctagcagcgatatttcttcagcccaaagtaaatatc

SEQ ID NO: 18937 - DNA, 169 bp, Homo sapiens
  MAP TO AC035150.1; EXPRESSED IN HEART, SIGNAL = 1.9; EXPRESSED IN BRAIN, SIGNAL = 1.8; EXPRESSED IN BONE MARROW, SIGNAL = 1.7; EXPRESSED IN PLACENTA, SIGNAL = 2.2; EXPRESSED IN ADULT LIVER, SIGNAL = 1.8; SWISSPROT HIT: P35554, EVALUE 7.50e+00; NT HIT: AF281869.1, EVALUE 5.90e-01; EST_HUMAN HIT: BE378471.1, EVALUE 1.40e-02
atggatggtgccaaagcattttttagtgcagtggcagcaggatttgtcatcattctcacatgccagctgcagtggcagtggcaacatggtggggtgcatgctcatcagctgtggcagcttgctagtgggtaccgggatgcctgcttctgtgtgagcacttacagcagtg

SEQ ID NO: 18938 - DNA, 471 bp, Homo sapiens
  MAP TO AC010219.4; EXPRESSED IN ADULT LIVER, SIGNAL = 1.8; EXPRESSED IN BRAIN, SIGNAL = 1.7; EXPRESSED IN HELA, SIGNAL = 3.3; EXPRESSED IN LUNG, SIGNAL =   3; EXPRESSED IN FETAL LIVER, SIGNAL = 3.9; EXPRESSED IN BONE MARROW, SIGNAL =   2; EXPRESSED IN PLACENTA, SIGNAL = 2.6; EST_HUMAN HIT: BG535667.1, EVALUE 3.00e-03; NT HIT: AF181897.1, EVALUE 3.00e-05
ttaagtttcaacatgaattttggcaaggacaaaaacatttaaaacatagcaatcactatcatcatcatcatcctcatcctcagcatcatcatcatcaccataatcagtaccaccatcattatccttatcatcaccatcaccatcatcaccattaccaacattatcaccatcaccatcatcatccttaccatcatcatcctcaccatcatcatcctcaccatcatcaccataattataatcaccacagtaataattatcatcattcaccatcgctatcatcatcctcaccatcaccattgtcatcctcaccatcaccaccatcaccatcatcatcatcattctcaccatcaccatcactgtcaccaccatcaccatcaccatgatcatcatccttaccatcaccatcactaacattgatctagtgcttaccatgtgccagatcctctcttgaatttctgccacacattccat

SEQ ID NO: 18939 - DNA, 242 bp, Homo sapiens
  MAP TO AB014077.1; EXPRESSED IN FETAL LIVER, SIGNAL = 3.8; EXPRESSED IN ADULT LIVER, SIGNAL = 2.7; EST_HUMAN HIT: AA827377.1, EVALUE 3.00e-38; SWISSPROT HIT: P36915, EVALUE 1.00e-17; NT HIT: gi4885288, EVALUE 2.00e-38
gcacctgggagtcccatccagagaccacggagctggtggttttgcagggcagggtggggccagcaggtgacgaggaggaggaggaagaggaagagctgagcagctcctgtgaggaggagggagaggaggaccgggatgcggatgaggagggagaaggggatgaggagaccccaacctcggctccagggtccagcctggctggccgaaacccttatgccctgctgggtgaggatgagtgctga

SEQ ID NO: 18940 - DNA, 273 bp, Homo sapiens
  MAP TO AC006485.1; EXPRESSED IN ADULT LIVER, SIGNAL = 1.5; EXPRESSED IN HEART, SIGNAL = 1.9; EXPRESSED IN BRAIN, SIGNAL = 1.2; EST_HUMAN HIT: BI018267.1, EVALUE 1.50e+00; SWISSPROT HIT: Q57081, EVALUE 2.00e-01; NT HIT: AF280107.1, EVALUE 3.00e-10
cccaaccaaaggaagcagaggaacctaaagtccctagcatctcccaggaaaaggaatccccaaagcctcagctgaaaccagttcttcaggccccacctgaggaaatgggatgtctgccccccatatgtgccagtctacctgtttttggcaagaatacacaggaggcagagttgggagcatctgaagagtcgggctcggaggaaagtgaggctcagtctccccaccaagtggaacagaagcccccattagaaaaaaacaaagaagatggaaagg

SEQ ID NO: 18941 - DNA, 141 bp, Homo sapiens
  MAP TO AC026431.2; EXPRESSED IN ADULT LIVER, SIGNAL = 1.4; EXPRESSED IN HEART, SIGNAL = 1.6; EXPRESSED IN LUNG, SIGNAL = 1.9; EXPRESSED IN PLACENTA, SIGNAL = 1.4; NT HIT: AF336044.1, EVALUE 1.20e-01; EST_HUMAN HIT: AA205775.1, EVALUE 7.00e-01
ccttccagatggctgaacctgctcattttgacttcctggatcattttctcccattggtctggccaagcacaggtggtgctcaggcactcgatgtgtctcagcacacacttttattctgaaaacatgcattcgatgttccat

SEQ ID NO: 18942 - DNA, 99 bp, Homo sapiens
  MAP TO AC006541.1; EXPRESSED IN ADULT LIVER, SIGNAL = 0.86; EXPRESSED IN HEART, SIGNAL =   1; SWISSPROT HIT: P02457, EVALUE 4.70e+00; EST_HUMAN HIT: R27167.1, EVALUE 3.00e-02
tctgttcctgctgtcccgctggcccagccactggctctcaacctggatggcctctgctgtcccgtgacctctgctgccccatggcctctgctgttccat

SEQ ID NO: 18943 - DNA, 286 bp, Homo sapiens
  MAP TO AC004213.1; EXPRESSED IN BRAIN, SIGNAL = 0.73; EXPRESSED IN PLACENTA, SIGNAL = 0.77; EXPRESSED IN ADULT LIVER, SIGNAL = 0.64; NT HIT: AF338355.1, EVALUE 6.00e-24; EST_HUMAN HIT: AW292869.1, EVALUE 1.00e-04
cccaaggagcttggtgccagacaatgaacttgtcctgagaatgaaggtgtagagacagtttcttcttcttccttttcttcttcttcttcttcttcttcttcttcttcttcttcttcttcttcttcttcttcttcttcttcttcttcttcttcttcttcttcttcttcctcttcctcttcctcttcctcttcctctccttctccttctccttctccttctcctccttctttcctcctcctcctgctcctccccgcccccctcctcttcttctctggaaaagttgtac

SEQ ID NO: 18944 - DNA, 223 bp, Homo sapiens
  MAP TO AC024077.2; EXPRESSED IN FETAL LIVER, SIGNAL = 1.2; EXPRESSED IN PLACENTA, SIGNAL = 4.1; EXPRESSED IN HEART, SIGNAL = 3.4; EXPRESSED IN ADULT LIVER, SIGNAL = 1.2; SWISSPROT HIT: P08547, EVALUE 6.00e-06; EST_HUMAN HIT: R64273.1, EVALUE 1.00e-122; NT HIT: L14723.1, EVALUE 2.00e-53
tcaaatttctttcaattctatggggagtatgtccagaagtggaattgctggatcaaacggtaatttattgtttaattttttgagaaacagcacaccaatttttacagtggctataacatttcccattcccatcagcaatgcactagagctccaatttttccatctgcttgaaaacacctgttgttttgtgttgctgtcattgttgttgtttatcaaagccatc

SEQ ID NO: 18945 - DNA, 96 bp, Homo sapiens
  MAP TO AL020992.1; EXPRESSED IN LUNG, SIGNAL = 3.3; EXPRESSED IN PLACENTA, SIGNAL = 2.4; EXPRESSED IN ADULT LIVER, SIGNAL = 2.1; EXPRESSED IN HEART, SIGNAL = 2.1; SWISSPROT HIT: P37439, EVALUE 1.60e+00; NT HIT: AB042297.1, EVALUE 3.00e-13; EST_HUMAN HIT: AW007393.1, EVALUE 1.00e-10
actgtacaagaagtgtggcgccagcatctggttctggtgaaggccccagggatcttccactcatggtgcaaggtgaagggaagcaggcatcacaag

SEQ ID NO: 18946 - DNA, 204 bp, Homo sapiens
  MAP TO AF072711.1; EXPRESSED IN PLACENTA, SIGNAL = 1.7; EXPRESSED IN ADULT LIVER, SIGNAL = 1.7; EXPRESSED IN HEART, SIGNAL = 3.5; EXPRESSED IN BRAIN, SIGNAL = 1.5; EXPRESSED IN HELA, SIGNAL = 1.4; EST_HUMAN HIT: C06313.1, EVALUE 1.00e-111; SWISSPROT HIT: P19835, EVALUE 2.00e-33; NT HIT: M54994.1, EVALUE 1.00e-111
ggaggacttctacaagctggtcagtgagttcacaatcaccaaggggctcagaggcgccaagacgacctttgatgtctacaccgagtcctgggcccaggacccatcccaggagaataagaagaagactgtggtggactttgagaccgatgtcctcttcctggtgcccaccgagattgccctagcccagcacagagccaatgccaa

SEQ ID NO: 18947 - DNA, 232 bp, Homo sapiens
  MAP TO AC020908.5; EXPRESSED IN HEART, SIGNAL = 2.1; EXPRESSED IN ADULT LIVER, SIGNAL = 1.7; EXPRESSED IN PLACENTA, SIGNAL = 1.9; EST_HUMAN HIT: BF838385.1, EVALUE 1.00e-110; SWISSPROT HIT: Q61838, EVALUE 5.00e-14; NT HIT: gi15302735, EVALUE 1.00e-128
tgacccatctggtgaggggacactcagtgtgaaggtcccggactccatcaccagctgggtgggtgaggccgtggccctgtccacctctcagggcttaggcatcgccgagccctccctgctgaagaccttcaagcccttcttcgtggacttcatgctccccgctctcatcatccgtggggagcaggtcaagatcccgctcagtgtctacaactacatgggcacctgcgctgag

SEQ ID NO: 18948 - DNA, 230 bp, Homo sapiens
  MAP TO AC006076.1; EXPRESSED IN BONE MARROW, SIGNAL = 0.78; EXPRESSED IN PLACENTA, SIGNAL = 1.2; EXPRESSED IN ADULT LIVER, SIGNAL = 1.1; EXPRESSED IN HEART, SIGNAL = 1.3; EST_HUMAN HIT: AW812869.1, EVALUE 9.00e-14; SWISSPROT HIT: P78325, EVALUE 4.60e+00; NT HIT: X75598.1, EVALUE 2.00e-13
ctgctttccttgctgaatcctggtaggtaccgtgggaatctagcttctttactctgggggtcctggggcccccctttctgggcagctgtctctgtacccccatcccctgtcatcacctgatcacacttcattgtactgattggataacacctgctatggattgaatgtgtcccccaaagttcgtatgttggaaacttaatccccggtgcaacagcattgagaggcagggc

SEQ ID NO: 18949 - DNA, 162 bp, Homo sapiens
  MAP TO AC008518.3; EXPRESSED IN FETAL LIVER, SIGNAL = 0.96; EXPRESSED IN PLACENTA, SIGNAL = 1.1; EXPRESSED IN ADULT LIVER, SIGNAL = 1.2; EXPRESSED IN BRAIN, SIGNAL = 0.89; EST_HUMAN HIT: R39427.1, EVALUE 8.20e-01; SWISSPROT HIT: P53911, EVALUE 5.80e+00; NT HIT: AP003009.2, EVALUE 5.60e-01
atttacaccaaggaattcccactggagtttagaaaccacaagaatgtgaaagacgccagccagccagcaattcaacccatgggaaggaaaaacctagcctggaagtacaaaaggacaacaccaaacaggagcccagtggggcactggggtgaggcagcaaag

SEQ ID NO: 18950 - DNA, 426 bp, Homo sapiens
  MAP TO AC013412.3; EXPRESSED IN LUNG, SIGNAL = 0.53; EXPRESSED IN BONE MARROW, SIGNAL = 0.8; EXPRESSED IN ADULT LIVER, SIGNAL = 0.63; EST_HUMAN HIT: BG198114.1, EVALUE 0.00e+00; SWISSPROT HIT: Q99218, EVALUE 4.00e-24; NT HIT: M55419.1, EVALUE 0.00e+00
cacttcctcctgcttggtcttgtctgttgctggccaagcttccagatgcagatcaggaagtatggggggcaggggccgcagggggaacattggaggcagaggtggctgtggcagcaggggctgcatgggttgcacaggtggctggggctgcatgggctggtgaggctgtggctgaacaggctggggctggaagggctgctgggcaggcagagggaggtttggctgatggtgttgggttggagtcatggattgctggccaggaacaggcatcagtgcttgctggcggaccctgggctgctgagctggcaccactgggatgtggtgatgagactgcagggtgtgagtcagggggtgctgttgggacaccacggggatgatttggtggtgcagccatccacccatgggctcgtaaccataggaagagta

SEQ ID NO: 18951 - DNA, 151 bp, Homo sapiens
  MAP TO AC010252.3; EXPRESSED IN LUNG, SIGNAL = 1.1; EXPRESSED IN BONE MARROW, SIGNAL = 1.1; EXPRESSED IN PLACENTA, SIGNAL = 1.1; EXPRESSED IN ADULT LIVER, SIGNAL = 0.83; SWISSPROT HIT: P39796, EVALUE 3.40e+00
cttctgtaggatgatgtgagcttgtgtttcctgcaagtccaatcttttgggatgaggaccctttctccttgcatctttcttgagaagttcttgtaactgtatatcttttcaattcaatttccaaaatttgtcgggctttaattggagacat

SEQ ID NO: 18952 - DNA, 270 bp, Homo sapiens
  MAP TO AC016396.5; EXPRESSED IN LUNG, SIGNAL = 0.96; EXPRESSED IN BRAIN, SIGNAL = 0.54; EXPRESSED IN ADULT LIVER, SIGNAL = 0.61; SWISSPROT HIT: P13693, EVALUE 4.00e-28; NT HIT: gi4507668, EVALUE 5.00e-64; EST_HUMAN HIT: BF910644.1, EVALUE 1.00e-124
tttttctggtctctgttcttcaagtttgcctttgattgttttcatgtaatctttgatgtagttcttgtaggtgttttttgtgaagctggtttcttgcaagtgatagtctgtgacagtatcaacagtgataactgtggttttggtacctttgccctcgggaccttcagcagaggcatttccgccaatgagcaagtcatcagtgttaccctctgtcctactgaccatattcccctccaccaccaggcacagcccatctgcaatctcccaaat

SEQ ID NO: 18953 - DNA, 126 bp, Homo sapiens
  MAP TO AC004206.1; EXPRESSED IN ADULT LIVER, SIGNAL = 0.42; EXPRESSED IN BONE MARROW, SIGNAL = 0.45; SWISSPROT HIT: P99507, EVALUE 5.00e-04; NT HIT: gi14759138, EVALUE 5.00e-59; EST_HUMAN HIT: BI463025.1, EVALUE 8.00e-59
tcactttgccacatatcctttgggaacagagacaccagtttcttgcaataattccatactcatgtattcatgtagtgagagattcctttgctgttgctgctgtacttggagtccatggttattaaa

SEQ ID NO: 18954 - DNA, 103 bp, Homo sapiens
  MAP TO AF004877.1; EXPRESSED IN ADULT LIVER, SIGNAL = 0.76; EXPRESSED IN HEART, SIGNAL = 1.4; EXPRESSED IN LUNG, SIGNAL = 2.9; EXPRESSED IN FETAL LIVER, SIGNAL = 2.1; EXPRESSED IN BRAIN, SIGNAL = 0.76; EXPRESSED IN PLACENTA, SIGNAL = 2.5; EST_HUMAN HIT: AA341131.1, EVALUE 2.00e-49; SWISSPROT HIT: P22577, EVALUE 2.00e-05; NT HIT: AF004877.1, EVALUE 2.00e-51
ggggaacgcggtcccccaggtgagagtggtgctgccggtcctactggtcctattggaagccgaggtccttctggacccccagggcctgatggaaacaaggtaa

SEQ ID NO: 18955 - DNA, 195 bp, Homo sapiens
  MAP TO AC022150.5; EXPRESSED IN PLACENTA, SIGNAL = 1.2; EXPRESSED IN HEART, SIGNAL = 1.2; EXPRESSED IN ADULT LIVER, SIGNAL = 0.78; EST_HUMAN HIT: AI745047.1, EVALUE 7.00e-11; SWISSPROT HIT: Q91375, EVALUE 6.40e-01; NT HIT: AF149773.1, EVALUE 4.00e-21
gccactcctcagaaggctgaatcaagtcccaattcttcctcagcctccactcccccaccctgtaaccctgctgtcacctcccctccccacacccagttcggcttacaatttcgttctgcagcaaatactccccaacctgcccaacaatttcctctttgagaagtgcctggagctgagggcatcggcagagtgcat

SEQ ID NO: 18956 - DNA, 139 bp, Homo sapiens
  MAP TO AC005756.1; EXPRESSED IN PLACENTA, SIGNAL = 1.2; EXPRESSED IN ADULT LIVER, SIGNAL = 1.1; EXPRESSED IN HEART, SIGNAL = 1.2; EXPRESSED IN BRAIN, SIGNAL = 1.4; EST_HUMAN HIT: BF326445.1, EVALUE 6.90e-01; SWISSPROT HIT: Q58818, EVALUE 5.90e+00; NT HIT: gi9628431, EVALUE 7.30e+00
caaaggaggtctggtctcccggtcagaaaacaggagagagggcagggacttctccatggagaatatattcatggagaaggacgtaaaaggatccagaccagacaccacgggcacatgcgacccctcggccatcggccag

SEQ ID NO: 18957 - DNA, 113 bp, Homo sapiens
  MAP TO AF087017.1; EXPRESSED IN ADULT LIVER, SIGNAL = 1.5; EXPRESSED IN LUNG, SIGNAL = 0.92; EXPRESSED IN BRAIN, SIGNAL = 1.7; EST_HUMAN HIT: BG619275.1, EVALUE 1.40e-01; NT HIT: U41302.1, EVALUE 6.00e-03
gttgaccaccccttgctgcagctgctccggaaacagagggtgctgccctggccattttgctccttgctgggtgtctgggagggctgcgaggggaggaagaagggcagggagag

SEQ ID NO: 18958 - DNA, 405 bp, Homo sapiens
  MAP TO AF196972.1; EXPRESSED IN PLACENTA, SIGNAL = 2.2; EXPRESSED IN ADULT LIVER, SIGNAL = 1.3; EXPRESSED IN HEART, SIGNAL = 1.6; EXPRESSED IN FETAL LIVER, SIGNAL = 2.1; NT HIT: gi14759567, EVALUE 4.00e-72; EST_HUMAN HIT: AL538245.1, EVALUE 0.00e+00; SWISSPROT HIT: Q60476, EVALUE 2.00e+00
ccttcattcactccaggtcacaggctgtgcgtgtgcatgccgaacacccacatgcacacagttggtggctcagtctgatgtacctgacttctcacgccttcccccagtcctccagtaccgtgcctctacatgggctgggcagccccaaactgaaatgtgagtgccagagtgcatcctttaagcgaggtctgccccacggacacccgctccctctgtgtccctgctttgacagatctatccatctggccatccatccgtgggggtctgcaatggccacctttagccgccaggaatttttccagcagctactgcaaggctgtctcctgcctactgcccagcagggccttgaccagatctggctgctccttgccatctgcctcgcctgccgcctcctctggaggctcg

SEQ ID NO: 18959 - DNA, 203 bp, Homo sapiens
  MAP TO AL024496.5; EXPRESSED IN BONE MARROW, SIGNAL = 1.2; EXPRESSED IN PLACENTA, SIGNAL = 1.3; EXPRESSED IN ADULT LIVER, SIGNAL = 1.5; EXPRESSED IN FETAL LIVER, SIGNAL = 1.8; SWISSPROT HIT: P06489, EVALUE 7.40e-02; NT HIT: Y07848.1, EVALUE 3.00e-03; EST_HUMAN HIT: BF732727.1, EVALUE 4.00e-03
agccctgagcagggcctgtgccgggagggccagttcccctggcccagagtcgtctccctgtcccagccaggctggaggtgagtgggacgaaggggtccccagggcaggtgctgccggtgaggaggagagtggcttctccgaggttgcagcgaaggacggccaggtctggagaggatgtggcctggccagtcctgacgccggag

SEQ ID NO: 18960 - DNA, 169 bp, Homo sapiens
  MAP TO AC005307.1; EXPRESSED IN ADULT LIVER, SIGNAL = 2.2; EXPRESSED IN HEART, SIGNAL = 1.5; EXPRESSED IN FETAL LIVER, SIGNAL = 1.6; EXPRESSED IN BONE MARROW, SIGNAL = 2.9; EXPRESSED IN PLACENTA, SIGNAL = 1.8; EST_HUMAN HIT: BI464998.1, EVALUE 8.60e-01; SWISSPROT HIT: O35926, EVALUE 9.80e+00; NT HIT: X17012.1, EVALUE 2.30e+00
aactgcttctctaaataacctgaggcctctttctgcactcaagggccccatatcctctgatccctgtgttgctgcacccgaatcagcccaggctggggcagcatggattccaggtggagcagctgctgagtccctgctagtttctgagaatagctcacaagagcagagg

SEQ ID NO: 18961 - DNA, 182 bp, Homo sapiens
  MAP TO AF036876.1; EXPRESSED IN HELA, SIGNAL = 1.7; EXPRESSED IN FETAL LIVER, SIGNAL = 1.8; EXPRESSED IN BONE MARROW, SIGNAL = 1.2; EXPRESSED IN PLACENTA, SIGNAL = 1.3; EXPRESSED IN ADULT LIVER, SIGNAL = 1.5; EXPRESSED IN HEART, SIGNAL = 1.6; EST_HUMAN HIT: BF819915.1, EVALUE 2.00e-45; SWISSPROT HIT: P04197, EVALUE 1.90e+00; NT HIT: U08988.1, EVALUE 8.00e-22
ttatacagaagatctagctaagattattgatgaaggtggatgtaccaaacaacagacttttaatgtagatgaagcagctttatattggaaaaagatgccatctaggacttccatagctagaaaggagaagtcaatgcctggcttcaaagcttcaaaggatatgctgactttcttgttagggg

SEQ ID NO: 18962 - DNA, 369 bp, Homo sapiens
  MAP TO AF129076.1; EXPRESSED IN HEART, SIGNAL = 1.4; EXPRESSED IN BRAIN, SIGNAL = 1.6; EXPRESSED IN BONE MARROW, SIGNAL = 1.1; EXPRESSED IN ADULT LIVER, SIGNAL = 1.3; EST_HUMAN HIT: AL079752.1, EVALUE 5.00e-75; SWISSPROT HIT: P31695, EVALUE 3.80e+00; NT HIT: AL163246.2, EVALUE 0.00e+00
ggaatgaggatggacctctctgagtggtcaaaaaccatgaagatatttgtatcccatgtgagtgctcaccaacgggtgacctcagtagaggaggattttaataatcaattggataggatgacctgttctgtggacaccacccagcctctttccccagccacccctgtcattgcccaatgggcccataaacaaagtggccatggtggcaaggatggttgttatgcatgggctcagcaacatggacttccactcaccaaggctgacctggctgtggtcactgctgagtgcccaatttgccagcagcagagaccaacactgagccctcgatatgacaccattccttggggtgatcagccagctacctggtga

SEQ ID NO: 18963 - DNA, 251 bp, Homo sapiens
  MAP TO AC007766.1; EXPRESSED IN HELA, SIGNAL = 0.55; EXPRESSED IN BRAIN, SIGNAL = 0.74; EXPRESSED IN FETAL LIVER, SIGNAL = 1.1; EXPRESSED IN PLACENTA, SIGNAL = 0.88; EXPRESSED IN ADULT LIVER, SIGNAL = 0.68; EST_HUMAN HIT: AL580788.1, EVALUE 1.00e-123; SWISSPROT HIT: Q04725, EVALUE 4.00e-08; NT HIT: gi13376098, EVALUE 0.00e+00
acccctggggccttcctgcgcacctgcctgctgtcctcaaacagcaggagcctgctcaccggtggctacaacctggccagcgtgagcgtgtgggacctggcggcgccctccctgcatgtgaaggagcagttgccctgtgcaggtctcaactgccaggccctggatgccaacctggatgccaacctggccttcgccagcttcaccagtggtgtggtcaggatctgggacctgcgggatcagagtgtggtcag

SEQ ID NO: 18964 - DNA, 107 bp, Homo sapiens
  MAP TO AC025432.3; EXPRESSED IN HEART, SIGNAL = 2.6; EXPRESSED IN ADULT LIVER, SIGNAL = 1.2; EXPRESSED IN FETAL LIVER, SIGNAL = 1.3; NT HIT: AF110520.1, EVALUE 1.40e+00
ctgggtagatggtagggctgtttgctgaacaagaggaaacaggagaaagagcagttttaggggaaacaatcatgggaatagatttgaaatgtcttccagaagcaggt

SEQ ID NO: 18965 - DNA, 203 bp, Homo sapiens
  MAP TO AC005760.1; EXPRESSED IN PLACENTA, SIGNAL = 1.9; EXPRESSED IN ADULT LIVER, SIGNAL = 1.8; EXPRESSED IN HEART, SIGNAL =   2; EXPRESSED IN LUNG, SIGNAL = 2.7; EXPRESSED IN HELA, SIGNAL = 1.2; EXPRESSED IN FETAL LIVER, SIGNAL = 0.97; EST_HUMAN HIT: AL543183.1, EVALUE 6.70e-02; SWISSPROT HIT: P00329, EVALUE 1.90e+00; NT HIT: AJ296303.1, EVALUE 2.80e+00
agcaaatctggggagctggccaccctgtcagatgccattggctggatgcttctctttttgcaagagaaatggctgactgaggacctgcagccagacctgggacatgttgtccaggacctggacttcatgttaatggcatcttctgaaatgacagagcagcatcattactcccagtcctattctaaaaatggacccatctctag

SEQ ID NO: 18966 - DNA, 281 bp, Homo sapiens
  MAP TO AC020946.4; EXPRESSED IN FETAL LIVER, SIGNAL = 3.6; EXPRESSED IN BRAIN, SIGNAL = 3.5; EXPRESSED IN BONE MARROW, SIGNAL = 3.1; EXPRESSED IN PLACENTA, SIGNAL = 3.8; EXPRESSED IN HEART, SIGNAL = 3.4; EXPRESSED IN ADULT LIVER, SIGNAL = 3.2; NT HIT: gi14756303, EVALUE 1.00e-125; EST_HUMAN HIT: AL044131.2, EVALUE 1.00e-117; SWISSPROT HIT: Q61626, EVALUE 3.00e-40
aattcacggtaccaaacgtaccagcgcatgtggaactacatgcagtcgaagcagcccagcgtgttcgtcaagagcacagaagagggcattgcccgcgtcctcaactcccgctacgccttcctgctcgagtccaccatgaacgaataccaccggcgcctcaactgcaacctcacccagatcgggggactcctcgacaccaagggctacggcattggcatgccgctgggtacggcacagcacggtgtggaacacagcagggccgtgggcatccaaaaccacct

SEQ ID NO: 18967 - DNA, 423 bp, Homo sapiens
  MAP TO AC004175.1; EXPRESSED IN ADULT LIVER, SIGNAL = 0.45; EXPRESSED IN BONE MARROW, SIGNAL = 0.61; NT HIT: S78653.1, EVALUE 0.00e+00; EST_HUMAN HIT: AI868942.1, EVALUE 2.30e+00; SWISSPROT HIT: P35410, EVALUE 4.00e-75
atgtgtgtgtcgagtctgactctactcattagattcctgtgctgctcccagcagcaaaaggccaccagggtctatgcggtggtgcagatctcggcccccatgttcctactctgggccctacccctgagcgtggcacccctcataacagatttcaaaatgtttgtcaccacctcctatttaatttccttgttcctcattataaacagcagcgccaaccctatcatttatttctttgtggggagcctcagaaagaaaaggctgaaggaatctctcagagtgattctccaacgggcgttagcagataagccagaggtggggaggaacaaaaaggcagctggcatcgacccaatggagcaaccacactctactcagcatgtggagaaccttcttcccagggagcacagggtcgatgtggaaacataa

SEQ ID NO: 18968 - DNA, 88 bp, Homo sapiens
  MAP TO AF241735.1; EXPRESSED IN FETAL LIVER, SIGNAL = 0.55; EXPRESSED IN BONE MARROW, SIGNAL =   1; EXPRESSED IN PLACENTA, SIGNAL = 0.8; EXPRESSED IN ADULT LIVER, SIGNAL = 0.88; EST_HUMAN HIT: T57388.1, EVALUE 4.00e-01; NT HIT: AE003959.1, EVALUE 4.00e-03
atggcgattgatcgggatccccagaagcagatcctgagatggaaattcacgtgcgagtatttgattaagggcatgctcccagtgggag

SEQ ID NO: 18969 - DNA, 145 bp, Homo sapiens
  MAP TO AL031033.5; EXPRESSED IN PLACENTA, SIGNAL = 1.2; EXPRESSED IN ADULT LIVER, SIGNAL = 1.4; EXPRESSED IN LUNG, SIGNAL = 0.99; EXPRESSED IN FETAL LIVER, SIGNAL = 1.8; SWISSPROT HIT: Q00145, EVALUE 2.30e-01; EST_HUMAN HIT: BE898071.1, EVALUE 5.00e-76; NT HIT: gi14777082, EVALUE 3.00e-76
gaacgtggaggaactctgccgcttccctgagctgcctgcccgcaagcccctcacctaccagacgaagcagctcatcgcccgcgagatcgaggtggagaagatgcggcgggcggaggcttctgcccgggtagagaacagcccccag

SEQ ID NO: 18970 - DNA, 122 bp, Homo sapiens
  MAP TO AC019183.3; EXPRESSED IN HELA, SIGNAL = 0.7; EXPRESSED IN BONE MARROW, SIGNAL = 0.59; EXPRESSED IN PLACENTA, SIGNAL = 0.64; EXPRESSED IN ADULT LIVER, SIGNAL = 0.65; EST_HUMAN HIT: BG987926.1, EVALUE 2.30e+00; SWISSPROT HIT: P50852, EVALUE 6.90e-01; NT HIT: gi16195826, EVALUE 6.30e+00
gaaggggagcaagaaggcgggcattaaaagccaggctgagaaacaaaatgagccccaaagggatgaaaatgacactatggggcagaggaatgacgtggagcagtcgaagcaatggaacctga

SEQ ID NO: 18971 - DNA, 258 bp, Homo sapiens
  MAP TO AC008462.5; EXPRESSED IN PLACENTA, SIGNAL = 0.93; EXPRESSED IN ADULT LIVER, SIGNAL = 0.9; EXPRESSED IN HEART, SIGNAL = 1.2; SWISSPROT HIT: P34284, EVALUE 2.00e-06; EST_HUMAN HIT: BF371400.1, EVALUE 1.00e-130; NT HIT: AF176529.1, EVALUE 6.00e-82
ctgcttgagtccttcatcagtgagtttgtcctggttgcctacatgcactttctgaagtaaaggacagtgagaggcaaccgcaataatagaggtgtcagaaagctgtttacacctgtaggctgtatacctaagaagtccaggacatttaaatgctaaaacacatacgccattatcagacatactgcgacaatcagaaatgttgatttcaattatattctgacttcttgatgcaattttttccaacaattcatcagtgac

SEQ ID NO: 18972 - DNA, 186 bp, Homo sapiens
  MAP TO AL050328.24; EXPRESSED IN ADULT LIVER, SIGNAL = 0.71; EXPRESSED IN LUNG, SIGNAL = 0.78; EXPRESSED IN PLACENTA, SIGNAL = 0.76; NT HIT: Z48051.1, EVALUE 4.00e-98; SWISSPROT HIT: Q16653, EVALUE 9.00e-09; EST_HUMAN HIT: AL564845.1, EVALUE 3.00e-59
atgctgagtgttggggattcagctctggacaatgtcaaatgtcagtcctgcctttcagatcctttctactgggtgagccctggagtgctggttctcctcgcggtgctgcctgtgctcctcctgcagatcactgttggcctcgtcttcctctgcctgcagtacagactgagaggtacagggcagagg

SEQ ID NO: 18973 - DNA, 137 bp, Homo sapiens
  MAP TO AC020626.6; EXPRESSED IN FETAL LIVER, SIGNAL = 0.68; EXPRESSED IN BRAIN, SIGNAL = 1.1; EXPRESSED IN BONE MARROW, SIGNAL = 1.3; EXPRESSED IN PLACENTA, SIGNAL = 0.63; EXPRESSED IN ADULT LIVER, SIGNAL = 0.75; NT HIT: AJ132780.1, EVALUE 4.60e-01
ctgtatcttcatggacagagaagcagatattacatctgctgaatcagagatcttgaaaattaagtcttcgatcatagacattttttttttgaaaattaagtctttgatcatagacatttttttaaaaagtagatgga

SEQ ID NO: 18974 - DNA, 104 bp, Homo sapiens
  MAP TO AC013455.4; EXPRESSED IN BONE MARROW, SIGNAL = 0.52; EXPRESSED IN BRAIN, SIGNAL = 0.48; EXPRESSED IN ADULT LIVER, SIGNAL = 0.51; NT HIT: AJ229042.1, EVALUE 3.30e-01
attttcaagttattatactgacttccagatttcagagtagttctttgcagagtggaaatgtttaagtgaacaaacatccaaatatgtttcatgaatgatttcat

SEQ ID NO: 18975 - DNA, 253 bp, Homo sapiens
  MAP TO AC006127.1; EXPRESSED IN BONE MARROW, SIGNAL = 1.2; EXPRESSED IN PLACENTA, SIGNAL = 0.94; EXPRESSED IN ADULT LIVER, SIGNAL = 1.3; NT HIT: AF254822.1, EVALUE 0.00e+00; SWISSPROT HIT: P51532, EVALUE 2.00e-37; EST_HUMAN HIT: BG328736.1, EVALUE 1.00e-126
gacctgcaagcgcaggaccgagcccaccgcatcgggcagcagaacgaggtgcgtgtgctccgcctctgcaccgtcaacagcgtggaggagaagatcctagctgcagccaagtacaagctcaacgtggaccagaaggtgatccaggccggcatgttcgaccagaagtcctccagccatgagcggcgcgccttcctgcaggccatcctggagcacgaggagcaggatgaggtgagcccagcaccggccccgaccc

SEQ ID NO: 18976 - DNA, 169 bp, Homo sapiens
  MAP TO AC005596.1; EXPRESSED IN ADULT LIVER, SIGNAL = 3.4; EXPRESSED IN HEART, SIGNAL = 3.6; EXPRESSED IN FETAL LIVER, SIGNAL = 2.4; EXPRESSED IN LUNG, SIGNAL = 2.7; EXPRESSED IN BONE MARROW, SIGNAL = 3.4; EXPRESSED IN BRAIN, SIGNAL = 3.5; EXPRESSED IN PLACENTA, SIGNAL = 3.5; SWISSPROT HIT: P07657, EVALUE 8.70e-01; EST_HUMAN HIT: BF204233.1, EVALUE 1.40e-02
cttccctgtgtttggacaaaggcttccagaccactgcattgccagctgtctttgctccttgcccctgaagcttttagcaccctctggatgcttctccctctaggggagatctggctaattaacactttgaccagcgtctggccaggatcggggtggcgatgtgacccac

SEQ ID NO: 18977 - DNA, 226 bp, Homo sapiens
  MAP TO AL031716.8; EXPRESSED IN BRAIN, SIGNAL =   1; EXPRESSED IN BONE MARROW, SIGNAL = 0.84; EXPRESSED IN PLACENTA, SIGNAL = 2.1; EXPRESSED IN ADULT LIVER, SIGNAL = 0.8; EXPRESSED IN HEART, SIGNAL =   2; SWISSPROT HIT: P02674, EVALUE 1.50e-02; EST_HUMAN HIT: BE274626.1, EVALUE 3.00e-01
tcacgtggacgtctccaatcctccatgctctgccccaccctgggccccaccccacactgtcctcagatcccctcccgtaccccagcggggccccatccctgcctcctgctcctcttctgaaggccccagctctccccaaaaccttgtcctctggtcacaatgctcagggtccttagtgtctccctgtgcaccccagctcccctgcgtggagtctggaaagtcatcc

SEQ ID NO: 18978 - DNA, 145 bp, Homo sapiens
  MAP TO AC000080.2; EXPRESSED IN BRAIN, SIGNAL =   2; EXPRESSED IN HEART, SIGNAL = 3.5; EXPRESSED IN ADULT LIVER, SIGNAL = 2.1; EXPRESSED IN LUNG, SIGNAL = 0.47; SWISSPROT HIT: Q90404, EVALUE 4.50e+00; EST_HUMAN HIT: BF515652.1, EVALUE 4.70e-02
ctgtactggctctccctggattactggatcgcagtcgaatcccctgccagaatcctggtccccctttatcacaccggatcagccccaaagggcagggcttcttgcagcagttccagcctttgctgggggtttccagccctgttga

SEQ ID NO: 18979 - DNA, 289 bp, Homo sapiens
  MAP TO AC007207.22; EXPRESSED IN PLACENTA, SIGNAL = 1.2; EXPRESSED IN ADULT LIVER, SIGNAL = 1.2; EXPRESSED IN BONE MARROW, SIGNAL = 0.93; EXPRESSED IN BRAIN, SIGNAL = 1.5; EXPRESSED IN LUNG, SIGNAL = 0.81; SWISSPROT HIT: P12001, EVALUE 1.00e-26; EST_HUMAN HIT: AW406406.1, EVALUE 4.00e-47; NT HIT: gi14760401, EVALUE 7.00e-45
cttgagtttgggcacctccagcacgggcacaacatccattatgatccccacaaccacagctgttttgttcttccagccagaaagcttcatcttccccatcatatgggagagagacagaggtggccagtttctgtgactcattaacaatgtcttcagcacaacctggttgaaggtggagttggttcatctggccggaaacctgaacagcttgaccaacagcctttggtggatgtcctggctcttgggctcctgatgccgaaccttttggtccttgtcatggcaaacatca

SEQ ID NO: 18980 - DNA, 173 bp, Homo sapiens
  MAP TO AF181449.1; EXPRESSED IN BONE MARROW, SIGNAL = 2.1; EXPRESSED IN ADULT LIVER, SIGNAL = 0.59; EXPRESSED IN HELA, SIGNAL =   2; EXPRESSED IN LUNG, SIGNAL = 5.5; NT HIT: gi13642859, EVALUE 8.00e-93; SWISSPROT HIT: Q01469, EVALUE 9.00e-28; EST_HUMAN HIT: BF981201.1, EVALUE 1.00e-92
gagtgggaatagctttgcgaaaaatgggcgcaatggccaagccagattgtatcatcacttgtgatggtaaaaacctcaccataaaaactgagagcactttgaaaacaacacagttttcttgtaccctgggagagaagtttgaagaaaccacagctgatggcagaaaaactcag

SEQ ID NO: 18981 - DNA, 370 bp, Homo sapiens
  MAP TO AJ251973.1; EXPRESSED IN ADULT LIVER, SIGNAL =  11; EXPRESSED IN HEART, SIGNAL = 9.2; EXPRESSED IN BRAIN, SIGNAL =  10; EXPRESSED IN FETAL LIVER, SIGNAL =  12; EXPRESSED IN BONE MARROW, SIGNAL =  12; EXPRESSED IN PLACENTA, SIGNAL =  12; SWISSPROT HIT: P50494, EVALUE 1.50e-01; EST_HUMAN HIT: BF842513.1, EVALUE 0.00e+00; NT HIT: AJ251973.1, EVALUE 0.00e+00
ctccctggagatgacctgctacgacagcgatgatgccaacccacgcagcgtgtccagcctctccaaccgctcgtcccctctgtcatggcgctatggccagtccagtccgcggctgcaggctggtgacgcgccctctgtgggtgggagctgccgctcggaggggacgcccgcctggtacatgcacggcgaacgggcccactactcccacaccatgcccatgcgcagccccagcaagctcagccatatctcccgcctggagctggtcgaatccctggactcggatgaggtggacctcaagtccggctacatgagcgacagtgacctcatgggcaagaccatgacggaggatgatgacatcactaccgggtaa

SEQ ID NO: 18982 - DNA, 170 bp, Homo sapiens
  MAP TO AC020728.4; EXPRESSED IN BONE MARROW, SIGNAL = 1.4; EXPRESSED IN PLACENTA, SIGNAL =   2; EXPRESSED IN HEART, SIGNAL = 2.1; EXPRESSED IN ADULT LIVER, SIGNAL = 1.6; SWISSPROT HIT: P11801, EVALUE 2.00e-16; EST_HUMAN HIT: BI000996.1, EVALUE 3.00e-74; NT HIT: gi14776112, EVALUE 5.00e-32
gtggtcttcatcaggccgttgtagttgttgctgttcttgcaggcactgaccagattgaagtcagtgatgatgatcttggagtcagtgcctggatggtggtagagcagattgtgaggcttgaggtcttggtttgtgatgcccagtgcatgcagatactggatgccatctag

SEQ ID NO: 18983 - DNA, 118 bp, Homo sapiens
  MAP TO AC005789.1; EXPRESSED IN PLACENTA, SIGNAL = 2.3; EXPRESSED IN ADULT LIVER, SIGNAL = 3.6; EXPRESSED IN HELA, SIGNAL = 1.8; EXPRESSED IN FETAL LIVER, SIGNAL = 1.9; SWISSPROT HIT: P24152, EVALUE 2.00e+00; EST_HUMAN HIT: AI016248.1, EVALUE 5.00e-60; NT HIT: AE005754.1, EVALUE 3.90e-01
tcagttggaatgggtggcctgcaagtcgtagtgctccagcttggccaccagagagccggacagcttgatggtggcaacccagggtggctcgcccaggtggttggtggatgtgctcagc

SEQ ID NO: 18984 - DNA, 471 bp, Homo sapiens
  MAP TO AC005239.1; EXPRESSED IN BRAIN, SIGNAL = 0.88; EXPRESSED IN PLACENTA, SIGNAL = 7.3; EXPRESSED IN ADULT LIVER, SIGNAL = 0.77; SWISSPROT HIT: P05143, EVALUE 1.40e+00; EST_HUMAN HIT: BG831907.1, EVALUE 0.00e+00; NT HIT: gi16163266, EVALUE 0.00e+00
ccatcgtcagccagtggcagcaggagtccaaagagaaggtggtgtccctcctgctgtcccaccttcccctgcttcagccaggcaacacagaggccaagtcggagtacatgaggctactgcagaaagtgctggcctactcaatcgagagcaatgctttcatcgaggagagtcgccagctgctttcctatgccctcatccacccagccaccacactggaggaccgcaacgcactggccctctggctgagccacctggaagagcggttggctagtggcttccgctcccggccagagccctcctaccattcacgtcaaggctcagatgagtgggggggccctgcagagctaggccctggggaggcagggccaggctggcaggacaagccaccccgggaaaatggacacgtgcccttccacccatccagctcagtgccgccagccatcaacagtattgggagcaatgcaaacacag

SEQ ID NO: 18985 - DNA, 245 bp, Homo sapiens
  MAP TO AC008580.5; EXPRESSED IN ADULT LIVER, SIGNAL = 1.1; EXPRESSED IN LUNG, SIGNAL = 0.7; EXPRESSED IN BRAIN, SIGNAL = 1.1; EXPRESSED IN PLACENTA, SIGNAL = 0.84; NT HIT: AL163303.2, EVALUE 3.50e+00; EST_HUMAN HIT: AW089240.1, EVALUE 3.30e-01
atagaagagaaaaatgagatttttacaaatgccaagttcaaaggaggaaaatccactgtgtctcagcactgtgagggaaagtttcttgagggaagtagtgcaggcaaaggccttgaagattgggagggacatgataaactcagcacctgccatcgtgtcagtcagctttggggatgaagaaagcacatgtggcctcaacgtgttactgctggcagaggtggaactagtcaaattattcagttcta

SEQ ID NO: 18986 - DNA, 220 bp, Homo sapiens
  MAP TO AJ239328.2; EXPRESSED IN ADULT LIVER, SIGNAL = 0.38; EXPRESSED IN LUNG, SIGNAL = 0.86; EXPRESSED IN BONE MARROW, SIGNAL = 0.73; NT HIT: AL163303.2, EVALUE 1.00e-118; SWISSPROT HIT: Q12381, EVALUE 6.00e-01; EST_HUMAN HIT: AJ003574.1, EVALUE 1.00e-120
ctggagttggttctgaggaggtttctcttctctaaaccattttgaacgtttgcccagctcagtagctgctcctcgtaacgcagttccagtctgtgtgctgctccctctgaactgcgagaggcgcctctgagctggttgggaggtggccgccaggtgagcgggctgctccagagccttctgcaaaccctgatgcttttgagttgggggcaaggacgtccat

SEQ ID NO: 18987 - DNA, 132 bp, Homo sapiens
  MAP TO AC006479.2; EXPRESSED IN BONE MARROW, SIGNAL =   1; EXPRESSED IN ADULT LIVER, SIGNAL = 1.2; EXPRESSED IN PLACENTA, SIGNAL =   1; EXPRESSED IN FETAL LIVER, SIGNAL = 1.1; EST_HUMAN HIT: BG751371.1, EVALUE 1.60e-01; SWISSPROT HIT: Q9QZB1, EVALUE 3.50e+00
atgttctcagtcaggacagaaaactgccaagcctggcgcttctggaacttcatcctactgtctagtcttttgtgccctcatcacatgcctgttcctgaagcccaggaacagagagaagctcctctggatcag

SEQ ID NO: 18988 - DNA, 119 bp, Homo sapiens
  MAP TO AL031707.17; EXPRESSED IN ADULT LIVER, SIGNAL = 1.5; EXPRESSED IN HEART, SIGNAL = 2.8; EXPRESSED IN FETAL LIVER, SIGNAL = 2.1; EXPRESSED IN LUNG, SIGNAL = 1.9; EXPRESSED IN PLACENTA, SIGNAL = 1.7; SWISSPROT HIT: P03204, EVALUE 6.90e-01; NT HIT: X98999.2, EVALUE 2.50e-02; EST_HUMAN HIT: BE561478.1, EVALUE 1.50e-01
cggtgagccggcgtcggggccacagccttcactcccagccgctgcaggtccccgtttccgtacgtcacccagcgccacgcttctgcacccacgcagagccaccccacctgtgcgttcat

SEQ ID NO: 18989 - DNA, 218 bp, Homo sapiens
  MAP TO AC022078.12; EXPRESSED IN BRAIN, SIGNAL = 1.3; EXPRESSED IN FETAL LIVER, SIGNAL = 1.2; EXPRESSED IN LUNG, SIGNAL = 0.76; EXPRESSED IN ADULT LIVER, SIGNAL = 1.3; SWISSPROT HIT: Q02000, EVALUE 1.00e+00; EST_HUMAN HIT: BI913207.1, EVALUE 5.00e-03
ttagctgccattggcgtttccttggccatgactgtccaggaggctccagagagagaagctggtttgcgtggcctcctcctccccacgttctgaattcagatcacagctcctgagcctctggactgacaggatgtactctgctgtcagctgtttccttccaactctgagatctcccagcatctggctccgctcccttctgccccatggatcctcactcc

SEQ ID NO: 18990 - DNA, 145 bp, Homo sapiens
  MAP TO AC006522.5; EXPRESSED IN ADULT LIVER, SIGNAL = 0.34; SWISSPROT HIT: Q00722, EVALUE 3.40e+00; NT HIT: AF139978.1, EVALUE 3.00e-76
ggtgttgccactgtccaagtcgctgtgcctagaacagatgagacagagattgaataactcgtcccttaagaaatatcaaatagatgatggaacagcaacgttcaagattttaaagttacaaaacctgtactctttaatgaactga

SEQ ID NO: 18991 - DNA, 128 bp, Homo sapiens
  MAP TO AJ007973.1; EXPRESSED IN PLACENTA, SIGNAL = 5.1; EXPRESSED IN ADULT LIVER, SIGNAL =  12; EXPRESSED IN HEART, SIGNAL = 6.6; EXPRESSED IN FETAL LIVER, SIGNAL =  11; EXPRESSED IN BRAIN, SIGNAL = 6.5; SWISSPROT HIT: P18627, EVALUE 3.10e-01; NT HIT: AJ007973.1, EVALUE 4.00e-66; EST_HUMAN HIT: BG704251.1, EVALUE 6.00e-66
aagacccagccatccccatgcccccaagacagttccaccagctggccgcccagggaccccaggagtgcttggtccgtatctacattgtccgagcatttggcctgcagcccaaggaccccaatggaaag

SEQ ID NO: 18992 - DNA, 149 bp, Homo sapiens
  MAP TO AC006138.1; EXPRESSED IN ADULT LIVER, SIGNAL = 1.6; EXPRESSED IN HEART, SIGNAL = 1.8; EXPRESSED IN PLACENTA, SIGNAL = 1.5; SWISSPROT HIT: P43535, EVALUE 2.00e-05; NT HIT: gi14761357, EVALUE 1.00e-78; EST_HUMAN HIT: BG762168.1, EVALUE 2.00e-78
ctggccagggagacacgcatgcgccagccccctgagaacttctgtgtgggtcgattctgcatttcagggtcaaagcccaggccagccaggatccgccgtgctttggcctctgcagctgccgccccagtggcccgcaattcctcatacac

SEQ ID NO: 18993 - DNA, 104 bp, Homo sapiens
  MAP TO AL118559.4; EXPRESSED IN ADULT LIVER, SIGNAL =   3; EXPRESSED IN HEART, SIGNAL = 4.7; EXPRESSED IN BONE MARROW, SIGNAL =   3; EXPRESSED IN PLACENTA, SIGNAL = 4.7; SWISSPROT HIT: P70549, EVALUE 9.00e-03; EST_HUMAN HIT: AW997120.1, EVALUE 9.00e-09; NT HIT: AY009158.1, EVALUE 1.00e-16
ctggccagcaaacagtccgcacactccaattatgcacaggatgttgaacacagcagagcccacgatggtgcccaccccgacgtccccatgggtgatgaacaccc

SEQ ID NO: 18994 - DNA, 234 bp, Homo sapiens
  MAP TO AC020894.3; EXPRESSED IN BONE MARROW, SIGNAL = 1.3; EXPRESSED IN PLACENTA, SIGNAL = 1.6; EXPRESSED IN ADULT LIVER, SIGNAL = 1.3; EXPRESSED IN BRAIN, SIGNAL = 1.4; EXPRESSED IN FETAL LIVER, SIGNAL = 1.1; SWISSPROT HIT: P08120, EVALUE 3.20e-02; EST_HUMAN HIT: BG674332.1, EVALUE 1.00e-129; NT HIT: gi14733011, EVALUE 1.00e-129
ccttcctcggtcaagtcgctgcgctccgagcgtctgatccgtacctcgctggacctggagttagacctgcaggcgacaagaacctggcacagccaattgacccaggagatctcggtgctgaaggagctcaaggagcagctggaacaagccaagagccacggggagaaggagctgccacagtggttgcgtgaggacgagcgtttccgcctgctgctgaggatgctggagaagcgg

SEQ ID NO: 18995 - DNA, 78 bp, Homo sapiens
  MAP TO AC006049.1; EXPRESSED IN ADULT LIVER, SIGNAL = 0.93; EXPRESSED IN HEART, SIGNAL = 1.6; EXPRESSED IN BRAIN, SIGNAL =   1; EXPRESSED IN FETAL LIVER, SIGNAL = 0.85; NT HIT: gi14761371, EVALUE 1.00e-36; EST_HUMAN HIT: BI830965.1, EVALUE 2.00e-36
ctgaactctgtgagaacctcggaagagagatagcataggaagccgcctcagcacggtgtttaatacagacgccgccat

SEQ ID NO: 18996 - DNA, 177 bp, Homo sapiens
  MAP TO AC005793.1; EXPRESSED IN BONE MARROW, SIGNAL = 3.7; EXPRESSED IN PLACENTA, SIGNAL = 1.8; EXPRESSED IN ADULT LIVER, SIGNAL = 3.1; EXPRESSED IN HEART, SIGNAL = 2.8; EXPRESSED IN BRAIN, SIGNAL = 2.7; EST_HUMAN HIT: AA458533.1, EVALUE 2.30e-01; NT HIT: AB033023.1, EVALUE 6.20e-01; SWISSPROT HIT: Q10339, EVALUE 9.80e+00
ctactggggtggctcctctaggttcagccctccaaggtgatcctgctttctcatggacagcttccacttattttcctcctcctcctcctcctcctccttctccttctcctcctcctcctcctcctcctggaagccctggggctggtgccatgtggtccatgctgacttctctcccat

SEQ ID NO: 18997 - DNA, 115 bp, Homo sapiens
  MAP TO AF245226.1; EXPRESSED IN FETAL LIVER, SIGNAL = 2.2; EXPRESSED IN BONE MARROW, SIGNAL = 1.7; EXPRESSED IN PLACENTA, SIGNAL = 1.5; EXPRESSED IN ADULT LIVER, SIGNAL = 1.5; NT HIT: AB032482.1, EVALUE 3.80e-01; EST_HUMAN HIT: AW810633.1, EVALUE 8.60e+00
cctttctatcatgtaaggacatagcgagagaaagcacaacctttgaattaggaaatgggctctcactagaaaccgtgtttgctggcacctgaattttgtgtttgccagtctccac

SEQ ID NO: 18998 - DNA, 243 bp, Homo sapiens
  MAP TO AC006541.1; EXPRESSED IN BONE MARROW, SIGNAL = 2.1; EXPRESSED IN PLACENTA, SIGNAL = 4.3; EXPRESSED IN ADULT LIVER, SIGNAL =   4; EXPRESSED IN HEART, SIGNAL = 5.3; EXPRESSED IN BRAIN, SIGNAL =   4; SWISSPROT HIT: Q9Y5R5, EVALUE 1.40e+00
tcagatgactttgccattcaggctgttcatggaatgagggaccctcacgatggccacgaatctgtctcctagctcaggctctgagttcagagagacaggactgaacttggaggctctaagctcagaaagtaggatctgtggggccacactttgggcaatgtctggccctgcagttccaccgctaccaaggtgatcaattcttctgcagtcattcttgtagaggcaggtgtggcctggggacat

SEQ ID NO: 18999 - DNA, 383 bp, Homo sapiens
  MAP TO AL008708.4; EXPRESSED IN LUNG, SIGNAL = 3.7; EXPRESSED IN PLACENTA, SIGNAL = 2.4; EXPRESSED IN ADULT LIVER, SIGNAL = 2.6; SWISSPROT HIT: Q00994, EVALUE 2.00e-07; NT HIT: gi16172829, EVALUE 0.00e+00; EST_HUMAN HIT: AL526247.1, EVALUE 0.00e+00
tcagggcataaggcaaaactcatcatgatggtcatggtgaggggggtcagtgctgactgcccgcagactatgactcaactgcttttccctcagcttttccatcagctgtctcacctcctccccaatcctttccatattctcttctctcatccttgcctgtggttctccaagcctatgcatcatatcccatctatactgcaggatgggctgcctaacgcggaaccgcctacgatttcctctaggcacacagtattcaccagcatccaaagggagggccaagggctcccctttattagcaacttgctccttttcttcattttcttggttggcattttccatgctgagactgtttactgctcgtttctctttggactccattactc

SEQ ID NO: 19000 - DNA, 92 bp, Homo sapiens
  MAP TO AC006133.1; EXPRESSED IN ADULT LIVER, SIGNAL = 0.6; EXPRESSED IN LUNG, SIGNAL = 0.69; EXPRESSED IN FETAL LIVER, SIGNAL = 1.3; SWISSPROT HIT: P34959, EVALUE 6.20e+00; NT HIT: X97445.1, EVALUE 1.10e+00; EST_HUMAN HIT: AA587133.1, EVALUE 4.20e-01
ctagtctttgaaaatgtccttgatgcctaagtccaccaaagctgtttcctctggggtgctgtccgtgatgctgagcactggtgcttctaggc

SEQ ID NO: 19001 - DNA, 180 bp, Homo sapiens
  MAP TO AC012384.16; EXPRESSED IN ADULT LIVER, SIGNAL =   1; EXPRESSED IN HEART, SIGNAL =   1; EXPRESSED IN BRAIN, SIGNAL = 1.2; SWISSPROT HIT: O00159, EVALUE 2.00e-21; NT HIT: X58479.1, EVALUE 7.00e-10; EST_HUMAN HIT: BG765057.1, EVALUE 6.00e-08
ctgtgagaggtatttatacagctgggggtctcgctcgagtcccaggtaagacaggcgctcctcttcgccacctgccagcagctggtagaagatgtggaaattccgctcgccttcgttttggtagacaactcgggacttctctatcaagtaactgatgatatgcccacctacgggaatgcc

SEQ ID NO: 19002 - DNA, 344 bp, Homo sapiens
  MAP TO AC007207.22; EXPRESSED IN PLACENTA, SIGNAL = 0.79; EXPRESSED IN ADULT LIVER, SIGNAL =   1; EXPRESSED IN LUNG, SIGNAL = 0.85; EXPRESSED IN BRAIN, SIGNAL = 1.1; EXPRESSED IN FETAL LIVER, SIGNAL = 0.71; SWISSPROT HIT: Q9KNZ9, EVALUE 8.90e-01; EST_HUMAN HIT: R96276.1, EVALUE 5.00e-04; NT HIT: AF267747.1, EVALUE 3.20e-01
atgttgccaaggctggggcctcatcagaaaactctacggaagaacaatcctcttccaaacgcagacgttgttggagatctttatcttctctggttgctggccagaggctacccttggttccttgccatgtggacccatccagtagagtccactagcaagagagaagtcaaaatatcttgtaacctaatcacagaagtgatgtcccttcaactttgccatattgtattgattaaaattaagtcaataggtccagctcctactcaagcagagggagttctatacaaggacaggaataccaagaggcaggagtcactggggccaccttggaagtcttcctatcacag

SEQ ID NO: 19003 - DNA, 96 bp, Homo sapiens
  MAP TO AC006506.1; EXPRESSED IN ADULT LIVER, SIGNAL = 0.98; EXPRESSED IN FETAL LIVER, SIGNAL = 0.71; NT HIT: Z73039.1, EVALUE 4.70e+00; SWISSPROT HIT: P37149, EVALUE 3.60e+00; EST_HUMAN HIT: AA338034.1, EVALUE 6.90e+00
ctgggccaggtgacagaactcagagcctttggctgcttcaggagatgtcaccatggctgtctcttcttggtcaaagttccagttggccaagacatc

SEQ ID NO: 19004 - DNA, 183 bp, Homo sapiens
  MAP TO AL096808.1; EXPRESSED IN BRAIN, SIGNAL = 2.6; EXPRESSED IN HELA, SIGNAL =   2; EXPRESSED IN HEART, SIGNAL =   2; EXPRESSED IN ADULT LIVER, SIGNAL =   3; EXPRESSED IN PLACENTA, SIGNAL = 2.7; EXPRESSED IN LUNG, SIGNAL =   5; EXPRESSED IN FETAL LIVER, SIGNAL = 3.1; EST_HUMAN HIT: BG706157.1, EVALUE 3.00e-96; NT HIT: AL096808.1, EVALUE 9.00e-99; SWISSPROT HIT: P54741, EVALUE 1.70e-01
ccaatcccatggggatgctcctgtgctctgcagacatctgggtgctgccacaggggcccgacagagttggcatctgggtggatctgagccaagtggtgcttctgggcctcagcaagtagctggtgctgattctgggcagccaactgtggcagcatcttcaggtgcgagtgctgctgggtgaag

SEQ ID NO: 19005 - DNA, 271 bp, Homo sapiens
  MAP TO AC022101.3; EXPRESSED IN FETAL LIVER, SIGNAL = 8.6; EXPRESSED IN BRAIN, SIGNAL = 8.2; EXPRESSED IN LUNG, SIGNAL = 4.2; EXPRESSED IN ADULT LIVER, SIGNAL = 8.5; SWISSPROT HIT: O51157, EVALUE 4.90e+00; EST_HUMAN HIT: AL521707.1, EVALUE 1.00e-62; NT HIT: AL163303.2, EVALUE 3.00e-38
ttagagttcttttactatttctactacatctgcggtaacttcctctactgaagtcttgaacctctcaaagtcatccatgagggttggaaccaacttcttccaaactcttgttaatactgatattatgacctcctcccatgaatcatgcatgttcttaatggcacctaggatggtgaattctttccagaaggttttcaatttactttgcccagattcatcagaaaaatcactatctgtggcagctatagccttacagaatgtatttcttaaa

SEQ ID NO: 19006 - DNA, 360 bp, Homo sapiens
  MAP TO AC020914.6; EXPRESSED IN PLACENTA, SIGNAL = 5.7; EXPRESSED IN ADULT LIVER, SIGNAL = 1.1; EXPRESSED IN BRAIN, SIGNAL = 1.2; EXPRESSED IN HELA, SIGNAL = 1.1; EXPRESSED IN BONE MARROW, SIGNAL = 0.83; SWISSPROT HIT: P20138, EVALUE 4.00e-32; EST_HUMAN HIT: AL542471.1, EVALUE 0.00e+00; NT HIT: gi14754841, EVALUE 0.00e+00
ccatcacacgcacagagagcttggaagatgtataaccgtatttcatccatttggacttcaaccgaaagaagtatgcagcattgtccctcctccgggcatctctgatgctcagggagcagttcttccttctgggatcccagaggaggtggaatcggccccgggtctcctcctgcacttcttcgtctgggtcgtttgtggccactggaacatcagccccttccaggaaccagtagccataaccatagtacgaggctggaagggtagtgggcaatctgcagggtacgaggacgcacagaccctcctgcaccgtcagtgactctggcccctccagctggaatctccgctcctgagccagggccc

SEQ ID NO: 19007 - DNA, 186 bp, Homo sapiens
  MAP TO AF172277.1; EXPRESSED IN FETAL LIVER, SIGNAL = 1.6; EXPRESSED IN BRAIN, SIGNAL = 1.2; EXPRESSED IN HELA, SIGNAL = 1.4; EXPRESSED IN BONE MARROW, SIGNAL = 0.95; EXPRESSED IN ADULT LIVER, SIGNAL = 1.1; EXPRESSED IN PLACENTA, SIGNAL = 1.2; SWISSPROT HIT: P02469, EVALUE 3.00e-07; NT HIT: AF071164.1, EVALUE 6.50e-01
ggctcggagacgtttggccagagtcctgctgttcacgttgttttaggagagccagttcctgggaaccctgttacatggactggacctggatttgccagggttctccctggggctggcttgagatttgctgtcaacaacattccctttcctgtggacttcaccattgccattcactatgaaacccag

SEQ ID NO: 19008 - DNA, 180 bp, Homo sapiens
  MAP TO AL117191.4; EXPRESSED IN BRAIN, SIGNAL = 0.7; EXPRESSED IN FETAL LIVER, SIGNAL = 0.41; EXPRESSED IN BONE MARROW, SIGNAL = 0.87; EXPRESSED IN PLACENTA, SIGNAL = 0.62; EXPRESSED IN ADULT LIVER, SIGNAL = 0.63; SWISSPROT HIT: Q27519, EVALUE 2.50e+00; NT HIT: AL163227.2, EVALUE 2.50e+00
ctaccttctagaatagggtgtaggaaactggatgggagggaagggttgcactgaatcagccagagggctgagctttgcaccatgacccttcccactatggcaatgatgtggcatctcactggccagcacattggtaatttgagtatgtcttttgttatgttctctgtatttagaattaag

SEQ ID NO: 19009 - DNA, 390 bp, Homo sapiens
  MAP TO AL118559.4; EXPRESSED IN HEART, SIGNAL = 3.7; EXPRESSED IN ADULT LIVER, SIGNAL = 3.8; EXPRESSED IN LUNG, SIGNAL = 4.9; EXPRESSED IN FETAL LIVER, SIGNAL = 4.6; EXPRESSED IN BRAIN, SIGNAL =   5; EXPRESSED IN HELA, SIGNAL = 2.9; EXPRESSED IN BONE MARROW, SIGNAL = 4.4; EXPRESSED IN PLACENTA, SIGNAL = 4.2; EST_HUMAN HIT: BG177113.1, EVALUE 1.40e-01; SWISSPROT HIT: P46414, EVALUE 8.30e-01; NT HIT: X94741.1, EVALUE 9.30e-02
tattgtacctggtaatcttaggaggtgtttattttctctttccccttggacagccaatgagcaagacacagtggttgctagcaagcgttcctccaggtacgggaggtgatgctgcgatttctcagggggcagtttcaggtgcacactgctgtctgcgtaaatgcccttccacagcctccacctaccctttgaggccaggctcagacgtggtctgctccagggagggcactcttgccctgaaccaccacactctttcctctgtggcaccctccctaggaagatcccccaccgtggtatttgcggcaggtggcttggtctggtttttgagccctggcctgtcttccccatgctcactgacagcagggactgggtgccttccagcttcagagc

SEQ ID NO: 19010 - DNA, 164 bp, Homo sapiens
  MAP TO AC007343.4; EXPRESSED IN ADULT LIVER, SIGNAL = 2.1; EXPRESSED IN LUNG, SIGNAL = 0.94; EXPRESSED IN FETAL LIVER, SIGNAL = 1.7; EXPRESSED IN BRAIN, SIGNAL = 2.1; EXPRESSED IN PLACENTA, SIGNAL = 2.6; NT HIT: AE008686.1, EVALUE 1.40e-01; SWISSPROT HIT: O75348, EVALUE 8.70e-01
tgggcccaccagtcagtctcccagaccacagtaggggaaaatggtggcttcctttcactagagggtgtgataaatgctactgtgtttttcttgactgctcctctatttttcctggcataggcctggagcagggtgtgctttgtggctgtgtcactgccaattat

SEQ ID NO: 19011 - DNA, 173 bp, Homo sapiens
  MAP TO AC008413.5; EXPRESSED IN ADULT LIVER, SIGNAL = 4.6; EXPRESSED IN PLACENTA, SIGNAL = 5.7; EXPRESSED IN BRAIN, SIGNAL = 4.5; EXPRESSED IN LUNG, SIGNAL = 2.6; SWISSPROT HIT: P51805, EVALUE 3.30e+00
atgaggggcttccacctgaagcacatcgtcagtgtggtgacagtgggatttgtgctcactcgcacatgccagaagccataccagggtgcacacacaactctgggaagcaacactggtgggggtgttgctggtacccgtgctaacactcacagcagcagcagggcagggcgctg

SEQ ID NO: 19012 - DNA, 306 bp, Homo sapiens
  MAP TO AC008509.5; EXPRESSED IN BRAIN, SIGNAL = 1.9; EXPRESSED IN BONE MARROW, SIGNAL = 1.3; EXPRESSED IN PLACENTA, SIGNAL = 1.9; EXPRESSED IN ADULT LIVER, SIGNAL = 1.4; EXPRESSED IN FETAL LIVER, SIGNAL = 1.6; EXPRESSED IN LUNG, SIGNAL = 0.79; SWISSPROT HIT: P10394, EVALUE 6.00e-09; NT HIT: gi8923123, EVALUE 0.00e+00; EST_HUMAN HIT: AL542685.1, EVALUE 0.00e+00
ctgttgaatgaattcatctctttggtccattattattttctgaggaggtccatataagaaaaatatattgataatagctttagaaacttctgatgctgaaacatcacatagaggcaaaatcacaatccatttggtgaacaaatctgtcatgattatagcatatacatgacttctgttgcttgtatgaaaaggccccatcagatcaacagtaactaaactccatggattttccaccttgagaaggtgctgtttcggtgctacaataactgtattttttgccacttggcaatgctgacaagcatatac

SEQ ID NO: 19013 - DNA, 548 bp, Homo sapiens
  MAP TO AC008747.4; EXPRESSED IN HEART, SIGNAL = 2.9; EXPRESSED IN BRAIN, SIGNAL = 1.1; EXPRESSED IN LUNG, SIGNAL = 0.94; EXPRESSED IN ADULT LIVER, SIGNAL = 1.2; SWISSPROT HIT: P52742, EVALUE 1.00e-59; NT HIT: gi11034834, EVALUE 1.00e-128; EST_HUMAN HIT: BF673094.1, EVALUE 0.00e+00
aaaatccatactggagagaagccttatgaatgtagagaatgtgagaaagctttctgctgtagctcacaccttactccacatcaaagaattcacactatggagaaacaatatgaatgcaacaaatgtctgaaagtctttagtagcctctcatttcttgttcagcatcagagtattcatactgaagaaaaaccctttgaatgtcagaaatgcaggaaatccttcaaccagcttgaatcactgaatatgcatttgagaaatcacattagattgaaatgtgatttctatctaatgaatgccatatatgtgggaaagcctttagtcataggtcatccctgcttcaacatcacagaattcatactggagagaaaccttacgaatgtattaaatgtgggaagaccttcagctgtagttcaaaccttaccgtacatcagagaattcatactggagaaaagccatataaatgtagtgagtgtgggaaagcttttagcaaaggctcaaatcttactgcccatcaaagagtacataatggagagaaacccaatagtgtg

SEQ ID NO: 19014 - DNA, 174 bp, Homo sapiens
  MAP TO AC016543.5; EXPRESSED IN LUNG, SIGNAL = 2.1; EXPRESSED IN HELA, SIGNAL = 1.5; EXPRESSED IN FETAL LIVER, SIGNAL = 1.2; EXPRESSED IN BRAIN, SIGNAL = 0.92; EXPRESSED IN PLACENTA, SIGNAL = 0.99; EXPRESSED IN ADULT LIVER, SIGNAL = 1.2; EST_HUMAN HIT: AW897386.1, EVALUE 8.90e-01; SWISSPROT HIT: P56121, EVALUE 9.80e+00; NT HIT: AF391367.1, EVALUE 2.40e+00
agctcattttggtacagtggcatcccataatattcgggttcactgagggagcagcggacggggatgcaggtgcgtttgtagctggggattcaggtgtgtatttcaaagtgtgtacttgtgccttggagtggatgtggcgggtaagttgatcattttcaccacgattgtattttc

SEQ ID NO: 19015 - DNA, 208 bp, Homo sapiens
  MAP TO AL078460.6; EXPRESSED IN BONE MARROW, SIGNAL = 1.1; EXPRESSED IN PLACENTA, SIGNAL = 1.1; EXPRESSED IN ADULT LIVER, SIGNAL =   1; EXPRESSED IN HEART, SIGNAL = 1.3; EXPRESSED IN HELA, SIGNAL = 0.96; EXPRESSED IN FETAL LIVER, SIGNAL = 1.1; EST_HUMAN HIT: BG105603.1, EVALUE 1.00e-111; SWISSPROT HIT: P26745, EVALUE 4.20e+00; NT HIT: AB023144.2, EVALUE 1.00e-113
atgctgactgaggaggtgcagagaacaggggcaggggattttaaatcacagcagaccatccagtggaatcctgtatcatctgatctgaacatcaatgaagacagagagaggaatttcattcagaaaggattccatagccccacatctagtcacacgggcattcctcttattttatcagggtctgttttcccccaacccagtgaaaccg

SEQ ID NO: 19016 - DNA, 223 bp, Homo sapiens
  MAP TO AC005305.1; EXPRESSED IN PLACENTA, SIGNAL = 0.57; EXPRESSED IN ADULT LIVER, SIGNAL = 0.74; EXPRESSED IN BRAIN, SIGNAL = 0.86; EST_HUMAN HIT: BG820937.1, EVALUE 1.00e-96; SWISSPROT HIT: O00555, EVALUE 1.00e-19; NT HIT: Z80139.1, EVALUE 1.00e-122
agatggaattggaagtggcacctcatttttctccaggctgtattcctccatcatcttgtccccttgctcctggaaggtgatgatgatcaaggccacaaagatattgacaaagaagaaggggaacaccacaaagtagacgacgtagaaaatggacatctccatgcggtacccggggctggggccctggttctcaaaggtggcgtccaccgaatgcttgaggacc

SEQ ID NO: 19017 - DNA, 183 bp, Homo sapiens
  MAP TO AL117259.3; EXPRESSED IN BRAIN, SIGNAL = 1.4; EXPRESSED IN HELA, SIGNAL = 1.9; EXPRESSED IN FETAL LIVER, SIGNAL = 1.3; EXPRESSED IN BONE MARROW, SIGNAL = 1.3; EXPRESSED IN PLACENTA, SIGNAL = 1.3; EXPRESSED IN ADULT LIVER, SIGNAL = 1.2; EXPRESSED IN HEART, SIGNAL = 1.3; SWISSPROT HIT: Q48303, EVALUE 2.50e+00; EST_HUMAN HIT: BF725230.1, EVALUE 8.00e-94
atttgtcatcatgattgtgaacattctttgtaagaaacggtaataaatctgatcgcttgatatgacatgtggcaggcaggcatatttctgaagtagcttctcatgagttctccattttaaagaggctgcagctcgctgttcagcagctgtgagtgctggaatcaagtcaggcagagaagataa

SEQ ID NO: 19018 - DNA, 89 bp, Homo sapiens
  MAP TO AC008775.5; EXPRESSED IN BRAIN, SIGNAL = 1.5; EXPRESSED IN LUNG, SIGNAL = 0.72; EXPRESSED IN PLACENTA, SIGNAL = 1.4; EXPRESSED IN ADULT LIVER, SIGNAL = 1.3; EST_HUMAN HIT: BG959912.1, EVALUE 7.00e-06; NT HIT: AL163285.2, EVALUE 3.00e-07
agaagaaagtcaagctggctgcaaaaatctgtgtaatgaggagctggatgtttatcaccaagacaaaggaaaaaatgtcaccagggcat

SEQ ID NO: 19019 - DNA, 125 bp, Homo sapiens
  MAP TO AC007883.3; EXPRESSED IN PLACENTA, SIGNAL = 4.1; EXPRESSED IN ADULT LIVER, SIGNAL = 3.1; EXPRESSED IN BRAIN, SIGNAL = 3.4; EST_HUMAN HIT: AL578084.1, EVALUE 3.00e-64; SWISSPROT HIT: P76463, EVALUE 1.20e+00; NT HIT: gi14724054, EVALUE 2.00e-64
gacaaggatagtgggaaaacctctgtggttgtcgggacatggaaccaagaagagcatattgaatgggctaagaagaatactgctagagcttatcatcttcaagacgatggtacccagacagtcag

SEQ ID NO: 19020 - DNA, 366 bp, Homo sapiens
  MAP TO AC010200.7; EXPRESSED IN ADULT LIVER, SIGNAL = 2.2; EXPRESSED IN HEART, SIGNAL = 1.5; EXPRESSED IN BONE MARROW, SIGNAL = 4.7; EXPRESSED IN PLACENTA, SIGNAL = 1.1; EST_HUMAN HIT: BG171220.1, EVALUE 0.00e+00; SWISSPROT HIT: O18473, EVALUE 3.00e-09; NT HIT: gi14754221, EVALUE 0.00e+00
gtgttttaacagaacaagtggcaggtcctctgggacagaacctggaagtggaaccatactcgcaatacagcaatgttcagtttccccaagttcaaccacagatttcctcgtcatcctattattccaacctgggtttctacccccagcagcctgaagagtggtactctcctggaatatatgaactcaggcgtatgccagctgagactctctaccagggagaaactgaggtagcagagatgcctgtaacaaagaagccccgcatgggcgcgtcagcagggaggatcaaaggggatgagctgtgtgttgtttgtggagacagagcctctggataccactataatgcactgacctgtgaggggtgtaaag

SEQ ID NO: 19021 - DNA, 392 bp, Homo sapiens
  MAP TO AC016553.4; EXPRESSED IN BRAIN, SIGNAL = 1.9; EXPRESSED IN ADULT LIVER, SIGNAL = 1.2; EXPRESSED IN HELA, SIGNAL =   2; EXPRESSED IN FETAL LIVER, SIGNAL = 1.9; EST_HUMAN HIT: AA403053.1, EVALUE 9.00e-74; SWISSPROT HIT: P27401, EVALUE 3.00e-04; NT HIT: AL163209.2, EVALUE 2.00e-80
actcatcctgtggtcatttccccagtgccagaatgcataattggcatagacatccttcgcagctggcagaacccccacattggctccctgacttgtagggtgagagctgttatggtgggaaaggccaaatggaagccattagagatgcctctacctagaaatatagtaaataaaaaacaatgttgcatccccagagggattgtggagatcagtgccaccatcaaggacttgaaagatgaaggggtggtgaaagatgtgggggtggtgattcccaccacatccctgttcaactctcccgtttggcctgtgcagaagacagatgcatcttggagaatgacagtggattatcataagcttaactacgtggtaactccaattgcagctgctgtacc

SEQ ID NO: 19022 - DNA, 465 bp, Homo sapiens
  MAP TO AL078611.1; EXPRESSED IN BONE MARROW, SIGNAL = 1.8; EXPRESSED IN PLACENTA, SIGNAL = 1.5; EXPRESSED IN ADULT LIVER, SIGNAL = 1.5; EXPRESSED IN HEART, SIGNAL = 2.2; EXPRESSED IN BRAIN, SIGNAL = 1.4; EXPRESSED IN FETAL LIVER, SIGNAL = 1.6; EST_HUMAN HIT: BE168040.1, EVALUE 0.00e+00; SWISSPROT HIT: Q07869, EVALUE 5.00e-83; NT HIT: S74349.1, EVALUE 0.00e+00
ttaaatcaaccactcacctccacagcaaatgatagcagccacaaaaagggagatatcactgtcatccagttccagtgcattgaacttcatggcaaaatcaaacttgggttccatgatatcacagaacggtttccttaggctttttaggaattcacgagttataaacccatttccatacgctaccagcatcccgtctttgttcatcacagaagacagcatggcgaatatggcctcataaactccgtattttagcaatgtcacttgatcgttcaggtccaagtttgcgaagcctgggatggccttggcgaattccgtgagctccgtgacggtctccactgacgtgcactggcagcagtgaaagatgcggacctccgcctccttgttctggatgccattggccaccagcttggccaccagcgtcttctcagccatacacagtgtctccatatcatgtatgacaaaagg

SEQ ID NO: 19023 - DNA, 168 bp, Homo sapiens
  MAP TO AC006231.18; EXPRESSED IN PLACENTA, SIGNAL = 2.4; EXPRESSED IN ADULT LIVER, SIGNAL = 1.9; EXPRESSED IN HEART, SIGNAL = 2.2; EXPRESSED IN BRAIN, SIGNAL = 1.8; EST_HUMAN HIT: AW801653.1, EVALUE 2.20e-01; SWISSPROT HIT: P40021, EVALUE 1.70e-01; NT HIT: AY049228.1, EVALUE 2.30e+00
atggagagatctcataacttcttttccagccggtccaaaggagcagagaaatttgatcatgaaaactggaagaagcagctcagagaagggtcagcagaagatagcgtatctggtgaccccgccttaggcttggaattacatgatgattcccccaaacatagcgcagag

SEQ ID NO: 19024 - DNA, 125 bp, Homo sapiens
  MAP TO AC001478.1; EXPRESSED IN BONE MARROW, SIGNAL = 1.7; EXPRESSED IN ADULT LIVER, SIGNAL = 1.7; NT HIT: X89631.1, EVALUE 2.00e-34; EST_HUMAN HIT: AA313487.1, EVALUE 2.00e-44; SWISSPROT HIT: P31214, EVALUE 7.80e+00
ggggaaggtctgcagcttcactcctaaagccagcgagaccaccaacccaccaggaggagcgaacaactctagacgcgccgccttaagagctgtaacactcaccacgaaggtttgcagcttcactc

SEQ ID NO: 19025 - DNA, 274 bp, Homo sapiens
  MAP TO AC005942.2; EXPRESSED IN ADULT LIVER, SIGNAL = 1.2; EXPRESSED IN BRAIN, SIGNAL = 1.2; EXPRESSED IN PLACENTA, SIGNAL =  19; SWISSPROT HIT: O15453, EVALUE 2.30e-02; NT HIT: gi14861873, EVALUE 6.40e-02; EST_HUMAN HIT: AU140143.1, EVALUE 3.00e-08
caaagaaggccagtaggcctgagcgtgccctaacctgcaagtgccaaaaacgccttggccagcctcccaacaaactggttactggaaatctgattgccctcttaacaagcaagctaacaggccggttcctcaaggccctggaaaagcaaagagtaaaaaggcactcatactgctgcagccccatggcctggccactgaagactgatggagcccagtcccccggccccatctgccatcactacatgggagcccagggtaactctgctaatagcag

SEQ ID NO: 19026 - DNA, 491 bp, Homo sapiens
  MAP TO AC005175.1; EXPRESSED IN PLACENTA, SIGNAL = 0.91; EXPRESSED IN ADULT LIVER, SIGNAL = 0.95; EXPRESSED IN FETAL LIVER, SIGNAL = 0.79; EXPRESSED IN HELA, SIGNAL = 0.99; EXPRESSED IN BONE MARROW, SIGNAL =   1; SWISSPROT HIT: O14342, EVALUE 3.00e-32; EST_HUMAN HIT: BE379385.1, EVALUE 0.00e+00; NT HIT: gi14765074, EVALUE 0.00e+00
tcaccgccgatagcggtagcgcttgaagtgaaaccacagctggaagatgccgttggcaaactggcagcggaagccgtggcggtgcgagtattcccactcgcggttgacgatcttgaaagcgatgtcctcgtagggcggccccgcgtggaagcgcaggatggcgaaatccttgttgtcggcgcaggcctccaggaagtactcgggcgtggagcgcttgtcgatgaggtcggggtagaagatgttgaacttgtatccctgcacgatcttgggcggtgggttgtcaaagtcgtagtgcgtctggttgtacttgttccactcgaagcccgtgtgcacgcggttgaagaagcgcggcttgcgtggccggtacttgtcggcccacaggtaggccttgccggtgagtggcatctccacgctgaactgcgcctcgtcctggcccatgccctccttggcccgccggaagaagatgtcctcggcgctctcgctggcgtctc

SEQ ID NO: 19027 - DNA, 309 bp, Homo sapiens
  MAP TO AL049813.1; EXPRESSED IN BRAIN, SIGNAL = 1.4; EXPRESSED IN BONE MARROW, SIGNAL = 2.2; EXPRESSED IN ADULT LIVER, SIGNAL = 1.3; EXPRESSED IN HEART, SIGNAL = 1.3; EXPRESSED IN LUNG, SIGNAL = 2.3; EXPRESSED IN FETAL LIVER, SIGNAL = 2.8; EST_HUMAN HIT: BF348411.1, EVALUE 4.20e-01; SWISSPROT HIT: P06206, EVALUE 2.10e+00; NT HIT: X03100.1, EVALUE 2.00e-26
ttatgacttccaggacagagtagccactcctgagctttgcatgtaacatctgtcatgatccagcccctgcctgtctatttttccttttttcttgctgctgttccacatccaaagctggctccattcatactgaagcagctgaagttcttcagatatgtcattgccacactgggcccacacttttgaacctgcttcctcctgtgtgagaagtggcttctgccctgttttcggactgcctacattgaagccatctgttccccaggaagccttccctgatgccttgacagcagcatcttgtgcctgccccat

SEQ ID NO: 19028 - DNA, 458 bp, Homo sapiens
  MAP TO AC008620.5; EXPRESSED IN ADULT LIVER, SIGNAL = 0.79; EST_HUMAN HIT: BG830268.1, EVALUE 1.00e-122; SWISSPROT HIT: P52860, EVALUE 1.80e+00; NT HIT: gi14754090, EVALUE 0.00e+00
gctccgaatccaaaaagcagcatcacacagcaccccacgctcgggaccacgaagcccgctcggaagaacaggttacttgcggggagaaacgggataacgagcaatcccaggcgcagagtaaggatccttctctggtggccgtctgcagagcacagggcttggcgtatgaggccaactgggcggaaccagagcgctgcaaatgcagttaccctccagtcgctgagggacttcatgagggggctgcagcccactgaccaatcaaaacacagccaccagggacgcagcagcagcagccaggcattcaatgaataggagtaattgtcgtttatggccctcgccagcacgcggtcagcaaaggaggcccagttgtcctcctcggtgaaggccggcgggcccgggcctatgatcctccagcgcacggagagcatcccagcccctccggaggcgagcagggtcat

SEQ ID NO: 19029 - DNA, 100 bp, Homo sapiens
  MAP TO AC008989.6; EXPRESSED IN BRAIN, SIGNAL = 0.7; EXPRESSED IN HEART, SIGNAL =   1; EXPRESSED IN ADULT LIVER, SIGNAL = 0.76; EXPRESSED IN LUNG, SIGNAL = 0.79; SWISSPROT HIT: P50442, EVALUE 8.00e+00; NT HIT: AJ310932.1, EVALUE 3.20e-01
ccccttcagcacccgtgtggatcccggaaagtcatcccctctgggcagctgaattatggccaaggggtgtccccactgctggctgacacagccatgtctg

SEQ ID NO: 19030 - DNA, 265 bp, Homo sapiens
  MAP TO AC012467.9; EXPRESSED IN BONE MARROW, SIGNAL = 0.4; EXPRESSED IN ADULT LIVER, SIGNAL = 0.55; EST_HUMAN HIT: AV715921.1, EVALUE 0.00e+00; SWISSPROT HIT: P22434, EVALUE 3.40e-01; NT HIT: gi14735840, EVALUE 0.00e+00
tctgcaaaagctactgctgaccgaaagtctgcatccaaacctattggatttgaaggggatcttcgtggccagtcctctgatcttccagaaagactccattcccaggaggtagatttggggtctgcacagggagatggcctgatggccggcaacgattccgaggaggccctcactgcactgatgtccaggaagactgccatctcgctgtttgaaggaaaagccctgggcctggataaagccatcctccatagcatagactgctgtt

SEQ ID NO: 19031 - DNA, 277 bp, Homo sapiens
  MAP TO AC010203.13; EXPRESSED IN ADULT LIVER, SIGNAL = 1.7; EXPRESSED IN LUNG, SIGNAL = 2.3; EXPRESSED IN BRAIN, SIGNAL = 1.4; EXPRESSED IN FETAL LIVER, SIGNAL = 1.1; EXPRESSED IN BONE MARROW, SIGNAL = 1.5; EXPRESSED IN PLACENTA, SIGNAL = 0.83; EST_HUMAN HIT: BE676648.1, EVALUE 0.00e+00; SWISSPROT HIT: P10263, EVALUE 2.00e-05; NT HIT: gi14754128, EVALUE 7.00e-14
ttcccagaaaaaggaacgctagacgtagagctctgggaacaagtggggagaaatcttaatcagcatcatgtgcaagggcaatgggtcccagtatcatctttaatgctatgggccttagtcagggcagccctggctccattatacacagaagagcctaaaaaggggaaggaggaggaaccgtcacctgctttaccacctccttttccctcagccccaatatcgccaggccaaaataacaaagaggaaatggaggttttgcctgagccccctcctccaa

SEQ ID NO: 19032 - DNA, 152 bp, Homo sapiens
  MAP TO AL021182.1; EXPRESSED IN PLACENTA, SIGNAL = 1.4; EXPRESSED IN ADULT LIVER, SIGNAL = 1.5; EXPRESSED IN HEART, SIGNAL = 1.4; EXPRESSED IN FETAL LIVER, SIGNAL = 1.5; EXPRESSED IN LUNG, SIGNAL = 1.5; EXPRESSED IN BRAIN, SIGNAL = 1.4; EXPRESSED IN BONE MARROW, SIGNAL = 1.4; EST_HUMAN HIT: AW979107.1, EVALUE 5.00e-39; SWISSPROT HIT: Q51519, EVALUE 1.50e+00; NT HIT: AF029308.1, EVALUE 2.00e-31
tgggttcttggtctcgctgacttcaggagtgaagctgcagaccttcacggtgagtgttactgctcttaaaggtggtgcgaccagagttgtttgttcctcccagtgggttcgtggtctcgctgacttcaggaatgaggctgcagaccctcaca

SEQ ID NO: 19033 - DNA, 146 bp, Homo sapiens
  MAP TO AC009510.9; EXPRESSED IN BRAIN, SIGNAL = 0.75; EXPRESSED IN PLACENTA, SIGNAL = 0.61; EXPRESSED IN HEART, SIGNAL = 1.1; EXPRESSED IN ADULT LIVER, SIGNAL = 0.7; NT HIT: AF098635.1, EVALUE 1.30e-01; EST_HUMAN HIT: AI798707.1, EVALUE 1.00e-76
agccaaatttcattctgtttcacagttttccaagagaaaagcaacagcagcaacacagtggacacaatcagggtggtggccccacatcgattcagccaagtgcagagcttgctcagtccatgcacaaaaaggatgcagtagcccat

SEQ ID NO: 19034 - DNA, 233 bp, Homo sapiens
  MAP TO AC068323.6; EXPRESSED IN ADULT LIVER, SIGNAL = 0.83; EXPRESSED IN BRAIN, SIGNAL = 0.64; EXPRESSED IN FETAL LIVER, SIGNAL = 0.5; SWISSPROT HIT: Q9UPR5, EVALUE 1.00e-07; NT HIT: U33320.1, EVALUE 8.40e-01; EST_HUMAN HIT: M62022.1, EVALUE 1.00e-06
gttaacatcacaatcatccgttccagtggagattttggccatgtgcgactctggtacaagacgatgagcgggacagcggaagcaggcttggattttgttcctgcagcaggggagctcctctttgaagcaggggagatgaggaaaagtctgcatgttgaaatccttgatgatgactatcctgaaggcccagaggaattttctctaacaattacaaaggtggaactccagggaag

SEQ ID NO: 19035 - DNA, 114 bp, Homo sapiens
  MAP TO AC008626.5; EXPRESSED IN BONE MARROW, SIGNAL = 0.83; EXPRESSED IN PLACENTA, SIGNAL = 0.71; EXPRESSED IN ADULT LIVER, SIGNAL = 0.74; EXPRESSED IN BRAIN, SIGNAL = 0.65; EST_HUMAN HIT: AV689950.1, EVALUE 9.00e-03; NT HIT: U19283.1, EVALUE 9.40e-02
attgtccactgggcgtgcctatgggatgcacaatctcacctgtgtgctgagtcctgttaggacactctgtgtcactcaaggatgttataggatatgcatgagtgtcatcatctt

SEQ ID NO: 19036 - DNA, 251 bp, Homo sapiens
  MAP TO AF207550.1; EXPRESSED IN BONE MARROW, SIGNAL = 1.6; EXPRESSED IN PLACENTA, SIGNAL = 1.8; EXPRESSED IN ADULT LIVER, SIGNAL = 1.7; EXPRESSED IN BRAIN, SIGNAL = 1.9; EXPRESSED IN LUNG, SIGNAL = 1.5; EXPRESSED IN FETAL LIVER, SIGNAL = 1.3; EST_HUMAN HIT: R19492.1, EVALUE 1.00e-126; NT HIT: gi14760089, EVALUE 0.00e+00
ctctgaggggcatggctcctgcgcagccctgccagcatgtccagctcctgcatgctgccacggctgactgaggcagtggagttggcaaggcggatggcgcggcgcttggccctgcgagggcagcaagaagacagcaggcttccgggtcccactggctgggaagacacagaggtgctacggctggtgcggccacccggcgagacggctcccagggcttcactgaaggtgagctcatctgtgaactcatggca

SEQ ID NO: 19037 - DNA, 147 bp, Homo sapiens
  MAP TO AL109944.19; EXPRESSED IN BRAIN, SIGNAL = 0.48; EXPRESSED IN FETAL LIVER, SIGNAL = 0.92; EXPRESSED IN PLACENTA, SIGNAL = 0.82; EXPRESSED IN ADULT LIVER, SIGNAL = 0.6; EST_HUMAN HIT: AA435789.1, EVALUE 7.00e-72; NT HIT: AF149827.1, EVALUE 2.00e+00
gatcgaataccataagaggaattctggactgaagagttatgaagtcatttcagacacttccagacaatttgtgttaattaaattctcactggttgagttccattctacactggaagagcatttttcctggaaaggctcctcaaaatg

SEQ ID NO: 19038 - DNA, 196 bp, Homo sapiens
  MAP TO AC010205.5; EXPRESSED IN LUNG, SIGNAL =   1; EXPRESSED IN FETAL LIVER, SIGNAL = 0.66; EXPRESSED IN BONE MARROW, SIGNAL = 0.98; EXPRESSED IN BRAIN, SIGNAL = 0.78; EXPRESSED IN PLACENTA, SIGNAL = 0.76; EXPRESSED IN ADULT LIVER, SIGNAL = 0.99; NT HIT: gi4505294, EVALUE 1.00e-106; SWISSPROT HIT: Q00872, EVALUE 4.00e-32
caatgatctggatgtcaattgatgcggtctccacgaatttgtccactttgacttgcagatcatatttcccagagtggctcctctctgcttttctaataaatatgattgtatcagtctcagagttgcgaatgtttatttgattcttatcaatttctgcaccatccttcttccaagttaattctggtcttggttttcc

SEQ ID NO: 19039 - DNA, 217 bp, Homo sapiens
  MAP TO AC016605.4; EXPRESSED IN ADULT LIVER, SIGNAL = 2.2; EXPRESSED IN FETAL LIVER, SIGNAL = 2.3; EXPRESSED IN BRAIN, SIGNAL = 2.2; EXPRESSED IN LUNG, SIGNAL = 1.9; EXPRESSED IN BONE MARROW, SIGNAL = 3.4; NT HIT: AF279897.1, EVALUE 1.00e-116; SWISSPROT HIT: P33551, EVALUE 7.00e-40; EST_HUMAN HIT: BG332310.1, EVALUE 1.00e-116
gtgggcgccggaacagcaagatgtgaggttctggttcatggatcatataatggacccatccctgactctgctgaacgccaagattcctccattcagattcagacatcagatgggttttagggaccagcttggctatgtccttgggcagcatgacatgtcgatactcaaactcctcgtcatcgtatttgtccgaatagtaaatttgtttgtgcgacat

SEQ ID NO: 19040 - DNA, 133 bp, Homo sapiens
  MAP TO AL121594.3; EXPRESSED IN ADULT LIVER, SIGNAL = 0.62; EXPRESSED IN FETAL LIVER, SIGNAL = 0.53; EST_HUMAN HIT: AW797482.1, EVALUE 6.00e-69; NT HIT: gi13649256, EVALUE 4.00e-69; SWISSPROT HIT: O15091, EVALUE 4.00e-21
ctgaggtgttgtctttctgtactggtcacctccatctatcacatccctcatgatttttcccttaagacattcatattcttctggactcagctgaatagactctatggtttttccacagcccgaacactggcca

SEQ ID NO: 19041 - DNA, 468 bp, Homo sapiens
  MAP TO AC008565.5; EXPRESSED IN ADULT LIVER, SIGNAL = 3.1; EXPRESSED IN LUNG, SIGNAL = 1.9; EXPRESSED IN BONE MARROW, SIGNAL = 2.6; SWISSPROT HIT: Q92540, EVALUE 1.10e+00; EST_HUMAN HIT: BE390947.1, EVALUE 3.00e-86; NT HIT: AL163282.2, EVALUE 2.00e-64
atccaggtcatgctgatgcaagaggtgagttcccattgtcttaggcagcttcacccctgtggctttacagggtaaagcctccctcctggttgctttcatgggttgatgttgagtgtctgaggcttttccaggtgcacagtgcaagctgtcagtggatctaccattctggggtctggacaattgtggccctcttctcacagctccactagtcccaaatagggactctgtttgggggctctgactccacatttcccttctgcactgctgtagcaaaggatcttcgtgagggccccatccctgcagcaaatttttgcctgtgtatccaggcatttccatacatcttctgaaatctaggtggaggtttccataccccgtttcttgacttctgtacacccacaggctcaacaccatgtggaagctgccaaggcttggggttttcaccctcttaagccacagcccaagctgcat

SEQ ID NO: 19042 - DNA, 189 bp, Homo sapiens
  MAP TO AL079302.4; EXPRESSED IN ADULT LIVER, SIGNAL = 1.7; EXPRESSED IN LUNG, SIGNAL = 3.8; EXPRESSED IN HELA, SIGNAL = 2.6; EXPRESSED IN FETAL LIVER, SIGNAL = 1.9; EXPRESSED IN BONE MARROW, SIGNAL = 2.3; SWISSPROT HIT: P38112, EVALUE 5.00e-07; EST_HUMAN HIT: BG769231.1, EVALUE 1.00e-102; NT HIT: gi14748376, EVALUE 1.00e-102
cttgaccacatccatgtattttgtctgcacggggaacagtgggatatcctcatctttcttgagcgttttgtaaatcttcttaaagttgatcacatcctcaggcccaatgagcatcagactgaggccttcattggtagctcgagcagttcgaccacttcggtggacataaatctccgaggtacgtgggac

SEQ ID NO: 19043 - DNA, 264 bp, Homo sapiens
  MAP TO AC010238.4; EXPRESSED IN HEART, SIGNAL = 1.5; EXPRESSED IN HELA, SIGNAL = 1.3; EXPRESSED IN BRAIN, SIGNAL =   1; EXPRESSED IN FETAL LIVER, SIGNAL = 0.87; EXPRESSED IN PLACENTA, SIGNAL = 1.1; EXPRESSED IN ADULT LIVER, SIGNAL = 1.2; SWISSPROT HIT: O35536, EVALUE 3.60e+00; EST_HUMAN HIT: BG959372.1, EVALUE 3.60e-01
tccatgggtaagggcatgagtggtcctggtagctttgtcagccctgtaatcctgcttctcatgaagctgcatgtaaatcctgtccccctctcttcacccctgcccctcacctgccagctgtctgctctgctctcacaagggactctggtctcatgtcacagagctacagtcaccagggataggctgccaggagggaataggacatttctgctgggttcacagatctggcttcacaaaggaggtggaattcaggctgaaccttga

SEQ ID NO: 19044 - DNA, 106 bp, Homo sapiens
  MAP TO AC000038.2; EXPRESSED IN ADULT LIVER, SIGNAL = 1.5; EXPRESSED IN BRAIN, SIGNAL = 1.4; EXPRESSED IN FETAL LIVER, SIGNAL = 0.57; EXPRESSED IN PLACENTA, SIGNAL = 1.3; SWISSPROT HIT: Q59557, EVALUE 6.10e+00; NT HIT: U66061.1, EVALUE 1.00e-06
cttgggaagtgagcatgtgcagtgtgttggggaagatgtacgcatgcccgtttgaggctgtcttcctttttccagtggcgtgccccggaaggtcatcctctgccat

SEQ ID NO: 19045 - DNA, 359 bp, Homo sapiens
  MAP TO AC006129.1; EXPRESSED IN FETAL LIVER, SIGNAL = 0.63; EXPRESSED IN BONE MARROW, SIGNAL = 0.8; EXPRESSED IN ADULT LIVER, SIGNAL = 0.72; SWISSPROT HIT: P22059, EVALUE 1.00e-04; EST_HUMAN HIT: BF929905.1, EVALUE 0.00e+00; NT HIT: gi14786815, EVALUE 0.00e+00
ctggcattggctatcttcacacattcctcaagcgttgtgatgaacgtgttacacgtggcactaagcagagaagaggcttcattgatgttctctgcactaggagatgaatgattctcatcgtggtgaacaaattcctgtatcgtatgaacttgctgcattaagaggtcacagtagaggcgaagttcagacattttggttttcagcgattcactggtttcacttctttctttttcgtttttagtccttgtatcagtcaaacatgctttggagctccccagagcgaccagccacctctgtctttcagctgcgttcactgccttcatgtagaaatgctgctctccaggaatgattaattccat

SEQ ID NO: 19046 - DNA, 203 bp, Homo sapiens
  MAP TO AL121768.2; EXPRESSED IN BONE MARROW, SIGNAL = 1.1; EXPRESSED IN PLACENTA, SIGNAL = 0.86; EXPRESSED IN ADULT LIVER, SIGNAL = 0.9; EXPRESSED IN LUNG, SIGNAL = 1.2; EXPRESSED IN FETAL LIVER, SIGNAL = 0.81; EXPRESSED IN BRAIN, SIGNAL = 0.8; SWISSPROT HIT: Q28738, EVALUE 2.50e+00; EST_HUMAN HIT: BG537209.1, EVALUE 4.20e+00; NT HIT: AF376131.1, EVALUE 7.20e-01
tttttccaatgcatgcatactgaacactggcccatcatgcgctttcactgtttttacaagaaagatgtctctccagatacacacatctcctgtggatgttccagaaaaagccatctcttcagtccatccatacactgcacacatcattgtgtcatttttccccagtgtgcctatgtagccttttcttccaatcaatcctcccc

SEQ ID NO: 19047 - DNA, 173 bp, Homo sapiens
  MAP TO AC008705.4; EXPRESSED IN BONE MARROW, SIGNAL = 0.68; EXPRESSED IN PLACENTA, SIGNAL = 0.6; EXPRESSED IN ADULT LIVER, SIGNAL = 0.7; EXPRESSED IN BRAIN, SIGNAL = 0.56; SWISSPROT HIT: P32126, EVALUE 5.70e+00; EST_HUMAN HIT: AA134045.1, EVALUE 2.20e-01; NT HIT: gi11430507, EVALUE 1.50e-01
tcaaatttctgggccgatgtccaggaggacagatctctgttgttctctaaggtcaaaaagaacagcatcaaagccaggctgagttccatgaagaaggacttgaagctgggcttccctgagccatgccagctgttccaggaccaccaatatggtgagtccctcacaagacatca

SEQ ID NO: 19048 - DNA, 216 bp, Homo sapiens
  MAP TO AC002481.1; EXPRESSED IN ADULT LIVER, SIGNAL = 1.7; EXPRESSED IN HEART, SIGNAL =   4; EXPRESSED IN BRAIN, SIGNAL = 2.2; EXPRESSED IN HELA, SIGNAL = 4.7; EXPRESSED IN PLACENTA, SIGNAL = 3.1; SWISSPROT HIT: Q00961, EVALUE 2.40e-01; EST_HUMAN HIT: BF932644.1, EVALUE 1.00e-118; NT HIT: gi14737266, EVALUE 7.00e-72
ggatgctgggaggcctggatggtaattgaggacctcttggaagaagtggcactgaggatatggatggggccccctgcagatgagtccaacaccatccacttgaaggtgattgagcagcggccagaccctccggtggcccaggagtatgatgtacctgtctttaccaaagacaaggaggatttcttcaactcacagtgggacctcactacacaacaa

SEQ ID NO: 19049 - DNA, 81 bp, Homo sapiens
  MAP TO AC009024.6; EXPRESSED IN HEART, SIGNAL = 1.4; EXPRESSED IN ADULT LIVER, SIGNAL = 0.96; EXPRESSED IN LUNG, SIGNAL = 1.6; EXPRESSED IN HELA, SIGNAL = 1.2; EXPRESSED IN BONE MARROW, SIGNAL = 0.93; EXPRESSED IN PLACENTA, SIGNAL = 0.81; EST_HUMAN HIT: AU117682.1, EVALUE 3.60e-01; NT HIT: AF081152.1, EVALUE 9.70e-01
ttcatattgaacttcaagtgccagcttgcctatccccttcttctcgaagcctttctcaacccgtgtgagctgactctccat

SEQ ID NO: 19050 - DNA, 166 bp, Homo sapiens
  MAP TO AF190641.1; EXPRESSED IN BONE MARROW, SIGNAL = 0.95; EXPRESSED IN PLACENTA, SIGNAL = 1.4; EXPRESSED IN ADULT LIVER, SIGNAL = 1.1; EXPRESSED IN BRAIN, SIGNAL = 1.3; EXPRESSED IN LUNG, SIGNAL = 0.59; EXPRESSED IN FETAL LIVER, SIGNAL = 0.97; SWISSPROT HIT: P13886, EVALUE 1.10e+00; EST_HUMAN HIT: BF825454.1, EVALUE 5.40e-02; NT HIT: AY056290.1, EVALUE 5.70e-01
atgacattatgggccttcctatgtgacacaataagaaatactgttatgaaagatcctggcacaaatgttaaatctgaaattgatcgcaaggtatacataagaaaaatcctaaacaatgactggcttaaccttcaagataacagaatcataagcagccacaaaaaag

SEQ ID NO: 19051 - DNA, 151 bp, Homo sapiens
  MAP TO AC004175.1; EXPRESSED IN BRAIN, SIGNAL = 0.58; EXPRESSED IN ADULT LIVER, SIGNAL = 0.5; EXPRESSED IN LUNG, SIGNAL = 0.53; EST_HUMAN HIT: AA234024.1, EVALUE 1.90e-01
tcattcagctgactcctgcagacaatgtgctctctctctctctgcccccacactaagggtgcactccttgttcatctccaggacggtgtcagcaaatgctgcctggggcatgctggtgatcactgtgtcactttgggtcaggaaacacatt

SEQ ID NO: 19052 - DNA, 163 bp, Homo sapiens
  MAP TO AC010267.5; EXPRESSED IN FETAL LIVER, SIGNAL = 1.2; EXPRESSED IN BONE MARROW, SIGNAL = 1.4; EXPRESSED IN PLACENTA, SIGNAL = 1.3; EXPRESSED IN ADULT LIVER, SIGNAL = 1.4; SWISSPROT HIT: O33261, EVALUE 1.50e+00; NT HIT: AF336043.1, EVALUE 1.40e-01
tcagaataaaagtgtgtgctgagacacatcgagtgcctgagcaccacctgtgcttggccagaccaatgggagaaaatgatcccggaagtcaaaatgagcaggttcagccatctggaagggcgtgaacgtggtatgggggtgatgaggggaggcaatgaagcaa

SEQ ID NO: 19053 - DNA, 184 bp, Homo sapiens
  MAP TO AC002497.1; EXPRESSED IN HEART, SIGNAL =   1; EXPRESSED IN LUNG, SIGNAL = 0.53; EXPRESSED IN BRAIN, SIGNAL = 0.69; EXPRESSED IN HELA, SIGNAL = 0.48; EXPRESSED IN ADULT LIVER, SIGNAL = 0.66; SWISSPROT HIT: P08548, EVALUE 3.80e-01; EST_HUMAN HIT: AW994007.1, EVALUE 1.00e-09; NT HIT: AJ006343.1, EVALUE 2.00e-07
aaaaaagaaaaagaagaaaaagaagaggaggaggaggaggaggaagaagaggaagaagaggacgaaaaagaggaagaggaagaagaagaaggaggagggaggaggaggagaaataatagaagacataagtgttgcaaagggtgtggagaaaatgaatccttgtacactgttggtgggaatgtac

SEQ ID NO: 19054 - DNA, 125 bp, Homo sapiens
  MAP TO AC008413.5; EXPRESSED IN BRAIN, SIGNAL = 2.6; EXPRESSED IN HELA, SIGNAL = 3.6; EXPRESSED IN BONE MARROW, SIGNAL = 2.2; EXPRESSED IN PLACENTA, SIGNAL = 3.2; EXPRESSED IN ADULT LIVER, SIGNAL = 3.2; EXPRESSED IN HEART, SIGNAL = 2.4; NT HIT: gi14785182, EVALUE 4.10e-01; SWISSPROT HIT: P40057, EVALUE 7.80e+00
ctgggatctctgttgggcattgcggacgctggtgttggaagttggggtgctggcttcatgaagcttctggtcctgtaggcggctctgacccataaagaggctgctacaatcacctgtactaagtg

SEQ ID NO: 19055 - DNA, 195 bp, Homo sapiens
  MAP TO AC005254.1; EXPRESSED IN PLACENTA, SIGNAL = 0.61; EXPRESSED IN ADULT LIVER, SIGNAL = 0.65; EXPRESSED IN BRAIN, SIGNAL = 1.3; EXPRESSED IN LUNG, SIGNAL = 0.58; EXPRESSED IN FETAL LIVER, SIGNAL = 0.74; EST_HUMAN HIT: BF530998.1, EVALUE 2.00e-76; NT HIT: gi4758083, EVALUE 5.00e-85; SWISSPROT HIT: P55066, EVALUE 5.00e-29
acaccgagggctgtgaccgcggctggcataagttccagggccactgttaccgctattttgcccaccggagggcatgggaagatgccgagaaggactgccgccgccgctccggccacctgaccagcgtccactcaccggaggaacacagcttcattaatagtaggggctctggggagggggccacctgcctggagg

SEQ ID NO: 19056 - DNA, 275 bp, Homo sapiens
  MAP TO AC011512.5; EXPRESSED IN FETAL LIVER, SIGNAL = 0.37; EXPRESSED IN LUNG, SIGNAL = 0.87; EXPRESSED IN BONE MARROW, SIGNAL = 0.92; EXPRESSED IN ADULT LIVER, SIGNAL = 0.65; EXPRESSED IN PLACENTA, SIGNAL = 1.1; NT HIT: AF112886.1, EVALUE 2.50e-01; SWISSPROT HIT: P08489, EVALUE 3.50e-01
ccgcaaagcattgggggtgccagccgtgaggtggcctcctggggtgctctcgccaaggtatttggtggaagcccctgtcgcaccctgctctgcggatttgatcttcctgggcagaggacactggcgtcgagggggcagcgggcatccccgcaccctggccttttcctggctggcggttgtgttgtggccgactaccacctaaggcacacaggaaagaagggtgtcagggacttgccatgggggcgccgatcgttcctcgcccttccattggacag

SEQ ID NO: 19057 - DNA, 276 bp, Homo sapiens
  MAP TO AC008282.2; EXPRESSED IN BRAIN, SIGNAL = 3.8; EXPRESSED IN LUNG, SIGNAL = 1.9; EXPRESSED IN BONE MARROW, SIGNAL = 2.9; EXPRESSED IN PLACENTA, SIGNAL = 4.8; EXPRESSED IN ADULT LIVER, SIGNAL = 3.4; EST_HUMAN HIT: BG533557.1, EVALUE 3.70e-01; NT HIT: gi6755007, EVALUE 1.00e+00
atgctgcattttacggcacagtattcacagggctctgcacttctagtcatagtaaatcttccttcgtcttcctgcagaagtaattgccatacacacataaaactgactgttgaaaagtttcagcccatttccttgttccctttccactgtgtaagcattcctacagagcctggctccattgcgcagatggtctatgagaagaaatcaataacaactcatcaccgggtgttattcggtgccaaggctcacagaaggcttatgcttcacaatggaaag

SEQ ID NO: 19058 - DNA, 198 bp, Homo sapiens
  MAP TO AF241733.1; EXPRESSED IN PLACENTA, SIGNAL = 1.4; EXPRESSED IN ADULT LIVER, SIGNAL = 1.3; EXPRESSED IN BRAIN, SIGNAL = 1.4; SWISSPROT HIT: Q01415, EVALUE 5.60e+00; EST_HUMAN HIT: BE676545.1, EVALUE 2.60e-01; NT HIT: Y11505.1, EVALUE 4.50e-02
ttgtactgtgcacatcagcatccctcagcatgaacctcaagcttgttgcagccaccgtattgggaattaacctcagcacactgggaagagggggaagtgtttcttcatcattggcttttctggctgaggatgctgttttagctttggctgcatcttttatgttgccacctgaggcatttagctcatctctgggctctc

SEQ ID NO: 19059 - DNA, 151 bp, Homo sapiens
  MAP TO AC023818.3; EXPRESSED IN PLACENTA, SIGNAL = 0.78; EXPRESSED IN ADULT LIVER, SIGNAL =   1; EXPRESSED IN BONE MARROW, SIGNAL = 0.92; SWISSPROT HIT: P93647, EVALUE 1.00e-09; EST_HUMAN HIT: AA683395.1, EVALUE 1.00e-79; NT HIT: gi14777715, EVALUE 9.00e-80
gtgttggatcctgaacaaaaccataacttcacagatcattatctaaatgtggcctttgacctttctcaagttctttttatagctactgccaacaccactgctaccattccagctgccttgttggacagaatggagatcattcaggttccag

SEQ ID NO: 19060 - DNA, 200 bp, Homo sapiens
  MAP TO AL121784.2; EXPRESSED IN ADULT LIVER, SIGNAL =   1; EXPRESSED IN FETAL LIVER, SIGNAL = 0.98; EXPRESSED IN BRAIN, SIGNAL = 0.86; EXPRESSED IN LUNG, SIGNAL = 1.6; EXPRESSED IN PLACENTA, SIGNAL = 0.95; NT HIT: Y00554.1, EVALUE 7.10e-01; SWISSPROT HIT: P08911, EVALUE 3.20e+00
ccatgcccactcatctttcaatcctgacccaagtatcaccatccctgtggagtttcccagatccttcccagtagctttgagcacttgcccttttccacctccaccgggtcctaaacaggttcctattggaacactcaagacactattgcacacacagtggcccttcctatctatggcttctacatctgcagactctacat

SEQ ID NO: 19061 - DNA, 149 bp, Homo sapiens
  MAP TO AC005546.1; EXPRESSED IN ADULT LIVER, SIGNAL =   1; EXPRESSED IN BRAIN, SIGNAL = 1.1; EXPRESSED IN PLACENTA, SIGNAL = 0.71; NT HIT: gi13632544, EVALUE 1.00e-78; SWISSPROT HIT: Q9NXH9, EVALUE 3.00e-21; EST_HUMAN HIT: BE256887.1, EVALUE 2.00e-78
ctggctgaggccttgaccttggcctggccggtgaagacacggacaaaaacacgcacgtagaagtcagcgctgatgctgagcagcggcaccacgaagcgctggtagcagttggcgcggaggtccaggctgtgcaggacgattctcagggc

SEQ ID NO: 19062 - DNA, 311 bp, Homo sapiens
  MAP TO AC010451.5; EXPRESSED IN ADULT LIVER, SIGNAL = 0.36; NT HIT: gi6679598, EVALUE 2.90e-01; SWISSPROT HIT: Q14596, EVALUE 2.50e-01; EST_HUMAN HIT: AI806446.1, EVALUE 9.00e-64
tcagcttgtagtgacagggccttctgggagggcttcatcttctcccttgagtcccacaaaacccttgaaggtgttcctggggcagtccgtgttcatccgaggacacaaaagcttcctggagcacttccccgccccagcgctgctgatggaggccacggggttccatgagcatgcaagcctctcctggtcatcaaccctaatgtcccacctggaggaagagctgagccacatggagagaatgtccacagtgcacgctcctctttttcctcgctcttgtttccagtagctgaaggacaaaattttgtcccttc

SEQ ID NO: 19063 - DNA, 233 bp, Homo sapiens
  MAP TO AC009087.4; EXPRESSED IN ADULT LIVER, SIGNAL = 1.4; EXPRESSED IN LUNG, SIGNAL = 2.5; EXPRESSED IN FETAL LIVER, SIGNAL = 0.99; EXPRESSED IN BONE MARROW, SIGNAL = 1.2; EXPRESSED IN PLACENTA, SIGNAL = 0.93; NT HIT: gi14779295, EVALUE 4.00e-83; SWISSPROT HIT: Q92620, EVALUE 3.00e-26; EST_HUMAN HIT: BG386149.1, EVALUE 5.00e-83
ttggggataacctgctgcttccccacgtgctctacctccagctctgaatctgctccaacttctgcaggcagcctcacctcattgatctgtctccgctgagctgaaatgcgcttctgcttctgtttatgcaggtgctgctcccgcctcctcacgtagtcctcggaggagtaggccagcgggttgtggaactcgtcatagccctcgtccatcatgtaccaatcccgatcggcttg

SEQ ID NO: 19064 - DNA, 157 bp, Homo sapiens
  MAP TO AC016046.1; EXPRESSED IN BRAIN, SIGNAL = 0.94; EXPRESSED IN HELA, SIGNAL = 0.62; EXPRESSED IN BONE MARROW, SIGNAL =   2; EXPRESSED IN PLACENTA, SIGNAL = 0.83; EXPRESSED IN ADULT LIVER, SIGNAL = 0.93; EXPRESSED IN FETAL LIVER, SIGNAL = 1.1; EST_HUMAN HIT: AL118769.1, EVALUE 8.00e-01; SWISSPROT HIT: P03203, EVALUE 5.10e-01
caattacccttatccagttgttcagaacagcaatcttgtcattatccctgaagacttccctcatacgctatccaatcccccagaaactgcttccatccacttattaccacttgccctgctgcctgtccaaggcaacatggcgtctgacataaagtga

SEQ ID NO: 19065 - DNA, 114 bp, Homo sapiens
  MAP TO AC010280.5; EXPRESSED IN BRAIN, SIGNAL = 0.96; EXPRESSED IN FETAL LIVER, SIGNAL = 1.3; EXPRESSED IN PLACENTA, SIGNAL = 1.3; EXPRESSED IN ADULT LIVER, SIGNAL = 1.2; NT HIT: X55074.1, EVALUE 1.50e+00; SWISSPROT HIT: P46600, EVALUE 4.10e-01
atactttgttcggaccatgctgtgctcccagcttggcttctgttccatggaaactgtgaagtgcttattgtcctggggctggttgggactcaggaaagctgtacgggatgagag

SEQ ID NO: 19066 - DNA, 106 bp, Homo sapiens
  MAP TO AC008747.4; EXPRESSED IN ADULT LIVER, SIGNAL = 1.2; EXPRESSED IN HEART, SIGNAL = 0.99; EXPRESSED IN HELA, SIGNAL = 0.94; EXPRESSED IN BONE MARROW, SIGNAL = 0.93; SWISSPROT HIT: Q15884, EVALUE 8.00e+00; EST_HUMAN HIT: BE174281.1, EVALUE 4.00e-26; NT HIT: AF288742.1, EVALUE 2.00e-21
gaaaaaccaaccaggatttaacatcaacacagaccttaagtctgataagaaacatttacaatctattatttctgaagcctgctacctggacacttcatctgcatga

SEQ ID NO: 19067 - DNA, 394 bp, Homo sapiens
  MAP TO AC011522.6; EXPRESSED IN PLACENTA, SIGNAL = 0.55; EXPRESSED IN ADULT LIVER, SIGNAL = 0.85; SWISSPROT HIT: Q05319, EVALUE 3.00e-12; EST_HUMAN HIT: AI698086.1, EVALUE 1.00e-04; NT HIT: AB047758.1, EVALUE 6.00e-03
ctggtagctgggtgtgtgtggtggcctccggggcgtctggaaatggcgtctgtcccctagcagtggtgctcacggcagataaggttgagttggcaggttggcccgtcaccctgctggcagccccaggggtgggtctgctgggtgtggcccccgggactgtgaggccagctgtcgtcctggggctggtggtggccagcatccttgtggtcgaggggggagacatgggaaggggctgggaggacatgatctccaggatccagccctttagcctggtgatgcgcgtgtacacgcccggcttcttaacctgagcgcagccaataccccagctcacgatccctgccagataaaacacgccaggggcctcctcgcaggccagggggcccccagagtcacc

SEQ ID NO: 19068 - DNA, 452 bp, Homo sapiens
  MAP TO AC010328.4; EXPRESSED IN ADULT LIVER, SIGNAL = 1.1; EXPRESSED IN BRAIN, SIGNAL = 0.84; NT HIT: AB004829.1, EVALUE 4.30e-01; SWISSPROT HIT: P51515, EVALUE 3.00e-13; EST_HUMAN HIT: BF988781.1, EVALUE 0.00e+00
ttccaaagtcatggagccacgtagcctcatcatagatcttttttatatcctcctctatcgccccactgttattgacataaacgcaacaggatttattgatcactgcacagactccaccctgctctgctaagaggtaatctaaggccaatctgttgtccatgactacatttgctagagaatctatggaggccttgagtttagagatgctatctctggtactcttagctatgttgtctatttgtctggagagatttctgagggtgacatcatgataagtgaaccctccccatggggcgatcattcctatggccgcacccatccctgccagtattagacccagagctcttttctgtctgggttgggtggtgttataaatggtcacacctatcccccgtggtcccaaaagtcccacagcacattctcccgtatgttggatgttattaatgcaagtg

SEQ ID NO: 19069 - DNA, 100 bp, Homo sapiens
  MAP TO AL049861.18; EXPRESSED IN ADULT LIVER, SIGNAL = 0.88; EXPRESSED IN LUNG, SIGNAL = 1.4; EXPRESSED IN FETAL LIVER, SIGNAL = 0.86; EXPRESSED IN BRAIN, SIGNAL = 0.94; EXPRESSED IN BONE MARROW, SIGNAL = 1.3; EXPRESSED IN PLACENTA, SIGNAL = 0.82; NT HIT: M25285.1, EVALUE 1.30e+00; EST_HUMAN HIT: AW052112.1, EVALUE 1.20e-01
atggtattcaaggcccttcattatcagacctcaacatatttctccaacctcaccttctaccagaccacctccaatgcacactatattttggtcatcacaa

SEQ ID NO: 19070 - DNA, 234 bp, Homo sapiens
  MAP TO AC005265.1; EXPRESSED IN PLACENTA, SIGNAL = 0.42; EXPRESSED IN ADULT LIVER, SIGNAL = 0.61; EXPRESSED IN BRAIN, SIGNAL = 0.5; SWISSPROT HIT: Q16927, EVALUE 8.20e+00
tttctgcttctccaagtccctgccttcacacatcatgacctcctgtggcccatccaccttgtggcaactttgctgcttttagcttcaaattcaaatgtggattgccacgctgagagaaagcaatgcctaggaaaatatcctggaaaaaaaaaaaaacaagaaactacactgctctttcctttactgccccttttcctttctctgccttttgttcaaagaggtatccaggaagtg

SEQ ID NO: 19071 - DNA, 196 bp, Homo sapiens
  MAP TO AC008427.5; EXPRESSED IN FETAL LIVER, SIGNAL = 2.8; EXPRESSED IN BONE MARROW, SIGNAL = 4.3; EXPRESSED IN PLACENTA, SIGNAL = 9.3; EXPRESSED IN ADULT LIVER, SIGNAL = 2.9; EXPRESSED IN BRAIN, SIGNAL = 3.3; NT HIT: L11910.1, EVALUE 1.00e-05; SWISSPROT HIT: O83485, EVALUE 2.50e+00; EST_HUMAN HIT: AL039642.1, EVALUE 7.00e-08
tttcctcatctgctcagtgaggatcatggtggtgcctactttgtggaccatcatgggggctgagctggagtatgtggaatgcagtgcagcaggtagtggtgttcggtgcttcctgtggtataagaagacatatatgtttggtcttcgttcctggttcctgacagagatcctaaaacccttggaatttcctgagtga

SEQ ID NO: 19072 - DNA, 117 bp, Homo sapiens
  MAP TO AC000067.2; EXPRESSED IN FETAL LIVER, SIGNAL = 1.2; EXPRESSED IN PLACENTA, SIGNAL = 2.1; EXPRESSED IN ADULT LIVER, SIGNAL = 2.4; EXPRESSED IN HEART, SIGNAL = 2.5; NT HIT: AJ006345.1, EVALUE 2.00e-06; EST_HUMAN HIT: AW577202.1, EVALUE 4.00e-51
gcagacacacaacaggctggatgtggagagaagcggatcggcggaagaagacacaagcggctggacgtcaaggggagcacgctggcggaagagcacagcgacagaagagcacactga

SEQ ID NO: 19073 - DNA, 411 bp, Homo sapiens
  MAP TO AF022141.1; EXPRESSED IN PLACENTA, SIGNAL = 1.2; EXPRESSED IN ADULT LIVER, SIGNAL = 1.5; EXPRESSED IN BRAIN, SIGNAL = 2.4; EXPRESSED IN LUNG, SIGNAL = 2.3; EST_HUMAN HIT: AI337323.1, EVALUE 2.00e-07; SWISSPROT HIT: P25632, EVALUE 6.80e-01; NT HIT: AJ229041.1, EVALUE 0.00e+00
atttctgtgagtcagatccgccatagatctcaccaggctaacaccaagctgttgccatgactgtgttccttctagaggctctggggggatatccatgtccttgacattccccccttctggagccacccacattccttgactcatggccccttcctccatctgcaaagccagtaatgtcacttctctgatccgtcctctgtcttctgtcctcccatcaccttctgattgcaggtgaggaaggtactctgcttttaaggactcttttgatgacactgggcccacctggataacccagagtatgctccccatctcaagactcttagctgaatcacatctgcactcctttatctcatgtaaagtaacatatccataggttttaaggatcagggcgtggacatcattgggggtcat

SEQ ID NO: 19074 - DNA, 210 bp, Homo sapiens
  MAP TO AL049779.5; EXPRESSED IN ADULT LIVER, SIGNAL = 0.9; EXPRESSED IN HELA, SIGNAL = 0.6; EXPRESSED IN BRAIN, SIGNAL = 0.65; EXPRESSED IN PLACENTA, SIGNAL = 1.1; EST_HUMAN HIT: BI752906.1, EVALUE 2.00e-60; SWISSPROT HIT: Q03326, EVALUE 5.00e-03; NT HIT: AE004916.1, EVALUE 8.00e-04
gccacttcctcctcacctacctgctcctggagcggctaaaggtgtctgcccctgcacgggtggttaatgtgtcctcggtggctcaccacattggcaagattcccttccacgacctccagagcgagaagcgctacagcaggggttttgcctattgccacagcaagctggccaatgtgctttttactcgtgagctggccaagaggctccaag

SEQ ID NO: 19075 - DNA, 420 bp, Homo sapiens
  MAP TO AC016651.5; EXPRESSED IN HELA, SIGNAL = 0.42; EXPRESSED IN BRAIN, SIGNAL = 0.83; EXPRESSED IN PLACENTA, SIGNAL = 0.88; EXPRESSED IN ADULT LIVER, SIGNAL = 0.83; EST_HUMAN HIT: AW085938.1, EVALUE 7.00e-13; SWISSPROT HIT: P19103, EVALUE 4.60e+00; NT HIT: AL163248.2, EVALUE 8.00e-18
tcatttggacataaaaagacactctgggtctttgaattgccagagtccttgtgctggttctttctcatctgtgtgggatgatgttccttcaatctttgaagctgctgtcctgtggatgagtttctttccttttatcttctttgaattctttggcagtttgattgtggtataaggtgggttcagttgactgggtttgtttctggaagattttaggtggctgaggctcagctcagtgctccctgtctgcatgttcttactctgggaggctggtactgggtctccagctttgttctctggcccctcaaagttaggaacctgctgttccagagggaccaaagtgtgcccagtccactggccaccacactttgaagggtgatgttggccaaagcacttcattggggtggtggcagcatgatccat

SEQ ID NO: 19076 - DNA, 153 bp, Homo sapiens
  MAP TO AC008449.4; EXPRESSED IN HELA, SIGNAL = 1.7; EXPRESSED IN BRAIN, SIGNAL =   1; EXPRESSED IN BONE MARROW, SIGNAL = 0.68; EXPRESSED IN PLACENTA, SIGNAL = 1.7; EXPRESSED IN HEART, SIGNAL =   2; EXPRESSED IN ADULT LIVER, SIGNAL = 0.9; EXPRESSED IN FETAL LIVER, SIGNAL = 2.2; SWISSPROT HIT: P39769, EVALUE 7.60e+00; NT HIT: AF005360.1, EVALUE 5.20e-01
gttccacccaagacaaattctaagtctctggtgatgagactcaagtattgttattctacaaaagctctctacataaatttcaatacggagtggtaccgactcactacgtgccacgctctgtcctggattctgaggattcagagacagaaaatc

SEQ ID NO: 19077 - DNA, 86 bp, Homo sapiens
  MAP TO AL050302.2; EXPRESSED IN LUNG, SIGNAL = 6.2; EXPRESSED IN BRAIN, SIGNAL = 2.8; EXPRESSED IN FETAL LIVER, SIGNAL =   3; EXPRESSED IN BONE MARROW, SIGNAL = 5.9; EXPRESSED IN PLACENTA, SIGNAL = 2.1; EXPRESSED IN ADULT LIVER, SIGNAL = 3.8; NT HIT: AL163203.2, EVALUE 3.00e-41; EST_HUMAN HIT: BI061036.1, EVALUE 3.00e-29
ctcaactcgagccatttcctgatttcttcatcaggaatgagctggttattgggatgtccaggcctctcaagcagcacagaaatgag

SEQ ID NO: 19078 - DNA, 210 bp, Homo sapiens
  MAP TO AC010990.3; EXPRESSED IN ADULT LIVER, SIGNAL = 0.97; EXPRESSED IN BRAIN, SIGNAL = 1.2; SWISSPROT HIT: O75078, EVALUE 1.10e+00; NT HIT: gi16157429, EVALUE 7.50e-01; EST_HUMAN HIT: BG248392.1, EVALUE 2.00e-97
tatttgcaaccctctcttgccctctaaccagcaaatggtcaccgagccggcagtcagctttctgggagtgggagatgatggggaaagaggaaagaatcgtccgctcgccggaccctggcttggagaagttctgcgctccgctgggactctgcgggccctttgcgtctacagacctatccctgccccgactaccccttcactcagacccag

SEQ ID NO: 19079 - DNA, 191 bp, Homo sapiens
  MAP TO AL117190.3; EXPRESSED IN ADULT LIVER, SIGNAL = 1.5; EXPRESSED IN LUNG, SIGNAL = 2.4; EXPRESSED IN HELA, SIGNAL = 2.9; EXPRESSED IN BONE MARROW, SIGNAL = 2.3; EXPRESSED IN BRAIN, SIGNAL = 1.1; SWISSPROT HIT: P78968, EVALUE 3.30e+00; NT HIT: AF140708.1, EVALUE 2.70e+00; EST_HUMAN HIT: AA483579.1, EVALUE 9.90e-01
ctggggcccctggctctctgggctgccaggatgggtgtcaggtgaagatccctgtccatcttggcctccttgtaggtggtgctcagagctccttgggtttgagggacatagctactgggtcttaggagggaagtggcctcaaaatgaatacccccagcagctccctctgctgcctggcctgctgtggcctc

SEQ ID NO: 19080 - DNA, 120 bp, Homo sapiens
  MAP TO AF274853.1; EXPRESSED IN PLACENTA, SIGNAL =   2; EXPRESSED IN ADULT LIVER, SIGNAL = 1.7; EXPRESSED IN BRAIN, SIGNAL = 1.8; EXPRESSED IN LUNG, SIGNAL = 1.3; EXPRESSED IN BONE MARROW, SIGNAL = 1.9; SWISSPROT HIT: Q9PN94, EVALUE 2.00e+00; EST_HUMAN HIT: BG678282.1, EVALUE 3.70e-02
gtgaccaagtggagaagaaggaagaagacatagaaaagcaaaaccatgaaagattaggaaatgaaatggcaaaggaaatcctggttttaaaaaaagagttgggaattgatgaacttgaag

SEQ ID NO: 19081 - DNA, 301 bp, Homo sapiens
  MAP TO AC004172.1; EXPRESSED IN BONE MARROW, SIGNAL =  39; EXPRESSED IN ADULT LIVER, SIGNAL =  23; EXPRESSED IN LUNG, SIGNAL = 1.3e+02; EXPRESSED IN FETAL LIVER, SIGNAL =  27; EST_HUMAN HIT: AL542094.1, EVALUE 0.00e+00; NT HIT: AF338356.1, EVALUE 0.00e+00; SWISSPROT HIT: P17693, EVALUE 4.00e-53
atgatgcctccatctccctccttactccatctcagcatgaggggctccggcagcccctcatgctgcacatggcacgtgtatctctgctcctctccagaaggcaccaccacagctgcccacttctggaaggttccatcccctgcaggcctggtctccacgagctccacgtcctgggtctggtcctccccatcccgctgccaggtcagtatgatctccgcagggtagaagcccagggcccagcacctcagggtggcctcatagtcaaagacagggtggtgggtcacgtgtgtcttgggggggt

SEQ ID NO: 19082 - DNA, 209 bp, Homo sapiens
  MAP TO AC008777.4; EXPRESSED IN ADULT LIVER, SIGNAL = 0.59; EXPRESSED IN LUNG, SIGNAL = 0.5; EST_HUMAN HIT: AW779903.1, EVALUE 1.00e-110; NT HIT: gi9506652, EVALUE 1.00e-114; SWISSPROT HIT: P22274, EVALUE 5.00e-09
ctcttgtactgagcgagctgctggcttgtcttgatgattggccaatattaaaaagggtaaagtgcataactgtggatgctgaagagctgagtgcagctcatttctagcagcttctaaatcatcctctgaagaggcactgtctaatacaaatattaccccttgagatccttggtagtagcggctccagtatttccggatgttatcagccc

SEQ ID NO: 19083 - DNA, 167 bp, Homo sapiens
  MAP TO AC027307.3; EXPRESSED IN HEART, SIGNAL =  15; EXPRESSED IN LUNG, SIGNAL = 5.1; EXPRESSED IN BRAIN, SIGNAL = 4.7; EXPRESSED IN HELA, SIGNAL = 9.7; EXPRESSED IN FETAL LIVER, SIGNAL = 8.6; EXPRESSED IN BONE MARROW, SIGNAL = 3.2; EXPRESSED IN PLACENTA, SIGNAL = 5.5; EXPRESSED IN ADULT LIVER, SIGNAL = 3.5; EST_HUMAN HIT: BI755593.1, EVALUE 4.00e-89; SWISSPROT HIT: P48809, EVALUE 1.00e-12; NT HIT: gi9506536, EVALUE 3.00e-89
agactctgcgcagctacttttcccaatatggagaagtcgtagattgtgttatcatgaaagataaaaccaccaaccagtctcgaggctttgggtttgtcaaatttaaagacccaaactgtgtggggacggtgctggccagcagaccgcacacgctagatggccgaaac

SEQ ID NO: 19084 - DNA, 100 bp, Homo sapiens
  MAP TO AL035609.7; EXPRESSED IN ADULT LIVER, SIGNAL = 3.1; EXPRESSED IN LUNG, SIGNAL = 2.6; EXPRESSED IN BRAIN, SIGNAL = 2.7; EXPRESSED IN FETAL LIVER, SIGNAL = 3.9; EXPRESSED IN BONE MARROW, SIGNAL = 3.4; EXPRESSED IN PLACENTA, SIGNAL = 3.6; SWISSPROT HIT: Q99406, EVALUE 6.00e-04; NT HIT: gi14769605, EVALUE 5.00e-37; EST_HUMAN HIT: BG112409.1, EVALUE 7.00e-37
tttcctttgagggaagagtatttttttcttcagtattagttttcttcagttttgacctgtcaaacttctccacttccgacaagtctggcttatcactcat

SEQ ID NO: 19085 - DNA, 261 bp, Homo sapiens
  MAP TO AC007031.2; EXPRESSED IN ADULT LIVER, SIGNAL = 0.51; EXPRESSED IN BRAIN, SIGNAL = 0.41; EXPRESSED IN FETAL LIVER, SIGNAL = 0.49; EXPRESSED IN BONE MARROW, SIGNAL = 0.7; SWISSPROT HIT: P09101, EVALUE 3.10e-01; NT HIT: AY056795.1, EVALUE 2.40e-01
ctggtcacctgaggcagaaacctgctattgctttgaccatctcctccttcatcttccacatccaaatgaatggtcaccagcatgttgggtccctgctggaagtccatcaccacctgtttattcctactgcattgccacaggcccttatccatcttcccggactcaacactatgatcatttccaagctgagctccagcttctgcatgtatccagccccactcggtcttccactctctcacatcccatggccagaggtatctt

SEQ ID NO: 19086 - DNA, 131 bp, Homo sapiens
  MAP TO AF037222.1; EXPRESSED IN ADULT LIVER, SIGNAL = 1.4; EXPRESSED IN HEART, SIGNAL = 1.7; EXPRESSED IN PLACENTA, SIGNAL = 1.3; EXPRESSED IN LUNG, SIGNAL = 3.4; EXPRESSED IN BRAIN, SIGNAL = 1.6; EXPRESSED IN HELA, SIGNAL = 2.2; EXPRESSED IN FETAL LIVER, SIGNAL = 2.3; SWISSPROT HIT: Q9H0B6, EVALUE 6.00e-09; NT HIT: Y14586.1, EVALUE 2.00e-49; EST_HUMAN HIT: BG255102.1, EVALUE 9.00e-68
ccggggttctttggctcactctctcgtgaacttcctcccttcagcttcctaaccagcttctcactgctgcgtctaatggaagcccggagtttgctaaaggaaccactgcgttttaaagatccagtgccatc

SEQ ID NO: 19087 - DNA, 204 bp, Homo sapiens
  MAP TO AC010203.13; EXPRESSED IN BONE MARROW, SIGNAL = 4.8; EXPRESSED IN PLACENTA, SIGNAL = 7.3; EXPRESSED IN ADULT LIVER, SIGNAL = 5.9; EXPRESSED IN BRAIN, SIGNAL = 6.1; EXPRESSED IN FETAL LIVER, SIGNAL = 8.4; SWISSPROT HIT: Q08379, EVALUE 5.00e-22; NT HIT: gi14754121, EVALUE 1.00e-111; EST_HUMAN HIT: AW418533.1, EVALUE 1.00e-111
gtgagccttgccagcagtggggagtctgcacaaggagaggcggggaagcattctccctgtgacaaccccactgagcagcagatcatgcaactgcttcatgagatgcagaacctccaggagcacccaggcttgggcagcagcccttgcattccttttttgtaccagactgatgagaacaatgaggtgaagatcaccatcatctaa

SEQ ID NO: 19088 - DNA, 111 bp, Homo sapiens
  MAP TO AC008999.5; EXPRESSED IN BRAIN, SIGNAL = 0.82; EXPRESSED IN BONE MARROW, SIGNAL = 0.68; EXPRESSED IN ADULT LIVER, SIGNAL = 0.81; EXPRESSED IN PLACENTA, SIGNAL = 0.77; EXPRESSED IN HEART, SIGNAL =   1; SWISSPROT HIT: P35494, EVALUE 7.90e+00; NT HIT: gi15982587, EVALUE 3.60e-01; EST_HUMAN HIT: BE144296.1, EVALUE 9.00e-06
ttagattgcaaacctaaagttagtattgacatgtccttgttttgtggaaggatatacatcttgaaaggtttcaaggccagcaaagaacaatttgtgaaggcagtcatctag

SEQ ID NO: 19089 - DNA, 420 bp, Homo sapiens
  MAP TO AC009265.5; EXPRESSED IN LUNG, SIGNAL = 1.1; EXPRESSED IN BRAIN, SIGNAL =   1; EXPRESSED IN BONE MARROW, SIGNAL = 0.85; EXPRESSED IN PLACENTA, SIGNAL = 1.2; EXPRESSED IN HEART, SIGNAL = 1.3; EXPRESSED IN ADULT LIVER, SIGNAL = 1.3; NT HIT: AL163303.2, EVALUE 4.00e-32; SWISSPROT HIT: P56814, EVALUE 4.60e+00; EST_HUMAN HIT: AL521707.1, EVALUE 1.00e-103
atagtgattcctctgatggaactgggcaaagtaaattgaaaacctggaaaggattcaccattctagatgccattgagaacattcatgggcacggaaggaggtcaaaatatatcaacattaagaggagtttggaagaagttgattaaaaccctcatatatgactttgaggcgttcaagacttcagtggaagaagtaactggagatgtggtagacatagcaataaaactagaactagaagtggagcctgaagatgtgactgaattgcttcaatctcaggataaaactggaacagatgaagagctacttcttatggatgaacaaagaaagtggtatcttgagggggaatctactcctggtgaagatgctgtgaacgttgttcaaatgacaacaaaggatttagaatattccataaacttaaac

SEQ ID NO: 19090 - DNA, 198 bp, Homo sapiens
  MAP TO AC005327.1; EXPRESSED IN ADULT LIVER, SIGNAL = 4.5; EXPRESSED IN FETAL LIVER, SIGNAL = 2.2; EXPRESSED IN BRAIN, SIGNAL = 4.3; EXPRESSED IN BONE MARROW, SIGNAL = 4.6; EXPRESSED IN PLACENTA, SIGNAL = 3.6; EST_HUMAN HIT: AW376414.1, EVALUE 1.00e-107; NT HIT: AF114491.1, EVALUE 1.00e-107; SWISSPROT HIT: P29776, EVALUE 6.40e-01
cttgtgtccggtttgatcaattgccacgaggaagaggaggtgggccaggaagaggcagagcgagagctgcagatgcagtgaggtgctggtgttctggatggctttacacaggagaaaagtgagggccgccaggaggaggcacagcagagagacgctcagccccatgtaggtgatgacagtcagcacgggatcctcctc

SEQ ID NO: 19091 - DNA, 403 bp, Homo sapiens
  MAP TO AC008988.7; EXPRESSED IN PLACENTA, SIGNAL = 1.2; EXPRESSED IN ADULT LIVER, SIGNAL = 1.8; EXPRESSED IN HEART, SIGNAL = 1.5; EXPRESSED IN BRAIN, SIGNAL = 1.8; EXPRESSED IN FETAL LIVER, SIGNAL = 1.9; EST_HUMAN HIT: BI771193.1, EVALUE 0.00e+00; NT HIT: AB001451.1, EVALUE 9.00e-67; SWISSPROT HIT: P29353, EVALUE 2.00e-05
gggctgggacctggccgcatcttcccgcggtcacctttcagctcccgacaggaagcgtggccccagaaccctgggggtttcagagcccgtgcccatgggtggttctggaattctgaggccgatcctttggctggtgtcccggaattccctggtccggcccctcgtccatgcaggcaccctaggggctccccggcaggaccccagaacgccaatatcctactccacgggtccaggcgggctcccgggagctgatgccgaggtctctgtcccgcaggtacggacgaaggacgtgctgtttgagagcatcagccacctgatcgaccaccacctgcagaacgggcagcccatcgtggccgccgagagtgagctgcacctgcgtggcgtggtctcacgggagccctga

SEQ ID NO: 19092 - DNA, 182 bp, Homo sapiens
  MAP TO AJ004799.1; EXPRESSED IN ADULT LIVER, SIGNAL = 0.92; EXPRESSED IN BRAIN, SIGNAL = 1.2; EXPRESSED IN BONE MARROW, SIGNAL = 1.1; EXPRESSED IN PLACENTA, SIGNAL = 1.9; SWISSPROT HIT: P13608, EVALUE 3.30e+00; NT HIT: AJ271736.1, EVALUE 3.00e-98
atgaaggaggagcgcagaagcaaacactttatgtgcccaactggaactgttcgctttggtcaaccaacactgattgctcattcctctgtgttccctcttaaacagcttctgaaaattgctcgagaggggcggagtcaggaagccaagagcgtgggaggcaaatctcagccccctcgctgtct

SEQ ID NO: 19093 - DNA, 127 bp, Homo sapiens
  MAP TO AC004076.1; EXPRESSED IN ADULT LIVER, SIGNAL = 0.43; SWISSPROT HIT: Q13360, EVALUE 4.00e-07; NT HIT: gi14766470, EVALUE 2.00e-15; EST_HUMAN HIT: BE799789.1, EVALUE 2.00e-65
gattgtatggtctttgaggatgtggccatatatttctcccaagaggaatgggggatccttaatgatgctcagagacacctgcacagcaatgtgatgttggagaactttgcgcttttgtcatcagtag

SEQ ID NO: 19094 - DNA, 109 bp, Homo sapiens
  MAP TO AL121924.12; EXPRESSED IN BONE MARROW, SIGNAL = 0.77; EXPRESSED IN ADULT LIVER, SIGNAL = 0.84; SWISSPROT HIT: Q9ULV3, EVALUE 8.00e+00; NT HIT: gi14760906, EVALUE 8.90e-02; EST_HUMAN HIT: AL601515.1, EVALUE 1.30e-01
agggatttgccgttggcacctgttcggccctgtctcagcatgtgggagagagtggtctgtaggttggtgttggtttcctgctcagaggatgcttcctcagtaggcccgg

SEQ ID NO: 19095 - DNA, 224 bp, Homo sapiens
  MAP TO AC010202.6; EXPRESSED IN HEART, SIGNAL = 4.5; EXPRESSED IN LUNG, SIGNAL = 3.2; EXPRESSED IN HELA, SIGNAL = 4.3; EXPRESSED IN FETAL LIVER, SIGNAL = 3.8; EXPRESSED IN PLACENTA, SIGNAL = 3.2; EXPRESSED IN ADULT LIVER, SIGNAL = 3.5; SWISSPROT HIT: Q60596, EVALUE 1.50e+00
atgcctccttccaactccaaagggtgctcaactgctcagcagttctagaacttaatgagaaactctctgctaaccctgtcccaagtttttctccccaccgcagagcagatacaacccgctttgaagactcgggttggctctgggttagaagtgggtttggattggttgtgtggcatgagctgcagaagatgaggaatgagcatactgacgtgaacccatattag

SEQ ID NO: 19096 - DNA, 260 bp, Homo sapiens
  MAP TO AC009533.9; EXPRESSED IN BONE MARROW, SIGNAL =   1; EXPRESSED IN PLACENTA, SIGNAL = 0.78; EXPRESSED IN HEART, SIGNAL =   1; EXPRESSED IN ADULT LIVER, SIGNAL = 0.88; SWISSPROT HIT: P50282, EVALUE 6.10e-02; EST_HUMAN HIT: AI680347.1, EVALUE 1.40e+00; NT HIT: gi6755299, EVALUE 9.40e-01
ctggaaagcaccacagccccaagagaaaagcttttccgcactgctgttaagccagggccacacactgcagtgctgcggtgctccaccagctggaggatggcctggcccataatacccgcattcccaccttgctctggccctgtgtcccctccaacgtgcatcctgagctcgcaacctgtgtggaacccaaccagctgcttatcaacatttaagtccacttttatgacacttccgtcaacaatctggtcaactgcactcat

SEQ ID NO: 19097 - DNA, 98 bp, Homo sapiens
  MAP TO AC004403.1; EXPRESSED IN BRAIN, SIGNAL = 0.97; EXPRESSED IN PLACENTA, SIGNAL = 0.76; EXPRESSED IN ADULT LIVER, SIGNAL = 0.45; SWISSPROT HIT: P11955, EVALUE 6.10e+00; EST_HUMAN HIT: AL552262.1, EVALUE 3.00e-08; NT HIT: AB032159.1, EVALUE 2.00e-02
gacaagcatgccgatgagcagatggtggagagcgtgggctccgaccccacggcagcatctaggattggttgtttacagttcctggagccccagtgggc

SEQ ID NO: 19098 - DNA, 324 bp, Homo sapiens
  MAP TO AC016940.7; EXPRESSED IN LUNG, SIGNAL = 3.4; EXPRESSED IN HELA, SIGNAL = 2.5; EXPRESSED IN BRAIN, SIGNAL = 2.9; EXPRESSED IN BONE MARROW, SIGNAL = 2.7; EXPRESSED IN ADULT LIVER, SIGNAL = 3.1; EXPRESSED IN PLACENTA, SIGNAL = 3.3; EXPRESSED IN HEART, SIGNAL =   3; SWISSPROT HIT: P43362, EVALUE 1.00e-34; EST_HUMAN HIT: BE541026.1, EVALUE 1.00e-63; NT HIT: U82671.3, EVALUE 9.00e-48
atgaaggaagtggataccactggccactcctacatccttgtcacttccctgggcctctcctatgacggcctgctgggtgatgatcagagcaagcccaatgcaggcctccagataatggtcctgtgcacgattataatggagggcaactgcacccctgaagaggtcatatgggaaaccctgagtgtgatggggctgtatgctgggaagaagcacagtgtctatgggaagcccaggaagctgctcacccaagactgggtgcaggaaaactacctggagtaccaccaggtgcccagcagtgatcctgcacactatgagttcctgtag

SEQ ID NO: 19099 - DNA, 128 bp, Homo sapiens
  MAP TO AC008518.3; EXPRESSED IN PLACENTA, SIGNAL = 0.89; EXPRESSED IN HEART, SIGNAL = 1.2; EXPRESSED IN ADULT LIVER, SIGNAL = 0.72; EXPRESSED IN BRAIN, SIGNAL = 0.94; NT HIT: gi14734137, EVALUE 1.00e-53; SWISSPROT HIT: Q13972, EVALUE 3.00e-06; EST_HUMAN HIT: BF766478.1, EVALUE 2.00e-53
acaggaagactgagcctatacctggcttggtgaatggcctccatccactctttaccatcctgctcctcctcacagcgcagctccagtggcttctgaccttcatggccaaaaagaacagtaaagtaata

SEQ ID NO: 19100 - DNA, 237 bp, Homo sapiens
  MAP TO AC008996.5; EXPRESSED IN ADULT LIVER, SIGNAL = 0.56; EXPRESSED IN BRAIN, SIGNAL = 0.6; NT HIT: AL163246.2, EVALUE 2.00e-51; SWISSPROT HIT: P07668, EVALUE 2.90e+00; EST_HUMAN HIT: BG620088.1, EVALUE 9.00e-48
cctactactcagggagccaatgtaggagttctgccatctgctaagtatgtctatgccaattttgcattctggaactggggaaatgaccacagagtgagtcttgggacccacttgatcaactgtaagttggacctgagctaaatttctattaagtacatgacctccataagcctctactttaactggaggaccacagtgatgttttgggtcccctggaatcaatgtcacctcagagcc

SEQ ID NO: 19101 - DNA, 153 bp, Homo sapiens
  MAP TO AC011358.5; EXPRESSED IN PLACENTA, SIGNAL = 0.87; EXPRESSED IN ADULT LIVER, SIGNAL = 0.96; EXPRESSED IN HELA, SIGNAL = 0.87; EXPRESSED IN BRAIN, SIGNAL = 0.95; EXPRESSED IN LUNG, SIGNAL = 0.72; NT HIT: Z75249.1, EVALUE 5.20e-01; SWISSPROT HIT: Q9XSI3, EVALUE 4.40e+00; EST_HUMAN HIT: BE908322.1, EVALUE 1.30e-02
gtaacaaacccaatgaaagatgaagtggatgatgcctttacaccatatcccttccatccactcagcaactggttccataaaattgtttcctacaaagcctggaaacgtggcaggacaccaaagcgcactgacgccatgaatcacggcagctga

SEQ ID NO: 19102 - DNA, 123 bp, Homo sapiens
  MAP TO AJ012008.1; EXPRESSED IN ADULT LIVER, SIGNAL = 3.9; EXPRESSED IN BRAIN, SIGNAL = 2.5; EXPRESSED IN LUNG, SIGNAL = 2.3; EXPRESSED IN BONE MARROW, SIGNAL =   3; NT HIT: AJ012008.1, EVALUE 4.00e-63; EST_HUMAN HIT: BG397555.1, EVALUE 1.50e-01
ggtttccaggtagcttgatctgttccaggcctggctggggtctgccctcgccacaggtggtcacggcctctttgcaagaactgctggggcttccaccacagttgtagcaccgcattcggtttc

SEQ ID NO: 19103 - DNA, 85 bp, Homo sapiens
  MAP TO AC005173.1; EXPRESSED IN ADULT LIVER, SIGNAL = 0.93
atgagaagctacccggaagggatgaataggatacagaacacagtcgatttaaacttaaaaaagaattatcctggctactgtgtgg

SEQ ID NO: 19104 - DNA, 140 bp, Homo sapiens
  MAP TO AC010205.5; EXPRESSED IN HELA, SIGNAL = 0.7; EXPRESSED IN FETAL LIVER, SIGNAL = 1.2; EXPRESSED IN LUNG, SIGNAL = 0.86; EXPRESSED IN PLACENTA, SIGNAL = 0.99; EXPRESSED IN ADULT LIVER, SIGNAL = 1.4; EXPRESSED IN HEART, SIGNAL = 1.3; EXPRESSED IN BRAIN, SIGNAL = 1.2; NT HIT: gi6981617, EVALUE 4.00e-14; SWISSPROT HIT: Q63520, EVALUE 3.00e-08; EST_HUMAN HIT: BG723417.1, EVALUE 3.00e-49
gcagaagcttaaccaagaatattctcagcagtttctgactttgtttcagcagtgggatttagatatgcagaaagctgaggaacaagaagaaaaaatacttgttggtatcatgattaggtttataatcaaccaagtctcaa

SEQ ID NO: 19105 - DNA, 228 bp, Homo sapiens
  MAP TO AL031713.6; EXPRESSED IN BONE MARROW, SIGNAL =   2; EXPRESSED IN ADULT LIVER, SIGNAL = 2.5; EXPRESSED IN BRAIN, SIGNAL = 2.1; EXPRESSED IN LUNG, SIGNAL = 1.4; EST_HUMAN HIT: AI811172.1, EVALUE 3.00e-10; NT HIT: gi14726179, EVALUE 9.00e-07; SWISSPROT HIT: O70338, EVALUE 2.00e+00
tggcagccaggcgcagctgcaggaccgtggggtagcggcgtggtggccatgcacgcctggcggtcgacatagaggctgttggtcttgacggcgatgtttttctccaggctcctgcacgtactccaggttgcccagcgactgctccacttctagaagcttctcccgcagcaccaccagggacgcatgcagcccctccacctcattccccagcctgagggtgcggggcat

SEQ ID NO: 19106 - DNA, 379 bp, Homo sapiens
  MAP TO AL049773.1; EXPRESSED IN LUNG, SIGNAL = 5.6; EXPRESSED IN FETAL LIVER, SIGNAL =   7; EXPRESSED IN BONE MARROW, SIGNAL = 6.1; EXPRESSED IN PLACENTA, SIGNAL = 6.8; EXPRESSED IN ADULT LIVER, SIGNAL = 5.4; EXPRESSED IN HEART, SIGNAL = 7.2; EST_HUMAN HIT: BF753619.1, EVALUE 2.10e+00; NT HIT: AF335589.1, EVALUE 2.30e-02
atgatctccatcatcatcaccatcatcatcatcaccaccactatcatcattaccgtcaccatgattactatcaccaccaccatcatcaccatgattaccattaccatcaccattatcatcaccatcatcatccttaccatgatcatcaccatcatcaccgtgatcaccatcatcatcaccatcaccatcaccatgatcactatcactatcaccatcatcattaccaccatcagcagcagcaccatcatcaccatgatcaccatcattatcactataatcaccgtcatcattaccatcaccatcacctttatcactgtcaccaccaccatcatcaccatcaccatcaacaccaacaacatcattattgtctttcaactag

SEQ ID NO: 19107 - DNA, 121 bp, Homo sapiens
  MAP TO AC005204.1; EXPRESSED IN LUNG, SIGNAL = 2.7; EXPRESSED IN BRAIN, SIGNAL = 2.3; EXPRESSED IN BONE MARROW, SIGNAL = 2.7; EXPRESSED IN ADULT LIVER, SIGNAL =   3; SWISSPROT HIT: P34616, EVALUE 3.50e+00; EST_HUMAN HIT: BF988461.1, EVALUE 4.00e-14; NT HIT: M76741.1, EVALUE 1.00e-07
cattttccacagcagctatagcatttcccatttccatcagcaatgcactacagctccaatttttccacttacttgaagatactttttgctttgtgctgttgttgtttttatcaaagctatc

SEQ ID NO: 19108 - DNA, 182 bp, Homo sapiens
  MAP TO AC009001.6; EXPRESSED IN PLACENTA, SIGNAL = 3.4; EXPRESSED IN ADULT LIVER, SIGNAL = 3.2; EXPRESSED IN FETAL LIVER, SIGNAL = 7.2; NT HIT: AF017079.1, EVALUE 8.00e-19; SWISSPROT HIT: P04406, EVALUE 2.00e-12; EST_HUMAN HIT: BF768591.1, EVALUE 6.00e-08
aagccagatcccagcaaaatcaaattgggtgacgatgctggcactggttatgtcatggagtccaccagcagcatcttcacgaccatggggaaggctggggctcgcttaggatgggcagccaaagggatcaccatctctgccccctctgcccatgcccccatgtttgtgatggacatgaacca

SEQ ID NO: 19109 - DNA, 154 bp, Homo sapiens
  MAP TO AJ009613.3; EXPRESSED IN ADULT LIVER, SIGNAL = 9.8; EXPRESSED IN BRAIN, SIGNAL =  20; EXPRESSED IN LUNG, SIGNAL =  66; EXPRESSED IN FETAL LIVER, SIGNAL =  22; NT HIT: AF014363.1, EVALUE 2.00e-34; SWISSPROT HIT: P53475, EVALUE 6.00e-17; EST_HUMAN HIT: BE616490.1, EVALUE 8.00e-38
ttactcctgcttgctgatccacatctgctggaaggtagacagtgaggccaggatggaactgccgatccacactgagtacctgtgcttggggcggggcacaatgatcttgatcttcgtggtgctgggcaccagggcagtgatctccttctgcatc

SEQ ID NO: 19110 - DNA, 157 bp, Homo sapiens
  MAP TO AC037199.1; EXPRESSED IN BRAIN, SIGNAL = 0.68; EXPRESSED IN PLACENTA, SIGNAL = 0.65; EXPRESSED IN ADULT LIVER, SIGNAL = 0.73; NT HIT: AF295068.2, EVALUE 2.00e-06; SWISSPROT HIT: O00321, EVALUE 5.10e-01; EST_HUMAN HIT: W39445.1, EVALUE 8.00e-04
gaaaagagcagtaacttccaggtcattggcatggaaaggagcagtaacttccgggtcactgccatggaaaggggaggtaacttctgggtcattgccatggaaaggggaagtaactttcaggtcattgccatgacagtttataaatgccatgacactg

SEQ ID NO: 19111 - DNA, 367 bp, Homo sapiens
  MAP TO AC005601.1; EXPRESSED IN BRAIN, SIGNAL = 0.8; EXPRESSED IN ADULT LIVER, SIGNAL = 0.85; EXPRESSED IN HEART, SIGNAL = 1.7; NT HIT: AL163218.2, EVALUE 2.00e-49; SWISSPROT HIT: P42533, EVALUE 4.90e+00; EST_HUMAN HIT: AL602279.1, EVALUE 2.00e-49
ctttctggggcctggaggacagaggccctcttctcacagctccactaggtagtgccccagtggggactctgtatgagggatccaaccccatatttcccttccgcattgccctagcagaggttctccatgaaggctctgcctccatggcagacttctgcctggacatccaggcgtttctatacatcctcttaaatataggcacaggttcccaaacctcaactcttgtcttctgcgcacctgcaggcccaacaccacgtgaaagctgccaaagcttggggcttgcaccctctgaagcaatggtgcgagctgtaacttggccccttacagccacagctggagctggagcatcagggatgcagggcaccat

SEQ ID NO: 19112 - DNA, 161 bp, Homo sapiens
  MAP TO AC011513.2; EXPRESSED IN HEART, SIGNAL = 1.1; EXPRESSED IN ADULT LIVER, SIGNAL = 0.99; EXPRESSED IN HELA, SIGNAL = 0.67; EXPRESSED IN PLACENTA, SIGNAL = 1.1; EST_HUMAN HIT: BG118207.1, EVALUE 5.20e-02; NT HIT: AB008424.1, EVALUE 1.40e-01; SWISSPROT HIT: P03218, EVALUE 2.00e+00
agaccagaacaactaagccatggccaccttcccgatggacacacaaggaggcctggtgtcacccactgctccaggggcggtgttctcggcaggggagctgcctcttgtcccggatcctgctctgctgccaccttatgtggctgcagaattggagggaattg

SEQ ID NO: 19113 - DNA, 88 bp, Homo sapiens
  MAP TO AC004205.1; EXPRESSED IN BONE MARROW, SIGNAL = 3.4; EXPRESSED IN ADULT LIVER, SIGNAL = 2.9; EXPRESSED IN FETAL LIVER, SIGNAL = 4.9; EXPRESSED IN HELA, SIGNAL = 7.6; EST_HUMAN HIT: BI915628.1, EVALUE 2.50e-02
ccctgaagaagctgaaattccatttttcttcgaaatggggtcttttcaaagttagtaacaatgaagctgtcattcacacgatgcatgg

SEQ ID NO: 19114 - DNA, 171 bp, Homo sapiens
  MAP TO AC020553.4; EXPRESSED IN LUNG, SIGNAL = 1.6; EXPRESSED IN HELA, SIGNAL = 1.6; EXPRESSED IN PLACENTA, SIGNAL = 0.82; EXPRESSED IN ADULT LIVER, SIGNAL = 0.79; SWISSPROT HIT: P34390, EVALUE 1.90e+00; EST_HUMAN HIT: AA987768.1, EVALUE 3.50e+00; NT HIT: gi14861872, EVALUE 3.80e-02
atgcaagataccatcaaacagatcaatatatgcagtgtgagagtctcagaaggaggagagagaaataaagaggaagtgagaatatttgaggacataatggccacaaacttcataaatttgaggaaagacatgatcaaaaaattcaagaagctcaacaaattccaactagaa

SEQ ID NO: 19115 - DNA, 258 bp, Homo sapiens
  MAP TO AC004510.1; EXPRESSED IN ADULT LIVER, SIGNAL = 0.49; EXPRESSED IN LUNG, SIGNAL = 0.57; SWISSPROT HIT: P31795, EVALUE 9.00e-11; NT HIT: gi9635487, EVALUE 4.00e-03; EST_HUMAN HIT: BF992424.1, EVALUE 2.00e-76
gcatcttccccctttcctcatatttctatttttccaatcccaaatccagaccacacttggtttattcatggcagttcctctaaacccagtcaaatctcgccagctaaagctggttatgctgtcgtgtcccatacctctattattgaggctgctgcacttcctccctccactacttcccaacaagccaaactgattgctttaacttgtgcactctctgtcgccaaaggaatgcacattaaaatttatattgactcctaa

SEQ ID NO: 19116 - DNA, 158 bp, Homo sapiens
  MAP TO AC010609.5; EXPRESSED IN PLACENTA, SIGNAL = 1.4; EXPRESSED IN HEART, SIGNAL = 1.3; EXPRESSED IN ADULT LIVER, SIGNAL = 1.8; EXPRESSED IN FETAL LIVER, SIGNAL = 1.4; EXPRESSED IN BRAIN, SIGNAL =   2; SWISSPROT HIT: Q08881, EVALUE 2.00e-26; NT HIT: gi16159882, EVALUE 6.00e-84; EST_HUMAN HIT: AA354109.1, EVALUE 3.00e-80
ctctttccagcagtgattcataatctggtagacgtgtgtggaggccagccggggcttgtacaaccgaaatccggtactgatgtcttccaccacctctgagttgcttcggttttcatacgggattttgccttcactgaaaacttcccacatcagcacac

SEQ ID NO: 19117 - DNA, 413 bp, Homo sapiens
  MAP TO AC005239.1; EXPRESSED IN BRAIN, SIGNAL = 0.59; EXPRESSED IN BONE MARROW, SIGNAL = 0.59; EXPRESSED IN ADULT LIVER, SIGNAL = 0.55; SWISSPROT HIT: O02491, EVALUE 4.50e+00; NT HIT: gi14764241, EVALUE 0.00e+00; EST_HUMAN HIT: BG683695.1, EVALUE 0.00e+00
tcagtcactgtcactatcagcttcactggaatcagaagctgcagcttcactgccatcctcctgggccgagtgctcgctgccactggggaagggactggcgctgcggctgtggctccggctccgctggccacccccattgctgccgctgtctgaatcattgtcactgccaccttgggcctgtcctctgtcctcatcatcagagtcggcatcgtcctcagaatcagcatcactgccaaagatctcctctttgtcacgggcagcccgggcctcatcctcgctgctctcgtcctcaccactgccactcttgtcactggcctcgtccctgtcaccttcctcccgttcactctcgctgcccgagtgctcatcttcactgccctccttctcactgctgctgcccttctcctgctcctcat

SEQ ID NO: 19118 - DNA, 147 bp, Homo sapiens
  MAP TO AC002103.1; EXPRESSED IN PLACENTA, SIGNAL = 0.8; EXPRESSED IN ADULT LIVER, SIGNAL = 0.99; EXPRESSED IN HEART, SIGNAL = 2.5; EXPRESSED IN FETAL LIVER, SIGNAL = 1.1; SWISSPROT HIT: Q08499, EVALUE 6.80e-01
ctgcctcctttgagttgggcctggggacactggcggtggggacaggccgctgggggcactggcagtggggacaggccactggggtcgctggtggtggggacaggccgcatcactacgtccaggatgagggagtcagctgtgcacctg

SEQ ID NO: 19119 - DNA, 286 bp, Homo sapiens
  MAP TO AC000041.2; EXPRESSED IN PLACENTA, SIGNAL = 0.47; EXPRESSED IN ADULT LIVER, SIGNAL = 0.65; EXPRESSED IN BRAIN, SIGNAL = 0.94; NT HIT: AJ010229.1, EVALUE 0.00e+00; SWISSPROT HIT: P19474, EVALUE 7.00e-05; EST_HUMAN HIT: BI758586.1, EVALUE 0.00e+00
atggctgcactcttccaagaagcaagcagctgtcccgtctgctcagactatctagagaaaccaatgtccctggagtgtggatgcgctgtctgcttcaagtgcatcaattcactgcagaaggagccccatggggaggatctactttgctgttgctgttccatggtctctcagaagaacaaaatcaggcccagttggcagctagagaggctggcttcccacatcaaggaactggagcccaagctgaagaagattctgcagatgaacccaaggatgcggaagttccaag

SEQ ID NO: 19120 - DNA, 117 bp, Homo sapiens
  MAP TO AC022116.3; EXPRESSED IN PLACENTA, SIGNAL = 2.6; EXPRESSED IN ADULT LIVER, SIGNAL = 1.7; EXPRESSED IN HEART, SIGNAL = 2.8; EXPRESSED IN BRAIN, SIGNAL = 1.8; EXPRESSED IN LUNG, SIGNAL = 1.4; EST_HUMAN HIT: AW948887.1, EVALUE 1.00e-14; NT HIT: AJ229042.1, EVALUE 2.00e-09
gaagcatccagcatgggagaaagatgaagactggaagactcagcaagtcaccttcttctgcctgctttatcttggttgcgctggcagatgatcacatgctgcccacccagattgaag

SEQ ID NO: 19121 - DNA, 79 bp, Homo sapiens
  MAP TO AF087017.1; EXPRESSED IN HEART, SIGNAL = 5.2; EXPRESSED IN LUNG, SIGNAL = 2.8; EXPRESSED IN BRAIN, SIGNAL = 1.9; EXPRESSED IN HELA, SIGNAL = 2.9; EXPRESSED IN PLACENTA, SIGNAL =   2; EXPRESSED IN ADULT LIVER, SIGNAL =   2; EXPRESSED IN FETAL LIVER, SIGNAL = 3.9; EXPRESSED IN BONE MARROW, SIGNAL = 2.2; NT HIT: U50731.1, EVALUE 4.00e-37
ttaggatgttcgatggctcgggtgtgctccacgctcagggatcatcacgtccggccggcggtagttggcacgtggagag

SEQ ID NO: 19122 - DNA, 185 bp, Homo sapiens
  MAP TO AC010451.5; EXPRESSED IN BRAIN, SIGNAL = 0.94; EXPRESSED IN HELA, SIGNAL = 0.71; EXPRESSED IN BONE MARROW, SIGNAL = 0.72; EXPRESSED IN PLACENTA, SIGNAL = 0.93; EXPRESSED IN ADULT LIVER, SIGNAL = 0.95; EXPRESSED IN LUNG, SIGNAL = 1.1; SWISSPROT HIT: P49011, EVALUE 1.50e+00; NT HIT: D84471.1, EVALUE 1.60e-01
atgaccggtcagatgctgctgcccatggggagaagcacatgccctgggggcctgatcatgaggtgtccagtgtcagagccccttgttggagggagtgcagagagcatgaagtcaaccatcctccgatggctttgctctgtcatcttcaaggactttgcacagaccctgatcagaacagaagctgc

SEQ ID NO: 19123 - DNA, 81 bp, Homo sapiens
  MAP TO AC005903.3; EXPRESSED IN BRAIN, SIGNAL = 2.8; EXPRESSED IN BONE MARROW, SIGNAL = 2.4; EXPRESSED IN ADULT LIVER, SIGNAL = 2.2; EXPRESSED IN PLACENTA, SIGNAL = 2.3; EXPRESSED IN LUNG, SIGNAL = 3.5; NT HIT: gi4502960, EVALUE 2.00e-38; SWISSPROT HIT: Q02388, EVALUE 2.00e-10; EST_HUMAN HIT: BG419231.1, EVALUE 4.00e-38
cttgaggccccggggacccatgaagccaacatctcctttttctcctcggataccaggcactccatcctttcctggggatcc

SEQ ID NO: 19124 - DNA, 202 bp, Homo sapiens
  MAP TO AL023774.1; EXPRESSED IN HELA, SIGNAL = 0.78; EXPRESSED IN PLACENTA, SIGNAL = 1.1; EXPRESSED IN ADULT LIVER, SIGNAL = 0.9; EXPRESSED IN FETAL LIVER, SIGNAL =   1; NT HIT: AL163300.2, EVALUE 4.60e-02; SWISSPROT HIT: gi10720301, EVALUE 1.90e+00
aagcaaagttttgctgcagatgaggatgccagctgggcccctccttgagctgcagtggtggcagtggcaggccaagtgtgcctgttcttgggcccattcaaggcagtgcatgctggcaccagtcttagtgggtccaggcaggttgatcattgggtttccagaaagcttgctcaagtgctggcaattgcagcagtggaccaag

SEQ ID NO: 19125 - DNA, 363 bp, Homo sapiens
  MAP TO AC005797.1; EXPRESSED IN ADULT LIVER, SIGNAL = 1.6; EXPRESSED IN PLACENTA, SIGNAL =  67; EXPRESSED IN FETAL LIVER, SIGNAL = 2.7; EXPRESSED IN BONE MARROW, SIGNAL = 0.89; SWISSPROT HIT: Q14002, EVALUE 4.00e-68; NT HIT: gi14786807, EVALUE 0.00e+00; EST_HUMAN HIT: AL602909.1, EVALUE 0.00e+00
agaatacgtagaattgtctggttacttcttcattcacaagattttcttttataacgtgtagggtatagaatcctgcgtcattgtgggtgacgttctggatcagcagggttccattggggtatattgtctctcgaccgttgtgtgcgggccctggggcattttcttgacttatattttttacatatcctataattcgatagttggcatgcaccctttcccctttgtaccagttgtagccataaagattctgggactcattatggactactagaaggacctccttcccttctgcgacattgaacggcacgacatcaatattggtctgggcactgtttggcaggttccagaaggttaaaagcgagg

SEQ ID NO: 19126 - DNA, 174 bp, Homo sapiens
  MAP TO AL121768.2; EXPRESSED IN PLACENTA, SIGNAL = 0.85; EXPRESSED IN ADULT LIVER, SIGNAL = 0.98; EXPRESSED IN FETAL LIVER, SIGNAL = 0.83; EXPRESSED IN BRAIN, SIGNAL = 0.83; EXPRESSED IN LUNG, SIGNAL = 1.3; SWISSPROT HIT: P20053, EVALUE 3.40e-02; NT HIT: Z72714.1, EVALUE 2.40e+00; EST_HUMAN HIT: BG112356.1, EVALUE 8.90e-01
cttcctgccatctccaaatggtaatagtatgttctgggtctagtcccacagacagcaatagtttgccagtagcactgaagctgactgaacatactccctttgaatggtagcatcttaggatagataaagtctgcttgttcattgcatcccagatgtgaatagaaggagctgtag

SEQ ID NO: 19127 - DNA, 87 bp, Homo sapiens
  MAP TO AC005222.1; EXPRESSED IN ADULT LIVER, SIGNAL = 0.54; SWISSPROT HIT: P57737, EVALUE 7.00e-12; NT HIT: gi13648926, EVALUE 7.00e-42; EST_HUMAN HIT: BG750448.1, EVALUE 1.00e-41
ctggttgaatccagtagacacaaggtgctcccaggtgcccatccatgccagccggctatccctgctgttctcatgggcctgcgtgct

SEQ ID NO: 19128 - DNA, 194 bp, Homo sapiens
  MAP TO AC022517.1; EXPRESSED IN PLACENTA, SIGNAL = 9.1; EXPRESSED IN ADULT LIVER, SIGNAL = 6.5; EXPRESSED IN HEART, SIGNAL = 7.8; EXPRESSED IN LUNG, SIGNAL = 8.5; SWISSPROT HIT: P39956, EVALUE 1.00e-15; NT HIT: AB020683.2, EVALUE 1.00e-105; EST_HUMAN HIT: BF856729.1, EVALUE 8.00e-91
caggacttaggctccccaaagtgcaggtagttgatgctgtacaggtccatgtcctcggtgtgccaggcgaaggtggtcttccacatgccgaagtacaggtagggcgtgttcacgccctcgatgatggtgccgcactcgcgctccaccatgtccaggatggtccggaggctcccgatgttccactgggccacgtc

SEQ ID NO: 19129 - DNA, 419 bp, Homo sapiens
  MAP TO AC000395.1; EXPRESSED IN BRAIN, SIGNAL =   3; EXPRESSED IN BONE MARROW, SIGNAL = 0.93; EXPRESSED IN PLACENTA, SIGNAL = 2.2; EXPRESSED IN ADULT LIVER, SIGNAL = 1.9; EXPRESSED IN HEART, SIGNAL =   1; SWISSPROT HIT: Q12967, EVALUE 4.00e-34; NT HIT: gi14734851, EVALUE 0.00e+00; EST_HUMAN HIT: BE312028.1, EVALUE 0.00e+00
cgcatccatcagtgtaaactgctctgccaccagatctggagggaacaccaagaggtgaggcttctcctcactcagcccgttctctgcaaccacaggtgaaggccaggaaggctgtaatgatggaactggtgctggagctggctccagctctagagtttgtgagggagctggatcctgttctggagctggctctagttccagagctggcgctggagccgattctagtcccacagctggctctggagcctgctggagctccggagctggtgctggagctacttctagctctgaacctggagctggtgttggagctggctctggctccggggctggagccggcactgggctgggtgctcgagctggtgttagagctagctcgagctctggagttggttttagagctggcactggtgacagag

SEQ ID NO: 19130 - DNA, 166 bp, Homo sapiens
  MAP TO AC020728.4; EXPRESSED IN LUNG, SIGNAL = 1.9; EXPRESSED IN BONE MARROW, SIGNAL = 1.5; EXPRESSED IN ADULT LIVER, SIGNAL = 1.3; EXPRESSED IN HEART, SIGNAL = 1.9; SWISSPROT HIT: P44863, EVALUE 2.60e+00; NT HIT: M94327.1, EVALUE 9.00e+00; EST_HUMAN HIT: AW500149.1, EVALUE 1.00e-82
ctacatttccagtatctacctactggaactttttcaaaggaaggatttggactcttgggaagattcttcctgacccaatcaatcagaaattgtttgggagattttccagtccaacttcgagcagtatagtcaaaatttcttacatcatgaggttctttctttttat

SEQ ID NO: 19131 - DNA, 143 bp, Homo sapiens
  MAP TO AC005257.1; EXPRESSED IN BRAIN, SIGNAL = 1.3; EXPRESSED IN BONE MARROW, SIGNAL = 1.2; EXPRESSED IN ADULT LIVER, SIGNAL = 1.3; EXPRESSED IN LUNG, SIGNAL = 0.98; SWISSPROT HIT: Q04998, EVALUE 2.60e+00; NT HIT: AL163284.2, EVALUE 8.00e-06; EST_HUMAN HIT: BG503440.1, EVALUE 2.00e-04
gctagagggtcggtgtctgtcagcctgtgctcagacgagggcgaggagagttctggtcagcgcgtccagcctccctcctgtgttgctttgctgctggaaaaagagggtcctgatgcagaccccaagagaggagagaactcgag

SEQ ID NO: 19132 - DNA, 159 bp, Homo sapiens
  MAP TO AL049856.1; EXPRESSED IN BRAIN, SIGNAL = 4.4; EXPRESSED IN HELA, SIGNAL = 3.3; EXPRESSED IN BONE MARROW, SIGNAL = 3.9; EXPRESSED IN PLACENTA, SIGNAL = 2.8; EXPRESSED IN ADULT LIVER, SIGNAL = 3.3; SWISSPROT HIT: Q24432, EVALUE 8.70e-01; NT HIT: D49733.1, EVALUE 8.50e+00
atctcgggactggcacttctcctgatccgcacatttcctccggacccccacatttccgatctgcacctctgggtacgcgcacatctccggacccacacatcggacccgcacatctcgggcccgcacatctccgctgcacacatctccagacctgcacat

SEQ ID NO: 19133 - DNA, 279 bp, Homo sapiens
  MAP TO AL121825.19; EXPRESSED IN PLACENTA, SIGNAL = 0.91; EXPRESSED IN ADULT LIVER, SIGNAL = 0.95; EXPRESSED IN BRAIN, SIGNAL = 0.98; EXPRESSED IN FETAL LIVER, SIGNAL = 0.91; EST_HUMAN HIT: BG311161.1, EVALUE 3.00e-79; SWISSPROT HIT: P31948, EVALUE 2.00e-09; NT HIT: M64324.1, EVALUE 2.60e-01
ctttggccacttgggattgagaagtcgagctttgattgcatcatccagtgccttgtcatactgctggattttcatgtaggctgcagatctattgctgtataagatgcagttctgagggtcaacagccagggcttcattatacagaacaatagctgtgtggaaatctccatcatgacaggcctgattactctgacgaactttctcaacaaattcagctttgctcagtaccggtccatcaggacttctctggccaatagtgtcagcaccaaagagaggaat

SEQ ID NO: 19134 - DNA, 99 bp, Homo sapiens
  MAP TO AC005932.1; EXPRESSED IN PLACENTA, SIGNAL = 0.8; EXPRESSED IN ADULT LIVER, SIGNAL = 0.92; EXPRESSED IN BRAIN, SIGNAL =   1; EST_HUMAN HIT: AV749863.1, EVALUE 4.60e-01; SWISSPROT HIT: P43244, EVALUE 2.10e+00; NT HIT: gi14733923, EVALUE 1.20e+00
ctcctgggtgccaggtggctgggcggggctgccccaatttccggaggtaggtcggggcccgattatttttggctgtggcgtccttgaagcctccgccat

SEQ ID NO: 19135 - DNA, 169 bp, Homo sapiens
  MAP TO AC011525.4; EXPRESSED IN BRAIN, SIGNAL = 1.2; EXPRESSED IN PLACENTA, SIGNAL = 0.79; EXPRESSED IN ADULT LIVER, SIGNAL = 0.61; SWISSPROT HIT: Q46915, EVALUE 1.90e+00; EST_HUMAN HIT: BE876669.1, EVALUE 8.60e-01; NT HIT: X84724.1, EVALUE 1.50e-01
tcacggaggttcacagtcatctgaagagggggtcctgtgttcacctgcatcttgcaggtgagtggacagaagtgcggaaagcatgagagctagtgcagagaagagctggggcaccagcagtaggactggaggcaggacattgtctttggttactacctggatggacaaa

SEQ ID NO: 19136 - DNA, 183 bp, Homo sapiens
  MAP TO AC000058.1; EXPRESSED IN ADULT LIVER, SIGNAL = 0.68; EXPRESSED IN HEART, SIGNAL = 1.1; EXPRESSED IN HELA, SIGNAL = 0.93; EXPRESSED IN FETAL LIVER, SIGNAL = 0.58; EXPRESSED IN PLACENTA, SIGNAL = 0.62; NT HIT: L39891.1, EVALUE 6.40e-01; SWISSPROT HIT: P44475, EVALUE 3.80e-01; EST_HUMAN HIT: AW849931.1, EVALUE 6.10e-02
tcattgactttctttacgctttgtgaccacatttctattcagatcaggttgcacagcttttaacttctccaagtctaaacttaaagttagagcaacttcatggtactccttaagtggatatctcttataacaagggagaacgcagtctggaaacttcagagcatccaggccaatgggatgact

SEQ ID NO: 19137 - DNA, 88 bp, Homo sapiens
  MAP TO AC006261.1; EXPRESSED IN BRAIN, SIGNAL = 1.3; EXPRESSED IN PLACENTA, SIGNAL = 1.4; EXPRESSED IN ADULT LIVER, SIGNAL = 1.4; SWISSPROT HIT: P51610, EVALUE 4.70e+00; NT HIT: M59819.1, EVALUE 4.30e+00; EST_HUMAN HIT: BF344726.1, EVALUE 1.00e-01
ttacagctgtgacttaggccctgggcttgtgggttcctggggtccaggctgtggagacccctcccacactgaggtcttagggtcaggc

SEQ ID NO: 19138 - DNA, 78 bp, Homo sapiens
  MAP TO AC026796.2; EXPRESSED IN ADULT LIVER, SIGNAL = 0.9; EXPRESSED IN LUNG, SIGNAL =   1; EXPRESSED IN BRAIN, SIGNAL = 0.86; EXPRESSED IN PLACENTA, SIGNAL = 0.92; EST_HUMAN HIT: T60196.1, EVALUE 3.40e-01
cagaaaatcactggatttcttcatgcccattggctcattattattgctggaccacttactattgattgttgaaaacac

SEQ ID NO: 19139 - DNA, 149 bp, Homo sapiens
  MAP TO AF205588.1; EXPRESSED IN BONE MARROW, SIGNAL = 0.99; EXPRESSED IN ADULT LIVER, SIGNAL =   1; EXPRESSED IN HEART, SIGNAL =   2; EXPRESSED IN FETAL LIVER, SIGNAL = 1.1; EXPRESSED IN BRAIN, SIGNAL = 1.2; SWISSPROT HIT: Q06730, EVALUE 3.00e-17; NT HIT: gi15299302, EVALUE 2.00e-56; EST_HUMAN HIT: BG494561.1, EVALUE 3.00e-68
aaaattgtgattttccagggatcagtgtcgtttagggatgtgactgtgggcttcactcaagaggagtggcagcatctggaccctgctcagaggaccctgtacagggatgtgatgctggagaactacagccaccttgtctcagtaggtag

SEQ ID NO: 19140 - DNA, 190 bp, Homo sapiens
  MAP TO AC010200.7; EXPRESSED IN FETAL LIVER, SIGNAL = 0.8; EXPRESSED IN BRAIN, SIGNAL = 1.4; EXPRESSED IN PLACENTA, SIGNAL = 0.91; EXPRESSED IN HEART, SIGNAL = 1.1; EXPRESSED IN ADULT LIVER, SIGNAL = 1.4; SWISSPROT HIT: P03921, EVALUE 2.20e-01; NT HIT: AL163285.2, EVALUE 7.00e-04; EST_HUMAN HIT: AI439488.1, EVALUE 1.00e-06
aaggctgtgggtggaggatgtgctccagggctctctccttggcccacagatggccatctccgtctcctctctgtgtgttcacatcaacttccctctctgtgtttctgtctctgtaaccaaatttccagtttttataaggatacaagtcatattggatcttcattttaatttgattttctctgtaatgacc

SEQ ID NO: 19141 - DNA, 152 bp, Homo sapiens
  MAP TO AC008455.5; EXPRESSED IN BRAIN, SIGNAL = 0.98; EXPRESSED IN LUNG, SIGNAL = 1.3; EXPRESSED IN HELA, SIGNAL = 1.2; EXPRESSED IN HEART, SIGNAL = 1.1; EXPRESSED IN ADULT LIVER, SIGNAL =   1; SWISSPROT HIT: P17301, EVALUE 1.00e-23; NT HIT: gi6006008, EVALUE 2.00e-80
ctgtatataaatgatgtgctcggggcaactctgtgcttgatttactaccatattcttctgcaggcacctttcattgttttctttaaataaccccctggaggttactctggatgaaaatccatctgcatcaagtgtgatgttatatacaatgg

SEQ ID NO: 19142 - DNA, 292 bp, Homo sapiens
  MAP TO AC016398.5; EXPRESSED IN LUNG, SIGNAL = 0.85; EXPRESSED IN ADULT LIVER, SIGNAL = 0.73; EST_HUMAN HIT: AL544165.1, EVALUE 0.00e+00; SWISSPROT HIT: Q13114, EVALUE 3.00e-05; NT HIT: gi4759253, EVALUE 0.00e+00
ctgcatcccttattgattttatgatgcaggctttgcagaacctatggctgcatggcgtttgcactgcttctcgtaatgccatcaagcagatggggcattcatacttgctttccaggggtgggccaaactctacatcatatccctggatctcctccataaaggagctgaagaggttccccgtgctggcagttctgcccacactatcattttttgttgctgcgctacaggagctggccatggccacacagtagtcactttgagactggctggatccacacctgttttcacagtt

SEQ ID NO: 19143 - DNA, 519 bp, Homo sapiens
  MAP TO AC004186.1; EXPRESSED IN PLACENTA, SIGNAL = 0.8; EXPRESSED IN ADULT LIVER, SIGNAL = 0.57; EST_HUMAN HIT: AI765855.1, EVALUE 0.00e+00; SWISSPROT HIT: P19474, EVALUE 8.00e-30; NT HIT: gi4508004, EVALUE 0.00e+00
atggccacgtcagccccactacggagcctggaagaggaggtgacctgctccatctgtcttgattacctgcgggaccctgtgaccattgactgtggccacgtcttctgccgcagctgcaccacagacgtccgccccatctcagggagccgccccgtctgcccactctgcaagaagccttttaagaaggagaacatccgacccgtgtggcaactggccagcctggtggagaacattgagcggctgaaggtggacaagggcaggcagccgggagaggtgacccgggagcagcaggatgcaaagttgtgcgagcgacaccgagagaagctgcactactactgtgaggacgacgggaagctgctgtgcgtgatgtgccgggagtcccgggagcacaggccccacacggccgtcctcatggagaaggccgcccagccccacagggtaagccctcttcacccccgagggtgccttgccaccttctctggatgctccaccttgcagtcctcagaggactcagcctga

SEQ ID NO: 19144 - DNA, 162 bp, Homo sapiens
  MAP TO AC011890.4; EXPRESSED IN ADULT LIVER, SIGNAL = 7.9; SWISSPROT HIT: Q16478, EVALUE 1.10e+00; EST_HUMAN HIT: BI011251.1, EVALUE 7.00e-29; NT HIT: AL163227.2, EVALUE 7.00e-22
atgatctcctttgactccatgtgttacatccagggcacactgatgcaagaggttggctctcatggtcttgggcagctccaccctgtggctttgcagggtacagccccacttccagttgctttcatgggctggcattgtctgcagcttttccaggtgcacggt

SEQ ID NO: 19145 - DNA, 542 bp, Homo sapiens
  MAP TO AC022143.6; EXPRESSED IN ADULT LIVER, SIGNAL =   1; NT HIT: Z70664.1, EVALUE 1.00e-121; SWISSPROT HIT: P21416, EVALUE 5.00e-28; EST_HUMAN HIT: AI654705.1, EVALUE 1.00e-73
tttttggcttcctggatggccaccactaagatttttgcttgtcttttggatgctttatcagcagctttttcagctgcctcagctgcctgttttcgtttttcagactctcgattgtcaaaaactttctgggctacttctaaaagctggctattgttcattccagcaaatccctccggcttttgtaattttcttttactatcagtagctgcctgagccacaaacaccaaattaatagcacggctattcttgggagctgccgggtcaaaaggggtgtaagtttgataggcctcctggagactttctaaaagtgttccaggttcatcaggcccctggacaacttcagttgtctcagacagatttatgggtttttgagcggctcccttgaggcccacaaggagataccggtgaaaatcatctaaagccctcctcccacccgaggagttaggatcccaattaggccgggtagagggaaaaacctccttaacgaggttttgggcttccccctctggtctatcagctgatgtaaggaaatactttctggc

SEQ ID NO: 19146 - DNA, 231 bp, Homo sapiens
  MAP TO AC005744.2; EXPRESSED IN ADULT LIVER, SIGNAL = 0.45; EXPRESSED IN LUNG, SIGNAL = 0.5; EXPRESSED IN BRAIN, SIGNAL = 0.56; EXPRESSED IN HELA, SIGNAL = 0.43; EXPRESSED IN PLACENTA, SIGNAL = 0.66; NT HIT: M11726.1, EVALUE 2.10e-01; SWISSPROT HIT: Q9RR76, EVALUE 1.20e+00
tttccagggattgtgggatatagagatgcatcaggcacttccctctcctccaggactcagtgggaagagactgtccactgtgggaggccactgagctcctggtttgattatccaaagtcaggggtgtttgttagagtcatgcatgggggagcagctgcagcagcccccaaggacgactcgccccagcccccagcccctttgcgggggctgccttggctggtgacactccct

SEQ ID NO: 19147 - DNA, 108 bp, Homo sapiens
  MAP TO AC027274.2; EXPRESSED IN ADULT LIVER, SIGNAL = 2.9; EXPRESSED IN BRAIN, SIGNAL = 2.7; EXPRESSED IN FETAL LIVER, SIGNAL = 3.6; EXPRESSED IN BONE MARROW, SIGNAL = 2.8; EXPRESSED IN PLACENTA, SIGNAL = 3.3; NT HIT: Z47735.1, EVALUE 2.00e-11; EST_HUMAN HIT: AL521707.1, EVALUE 1.00e-14
ctacttcgttattatttcaacaatgttcacaacattttcactaggggtagcttccatctcaagaaaccactttctcagctcattcataagcagcaattccttatccat

SEQ ID NO: 19148 - DNA, 162 bp, Homo sapiens
  MAP TO AF222684.1; EXPRESSED IN BRAIN, SIGNAL = 0.96; EXPRESSED IN PLACENTA, SIGNAL = 1.6; EXPRESSED IN HEART, SIGNAL = 0.96; EXPRESSED IN ADULT LIVER, SIGNAL = 1.2; EXPRESSED IN FETAL LIVER, SIGNAL = 1.4; SWISSPROT HIT: P08826, EVALUE 2.60e+00; NT HIT: AL163208.2, EVALUE 3.00e-86
gtggcaagattctgggatcgagaggcaggtggaggagttggaagggtcaattcccgtgttctgcctggggtaactgagactgaatttggaggccatgtctgcagccctggctgtcctgagtgtgctgccaaagcatccgactgcattgctttcagggcaaag

SEQ ID NO: 19149 - DNA, 231 bp, Homo sapiens
  MAP TO AF207953.2; EXPRESSED IN BONE MARROW, SIGNAL = 0.88; EXPRESSED IN ADULT LIVER, SIGNAL = 0.9; EXPRESSED IN FETAL LIVER, SIGNAL = 1.1; EXPRESSED IN BRAIN, SIGNAL = 0.85; EST_HUMAN HIT: AW363667.1, EVALUE 7.00e-67; SWISSPROT HIT: Q14541, EVALUE 1.00e-25; NT HIT: AF133496.1, EVALUE 1.00e-122
atagttctgccccagagacaagtatgaataccacagacaacggtgtcaactgtctgtgtgctatctgtggggacagagcaacaggaaaacactatggggcatccagctgtgatgggtgcaagggtttcttcagacgcagcattcgtaagagtcacgtttattcttgcaggtactttaaatgcccttttaggcaagttatctttacagatgtttcagtttggcacgcaaaaa

SEQ ID NO: 19150 - DNA, 154 bp, Homo sapiens
  MAP TO AL022069.1; EXPRESSED IN HEART, SIGNAL = 1.5; EXPRESSED IN BONE MARROW, SIGNAL = 1.2; EXPRESSED IN PLACENTA, SIGNAL = 0.76; EXPRESSED IN ADULT LIVER, SIGNAL = 0.97; EST_HUMAN HIT: F06080.1, EVALUE 3.00e-68; SWISSPROT HIT: Q15349, EVALUE 1.00e-21; NT HIT: gi10863932, EVALUE 1.00e-72
gacgtcgtgtccaagatgctccacgtggaccctcatcagcgcctgacggcgatgcaagtgctcaaacacccgtgggtggtcaacagagagtacctgtccccaaaccagctcagccgacaggacgtgcacctggtgaaggtaccggcaggcgaca

SEQ ID NO: 19151 - DNA, 191 bp, Homo sapiens
  MAP TO AC016545.4; EXPRESSED IN PLACENTA, SIGNAL = 2.5; EXPRESSED IN ADULT LIVER, SIGNAL = 2.3; EXPRESSED IN HEART, SIGNAL = 2.5; EXPRESSED IN FETAL LIVER, SIGNAL = 2.2; NT HIT: AF157623.1, EVALUE 1.70e-01; EST_HUMAN HIT: AW976456.1, EVALUE 9.90e-01; SWISSPROT HIT: Q10638, EVALUE 3.30e+00
gctgaagatactgtagctggcagtcctagtgtggggaagtgccaagtcaagttggaaagcaagacttttagacaagatgaccagcaaaggtggggccacagagctgggctcgaccagactgctgtgctccgtgtttatagcacggagcccatctccaaattaaatctcctggacttgtcacttggggtaag

SEQ ID NO: 19152 - DNA, 438 bp, Homo sapiens
  MAP TO AF035396.1; EXPRESSED IN PLACENTA, SIGNAL = 1.3; EXPRESSED IN ADULT LIVER, SIGNAL = 1.1; EXPRESSED IN HEART, SIGNAL =   2; EXPRESSED IN BRAIN, SIGNAL = 1.2; EXPRESSED IN FETAL LIVER, SIGNAL = 1.4; SWISSPROT HIT: Q13506, EVALUE 9.00e-56; NT HIT: AF045451.1, EVALUE 0.00e+00; EST_HUMAN HIT: AA983371.1, EVALUE 0.00e+00
agagttgagcagccgcttcattaacagtgagctcatgaagcatgagatgttttccatccttcctctttgagtcaaatctgccatatattcactgtatttccaaatttcctcctctttgcgtggatcattatcgttcatctcaaagatgtgaccaagcattttggccaacgtcttgttggtttttagcagctttttcacttcgttcaagtcacttttcggcagtgtgggggccatccgctccacacactctgccacagagagcacagcagcagcatccagtgcctcgctgctctcctttggggacgtgtgggagcccaggtctgctggggagaggctgtgctcgctcttggtggcatggtggccttgccagagtctggactcaccagcactctgcagtgctaggctcccgaccacatctgacttcccctgtcccaagct

SEQ ID NO: 19153 - DNA, 228 bp, Homo sapiens
  MAP TO AL117337.25; EXPRESSED IN ADULT LIVER, SIGNAL = 0.81; EXPRESSED IN BRAIN, SIGNAL = 1.8; EXPRESSED IN HELA, SIGNAL = 1.5; EXPRESSED IN PLACENTA, SIGNAL = 0.89; EST_HUMAN HIT: AW390297.1, EVALUE 3.00e-35; SWISSPROT HIT: P51814, EVALUE 3.00e-25; NT HIT: M19441.1, EVALUE 1.00e-52
aattcagtcctcagattacatcaaaggactcacacaggagagaagccctatgcatgcaaggaatgtgggaagtccttttctcagaagtcacattttattatacatcagagaaaacacacaggggagaagccctatgagtgtcaggagtgtggggaaacctttatccagaagtcacaactcactgcacatcagaagacacacacaaagaagaggaatgctgagaagtaa

SEQ ID NO: 19154 - DNA, 77 bp, Homo sapiens
  MAP TO AF044083.1; EXPRESSED IN PLACENTA, SIGNAL = 2.1; EXPRESSED IN BONE MARROW, SIGNAL = 3.3; EXPRESSED IN ADULT LIVER, SIGNAL = 1.8; EXPRESSED IN LUNG, SIGNAL = 2.9; EXPRESSED IN BRAIN, SIGNAL = 2.4; EST_HUMAN HIT: AA453195.1, EVALUE 2.00e-18; SWISSPROT HIT: P51840, EVALUE 2.80e+00; NT HIT: AF044083.1, EVALUE 6.00e-36
aaatcttgcggtgttgagtaggaccgccaggccggcaagcaggaggcggcctcctcgtaaccgccaggcggcgacac

SEQ ID NO: 19155 - DNA, 302 bp, Homo sapiens
  MAP TO AF044083.1; EXPRESSED IN PLACENTA, SIGNAL = 1.7; EXPRESSED IN ADULT LIVER, SIGNAL =   1; EXPRESSED IN BRAIN, SIGNAL = 1.2; EST_HUMAN HIT: BE139127.1, EVALUE 4.00e-78; SWISSPROT HIT: P96069, EVALUE 3.60e+00; NT HIT: AF044083.1, EVALUE 5.00e-83
acaatgtggagcccttggttttaaagaagagcatcaaaattaaatttcttctttcaaaattttattctccccagattaacgaatattattcaagttataccttcagtttcaccaaaggtcatgtctcaatccttctcctctacaggaaagcaattctaaaaaaaaaaaaaaaagggaaaagaaaaacctcagataaaactggttttggtaggactactctcaggcaggacagcataagatacaagaatcaaatgactggcaatagaagacttattaagattaaaactgtactggtcatcaga

SEQ ID NO: 19156 - DNA, 145 bp, Homo sapiens
  MAP TO AC034211.3; EXPRESSED IN LUNG, SIGNAL = 3.1; EXPRESSED IN BRAIN, SIGNAL = 2.8; EXPRESSED IN BONE MARROW, SIGNAL = 2.4; EXPRESSED IN PLACENTA, SIGNAL = 2.6; EXPRESSED IN ADULT LIVER, SIGNAL = 2.2; EXPRESSED IN HEART, SIGNAL = 2.8; EST_HUMAN HIT: AA978107.1, EVALUE 3.00e-06; SWISSPROT HIT: Q51463, EVALUE 2.00e+00
cagtggactgcagttgaaagagctgaagatgcagactatctctgagaagaatttaggaaagccaaaatttcacagcagagacaaaagcaaggacaacaggagggagtttgaagcttctgacacctacagctacaacaaacattaa

SEQ ID NO: 19157 - DNA, 142 bp, Homo sapiens
  MAP TO AC010209.13; EXPRESSED IN BRAIN, SIGNAL = 1.1; EXPRESSED IN BONE MARROW, SIGNAL =   1; EXPRESSED IN PLACENTA, SIGNAL = 0.81; EXPRESSED IN HEART, SIGNAL = 1.3; EXPRESSED IN ADULT LIVER, SIGNAL =   1; SWISSPROT HIT: O43903, EVALUE 9.00e-18; EST_HUMAN HIT: AW937747.1, EVALUE 3.00e-74; NT HIT: gi16181092, EVALUE 1.90e+00
aattttccaatgagaaaagtgccctgtaagaaagatgctgcatcaggttcattctttgctcgggacaataccgcaaacttccttcactggtgtagggacattggggttgatgaaacttacctctttgaatctgaaggtttag

SEQ ID NO: 19158 - DNA, 143 bp, Homo sapiens
  MAP TO AC004264.1; EXPRESSED IN BRAIN, SIGNAL = 1.4; EXPRESSED IN PLACENTA, SIGNAL = 1.8; EXPRESSED IN ADULT LIVER, SIGNAL = 1.6; NT HIT: gi11417961, EVALUE 5.00e-75; EST_HUMAN HIT: BG333052.1, EVALUE 7.00e-75; SWISSPROT HIT: P13725, EVALUE 3.00e-20
ataggggtccaggagtctgctggtgtcctgcatgagatctgtctgcttctggagctggccaaggagcacgcggtactctttcgagcagctgcctatagccgccatgctcgccatgcttggaaacaggagtgcaaggaccagac

SEQ ID NO: 19159 - DNA, 234 bp, Homo sapiens
  MAP TO AC034103.5; EXPRESSED IN BRAIN, SIGNAL = 1.8; EXPRESSED IN LUNG, SIGNAL = 1.4; EXPRESSED IN FETAL LIVER, SIGNAL = 1.5; EXPRESSED IN PLACENTA, SIGNAL = 1.4; EXPRESSED IN ADULT LIVER, SIGNAL = 1.7; NT HIT: AF224669.1, EVALUE 2.00e-14; SWISSPROT HIT: Q49430, EVALUE 1.90e-01; EST_HUMAN HIT: AW821312.1, EVALUE 9.00e-14
atggacagaacagtgtgtggagattcattttgtgaacttctgcttcaaggaccactgcaagaacataccagaaaaaccgaaaaaattcacagaccctttgaaagaagcagcttgctactgcaaatgctgcaagacaactggaaaactgtgaagacaaaggacgtaaactcttgggagctctatgaccctgcccattgcctgagaaacccaagtacttatcctggccaacttagg

SEQ ID NO: 19160 - DNA, 164 bp, Homo sapiens
  MAP TO AF052656.1; EXPRESSED IN ADULT LIVER, SIGNAL =   1; EXPRESSED IN HEART, SIGNAL = 1.1; EXPRESSED IN LUNG, SIGNAL = 1.4; EXPRESSED IN BRAIN, SIGNAL = 0.99; EXPRESSED IN HELA, SIGNAL = 1.3; NT HIT: AL163267.2, EVALUE 2.00e-87; SWISSPROT HIT: P11345, EVALUE 2.60e+00; EST_HUMAN HIT: BG222050.1, EVALUE 2.00e-87
ggcctcacatgcaggaggacttcgtaaactctggtacacaggaagaaaattattgcagggtcgttggacccagaaaagcatcacgggcggaggatgttgaagcttctgaccaggacagagttcttcagttgatagctgtccagaagtttcggcaagacgtttga

SEQ ID NO: 19161 - DNA, 186 bp, Homo sapiens
  MAP TO AC005257.1; EXPRESSED IN ADULT LIVER, SIGNAL = 0.41; EXPRESSED IN PLACENTA, SIGNAL = 1.5; EXPRESSED IN LUNG, SIGNAL = 0.79; EXPRESSED IN BONE MARROW, SIGNAL = 0.69; SWISSPROT HIT: P90211, EVALUE 9.70e+00; EST_HUMAN HIT: BF988120.1, EVALUE 6.00e-33; NT HIT: AF115479.1, EVALUE 6.50e-01
atgaaaggagcttctcctgcggagcgctctgctctttcaacagcccgggacaccgtcctgctttattctcttgttgtggacaggctcaacgccctctgcacccaggagcagagcggccgcggccaccctgaggcagcatggaaccgaggcccccacaccgggacctacctccactcccacaactga

SEQ ID NO: 19162 - DNA, 184 bp, Homo sapiens
  MAP TO AC000087.2; EXPRESSED IN BONE MARROW, SIGNAL = 1.1; EXPRESSED IN ADULT LIVER, SIGNAL =   1; EXPRESSED IN HELA, SIGNAL = 1.5; SWISSPROT HIT: P70362, EVALUE 1.00e-13; EST_HUMAN HIT: BE385819.1, EVALUE 1.00e-67; NT HIT: gi5032208, EVALUE 2.00e-65
cgccagcacactctcctttgtctagaagaactccgcttatttgaaaaagatacacggctttggggttggtgatgtccaggaagtcagggctctgaggttggaatttggagtaggtggccacttgaaggttgacgctctccacctggaccaggccgccttcttccaagagtaagttctgcatcat

SEQ ID NO: 19163 - DNA, 130 bp, Homo sapiens
  MAP TO AC000007.8; EXPRESSED IN BONE MARROW, SIGNAL = 1.4; EXPRESSED IN PLACENTA, SIGNAL = 4.7; EXPRESSED IN ADULT LIVER, SIGNAL =   2; EXPRESSED IN HELA, SIGNAL = 6.1; EXPRESSED IN FETAL LIVER, SIGNAL = 8.2; SWISSPROT HIT: P42568, EVALUE 3.00e-05; EST_HUMAN HIT: R98334.1, EVALUE 4.00e-67; NT HIT: gi16162117, EVALUE 3.00e-67
ctgcgacttcggctgcctcctctatttacaggcctctccatttcagagtcattgtcgttatcctccacttcatctgattcctcctcattgtcatcagaatgcagatctttcattatagacctcaaaggac

SEQ ID NO: 19164 - DNA, 168 bp, Homo sapiens
  MAP TO AC010267.5; EXPRESSED IN BONE MARROW, SIGNAL = 1.6; EXPRESSED IN HELA, SIGNAL = 1.3; EXPRESSED IN BRAIN, SIGNAL = 1.5; EXPRESSED IN PLACENTA, SIGNAL = 0.99; EXPRESSED IN ADULT LIVER, SIGNAL = 1.7; EXPRESSED IN FETAL LIVER, SIGNAL = 0.9; SWISSPROT HIT: O99828, EVALUE 3.30e+00
atctttatacttattccaatgccttgttgaataaaaggacagccttctttcttctttttcatatcaggattgacattaatcatggcatctacttgtcctccattcactttattatgaaaatcattgggatggaggaggaaaagtcagtcttccataatcagcctggct

SEQ ID NO: 19165 - DNA, 208 bp, Homo sapiens
  MAP TO AC010615.5; EXPRESSED IN PLACENTA, SIGNAL = 1.6; EXPRESSED IN HEART, SIGNAL = 1.8; EXPRESSED IN ADULT LIVER, SIGNAL = 1.8; EXPRESSED IN BRAIN, SIGNAL = 1.7; EXPRESSED IN FETAL LIVER, SIGNAL = 1.4; SWISSPROT HIT: P11930, EVALUE 8.00e-25; EST_HUMAN HIT: BF742321.1, EVALUE 1.00e-113; NT HIT: gi14861847, EVALUE 1.00e-27
ctggtaaaagatggaccatcccatcagcagttaacaagatgatcggcagccacctttccagtccttctaatgcacgacccaaacaaaatttgtgcaagtcagagagagaggcaaagtttgcaagtcttctcacttcgtagaactgtgggggtggcaaccaaatttcttttgataagaaactttcagttgcctctgatggagatgacca

SEQ ID NO: 19166 - DNA, 174 bp, Homo sapiens
  MAP TO AC040163.3; EXPRESSED IN BONE MARROW, SIGNAL = 4.9; EXPRESSED IN PLACENTA, SIGNAL = 4.6; EXPRESSED IN ADULT LIVER, SIGNAL = 4.7; EXPRESSED IN HEART, SIGNAL = 2.9; NT HIT: AL163303.2, EVALUE 1.00e-11; EST_HUMAN HIT: BG113167.1, EVALUE 1.00e-30
gtggaatctactactggtgaagatgctgtgaacgtcatggaaatgacaatgaaagatttagaatattacataaacttagttgagaaagtagtggcagggtttgagagaaatgactccaattttgaaggaatttctaccatgggtaaaaatgctgtcaaacagcatgggatgcta

SEQ ID NO: 19167 - DNA, 171 bp, Homo sapiens
  MAP TO AC012310.4; EXPRESSED IN FETAL LIVER, SIGNAL = 1.8; EXPRESSED IN BRAIN, SIGNAL = 1.5; EXPRESSED IN HELA, SIGNAL = 1.6; EXPRESSED IN BONE MARROW, SIGNAL = 1.4; EXPRESSED IN ADULT LIVER, SIGNAL = 1.7; EXPRESSED IN PLACENTA, SIGNAL = 1.9; EXPRESSED IN HEART, SIGNAL = 1.6; SWISSPROT HIT: P10775, EVALUE 1.00e-06; EST_HUMAN HIT: BF996613.1, EVALUE 3.50e+00
tccagtctctctaaggcacacttggggtgagtcagggccgcacacaatagctttatgccatcatcttggagccgattaaatcccaggcacaatcgagttacgtgttggatgctggtgagaaacaaggctaggtcctgacagctggctgccgacaagttgcatttctccagg

SEQ ID NO: 19168 - DNA, 188 bp, Homo sapiens
  MAP TO AF238375.1; EXPRESSED IN PLACENTA, SIGNAL = 2.1; EXPRESSED IN ADULT LIVER, SIGNAL =   1; EXPRESSED IN FETAL LIVER, SIGNAL = 1.9; EXPRESSED IN BRAIN, SIGNAL = 0.94; NT HIT: gi5730038, EVALUE 4.00e-70; SWISSPROT HIT: P41997, EVALUE 5.00e-08; EST_HUMAN HIT: AA150133.1, EVALUE 6.00e-70
gaatgattacaatcgacccatttttgccaatgagaaataagtttgtttattcctgtagcgtaaaaatccgtgctttgggatttgatgaactcttggaaagcattttctgcatcctgctggttgtggaagcattttccctgcaaaaagttgtcaagatgcttgaagaagtggtagtcggttggcaagag

SEQ ID NO: 19169 - DNA, 171 bp, Homo sapiens
  MAP TO AC016606.6; EXPRESSED IN PLACENTA, SIGNAL = 8.6; EXPRESSED IN BONE MARROW, SIGNAL = 6.9; EXPRESSED IN ADULT LIVER, SIGNAL = 8.4; EXPRESSED IN HEART, SIGNAL = 5.1; EXPRESSED IN BRAIN, SIGNAL = 6.1; EXPRESSED IN FETAL LIVER, SIGNAL =  10; NT HIT: gi12731262, EVALUE 1.00e-91; SWISSPROT HIT: P04035, EVALUE 4.00e-28; EST_HUMAN HIT: BF980091.1, EVALUE 8.00e-69
ttctctgacaaccttggctggaatgacagcttcacaaacaacagattttcctcttccctctatccaatttatagcagcaggtttcttgtcagtacaatagttaccactaacggctagaatctgcatttcagggaaatactcgtgaagttttgaaagtgctttctctgtacc

SEQ ID NO: 19170 - DNA, 80 bp, Homo sapiens
  MAP TO AC000354.1; EXPRESSED IN HEART, SIGNAL = 1.1; EXPRESSED IN ADULT LIVER, SIGNAL = 0.79; EXPRESSED IN BRAIN, SIGNAL = 0.88; EXPRESSED IN BONE MARROW, SIGNAL = 0.57; EXPRESSED IN PLACENTA, SIGNAL = 1.1; EST_HUMAN HIT: AA329338.1, EVALUE 8.90e-02; NT HIT: AF123535.1, EVALUE 3.80e+00
aaagactttcacagttgtcacacctatcaaaacacttaattgcatcaatttctctacctcatctccttccttcttcatag

SEQ ID NO: 19171 - DNA, 206 bp, Homo sapiens
  MAP TO AC005525.1; EXPRESSED IN FETAL LIVER, SIGNAL = 2.1; EXPRESSED IN ADULT LIVER, SIGNAL = 1.9; SWISSPROT HIT: O70146, EVALUE 7.30e-02; EST_HUMAN HIT: BG121932.1, EVALUE 1.00e-112; NT HIT: AF320903.1, EVALUE 1.20e-02
ctggggaaaggtcttcatcatcttcttccaagctggcgtagcccccagtctcagctggctcacgggtctctgtcatgaccgggggaggggacaggagacaggagcagagcagcagctgagcagcgtccctccccggccagctctccacagccacacctccggccacaagttctctaatacaggatgttggcaggtagagagggatg

SEQ ID NO: 19172 - DNA, 220 bp, Homo sapiens
  MAP TO AF107045.1; EXPRESSED IN ADULT LIVER, SIGNAL = 1.4; EXPRESSED IN BRAIN, SIGNAL = 1.5; EXPRESSED IN LUNG, SIGNAL = 1.1; EXPRESSED IN BONE MARROW, SIGNAL = 2.1; EXPRESSED IN PLACENTA, SIGNAL = 1.4; SWISSPROT HIT: P07742, EVALUE 2.00e-21; EST_HUMAN HIT: AA188210.1, EVALUE 7.00e-76; NT HIT: AF107045.1, EVALUE 1.00e-121
tgtctttgtgttgagtaatcatttttgtgactctgcttcatttccttgctctaagttgagacattttttcccccgtagctgttttcttctgagtatgaaagatgacagcattgaaggcatttatgacactctaaagcaatgtgcattgatttctaagtctgctggaggaattggtgttgctgtgagttgtattcgggctactggcagctacattgctggg

SEQ ID NO: 19173 - DNA, 132 bp, Homo sapiens
  MAP TO AC026736.3; EXPRESSED IN PLACENTA, SIGNAL = 0.83; EXPRESSED IN ADULT LIVER, SIGNAL = 0.84; EXPRESSED IN HEART, SIGNAL = 0.94; EXPRESSED IN BRAIN, SIGNAL = 0.92; EXPRESSED IN LUNG, SIGNAL = 0.81; NT HIT: AF290157.1, EVALUE 2.80e-02; SWISSPROT HIT: Q9WTN3, EVALUE 2.00e+00; EST_HUMAN HIT: BG400915.1, EVALUE 1.60e-01
aattgcttggctcctcaatggagatctgactgaagaggaccaggatggaggcaggaggggcaagcaagaagccactgcaacaatcaaggccagaaatggcagcagctgggacagatggtctcagtggaccag

SEQ ID NO: 19174 - DNA, 236 bp, Homo sapiens
  MAP TO AC012315.4; EXPRESSED IN LUNG, SIGNAL = 1.3; EXPRESSED IN FETAL LIVER, SIGNAL =   2; EXPRESSED IN BRAIN, SIGNAL = 1.4; EXPRESSED IN PLACENTA, SIGNAL = 1.8; EXPRESSED IN ADULT LIVER, SIGNAL = 1.4; EXPRESSED IN HEART, SIGNAL = 1.4; SWISSPROT HIT: Q9Y6J3, EVALUE 1.70e+00; EST_HUMAN HIT: AA639465.1, EVALUE 3.10e-01
ggtggcattaggtcacttctttgctcagaatacttcagtaacttctgattttccccaaaatgaaattgaaggtctttataataatctactattttttcctgtggcctctcagattcagctcctactcctcctcctctggtccagtcactctggtctccttccattcccacaactatccaagcaaagtcctgcttcaggtacttcatgttctcaagtccttcagccagaacttgcat

SEQ ID NO: 19175 - DNA, 448 bp, Homo sapiens
  MAP TO AC016620.5; EXPRESSED IN ADULT LIVER, SIGNAL = 2.7; EXPRESSED IN HEART, SIGNAL = 2.8; EXPRESSED IN BRAIN, SIGNAL = 2.4; EXPRESSED IN LUNG, SIGNAL = 2.2; EXPRESSED IN HELA, SIGNAL = 3.3; EXPRESSED IN FETAL LIVER, SIGNAL = 4.5; EXPRESSED IN PLACENTA, SIGNAL = 3.5; EST_HUMAN HIT: BF214073.1, EVALUE 0.00e+00; NT HIT: gi15295679, EVALUE 0.00e+00; SWISSPROT HIT: P54686, EVALUE 2.00e-03
gcttagtgattcatcaaagactctcatgagttttccagttacaaatctgaaaattctaacttttctatcagaaccaatagtagctattttcttcccatctggtgaaaaacatacgctggttggataagccttacacttggcaaattcatataaatcagtgtcagttttatattcccagttcacatttttggggaatttatattcatgaggaggcccagtccagtattcaatcatcccagatttgtcagaagacactactgctttgtaaactgggtttagccgtatctgagtaagaggtgatgtatggagtttgtcaaaaatatgaagtggctggttatctcctcggccatcataaatgaaaatttttcctgtactcttttcggaagcagcaactgaagaaattgcatcccctgggcaatagatccactcacactgtccaggaaaatag

SEQ ID NO: 19176 - DNA, 297 bp, Homo sapiens
  MAP TO AC012331.9; EXPRESSED IN LUNG, SIGNAL = 1.8; EXPRESSED IN BRAIN, SIGNAL =   2; EXPRESSED IN PLACENTA, SIGNAL = 2.3; EXPRESSED IN ADULT LIVER, SIGNAL = 2.2; EXPRESSED IN HEART, SIGNAL = 2.1; SWISSPROT HIT: P01714, EVALUE 2.00e-29; EST_HUMAN HIT: AV698098.1, EVALUE 6.00e-31; NT HIT: Z73645.1, EVALUE 0.00e+00
ttttccatctgcctgtgtcactgtgagttgagtagcatggttgtctatcaactgatagtaataatcagcctcatcctcagcctgggccccagtgatggtcagggtggttgtgttgcctgatttggagccagagaatcgctcagggatccttgagggccggtcactgctatcatagatgaccagcacgggggcctggcctggcttctgctggtaccagtgttcataagagccttccatgctgtctccctggcaggtgatcctggccatttgtcccaaggccacagacactgcaggcac

SEQ ID NO: 19177 - DNA, 92 bp, Homo sapiens
  MAP TO AC000068.2; EXPRESSED IN PLACENTA, SIGNAL = 0.62; EXPRESSED IN ADULT LIVER, SIGNAL = 0.76; SWISSPROT HIT: Q92890, EVALUE 2.00e-07; EST_HUMAN HIT: AI940033.1, EVALUE 1.00e-32; NT HIT: gi14777015, EVALUE 7.00e-33
tgtaactggacagagccactcacgttcatgtcacactcaatgatggacactgccttgtcgggtttggtctccatcacacgcagttcgtagat

SEQ ID NO: 19178 - DNA, 126 bp, Homo sapiens
  MAP TO AF238380.1; EXPRESSED IN BONE MARROW, SIGNAL = 1.3; EXPRESSED IN HEART, SIGNAL = 0.94; EXPRESSED IN ADULT LIVER, SIGNAL = 2.3; SWISSPROT HIT: O60829, EVALUE 8.00e-19; EST_HUMAN HIT: N27018.1, EVALUE 9.00e-65; NT HIT: AF275258.1, EVALUE 6.00e-65
aacgtaaagtagaaggtgattgccaggaaatggatctggaaaagactcggagtgagcgtggagatggctctgatgtaaaagagaagactccacctaatcctaagcatgctaagactaaagaagcag

SEQ ID NO: 19179 - DNA, 485 bp, Homo sapiens
  MAP TO AF205588.1; EXPRESSED IN BRAIN, SIGNAL = 0.76; EXPRESSED IN BONE MARROW, SIGNAL = 0.91; EXPRESSED IN PLACENTA, SIGNAL = 0.77; EXPRESSED IN ADULT LIVER, SIGNAL = 0.91; SWISSPROT HIT: P03360, EVALUE 2.00e-24; EST_HUMAN HIT: AW237002.1, EVALUE 0.00e+00; NT HIT: Z70664.1, EVALUE 0.00e+00
gtggctgtaattcactgcaaatgtcatcaaacagaaggcatggctattgcctgtggtaaccaaaaagcaggctctgcagctcgagaggcagcttggctcccagtcacgcctttgaccctgctgcccactgtgtcctttccgcaacctgacctaccagaccacccacaatactccccagaggaagaaaaacaagcttcagatctttgggccagtaaatatcaggaaggttggtggattcttcctgattccagaatctttatgccccaagcccctggggaaactttaatcaatcatctgcattctgccacccatttgggaggaataaaactggcccagcttcttaggagccatttcaacatcccccaccttcaggacttaactaaccaagcagctctctggtgtatggcttgtgctcaggtaaacaccaaacaaggtcctaagcccagctcagtccaccgcctccagggaggctctccccgagaaag

SEQ ID NO: 19180 - DNA, 134 bp, Homo sapiens
  MAP TO AF015724.1; EXPRESSED IN ADULT LIVER, SIGNAL = 1.4; EXPRESSED IN FETAL LIVER, SIGNAL = 2.1; EXPRESSED IN LUNG, SIGNAL = 1.8; EXPRESSED IN BONE MARROW, SIGNAL =   2; EXPRESSED IN PLACENTA, SIGNAL = 1.5; NT HIT: AL163267.2, EVALUE 4.00e-57; EST_HUMAN HIT: BF701756.1, EVALUE 4.20e-02
tttttcattcattaatttgattttactctgtgccttccctgtggggatataggcatcatgaattaggaacttggtttttttcaaaatgatatcccgagtattcaaaatgatatccccattattcagaatactac

SEQ ID NO: 19181 - DNA, 180 bp, Homo sapiens
  MAP TO AC026745.3; EXPRESSED IN BONE MARROW, SIGNAL = 2.7; EXPRESSED IN PLACENTA, SIGNAL = 3.1; EXPRESSED IN ADULT LIVER, SIGNAL = 2.6; EXPRESSED IN HEART, SIGNAL = 2.5; EXPRESSED IN LUNG, SIGNAL = 2.5; EST_HUMAN HIT: AW978317.1, EVALUE 1.00e-03; NT HIT: AL163282.2, EVALUE 4.00e-05; SWISSPROT HIT: P51482, EVALUE 1.10e+00
agtgatggacctctgctctggtttgaatgtttgtgtgtctccaatatccatctgttggaacctaacatccaatgtgatagcattaagaggtggtgcctttggggaactagtgaagtcagagcactccaccctcttaaatgagattagtgccagcataaaagggactacaggaagcaccat

SEQ ID NO: 19182 - DNA, 123 bp, Homo sapiens
  MAP TO AF022141.1; EXPRESSED IN FETAL LIVER, SIGNAL = 0.71; EXPRESSED IN HELA, SIGNAL = 0.82; EXPRESSED IN BONE MARROW, SIGNAL = 0.66; EXPRESSED IN PLACENTA, SIGNAL = 0.72; EXPRESSED IN ADULT LIVER, SIGNAL = 0.77; NT HIT: AJ229041.1, EVALUE 4.00e-63; SWISSPROT HIT: P70699, EVALUE 4.60e+00
ctgtacctctgcctggcgctggatagatgggaagttctcatcatcatggaccgacagggtgttagagtgggaaaaccttagggtgtcatttccttttattttacaggtgagggcattgagtcc

SEQ ID NO: 19183 - DNA, 233 bp, Homo sapiens
  MAP TO AC011751.2; EXPRESSED IN BRAIN, SIGNAL = 2.4; EXPRESSED IN HELA, SIGNAL = 2.6; EXPRESSED IN PLACENTA, SIGNAL = 2.8; EXPRESSED IN BONE MARROW, SIGNAL = 2.1; EXPRESSED IN ADULT LIVER, SIGNAL = 2.8; EXPRESSED IN HEART, SIGNAL = 2.8; EXPRESSED IN FETAL LIVER, SIGNAL = 3.3; SWISSPROT HIT: P38479, EVALUE 2.80e+00; EST_HUMAN HIT: AA601493.1, EVALUE 7.00e-70; NT HIT: L08641.1, EVALUE 2.10e-01
ccagtgtcctccagaaaaggaagatctggagggtcaggccactctttttcttcaaaataatgaggaggtgcagaagggtagggatgaacctcttcctcctttgctactttagcttcagctggcaaacaaaactgctctgttgcttctgttacttcattatactctccttcctcctcatcattagtgtgaaaaggtttcaaggtggaatgaaccagagcccacccttgtcccat

SEQ ID NO: 19184 - DNA, 193 bp, Homo sapiens
  MAP TO AC000072.2; EXPRESSED IN PLACENTA, SIGNAL = 0.63; EXPRESSED IN ADULT LIVER, SIGNAL = 0.83; EXPRESSED IN HEART, SIGNAL = 0.93; SWISSPROT HIT: P53675, EVALUE 4.00e-31; EST_HUMAN HIT: BF893495.1, EVALUE 1.00e-104; NT HIT: L77569.1, EVALUE 1.00e-104
tgctcctgctggctgactgaacaacttccaggtaagaggaagggtcgtcccctctgatataggagttgatggcttccttcaccaaatctttctggagctgggcttgggccagctgactccacacagcaggctcattgcatctctccgcaaactcatatgcccggtccaggtttccaatgtgctcgatcaggac

SEQ ID NO: 19185 - DNA, 126 bp, Homo sapiens
  MAP TO AC007759.1; EXPRESSED IN FETAL LIVER, SIGNAL = 0.71; EXPRESSED IN BONE MARROW, SIGNAL = 0.87; EXPRESSED IN ADULT LIVER, SIGNAL = 0.96; SWISSPROT HIT: Q21037, EVALUE 1.20e+00; EST_HUMAN HIT: H19266.1, EVALUE 2.40e+00; NT HIT: X66363.1, EVALUE 1.70e+00
tccaggatctgcttgtcgaggtactcaaagacagtgccagaggagtgtaactgaggctggagtatgagctgagtgattagaaacggcttcaaggaccaggagacgtttgaaccagcaaaggctttg

SEQ ID NO: 19186 - DNA, 87 bp, Homo sapiens
  MAP TO AF198098.1; EXPRESSED IN PLACENTA, SIGNAL = 0.95; EXPRESSED IN HEART, SIGNAL = 1.6; EXPRESSED IN ADULT LIVER, SIGNAL = 1.4; EXPRESSED IN LUNG, SIGNAL = 1.2; SWISSPROT HIT: Q84934, EVALUE 2.80e+00; EST_HUMAN HIT: BG221791.1, EVALUE 1.00e-41; NT HIT: AL163206.2, EVALUE 7.00e-42
cttttagctgacagggccttctgatgtgggaatcattcttatgcttgctgtgttcctgccagattttgtcattcacagtttttcctt

SEQ ID NO: 19187 - DNA, 221 bp, Homo sapiens
  MAP TO AL008727.2; EXPRESSED IN FETAL LIVER, SIGNAL = 1.2; EXPRESSED IN LUNG, SIGNAL = 1.8; EXPRESSED IN HELA, SIGNAL = 1.7; EXPRESSED IN BONE MARROW, SIGNAL = 1.5; EXPRESSED IN PLACENTA, SIGNAL = 1.2; EXPRESSED IN HEART, SIGNAL =   1; EXPRESSED IN ADULT LIVER, SIGNAL = 1.4; NT HIT: L19268.1, EVALUE 3.10e+00; SWISSPROT HIT: Q9IA22, EVALUE 8.20e-01; EST_HUMAN HIT: BI834807.1, EVALUE 2.90e-01
ctggccgaaacacgggggaaatgctccagggctccaggagaagccgtctgtgcgtgcagccccggtgggatgtaggctggagacagccctgagtcaggaagtccggcgaggccatctgggtccacgtggctttttggtgctgtccccgcagcttgaggcaaggaaggtggagaggcgccgcctgccccgcctgtgtctgcaaggaaccgtgctgactccat

SEQ ID NO: 19188 - DNA, 134 bp, Homo sapiens
  MAP TO AC004501.1; EXPRESSED IN PLACENTA, SIGNAL = 0.94; EXPRESSED IN ADULT LIVER, SIGNAL = 0.89; EXPRESSED IN HEART, SIGNAL = 1.7; EST_HUMAN HIT: AI913947.1, EVALUE 4.00e-27; NT HIT: AF041260.1, EVALUE 2.00e-31; SWISSPROT HIT: O75363, EVALUE 9.00e-07
aacagcatctgcagaccccccttccccacgagagggtagatgcccttcccagagtagcactgaccttcctctaagtgctgaactgtgtgggtcgacaccaccactggaaccccgttcagagcagacgcgttgtc

SEQ ID NO: 19189 - DNA, 157 bp, Homo sapiens
  MAP TO AC026805.3; EXPRESSED IN BONE MARROW, SIGNAL = 1.9; EXPRESSED IN PLACENTA, SIGNAL = 1.5; EXPRESSED IN ADULT LIVER, SIGNAL = 1.6; EXPRESSED IN BRAIN, SIGNAL = 2.4; EXPRESSED IN LUNG, SIGNAL =   2; EXPRESSED IN HELA, SIGNAL = 1.3; EST_HUMAN HIT: BI225098.1, EVALUE 2.00e-01; NT HIT: Z80133.1, EVALUE 2.00e-83; SWISSPROT HIT: P27884, EVALUE 9.00e-20
ccttcgccgcctgtgccattacatcctgaacctgcgctactttgagatgtgcatcctcatggtcattgccatgagcagcatcgccctggccgccgaggaccctgtgcagcccaacgcacctcggaacaacgtgagtcccacagagcacaccccttcc

SEQ ID NO: 19190 - DNA, 102 bp, Homo sapiens
  MAP TO AC004800.1; EXPRESSED IN PLACENTA, SIGNAL = 0.74; EXPRESSED IN ADULT LIVER, SIGNAL = 0.6; EXPRESSED IN HEART, SIGNAL = 1.9; SWISSPROT HIT: P34413, EVALUE 1.80e-01; EST_HUMAN HIT: BG188287.1, EVALUE 3.00e-48; NT HIT: gi14749514, EVALUE 1.00e-03
cgctttttccatgaagtcaaattcgggagcacaggtgtatattaaagtatcaaaatctgtataccttaagattctggctgctataagatcactcaggcgaat

SEQ ID NO: 19191 - DNA, 160 bp, Homo sapiens
  MAP TO AC005782.1; EXPRESSED IN LUNG, SIGNAL = 2.2; EXPRESSED IN BONE MARROW, SIGNAL = 1.6; EXPRESSED IN ADULT LIVER, SIGNAL = 1.6; EXPRESSED IN PLACENTA, SIGNAL = 1.3; SWISSPROT HIT: Q91187, EVALUE 8.70e-01; EST_HUMAN HIT: BI916310.1, EVALUE 1.00e-82; NT HIT: gi14762629, EVALUE 4.00e-85
ctcatcacctcaatgtagcccttggcagcagccacgtgcagggcagaggcgcctgtgcgggggtgccgggcctctggcatggcgcccccattcagccagcacctcgtgtcatgaaggagcaattcctcttctgcccgcttggctgcttccacatccacac

SEQ ID NO: 19192 - DNA, 351 bp, Homo sapiens
  MAP TO AF031075.1; EXPRESSED IN BRAIN, SIGNAL = 1.2; EXPRESSED IN LUNG, SIGNAL = 0.76; EXPRESSED IN HELA, SIGNAL = 1.8; EXPRESSED IN BONE MARROW, SIGNAL =   1; EXPRESSED IN PLACENTA, SIGNAL = 1.3; EXPRESSED IN ADULT LIVER, SIGNAL = 0.91; EXPRESSED IN HEART, SIGNAL = 1.3; SWISSPROT HIT: P51608, EVALUE 2.00e-34; EST_HUMAN HIT: BG706068.1, EVALUE 0.00e+00; NT HIT: gi14768314, EVALUE 0.00e+00
ttgatcaaatacacatcatacttcccagcagagcggccagatttcctttgcttaagcttccgtgtccagccttcaggcagggtggggtcatcatacatgggtccccggtcacggatgatggagcgccgctgtttgggggaggcagaagcttccggcacagccggggcggagcctgacccttctgatgtctctgctttgcctgcctctgcgggctcagcagagtggtgggctgatggctgcacgggctcatgcttgccctctttctcttctttcttatctttcttcacctttttaaacttgaggggtttgtccttgaggccctggaggtcctggtcttctgacttttcttcc

SEQ ID NO: 19193 - DNA, 105 bp, Homo sapiens
  MAP TO AC025458.3; EXPRESSED IN LUNG, SIGNAL = 1.9; EXPRESSED IN BRAIN, SIGNAL = 1.9; EXPRESSED IN PLACENTA, SIGNAL = 2.4; EXPRESSED IN HEART, SIGNAL = 1.8; EXPRESSED IN ADULT LIVER, SIGNAL = 2.5; NT HIT: AB037875.1, EVALUE 1.30e+00
atggggccaagtttggtgtctattaacttgctttatcagccaccatgggaagttggggacgtgcctgcattccaccttgccagtgcatgctatggaggagaaaat

SEQ ID NO: 19194 - DNA, 220 bp, Homo sapiens
  MAP TO AC002497.1; EXPRESSED IN ADULT LIVER, SIGNAL = 5.1; EXPRESSED IN HEART, SIGNAL = 4.8; EXPRESSED IN BONE MARROW, SIGNAL = 2.3; NT HIT: gi14778537, EVALUE 4.00e-15; SWISSPROT HIT: Q47316, EVALUE 3.00e+00; EST_HUMAN HIT: BI056685.1, EVALUE 1.00e-15
accctgtccttacctgcaaattcacgaacacttcctcaggcccaggaagaactggacgacttctgtctacctatactaccagcaaatgattaagtcagactgtcaggacgtctacaaccctcttattatatgtttcctatattctttcaactctgatcagttgttgggggaagtcagggaccccgaatggagggactggttgaagccatggcagaagaat

SEQ ID NO: 19195 - DNA, 189 bp, Homo sapiens
  MAP TO AC004184.1; EXPRESSED IN BONE MARROW, SIGNAL = 1.1; EXPRESSED IN ADULT LIVER, SIGNAL = 0.56; NT HIT: AB031010.1, EVALUE 2.00e-96; SWISSPROT HIT: P35894, EVALUE 9.60e+00; EST_HUMAN HIT: BE144681.1, EVALUE 2.00e-05
ggcacttctagtcctgcaagctccattcatggtaagtgtcctagacagatacgccattttaaagatctttttattaatcacatttttactgtaccttttctctgtttacacatgcttagatccacaaatacttaccattgtgttagaattggctgcaatgttccatacggtaacatgctatataatttg

SEQ ID NO: 19196 - DNA, 289 bp, Homo sapiens
  MAP TO AL021366.1; EXPRESSED IN LUNG, SIGNAL = 2.3; EXPRESSED IN PLACENTA, SIGNAL = 1.3; EXPRESSED IN ADULT LIVER, SIGNAL = 1.5; EST_HUMAN HIT: BI759891.1, EVALUE 0.00e+00; NT HIT: gi13645877, EVALUE 0.00e+00; SWISSPROT HIT: O43189, EVALUE 1.00e-18
gtcacccctggaacttcacattggtttccccacagacatccctaaaagtgccccccactcgatgactgcctcatcttcctcagtttcatccccatccccaggtcttcctagacgctcagcacccccttctcccctgtgccgtagtttgtctcctgggactgggggaggagtccgaggtggggttggttacctgtcccgaggggaccctgtccgggtccttgctcggagagtacggcctgatggctctgtgcagtacctggttgagtggggaggagggggcatcttctga

SEQ ID NO: 19197 - DNA, 213 bp, Homo sapiens
  MAP TO AF037222.1; EXPRESSED IN LUNG, SIGNAL = 1.8; EXPRESSED IN PLACENTA, SIGNAL = 1.8; EXPRESSED IN ADULT LIVER, SIGNAL = 1.6; EXPRESSED IN HEART, SIGNAL = 1.9; EST_HUMAN HIT: BG325857.1, EVALUE 1.00e-114; NT HIT: gi15299780, EVALUE 1.00e-114; SWISSPROT HIT: O15315, EVALUE 3.00e-03
gacaccttgttggagtgtgtgaataagaaggtccccgtactgctgtctcggggcatggctcgcctggtggtcatcgactcggtggcagccccattccgctgtgaatttgacagccaggcctccgcccccagggccaggcatctgcagtccctgggggccatgctgcgtgagctgagcagtgccttccagagccctgtgctgtgcatcaaccag

SEQ ID NO: 19198 - DNA, 163 bp, Homo sapiens
  MAP TO AC004058.1; EXPRESSED IN ADULT LIVER, SIGNAL = 0.42; EXPRESSED IN BONE MARROW, SIGNAL = 0.51; NT HIT: U29910.1, EVALUE 3.60e-02; SWISSPROT HIT: P36003, EVALUE 1.30e-01; EST_HUMAN HIT: BI031033.1, EVALUE 1.00e-08
atggctaggaaacaccagctctacaactggatcatccaggtggacatgggattcatcaaagaaacaatgcaacccaaaagaacagagaagagtgaagcaggacagctgtccacccaggactggcatgcagcaaggagaggctccacactatgggaaaatggta

SEQ ID NO: 19199 - DNA, 142 bp, Homo sapiens
  MAP TO AC012055.8; EXPRESSED IN BONE MARROW, SIGNAL = 1.9; EXPRESSED IN PLACENTA, SIGNAL = 1.9; EXPRESSED IN ADULT LIVER, SIGNAL =   2; EXPRESSED IN HEART, SIGNAL = 1.5; EXPRESSED IN HELA, SIGNAL = 1.9; EXPRESSED IN BRAIN, SIGNAL = 1.8; SWISSPROT HIT: Q9TKV3, EVALUE 7.70e+00; NT HIT: AF268973.1, EVALUE 4.80e-01
ccattattcccaggctccaattgctgcttcctgctaggtttgctgtaaaaccagaaggatggacaagtaggattggcagcaccctggtgtcctcttgttgctcctctatctggggctgagccacattattcttagagacttc

SEQ ID NO: 19200 - DNA, 111 bp, Homo sapiens
  MAP TO AL118503.12; EXPRESSED IN PLACENTA, SIGNAL = 4.1; EXPRESSED IN ADULT LIVER, SIGNAL = 2.9; EXPRESSED IN HEART, SIGNAL = 5.5; EXPRESSED IN BRAIN, SIGNAL = 4.1; EXPRESSED IN LUNG, SIGNAL =   5; EXPRESSED IN BONE MARROW, SIGNAL = 3.1; NT HIT: AF048728.1, EVALUE 1.00e-03; SWISSPROT HIT: P33293, EVALUE 1.60e+00; EST_HUMAN HIT: BG575135.1, EVALUE 1.30e-01
cggtgtccagatgctccaaggcactgtgcccttccattttggaacttatgatgatgatgttgttgatcaccgtgatagtaacaggaagaggaagagaagcagcagcagctg

SEQ ID NO: 19201 - DNA, 144 bp, Homo sapiens
  MAP TO AF230666.1; EXPRESSED IN ADULT LIVER, SIGNAL = 0.56; EXPRESSED IN BRAIN, SIGNAL = 0.68; EXPRESSED IN FETAL LIVER, SIGNAL = 0.65; NT HIT: gi14748739, EVALUE 1.00e-75; SWISSPROT HIT: P01266, EVALUE 4.00e-20; EST_HUMAN HIT: BG997298.1, EVALUE 2.00e-75
gtttggagttgttactggatgaaatttatgacaccatttttgctggcctggaccttccttccaccttcactgaaaccaccctgtaccggatactgcagagacggttcctcgcagttcaatcagtcatctctggcagattccgat

SEQ ID NO: 19202 - DNA, 103 bp, Homo sapiens
  MAP TO AC007292.1; EXPRESSED IN PLACENTA, SIGNAL = 1.1; EXPRESSED IN ADULT LIVER, SIGNAL = 1.2; EXPRESSED IN BRAIN, SIGNAL = 1.2; EXPRESSED IN HELA, SIGNAL = 1.3; EXPRESSED IN BONE MARROW, SIGNAL = 1.1; EXPRESSED IN FETAL LIVER, SIGNAL = 1.1; SWISSPROT HIT: Q99865, EVALUE 2.10e+00; EST_HUMAN HIT: BI544663.1, EVALUE 7.60e+00
cgcccgtctggcagaagccatgggccacacgctgtcccagcacatggtggcagggcggtgacctgggctcggctctaatgaccggcagccctggggctcccat

SEQ ID NO: 19203 - DNA, 80 bp, Homo sapiens
  MAP TO AC025811.1; EXPRESSED IN BONE MARROW, SIGNAL = 1.9; EXPRESSED IN PLACENTA, SIGNAL = 1.7; EXPRESSED IN HEART, SIGNAL = 2.9; EXPRESSED IN ADULT LIVER, SIGNAL = 1.6; NT HIT: AK024506.1, EVALUE 3.80e+00; SWISSPROT HIT: Q9I7C5, EVALUE 8.20e+00; EST_HUMAN HIT: BF944903.1, EVALUE 5.50e+00
atggctctgaatccgagcccccgacacccggcccaacccacccctacagcaccctgcgtggctggctgccagcccgtcgg

SEQ ID NO: 19204 - DNA, 170 bp, Homo sapiens
  MAP TO AL022069.1; EXPRESSED IN LUNG, SIGNAL = 1.3; EXPRESSED IN ADULT LIVER, SIGNAL = 0.77; EST_HUMAN HIT: AA743566.1, EVALUE 8.70e-01; NT HIT: Y17306.1, EVALUE 1.50e-01; SWISSPROT HIT: P01029, EVALUE 4.40e+00
taaatcataatccagccactggtaagcagcaccaacagctgttcccgtgttcatgtaaaagggctgaaagagaaggagtcaggggctctgattccaattctgctgttgacatctcagtgcaacttcatgcagtgagcgtggaggtgatgattgtagagatgatggtggag

SEQ ID NO: 19205 - DNA, 113 bp, Homo sapiens
  MAP TO AL022343.6; EXPRESSED IN BRAIN, SIGNAL = 2.3; EXPRESSED IN FETAL LIVER, SIGNAL = 2.7; EXPRESSED IN BONE MARROW, SIGNAL = 2.6; EXPRESSED IN PLACENTA, SIGNAL = 2.4; EXPRESSED IN ADULT LIVER, SIGNAL =   2; EST_HUMAN HIT: BF944955.1, EVALUE 2.10e+00; NT HIT: AF091121.1, EVALUE 3.70e-01
ctgctctgacatcggtggtaagcaagaaccatggtgaagtcagcaacaagaaaacagtgctcctcctctctgctgcagcccttctctaccctctctgggcagtgctctagcat

SEQ ID NO: 19206 - DNA, 176 bp, Homo sapiens
  MAP TO AC005788.1; EXPRESSED IN BONE MARROW, SIGNAL = 5.2; EXPRESSED IN PLACENTA, SIGNAL = 9.6; EXPRESSED IN ADULT LIVER, SIGNAL = 7.8; EXPRESSED IN FETAL LIVER, SIGNAL = 9.9; EXPRESSED IN BRAIN, SIGNAL = 7.9; SWISSPROT HIT: P10586, EVALUE 2.00e-26; EST_HUMAN HIT: BF314504.1, EVALUE 5.00e-92; NT HIT: gi14765215, EVALUE 1.00e-94
ccgtgacttctcctccagccgcgtcatcatgacgatggtcgccgaccgctgctcccacaccatacgccagaagtccccaaaggtctcaggcagcggcccctgcgtggcaatgtacgcgttctgacaccggtagccgtccacgtagttggcattgatgtaatcactgcccatgatgc

SEQ ID NO: 19207 - DNA, 125 bp, Homo sapiens
  MAP TO AC012085.4; EXPRESSED IN BONE MARROW, SIGNAL =   2; EXPRESSED IN PLACENTA, SIGNAL = 1.7; EXPRESSED IN ADULT LIVER, SIGNAL = 2.2; EXPRESSED IN FETAL LIVER, SIGNAL = 1.7; EXPRESSED IN HELA, SIGNAL = 1.7; EXPRESSED IN BRAIN, SIGNAL = 1.9; NT HIT: AF163051.1, EVALUE 1.60e+00; EST_HUMAN HIT: AI168290.1, EVALUE 2.00e-59
tcacatggtaggagggtcaagatagctctctcgggcttcttttatatgggtaccaatcttgttcatgaaggctctgccaaaggtaagatttagcaaagtggagaatagatgatattgctggatgc

SEQ ID NO: 19208 - DNA, 200 bp, Homo sapiens
  MAP TO AC016597.4; EXPRESSED IN LUNG, SIGNAL =   1; EXPRESSED IN HELA, SIGNAL = 1.2; EXPRESSED IN ADULT LIVER, SIGNAL = 0.72; NT HIT: AB011128.2, EVALUE 1.00e-109; SWISSPROT HIT: P23569, EVALUE 8.40e-01; EST_HUMAN HIT: BG819708.1, EVALUE 4.00e-99
ccgttcatcagcccccaagccagcctgggtgaagggccgctcatccccctcgccgtcggccgtgctgggcctcctcattgcctcttcatcctgcaggctgtccaggctccccacatccaggtcaaacatctcatcagaatagaatatggcctcgagaatgtcatcatcggttgtgaataagatcgtgtctccaaagtgct

SEQ ID NO: 19209 - DNA, 87 bp, Homo sapiens
  MAP TO AC012262.14; EXPRESSED IN BONE MARROW, SIGNAL = 1.2; EXPRESSED IN ADULT LIVER, SIGNAL = 1.6; EXPRESSED IN HEART, SIGNAL = 1.4; EXPRESSED IN PLACENTA, SIGNAL = 1.4; NT HIT: U89957.1, EVALUE 1.10e+00; EST_HUMAN HIT: D25246.1, EVALUE 3.90e-01
atgagctttacaaaagaggggaaggaaagtttgcaagggaccaccatgattaaaatcattgaggaaagactaatgccccttgggaac

SEQ ID NO: 19210 - DNA, 336 bp, Homo sapiens
  MAP TO AL118557.2; EXPRESSED IN ADULT LIVER, SIGNAL = 1.4; EXPRESSED IN BRAIN, SIGNAL =   2; EXPRESSED IN LUNG, SIGNAL =   6; EXPRESSED IN BONE MARROW, SIGNAL = 1.4; NT HIT: gi4504746, EVALUE 2.00e-76; SWISSPROT HIT: P26006, EVALUE 5.00e-43; EST_HUMAN HIT: AU140320.1, EVALUE 1.00e-78
atggacaacctccgtgacaaactccatcccatcatcatctccatgaactactctttacctatacggatgccggatcgcctgcagccggggctctggtccctggacgcccaccaggcacgggctttggagaaccatactgaggtccagttccagaaggagtgcgggcctgacaataagtgcgagagcaacttgcagatacgggcagccttcatgtcggagcagcagcagaagccgggcaggctccagtacagcagagacgtctggaaactgctcctgagcatcaacgtgacgaacacccggaccaacacattagtccagaccattgctgtccggtag

SEQ ID NO: 19211 - DNA, 256 bp, Homo sapiens
  MAP TO AC026404.4; EXPRESSED IN LUNG, SIGNAL = 2.1; EXPRESSED IN PLACENTA, SIGNAL =  24; EXPRESSED IN HEART, SIGNAL = 6.1; EXPRESSED IN ADULT LIVER, SIGNAL = 3.6; SWISSPROT HIT: P10225, EVALUE 1.50e+00
atggctgttggcagtacttgtaataagtcacaagagaagaaagccaagagttccaggaagttttctgctctgcaggagacttggaggtcctggggaaaagccacatttgagcagaggagaatatactgtgctggagtcaccctccaggtctccccccatttggtgctccagccttttccaccagaggacttggtgctcggagcctgcccctggccctggctgcttgtggatgcctctggctctcagaaaaggccat

SEQ ID NO: 19212 - DNA, 223 bp, Homo sapiens
  MAP TO AC016830.5; EXPRESSED IN PLACENTA, SIGNAL =   1; EXPRESSED IN ADULT LIVER, SIGNAL = 0.66; EXPRESSED IN BRAIN, SIGNAL = 1.1; EXPRESSED IN LUNG, SIGNAL = 0.59; EXPRESSED IN BONE MARROW, SIGNAL = 0.8; EST_HUMAN HIT: AA352021.1, EVALUE 1.00e-120; NT HIT: gi16166973, EVALUE 1.00e-122; SWISSPROT HIT: Q9NY65, EVALUE 1.00e-39
cgggaatgcatatcagtccacgtgggccaagcgggagttcagattggcaatgcctgctgggagctcttctgcctggaacacggcatccaggcagacggcacttttgatgctcaagctagcaagatcaacgatgatgactccttcaccacctttttcagcgagactggcaatgggaagcatgtgccccgggccgtcatgatagatctggagcctactgtagtgg

SEQ ID NO: 19213 - DNA, 218 bp, Homo sapiens
  MAP TO AC008524.5; EXPRESSED IN BRAIN, SIGNAL = 1.6; EXPRESSED IN HELA, SIGNAL = 1.2; EXPRESSED IN FETAL LIVER, SIGNAL = 1.1; EXPRESSED IN ADULT LIVER, SIGNAL = 1.2; EXPRESSED IN PLACENTA, SIGNAL = 1.8; EXPRESSED IN LUNG, SIGNAL = 1.1; EST_HUMAN HIT: AA682475.1, EVALUE 1.00e-119; NT HIT: gi14728537, EVALUE 1.00e-119; SWISSPROT HIT: O35464, EVALUE 2.00e-37
ctgttataaggtgtagaaaacgttgccaggacaacatcacgcccgttgatacgaatcacatctgtaactgcctggagaatgttgaaataaaaatgagagtctccaggaactgagcagttcaagcgcgccttcaggaacgacgtccactgtttctccaggactctttgagatcctcccatatcattcttacaaacctgagccactcttgggaaaactac

SEQ ID NO: 19214 - DNA, 402 bp, Homo sapiens
  MAP TO AC022103.4; EXPRESSED IN HEART, SIGNAL = 1.2; EXPRESSED IN ADULT LIVER, SIGNAL = 1.6; EXPRESSED IN LUNG, SIGNAL = 1.2; EXPRESSED IN PLACENTA, SIGNAL =   3; EST_HUMAN HIT: BF983020.1, EVALUE 1.00e-88; NT HIT: AL163246.2, EVALUE 1.00e-128; SWISSPROT HIT: P03360, EVALUE 8.00e-06
accatgaacaaagtggccgtggtggcagggatggaggttacacatgggctcagcaacatggacttccactcaccaagggtgacctggttatggccactgctcagtgcccaatttgccagcagcagagaccaacaccaagccctcgatatggcaccattccttggggtgatcagtcagctacctggtggcagcttgattatattgaacctcttctatcatggaaagggcagaggtttgtcctcactgaaatagatacttactccagatatgggtttgcctatcctgcacgcaatgcttctgccaagactaccatccatggactcacagaatgctttatccaccatcatgatattccacacagcattgcctctgaccaaagcactcacttttcggctaaagaag

SEQ ID NO: 19215 - DNA, 404 bp, Homo sapiens
  MAP TO AC005793.1; EXPRESSED IN PLACENTA, SIGNAL = 6.4; EXPRESSED IN ADULT LIVER, SIGNAL = 3.9; EXPRESSED IN FETAL LIVER, SIGNAL = 7.2; EXPRESSED IN BRAIN, SIGNAL = 5.6; NT HIT: AB011133.1, EVALUE 5.00e-90; SWISSPROT HIT: P22612, EVALUE 4.00e-15; EST_HUMAN HIT: BI827497.1, EVALUE 0.00e+00
tctgctcatcacctcgcttggccacatcaagctcacggacttcggcctgtccaagatcggcctcatgagcatggccaccaacctctatgagggccacatcgagaaggacgcccgagagttcatcgacaagcaggtgggcgggcaggtgggtgggcagccccgggatgcctcctcctctctcctgggacctctcttgggctgggggctggcctcagtttccccgttctccctggcccaggtgtgtgggacgccggagtacatagcccccgaggtgatcttccgccagggctatgggaagccagtggactggtgggccatgggcgtcgtcctctatgagtttctggtgggctgcgtgcctttctttggagatacccccgaggaactcttcggtcaggtggtcagcg

SEQ ID NO: 19216 - DNA, 141 bp, Homo sapiens
  MAP TO AC016604.4; EXPRESSED IN LUNG, SIGNAL =  15; EXPRESSED IN HELA, SIGNAL =  15; EXPRESSED IN BONE MARROW, SIGNAL =  19; EXPRESSED IN PLACENTA, SIGNAL =  22; EXPRESSED IN ADULT LIVER, SIGNAL =  21; EXPRESSED IN FETAL LIVER, SIGNAL =  30; EXPRESSED IN BRAIN, SIGNAL =  16; EXPRESSED IN HEART, SIGNAL =  14; SWISSPROT HIT: P57239, EVALUE 2.60e+00; EST_HUMAN HIT: AV689661.1, EVALUE 1.80e-01
atgggctaccacctccccctccaccaagtgtacatcatttgcttcaaattaagacctctccagagggctgaagacatagtcaaaatgatgagagaaaagtataatgaacaacaggaaattgggaatttcctaatattggaa

SEQ ID NO: 19217 - DNA, 235 bp, Homo sapiens
  MAP TO AL008711.1; EXPRESSED IN FETAL LIVER, SIGNAL = 1.2; EXPRESSED IN BONE MARROW, SIGNAL = 0.92; EXPRESSED IN ADULT LIVER, SIGNAL = 1.1; EXPRESSED IN HEART, SIGNAL = 1.1; EXPRESSED IN BRAIN, SIGNAL = 0.93; EXPRESSED IN HELA, SIGNAL = 0.57; NT HIT: gi16159284, EVALUE 3.30e+00; SWISSPROT HIT: P45403, EVALUE 2.80e+00; EST_HUMAN HIT: AA676430.1, EVALUE 2.00e-08
agctagggtgacaagactagagaggtgctttagcaggaggaagctgatgcaggcctgtggaacggcagctgggggagcaatgcaacaaatcatgcagagcagtgaggagaacagggtcacaccggggagccttttgaggcctgtgctcatgacagcagtgggcatggctgaggagagggtgaagggggtcaagcccacgagaaccggcaatggcgctgacattgggagtcaggga

SEQ ID NO: 19218 - DNA, 142 bp, Homo sapiens
  MAP TO AF196970.1; EXPRESSED IN BONE MARROW, SIGNAL = 3.1; EXPRESSED IN ADULT LIVER, SIGNAL =   2; EXPRESSED IN PLACENTA, SIGNAL = 1.6; EXPRESSED IN HEART, SIGNAL = 1.8; EXPRESSED IN FETAL LIVER, SIGNAL = 1.8; EXPRESSED IN BRAIN, SIGNAL = 1.7; NT HIT: AF115549.2, EVALUE 2.00e-74; SWISSPROT HIT: P42768, EVALUE 2.00e-13; EST_HUMAN HIT: BI766599.1, EVALUE 5.00e-51
gactgccaagcggggctgaactttgcagacgaggacgaggcccaggccttccgggccctcgtgcaggagaagatacaaaaaaggaatcagaggcaaagtggaggtgaggaggccacaggggaggaaaggaagttgggcagag

SEQ ID NO: 19219 - DNA, 154 bp, Homo sapiens
  MAP TO AC007570.23; EXPRESSED IN ADULT LIVER, SIGNAL = 3.5; EXPRESSED IN HEART, SIGNAL = 2.6; EXPRESSED IN BRAIN, SIGNAL = 3.3; EXPRESSED IN BONE MARROW, SIGNAL = 1.9; EXPRESSED IN PLACENTA, SIGNAL = 3.1; EST_HUMAN HIT: AI188712.1, EVALUE 3.10e+00; SWISSPROT HIT: P57033, EVALUE 8.80e-01
tgagacccttgccagaaccagggaaattctctgagaacttcaggctgcagaccctgggagcggctccagcttatgacctgaaaggcactgctgttcccctcgcaaagaaggtgtcagtgctatgtgaccgcctctttgcagaggaagcagggag

SEQ ID NO: 19220 - DNA, 75 bp, Homo sapiens
  MAP TO AC022143.6; EXPRESSED IN HEART, SIGNAL =   2; EXPRESSED IN FETAL LIVER, SIGNAL =   2; EXPRESSED IN BONE MARROW, SIGNAL = 1.7; EXPRESSED IN PLACENTA, SIGNAL =   2; EXPRESSED IN ADULT LIVER, SIGNAL = 2.2; EST_HUMAN HIT: BG326384.1, EVALUE 3.20e-01; NT HIT: U82671.3, EVALUE 3.50e+00; SWISSPROT HIT: P79385, EVALUE 4.80e+00
atgtgggtcctcaagtgccatgagaggaagttcctgcctgtgtcacatgcatccatcccacccaccacactgcag

SEQ ID NO: 19221 - DNA, 211 bp, Homo sapiens
  MAP TO AC016651.5; EXPRESSED IN BRAIN, SIGNAL = 1.3; EXPRESSED IN FETAL LIVER, SIGNAL = 2.1; EXPRESSED IN BONE MARROW, SIGNAL = 1.2; EXPRESSED IN PLACENTA, SIGNAL = 1.8; EXPRESSED IN HEART, SIGNAL = 2.7; EXPRESSED IN ADULT LIVER, SIGNAL = 1.4; EST_HUMAN HIT: AI381574.1, EVALUE 1.10e+00; SWISSPROT HIT: Q01651, EVALUE 1.90e+00
ttgggacaaactatctgccatgtcctggggacacttaggcagaagtcctgtggaaaggcccgctttgtgaagaactgaaatctccagcccatagccatgaagtctgctaacaactgcaggagccatcttggaggctgattccccagcaccaggagaaacagggatgacagcagcctctgttggcagctcagttgcaacctcatgctggacc

SEQ ID NO: 19222 - DNA, 355 bp, Homo sapiens
  MAP TO AL023753.1; EXPRESSED IN BONE MARROW, SIGNAL = 0.45; EXPRESSED IN ADULT LIVER, SIGNAL = 0.39; EXPRESSED IN BRAIN, SIGNAL = 0.46; EXPRESSED IN FETAL LIVER, SIGNAL = 0.73; SWISSPROT HIT: P10266, EVALUE 1.00e-52; NT HIT: M30520.1, EVALUE 7.00e-64; EST_HUMAN HIT: AI625404.1, EVALUE 1.00e-124
ctgaagctcttcaaccagttagagacaagttttcagactacgtctttcattatgttgatgatcttttgtgtgctgcagaaacgagagacacattaattgactgttacacatttctgcagacagaggttgcaaacgcaggactgacaatagcatctgataagattcaaacctctactcctgtccattacttgggaatgcaggtagaggaaagaaaatttaaacaacaaaaaatagaaataagaaaagacacattaaaaacattaaacgactttcataaattgctaggagatattaattggatttggccaactctaggcatccttacttatgccatgtcaaatttgttctctatctt

SEQ ID NO: 19223 - DNA, 215 bp, Homo sapiens
  MAP TO AC008536.5; EXPRESSED IN BONE MARROW, SIGNAL = 0.47; EXPRESSED IN PLACENTA, SIGNAL = 0.52; EXPRESSED IN ADULT LIVER, SIGNAL = 0.75; EXPRESSED IN BRAIN, SIGNAL = 0.62; SWISSPROT HIT: P09132, EVALUE 4.00e-09; NT HIT: gi4507212, EVALUE 3.00e-37; EST_HUMAN HIT: AA411960.1, EVALUE 2.00e-48
aataaatgcagtgaagagaaccccctgcggctctaacaagattacgtggcccgaccaggatgacaccccccattccctcgaggatcaaggtgccagccatcttgcttaccttacttatggggattcgccttccctctgcgatggtcttcttattatttaaataagcaggatagatacaaataaacctgccatagacaatagcataagtggtatca

SEQ ID NO: 19224 - DNA, 137 bp, Homo sapiens
  MAP TO AL022345.2; EXPRESSED IN PLACENTA, SIGNAL = 0.88; EXPRESSED IN ADULT LIVER, SIGNAL = 0.88; EXPRESSED IN FETAL LIVER, SIGNAL =   1; EXPRESSED IN LUNG, SIGNAL = 0.85; SWISSPROT HIT: Q06732, EVALUE 1.00e-21; EST_HUMAN HIT: AW295024.1, EVALUE 3.00e-71; NT HIT: X68684.1, EVALUE 2.00e-71
gtccatgttaaatggtattcctattacattaccttgttccttagtcagcatttcattattgatgaatacaacttcccacaaatgtttagattgattttcttggctcctctctttcaggtgatcagctgtccagactt

SEQ ID NO: 19225 - DNA, 196 bp, Homo sapiens
  MAP TO AC006178.1; EXPRESSED IN LUNG, SIGNAL = 1.3; EXPRESSED IN FETAL LIVER, SIGNAL = 1.3; EXPRESSED IN HELA, SIGNAL = 2.1; EXPRESSED IN PLACENTA, SIGNAL = 1.7; EXPRESSED IN ADULT LIVER, SIGNAL =   1; EXPRESSED IN HEART, SIGNAL = 2.9; SWISSPROT HIT: O95429, EVALUE 1.90e+00; EST_HUMAN HIT: AW051929.1, EVALUE 2.60e-01; NT HIT: M96145.1, EVALUE 3.00e-03
atggtagcacagaagaaggcctggtacaccaacagcaaattgcatttccttctcagaaccctcagctctggtctggtacccccaggcaacaacagcctagcgggcagacaggacaggaggcctgggagctgtgcgtcactcaaagccagactggagagtgacaattgcctcgcagctcccagcgggtttcgagaag

SEQ ID NO: 19226 - DNA, 325 bp, Homo sapiens
  MAP TO AJ251973.1; EXPRESSED IN PLACENTA, SIGNAL = 1.5; EXPRESSED IN HEART, SIGNAL = 2.5; EXPRESSED IN ADULT LIVER, SIGNAL = 1.5; EXPRESSED IN BRAIN, SIGNAL = 1.3; SWISSPROT HIT: P11260, EVALUE 3.00e-06; EST_HUMAN HIT: AW881756.1, EVALUE 2.00e-03; NT HIT: AJ251973.1, EVALUE 0.00e+00
ctgtagattaaggtttcctgtttctcttcctgctttcaagattgtttctttgtctttaactcgcagatgcttaatttgtgatttctttaggtctatcttgtttggcatttgctcagattcttgaatctgtgggtttatgtctcttgccaactttgcaaagttttcaactattttttcttggagtactttttcagcaccatcctctttcttttctcttaccagaacttcaataacacgaaagttagatcttttgttatagtcccacaggcccctaagaatctgctctgctttttgttttggtctattttctttctgttgttcatat

SEQ ID NO: 19227 - DNA, 272 bp, Homo sapiens
  MAP TO AC061958.9; EXPRESSED IN BRAIN, SIGNAL = 1.1; EXPRESSED IN BONE MARROW, SIGNAL = 1.1; EXPRESSED IN PLACENTA, SIGNAL = 0.77; EXPRESSED IN ADULT LIVER, SIGNAL = 0.48; NT HIT: AY053503.1, EVALUE 0.00e+00; SWISSPROT HIT: Q9Z812, EVALUE 5.80e-01; EST_HUMAN HIT: BI546808.1, EVALUE 6.00e-83
ggagagcttacagaccagaacgagctggagtgcacaccagccttgcctacacttgcaaacaggcggggctgcttatacccaagcacaactttgtagcagtaatatcacctcagacatttggagtgtggatccctcctctgtggggagcagcccccaacgaactggagctcatgagcaaaatcctgcagacagtgaactttatcattctccaagccttgattattcaccttcccactaccaggttgtccaagaaggtcatttgcaatttttaa

SEQ ID NO: 19228 - DNA, 142 bp, Homo sapiens
  MAP TO AC016619.5; EXPRESSED IN BONE MARROW, SIGNAL =   1; EXPRESSED IN PLACENTA, SIGNAL =   2; EXPRESSED IN ADULT LIVER, SIGNAL = 1.4; EXPRESSED IN LUNG, SIGNAL =   1; EST_HUMAN HIT: BF355124.1, EVALUE 7.00e-72; NT HIT: gi16157985, EVALUE 2.00e-74; SWISSPROT HIT: P17301, EVALUE 8.00e-21
cggcagggagaatgatgcaaaaaacaagttttctgaaaaatcaacaacaattccagtgttgtatgcactttcccttttatttttcagcgttactgaaaatgttaaccttttgttttggttgctgacaataaagggttgttct

SEQ ID NO: 19229 - DNA, 91 bp, Homo sapiens
  MAP TO AL031730.1; EXPRESSED IN BRAIN, SIGNAL = 0.42; EXPRESSED IN PLACENTA, SIGNAL = 0.6; EXPRESSED IN ADULT LIVER, SIGNAL = 0.52; EST_HUMAN HIT: AA534786.1, EVALUE 4.00e-44; NT HIT: AL049847.1, EVALUE 3.00e-44
ctccttctgcacagagttcatggcaggcctggtgcagtggctggagttgtctgaagctgtcttgccaaccatgactgcttttgcgagcggc

SEQ ID NO: 19230 - DNA, 158 bp, Homo sapiens
  MAP TO AC007619.22; EXPRESSED IN BRAIN, SIGNAL = 0.89; EXPRESSED IN BONE MARROW, SIGNAL = 0.77; EXPRESSED IN PLACENTA, SIGNAL = 0.67; EXPRESSED IN FETAL LIVER, SIGNAL = 0.44; EXPRESSED IN ADULT LIVER, SIGNAL = 0.92; EST_HUMAN HIT: BI755201.1, EVALUE 9.00e-84; NT HIT: AY037866.1, EVALUE 6.00e-84; SWISSPROT HIT: P38285, EVALUE 6.70e-01
ggctattgagtggccagacttccccaacaaatgccaaattggagaaactggactctcagcaggtgttgcagctctgcctccgatatcaagatcacctgcatcagtgtgcagaggccgttgcttttgaccagaatgctttggttaaacgaatcaaagag

SEQ ID NO: 19231 - DNA, 364 bp, Homo sapiens
  MAP TO AC064878.7; EXPRESSED IN BRAIN, SIGNAL = 2.9; EXPRESSED IN LUNG, SIGNAL = 1.9; EXPRESSED IN BONE MARROW, SIGNAL = 2.8; EXPRESSED IN ADULT LIVER, SIGNAL = 3.1; EXPRESSED IN PLACENTA, SIGNAL = 3.3; EXPRESSED IN HEART, SIGNAL = 2.3; EXPRESSED IN FETAL LIVER, SIGNAL =   4; EST_HUMAN HIT: BF739117.1, EVALUE 8.00e-71; NT HIT: gi13937343, EVALUE 8.00e-70; SWISSPROT HIT: P03341, EVALUE 8.00e-07
tgtatattaagaataaggcggccttctggcccctctgggtctagggtggtaaagcgtctaagggttgccgctaagcgggccatgaactgggctgggttttcatctttacctcgggtagtttcttgaagcttgtcataattaacagctttgtaagctgcctttttaagcctttcaactaggcaggaaaccatgtaatctcgcctagctatacctggggaatttgcctggtagttcctttggggatcttcttggggaactgctctaatgccttcctggaggtctggctcatgaagccagcggttatcagcgtgagattgggctagggaaaaaactctttcctgttcatctggggagagggtagaag

SEQ ID NO: 19232 - DNA, 240 bp, Homo sapiens
  MAP TO AC008509.5; EXPRESSED IN PLACENTA, SIGNAL = 0.91; EXPRESSED IN ADULT LIVER, SIGNAL = 0.99; EXPRESSED IN HEART, SIGNAL = 1.1; EXPRESSED IN LUNG, SIGNAL = 0.56; EXPRESSED IN HELA, SIGNAL = 0.89; EXPRESSED IN FETAL LIVER, SIGNAL = 0.61; EST_HUMAN HIT: AA804973.1, EVALUE 1.00e-03; NT HIT: AL163207.2, EVALUE 5.50e-02; SWISSPROT HIT: P08547, EVALUE 8.00e-16
gaaaaagaagagcaagttaaacctaaaataagcagagaaaagaaaatagcaatgatcagagctgaaatcaatgaaatagaaaacagaaaaacaattgagaaaatcaatgaaaccaaaatctggttatttgagaagatcaacaaaattgatacacttttatgtatactaattggcataaaaagaatgaaaatacaaattaaaaatatcagaaaggagaaaggtacatacttagatgtccta

SEQ ID NO: 19233 - DNA, 133 bp, Homo sapiens
  MAP TO AL022309.1; EXPRESSED IN LUNG, SIGNAL = 0.92; EXPRESSED IN FETAL LIVER, SIGNAL = 1.7; EXPRESSED IN BONE MARROW, SIGNAL = 1.3; EXPRESSED IN PLACENTA, SIGNAL = 1.2; EXPRESSED IN ADULT LIVER, SIGNAL = 1.2; EXPRESSED IN HEART, SIGNAL = 1.2; EST_HUMAN HIT: BE936929.1, EVALUE 6.60e-01; NT HIT: AB050723.1, EVALUE 1.80e+00
ctctgtgagacagagaatgatgtctcttccctggaatataatgaacagtttcacaaaatcttgcttaatgaatgacagaaaaaaacggatggctattcttttaatgtcattacatactacctcagttgatgac

SEQ ID NO: 19234 - DNA, 316 bp, Homo sapiens
  MAP TO AC018846.2; EXPRESSED IN PLACENTA, SIGNAL = 0.79; EXPRESSED IN ADULT LIVER, SIGNAL =   1; EXPRESSED IN HEART, SIGNAL = 1.2; EXPRESSED IN FETAL LIVER, SIGNAL = 0.81; EXPRESSED IN LUNG, SIGNAL = 0.97; NT HIT: AJ271735.1, EVALUE 5.00e-49; SWISSPROT HIT: Q19802, EVALUE 1.70e+00; EST_HUMAN HIT: AW995263.1, EVALUE 5.00e-84
tcaatcagttctgctattaaaaaactctgatgcatccttcagtattccaattgcatctttcagcttcagaaattctgcttgattctttttaattattttaatgtctttgttacatttatctgatagaattctgaattccttctctgtgctatcttgagcttcgttgagtttcttcaacacagctattttgaattctttgtctgaaaggtcacatatttctgtttctccaggattggtccctggtggcttattcagttcatttggtgaggtcatgttttcctggatggtgatgatgcttgtagatgttctttggtat

SEQ ID NO: 19235 - DNA, 299 bp, Homo sapiens
  MAP TO AC025445.3; EXPRESSED IN BONE MARROW, SIGNAL = 2.2; EXPRESSED IN PLACENTA, SIGNAL = 3.5; EXPRESSED IN HEART, SIGNAL = 2.5; EXPRESSED IN ADULT LIVER, SIGNAL = 2.5; EXPRESSED IN FETAL LIVER, SIGNAL = 3.2; EST_HUMAN HIT: BF910502.1, EVALUE 1.00e-01; NT HIT: AL161564.2, EVALUE 7.00e-02; SWISSPROT HIT: P19021, EVALUE 2.70e+00
gggaaaatgcttacttcccacagatgttgtcatctttgcatttgtgaattgggtcaatctaaacaaacaggatttaaagacattatctaagaagcagaaattaaaattgggtgtggttgttgatcagactaaggccactctttggtcaactcaagcaatggtgacagcacagatggcaggtcttccagataagagaatctattctaatcaacagaatccaaaagtgcagctttcttggctgcctgggcacactggaaacaaggcccaaggctaccgctgctggtgcttcctccacactt

SEQ ID NO: 19236 - DNA, 356 bp, Homo sapiens
  MAP TO AC004475.1; EXPRESSED IN BONE MARROW, SIGNAL = 0.6; EXPRESSED IN ADULT LIVER, SIGNAL = 0.91; EST_HUMAN HIT: BG215969.1, EVALUE 0.00e+00; NT HIT: gi14767776, EVALUE 0.00e+00; SWISSPROT HIT: P45978, EVALUE 6.20e+00
ctgacagaggcgagggagaggcatccacgtccctctgcaccagttcagcaggtgggagctctaccttatcctcttcaggcccccaccggctcttccgcttcctcttcacggtggctgcggaggctggcttcccgggggcagctggagcagggatgatagtgggcgcaggcgtggacgaggcggggcaggtggtggctgggggtaaggaccctgacagggcctcaggaggggacttgcgcttcaggccgggatcaggtgctgtgaagctgcctgtggagctggccttggctttccggaactcctccagcttctgtcggtagtacttgtacccttggctattgggctcatacagaaag

SEQ ID NO: 19237 - DNA, 233 bp, Homo sapiens
  MAP TO AC008524.5; EXPRESSED IN PLACENTA, SIGNAL = 2.4; EXPRESSED IN ADULT LIVER, SIGNAL = 1.6; EXPRESSED IN HEART, SIGNAL = 2.7; EXPRESSED IN BRAIN, SIGNAL = 1.8; EXPRESSED IN LUNG, SIGNAL = 6.7; EST_HUMAN HIT: AL543344.1, EVALUE 1.00e-128; NT HIT: gi14728509, EVALUE 2.00e-88; SWISSPROT HIT: O35464, EVALUE 4.00e-16
ccttcttgtcttggtgattatgggaagacactgcccccaaagggtctgtgctgtcaggtgagtcaagcagatgcttccagtccagcattcctcccctagactcatacccctcttgagccgtcgaatctgatgtggttgtgctgggcaagagggaactggaatgccctgttttcatcacaaatacagttaggaaaacatcaccagagagacccacattccctttgcgcagaggc

SEQ ID NO: 19238 - DNA, 167 bp, Homo sapiens
  MAP TO AC005907.1; EXPRESSED IN ADULT LIVER, SIGNAL = 1.1; EXPRESSED IN BRAIN, SIGNAL = 0.98; EXPRESSED IN FETAL LIVER, SIGNAL = 1.2; EXPRESSED IN PLACENTA, SIGNAL = 1.6; EST_HUMAN HIT: BE969977.1, EVALUE 2.00e-84; NT HIT: AY028608.1, EVALUE 1.50e-01
gaaactcttttgagaaaatggaggaaatgtgcttaattctggacactgtttatcagttctttcaaacaaatctaatgctgttacgtctagaatgccacatgcccatcctttctgtcatcaacctggaaaagaacaacaacaaatattttaacctcttcctcgtctaa

SEQ ID NO: 19239 - DNA, 230 bp, Homo sapiens
  MAP TO AL031008.1; EXPRESSED IN ADULT LIVER, SIGNAL = 0.96; EXPRESSED IN FETAL LIVER, SIGNAL = 1.1; EST_HUMAN HIT: W74341.1, EVALUE 2.00e-76; SWISSPROT HIT: P29966, EVALUE 1.60e-02; NT HIT: U97652.1, EVALUE 5.30e-02
tgctcatggtgtggcgtctccaccatcaggccagtcctggcgcaaggtgcctgggggtttcggtccacggggcagtccgaggctgtgagggagccaggccgggacctgtttcctgagggcggagcctctgcttcccagggcttcaggcccttccctgcctgagacgtgcagatgctggctggctgctctcctctgtcatgcccgagtgggatgaaggcccccacccccat

SEQ ID NO: 19240 - DNA, 146 bp, Homo sapiens
  MAP TO AC012384.16; EXPRESSED IN BRAIN, SIGNAL = 1.2; EXPRESSED IN PLACENTA, SIGNAL = 1.6; EXPRESSED IN ADULT LIVER, SIGNAL = 1.4; EST_HUMAN HIT: BF527554.1, EVALUE 1.90e-01; SWISSPROT HIT: P09711, EVALUE 1.20e+00; NT HIT: AF323488.1, EVALUE 4.00e-14
gcttctagccaccaccagcgatgatgaccttcccggggacctgcagtcgctgtcgtggctcacggcggtggatgtgcctcggctgcagcagatggcaagtggccgcgtggacctgggtggcccctgcgtgccacatccacacccag

SEQ ID NO: 19241 - DNA, 267 bp, Homo sapiens
  MAP TO AF246928.1; EXPRESSED IN HEART, SIGNAL = 0.95; EXPRESSED IN ADULT LIVER, SIGNAL = 0.93; EXPRESSED IN FETAL LIVER, SIGNAL = 1.6; SWISSPROT HIT: Q24317, EVALUE 4.30e+00; NT HIT: AL163208.2, EVALUE 0.00e+00; EST_HUMAN HIT: W76556.1, EVALUE 1.40e+00
tatactaatgagaaacattttaggagctcgcttccagattacatgcaccagctactttggaggaagttcataagaattgcaattagtgagaagcgaagcactgatgggaaccaagcaagaaaacagaagagtaatgaaatgaagagagctttaatgaacaagaaaaacaggcaggagcaggcaagtcaggccctgaaaatgaatggtgggagaggcactgttttccctcagattaatgtcacactcaaggctgccttatttgactac

SEQ ID NO: 19242 - DNA, 181 bp, Homo sapiens
  MAP TO AC026774.4; EXPRESSED IN ADULT LIVER, SIGNAL = 1.1; EXPRESSED IN FETAL LIVER, SIGNAL = 0.78; EXPRESSED IN BONE MARROW, SIGNAL = 1.3; EXPRESSED IN PLACENTA, SIGNAL = 1.3; EST_HUMAN HIT: BE439466.1, EVALUE 1.00e-92; SWISSPROT HIT: O75154, EVALUE 1.50e+00; NT HIT: gi14861871, EVALUE 2.50e+00
gagcaacgatttcggggacggcacacgcctgtgtgaccgcttcccactccacttgggttccgtgagcgcgcggagccggaggagtcagggacgtgaggatgccctacttcccgcagcatccggatggcagggtctgcgtcggaaggcccgggagggcgacgccctccactgctgccgcggg

SEQ ID NO: 19243 - DNA, 128 bp, Homo sapiens
  MAP TO AC008563.4; EXPRESSED IN ADULT LIVER, SIGNAL = 1.2; EXPRESSED IN BRAIN, SIGNAL = 1.2; EXPRESSED IN PLACENTA, SIGNAL = 1.1; EST_HUMAN HIT: AV696348.1, EVALUE 6.30e-01; SWISSPROT HIT: Q99717, EVALUE 4.60e+00; NT HIT: AF219915.1, EVALUE 4.30e-01
gatcaatctttctataattcggatcatttctgccacccactgttatcctcagaataaaactctgcatgacagcaatggtcctccttgtaacacaccctttccagatggcattctggatgctgttaggt

SEQ ID NO: 19244 - DNA, 179 bp, Homo sapiens
  MAP TO AF207955.1; EXPRESSED IN BRAIN, SIGNAL = 1.6; EXPRESSED IN FETAL LIVER, SIGNAL = 2.3; EXPRESSED IN BONE MARROW, SIGNAL = 1.6; EXPRESSED IN PLACENTA, SIGNAL = 1.5; EXPRESSED IN ADULT LIVER, SIGNAL = 1.7; EXPRESSED IN HEART, SIGNAL = 1.6; EST_HUMAN HIT: BG546163.1, EVALUE 2.30e-01; NT HIT: AL163248.2, EVALUE 2.00e-96; SWISSPROT HIT: P07986, EVALUE 5.00e-01
tcatttggaattatgaagttctttcttctcttgggccactttctcttgcaagtccagctgggcattaccctgccccgtggaatttactccaacacagaatccttcatgcttaaccccaattccactgtctgggccttcggagtcagagccaaagctcagcagcagataaagtacaaaag

SEQ ID NO: 19245 - DNA, 204 bp, Homo sapiens
  MAP TO AC002522.2; EXPRESSED IN BONE MARROW, SIGNAL = 0.51; EXPRESSED IN ADULT LIVER, SIGNAL = 0.71; EST_HUMAN HIT: BG988629.1, EVALUE 1.00e-111; NT HIT: gi4826693, EVALUE 1.00e-111; SWISSPROT HIT: P98153, EVALUE 6.00e-40
ctgggtccagacacatgaacttgcagcactctttggggtccttgcggtactgttggcagccctggggcctctcacagagagcagccacacacatctcaggctcccctccatggcaggtgcagctcaggcatgggtcgtcccccttaggggtgaagtagaacccttcatccaccacgttgtccttgatgtcaacacatgtttgac

SEQ ID NO: 19246 - DNA, 134 bp, Homo sapiens
  MAP TO AC006124.1; EXPRESSED IN HEART, SIGNAL = 1.8; EXPRESSED IN ADULT LIVER, SIGNAL = 0.99; EXPRESSED IN BRAIN, SIGNAL = 1.2; EST_HUMAN HIT: AA521509.1, EVALUE 4.20e-02; SWISSPROT HIT: Q9DCW2, EVALUE 2.00e+00; NT HIT: AJ251485.1, EVALUE 5.00e-04
cgtgtggatggccacgccgtggccacgtcgtatttcagcatgtggatggccatgctgtgttgatccactcatccatcaacagacacctggactgtttccacctttgggctgctgggagttatgctgctgtggcc

SEQ ID NO: 19247 - DNA, 147 bp, Homo sapiens
  MAP TO AL031186.8; EXPRESSED IN ADULT LIVER, SIGNAL = 0.86; EXPRESSED IN FETAL LIVER, SIGNAL = 1.4; EXPRESSED IN HELA, SIGNAL = 0.98; SWISSPROT HIT: P34687, EVALUE 8.80e-01; NT HIT: AJ416090.1, EVALUE 7.00e-28; EST_HUMAN HIT: BI771771.1, EVALUE 1.00e-27
gtccacagggccccccagggagccctggccgggctggagctgtgggcacccctggagagaggggacctcctgggccaccagggcctcctggcccccctgggcccccagcccctgttgggccaccccatgcccggatctcccagcatg

SEQ ID NO: 19248 - DNA, 170 bp, Homo sapiens
  MAP TO AC018557.5; EXPRESSED IN FETAL LIVER, SIGNAL = 1.2; EXPRESSED IN BRAIN, SIGNAL =   2; EXPRESSED IN HELA, SIGNAL = 2.6; EXPRESSED IN BONE MARROW, SIGNAL = 1.6; EXPRESSED IN PLACENTA, SIGNAL = 1.3; EXPRESSED IN ADULT LIVER, SIGNAL = 1.6; SWISSPROT HIT: O43237, EVALUE 2.00e-28; NT HIT: gi5453633, EVALUE 5.00e-91; EST_HUMAN HIT: AA195065.1, EVALUE 7.00e-91
ttgtgaaagattttcaagactatatggaacctgaagaaggttgtcaaggttccccacagagaagaggccctctgacctcaggctccgatgaagaaaatgttgccctgcctctgggtgacaatgtgctgactcataacctggggatcccggtgttggtggtgtgcacaaag

SEQ ID NO: 19249 - DNA, 146 bp, Homo sapiens
  MAP TO AC069278.1; EXPRESSED IN ADULT LIVER, SIGNAL = 1.1; EXPRESSED IN HEART, SIGNAL = 1.4; EXPRESSED IN LUNG, SIGNAL = 1.9; EXPRESSED IN HELA, SIGNAL =   1; EXPRESSED IN BRAIN, SIGNAL = 1.3; EXPRESSED IN BONE MARROW, SIGNAL = 1.2; EXPRESSED IN PLACENTA, SIGNAL =   1; SWISSPROT HIT: P14172, EVALUE 2.00e+00; NT HIT: D25543.1, EVALUE 5.00e-01
cggaactgggctctgtggggtgctcctccttcgggatgggttgtgaggtctcatgactggggtccttctgttgttttccttgagggcctgaaaccccaaagccctcattattctgtgcctctagtccttgcccatctccacaggtt

SEQ ID NO: 19250 - DNA, 290 bp, Homo sapiens
  MAP TO AC022143.6; EXPRESSED IN ADULT LIVER, SIGNAL = 4.4; EXPRESSED IN HEART, SIGNAL = 3.9; EXPRESSED IN FETAL LIVER, SIGNAL =   7; EXPRESSED IN PLACENTA, SIGNAL = 5.9; EST_HUMAN HIT: AW450464.1, EVALUE 7.00e-83; SWISSPROT HIT: P47172, EVALUE 5.00e-01; NT HIT: gi14766700, EVALUE 2.00e-51
ttatggttcagaaagagtagactttgaatgaaaggtgattctaaatgtgtcatatttgtaactgtccccagtggggctttctctagaggtgagagttgctggtctgaaatgttctacatgaattccaggcttcccttccaacttttctatgtgttccaaattcttggtagaatttgaaaattcataactttgttttaaaactttttctattgttactgtttggagtgaatcttccttataaatatccttctttgttgataattccttgttttcccatcttgattcccaac

SEQ ID NO: 19251 - DNA, 144 bp, Homo sapiens
  MAP TO AC004190.1; EXPRESSED IN ADULT LIVER, SIGNAL = 0.55; EXPRESSED IN BRAIN, SIGNAL = 0.91; EXPRESSED IN FETAL LIVER, SIGNAL = 0.37; EXPRESSED IN PLACENTA, SIGNAL = 0.62; EST_HUMAN HIT: BG676953.1, EVALUE 2.00e-75; NT HIT: AL163247.2, EVALUE 3.00e-08; SWISSPROT HIT: Q9X1F8, EVALUE 5.90e+00
ctaggagggaaggatggtttcctgggccaggctcagggtcctgctgccctgcacaacctcaggaaactgctctccaaatcccagctgctccagctccagcttcagctcaaagggccccaggtatagctcaggctgctgctccat

SEQ ID NO: 19252 - DNA, 136 bp, Homo sapiens
  MAP TO AC007758.1; EXPRESSED IN LUNG, SIGNAL = 0.8; EXPRESSED IN BONE MARROW, SIGNAL = 0.83; EXPRESSED IN PLACENTA, SIGNAL = 1.2; EXPRESSED IN ADULT LIVER, SIGNAL = 1.1; EXPRESSED IN HEART, SIGNAL = 1.1; EXPRESSED IN BRAIN, SIGNAL = 1.1; EST_HUMAN HIT: BF852207.1, EVALUE 6.70e-01; NT HIT: D83966.1, EVALUE 4.60e-01; SWISSPROT HIT: P53725, EVALUE 4.50e+00
aatttagtacaatgtccttagctatcatttttggcgtggaagagagtttgatggattctgcaataatgagattgacgagacagatggtcgctgccaggaattcagcagaggccagggtgatggagaagcaacggct

SEQ ID NO: 19253 - DNA, 157 bp, Homo sapiens
  MAP TO AF235097.1; EXPRESSED IN ADULT LIVER, SIGNAL = 1.2; EXPRESSED IN HEART, SIGNAL = 1.2; EXPRESSED IN BONE MARROW, SIGNAL = 1.6; EXPRESSED IN PLACENTA, SIGNAL = 1.5; SWISSPROT HIT: O60840, EVALUE 1.50e-02; NT HIT: gi13649410, EVALUE 2.00e-49
gggttggtttggctgaggcagaagaaggcgctgccctcagggatgggtaccaccttctccttgggtacaacttcctgcaggagttccacaccccctgcaccctcttcctcttcttcctcttcttcctcttcttcctcctcctcctcctcctccatgt

SEQ ID NO: 19254 - DNA, 368 bp, Homo sapiens
  MAP TO AC009286.31; EXPRESSED IN ADULT LIVER, SIGNAL =   2; EXPRESSED IN FETAL LIVER, SIGNAL = 0.62; EXPRESSED IN BRAIN, SIGNAL = 0.63; EXPRESSED IN PLACENTA, SIGNAL = 0.62; SWISSPROT HIT: P04208, EVALUE 3.00e-37; NT HIT: X59707.1, EVALUE 0.00e+00; EST_HUMAN HIT: BG686011.1, EVALUE 0.00e+00
cctcctgacagaggaggaagggggttcttgtctcagttccccattggcctggagcactgtgggaccattcaggctgtcatcccatgctgcacagtaataatcagcctcatcctcagactggagcccactgatggccagggaggctgaggtgccagacttggagccagagaatcggtcagggacccctgagggccgctgattattactatagatgaggagtttgggggccgttcctgggagctgctggtaccagtttacagtattacttccgatgttggagctgcttccagaacaagagatggtgaccctctgcccgggggtcccagacgctgagggtggctgagtcagcacagactgggcccaggacc

SEQ ID NO: 19255 - DNA, 243 bp, Homo sapiens
  MAP TO AC007782.20; EXPRESSED IN LUNG, SIGNAL = 1.1; EXPRESSED IN BONE MARROW, SIGNAL =   1; EXPRESSED IN PLACENTA, SIGNAL = 2.5; EXPRESSED IN ADULT LIVER, SIGNAL = 1.3; EXPRESSED IN BRAIN, SIGNAL = 1.4; EXPRESSED IN FETAL LIVER, SIGNAL =   1; SWISSPROT HIT: Q9Z985, EVALUE 1.80e+00; NT HIT: gi14861872, EVALUE 4.00e-92; EST_HUMAN HIT: BG007849.1, EVALUE 2.00e-67
tcaagggctcagtgttggtctctgctgctggcaaattgggcactcagcagtggctgtagccaggtcagccttggtgagtggaagtccatggtgctgagcccatgtataacctccatccctgccaccatggccactttgttcatgggaccattgggcaatcactggagtggctggggaaagaagctgagtggcgtccacagaacaggtcatcctatctacttgattattaaactcctcctccgc

SEQ ID NO: 19256 - DNA, 205 bp, Homo sapiens
  MAP TO AC012472.5; EXPRESSED IN BONE MARROW, SIGNAL = 1.3; EXPRESSED IN ADULT LIVER, SIGNAL = 1.2; EXPRESSED IN FETAL LIVER, SIGNAL =   1; SWISSPROT HIT: O83183, EVALUE 1.90e+00; NT HIT: AY048213.1, EVALUE 1.80e-01; EST_HUMAN HIT: BG028253.1, EVALUE 1.10e+00
aagaagacggaaggaccaagaagcttctaaaattcatgaggcactaaatatgcatgaggcacctgaggcactaaatattcatgctgcacaaattatatatgagacatacgtggcactcaatattcatgaggctttaattaggccacccacagtaaagaacattcttatcctcagcacaggacacacaaaacccatagctgtcagc

SEQ ID NO: 19257 - DNA, 87 bp, Homo sapiens
  MAP TO AC005524.1; EXPRESSED IN PLACENTA, SIGNAL = 0.57; EXPRESSED IN ADULT LIVER, SIGNAL = 0.42; EST_HUMAN HIT: H16877.1, EVALUE 2.50e-02; NT HIT: gi6678653, EVALUE 4.00e-03
gacagtgctccccacattctggctgctctggctccagctgtggctcaaagagttgcagatactgcttgtgcctccaatccagagtgg

SEQ ID NO: 19258 - DNA, 199 bp, Homo sapiens
  MAP TO AC020663.1; EXPRESSED IN ADULT LIVER, SIGNAL = 0.65; EXPRESSED IN BRAIN, SIGNAL = 0.75; EXPRESSED IN HELA, SIGNAL = 0.51; EXPRESSED IN BONE MARROW, SIGNAL = 0.67; EXPRESSED IN PLACENTA, SIGNAL = 0.73; EST_HUMAN HIT: AL530843.1, EVALUE 1.00e-103; SWISSPROT HIT: P57078, EVALUE 4.00e-07; NT HIT: AJ307662.1, EVALUE 7.00e-01
ctggagaagaaagtaggcgatgctctcgttgccacagctggaggccagcatcagtggagtctgcccttctggggtcggcacattcacactcacccccgcctcaagcagcaggtgcacgattgtgtcgtggccaatgtaggaggcatacatcagcggggtccagccaccaccattcttcttattcaaatctaactctctc

SEQ ID NO: 19259 - DNA, 201 bp, Homo sapiens
  MAP TO AF178030.1; EXPRESSED IN ADULT LIVER, SIGNAL = 1.2; EXPRESSED IN HEART, SIGNAL = 1.2; NT HIT: gi8394046, EVALUE 4.60e-02
gtagtttccaaagtggatgcacgcttatggttggaaaggatccttcttgacaaagctttcacactcagaaactactatcaaatgcagtcaagcacaggaagaaagaatacactgatgaccgagtatgctgaaataaagaaacataaggtgctgctgtctgaattcacactggagtttcttccactggtgtcagtgtggtaa

SEQ ID NO: 19260 - DNA, 245 bp, Homo sapiens
  MAP TO AF037338.1; EXPRESSED IN ADULT LIVER, SIGNAL = 2.1; EXPRESSED IN PLACENTA, SIGNAL = 2.4; EST_HUMAN HIT: BG104797.1, EVALUE 0.00e+00; SWISSPROT HIT: P19747, EVALUE 4.10e+00; NT HIT: gi14755895, EVALUE 0.00e+00
atgtgaagttcgacgccgtgagcggtgactactatcccatcatctacttcaatgactactggaacctgcagaaggactactaccccatcaacgagagcctggccagcctgccgctccgcgtctccttctgcccactctcgctttggcgctggcagctctatgctgcccagagcaccaagtcgccctggaacttcctgggtgatgagttgtacgagcagtcagatgaggagcaggactcggtgaag

SEQ ID NO: 19261 - DNA, 177 bp, Homo sapiens
  MAP TO AC022469.4; EXPRESSED IN BONE MARROW, SIGNAL = 0.76; EXPRESSED IN ADULT LIVER, SIGNAL = 1.1; EXPRESSED IN PLACENTA, SIGNAL = 1.1; EXPRESSED IN HELA, SIGNAL = 1.4; NT HIT: gi9055257, EVALUE 6.20e-01; SWISSPROT HIT: P29431, EVALUE 2.50e+00
ctttgtttgccaacttattccactgcggctctttttgtcttgcaatgcattctgtgtactggtgaagaagttttgaccacgaatagctgacaaatatgtgcaggtggtcatgcacagaagcagaaagaaaattcctctgtggttgttaacgtgaaggttttccaggggcttggggca

SEQ ID NO: 19262 - DNA, 232 bp, Homo sapiens
  MAP TO AC023818.3; EXPRESSED IN BONE MARROW, SIGNAL = 2.2; EXPRESSED IN PLACENTA, SIGNAL = 1.6; EXPRESSED IN ADULT LIVER, SIGNAL = 1.8; EXPRESSED IN BRAIN, SIGNAL = 1.6; SWISSPROT HIT: P56252, EVALUE 3.50e+00; NT HIT: M57719.1, EVALUE 3.30e+00; EST_HUMAN HIT: BI438668.1, EVALUE 1.00e-127
tggtccctgtgaaccttacctcaaaccatgcatctggggcagagatccttacttgcttggtggttacaaatgcaaatacagtgaagaatgtcatctttgtgattgttcctgaaatagttcacgagaaatccatgaccgtaaagtactgtgatagtgatgtctaccactgtgagcttccagtactaggtgattggtctgcattcacagtgaccaaaatcagctatgtggccag

SEQ ID NO: 19263 - DNA, 199 bp, Homo sapiens
  MAP TO AC006339.3; EXPRESSED IN ADULT LIVER, SIGNAL =   2; EXPRESSED IN HEART, SIGNAL = 5.3; EXPRESSED IN PLACENTA, SIGNAL =   3; SWISSPROT HIT: P27935, EVALUE 3.20e+00; NT HIT: gi13376283, EVALUE 7.00e-01; EST_HUMAN HIT: AA020860.1, EVALUE 2.60e-01
ccctggaattgactgctatcatcaaaactatggacgacatggctctaattacctcactttcttcattttccaaaaagagacaccaatgagtcagaaacctctctcggagtttattgaggtgactatgctctattactgcaaccaccttactaccctctcctcaatccccctaataccagactacacagtggaagaataa

SEQ ID NO: 19264 - DNA, 132 bp, Homo sapiens
  MAP TO AC025432.3; EXPRESSED IN BONE MARROW, SIGNAL = 1.6; EXPRESSED IN PLACENTA, SIGNAL = 1.9; EXPRESSED IN ADULT LIVER, SIGNAL = 1.8; EXPRESSED IN HELA, SIGNAL = 2.1; SWISSPROT HIT: Q9TL36, EVALUE 5.20e-01; NT HIT: gi14042971, EVALUE 1.10e-01; EST_HUMAN HIT: AA446684.1, EVALUE 1.60e-01
atgcttatctcaaaagagtttacaaagactttccatggatgtgtgggcatggatagctttgggggaatcaatttccagatccagaacttccacatgaacaatttcccaaagttgatctgtctgaatgtccac

SEQ ID NO: 19265 - DNA, 366 bp, Homo sapiens
  MAP TO AL022159.1; EXPRESSED IN LUNG, SIGNAL = 1.1; EXPRESSED IN ADULT LIVER, SIGNAL = 2.2; EXPRESSED IN BRAIN, SIGNAL = 2.1; EXPRESSED IN HELA, SIGNAL = 1.6; EXPRESSED IN BONE MARROW, SIGNAL = 2.3; EXPRESSED IN PLACENTA, SIGNAL = 2.2; SWISSPROT HIT: Q9NYV4, EVALUE 9.80e-01; NT HIT: AF181897.1, EVALUE 1.00e-65; EST_HUMAN HIT: BF035327.1, EVALUE 1.00e-69
tttgtcaagttgtgattgatcaggaagagttcttgaaggaaattaaaagtgccactctggtgaacccacaaatgataagaaagcaaaacagccttattgcggatatggagaacattttagtggtctggatagatcaaaacagccacaaaattcccttaagccaaagcctgatccagagcaaggctctaactctcttcaattctgtaaaggctaagagtgctgaggaagctgcagaacacaagttggaagctagcagaggttggttcatgaggtttaaggaaataagctgtctccagaacataaaagttcaaagtgaaacagcaagtactgagttaaaagctatagccagttatccagaagacacag

SEQ ID NO: 19266 - DNA, 245 bp, Homo sapiens
  MAP TO AC004199.1; EXPRESSED IN PLACENTA, SIGNAL = 1.2; EXPRESSED IN ADULT LIVER, SIGNAL = 0.73; EXPRESSED IN HEART, SIGNAL = 2.2; EST_HUMAN HIT: BI827073.1, EVALUE 0.00e+00; SWISSPROT HIT: P50289, EVALUE 8.00e-01; NT HIT: gi15304621, EVALUE 0.00e+00
atgctgtatgtgctgatagagtcagagagggcccggatcaagaaactgcaggaagagaaaactagaaacctagaatcgtctagaaaactagaacctacaatcgtctcagaacacaaaggaggcttgaggactgagcagactgacatagatgtacttggacaacacctcaccaaggagcatgtctcttcccactcacaatccccaatacgagattcacagtggttcacgctgagtccacaggaaaa

SEQ ID NO: 19267 - DNA, 230 bp, Homo sapiens
  MAP TO AL031708.3; EXPRESSED IN HEART, SIGNAL = 1.5; EXPRESSED IN ADULT LIVER, SIGNAL = 1.3; EXPRESSED IN BRAIN, SIGNAL = 1.6; EXPRESSED IN PLACENTA, SIGNAL = 1.4; EST_HUMAN HIT: AA523827.1, EVALUE 9.00e-14; SWISSPROT HIT: O43516, EVALUE 1.10e-01; NT HIT: Z22532.1, EVALUE 2.10e-01
atggcccttggcacgcagaggggtcccaactgcttgagcaggactggaagcaacgtgtgtgagtttccctcaaggaacttccaggagaagcaggtccacccctatgctctgtcatcacacgaggacgcagcagtgtggaggcgactggagtccagggagcactgggctgcagtcctgtatctgggcagggatcgcccaacctgtgttcaggccgtggaggggatgtcgcg

SEQ ID NO: 19268 - DNA, 105 bp, Homo sapiens
  MAP TO AF196968.1; EXPRESSED IN ADULT LIVER, SIGNAL = 3.1; EXPRESSED IN HEART, SIGNAL = 2.6; EXPRESSED IN LUNG, SIGNAL = 4.5; EXPRESSED IN BRAIN, SIGNAL =   3; NT HIT: AP003014.2, EVALUE 8.50e-02
tcagccttgcttcctttgggagcaacactttccctggagggagttggtgacaattgtgatgaccgtgatgatgatgtcggcagcagtaatgacagcaactaacat

SEQ ID NO: 19269 - DNA, 200 bp, Homo sapiens
  MAP TO AC020893.4; EXPRESSED IN FETAL LIVER, SIGNAL =   1; EXPRESSED IN BRAIN, SIGNAL = 1.1; EXPRESSED IN HELA, SIGNAL = 3.2; EXPRESSED IN PLACENTA, SIGNAL = 6.9; EXPRESSED IN ADULT LIVER, SIGNAL = 1.3; SWISSPROT HIT: P00795, EVALUE 4.90e-01; NT HIT: AF153201.1, EVALUE 8.00e-81; EST_HUMAN HIT: AV708247.1, EVALUE 8.00e-94
gtatcatcaaatggtattcagtccactcctctgaatcttgcaacatactggaaatgtagtgctagcaccacagatcttagagtggattataaatacaatccagaagctatggtggcacctagtgtgctttccaacatacaggtggtggtaccagtggatggaggagtaacgaacatgcagtcccttccccctgcaatatg

SEQ ID NO: 19270 - DNA, 348 bp, Homo sapiens
  MAP TO AJ012008.1; EXPRESSED IN BRAIN, SIGNAL = 0.93; EXPRESSED IN PLACENTA, SIGNAL = 1.4; EXPRESSED IN ADULT LIVER, SIGNAL = 0.91; EXPRESSED IN FETAL LIVER, SIGNAL = 1.1; SWISSPROT HIT: O54751, EVALUE 1.80e-01; NT HIT: AJ012008.1, EVALUE 0.00e+00
catgggtaggcccgggggccttgcaataggtcctgtcccccagcacgtgaagcactgtacggctctcgtcctcgtggcggcccttgcagaaaaaagtgcccgagtcccccgcgctcaagaggagctccagccgccggataccagagtccagggagcgtaggcggccgacgaaaggctggaggggaggcacggtgggggtcccgctcgaagaggcccacaggatcggtcggcgtcctttggacaggcccttgcaggccgggaagctgggtgcccagacccagcggatgggatgagagactcctccgcaggagagattcacccggtccccagggcggccgtccagagaag

SEQ ID NO: 19271 - DNA, 110 bp, Homo sapiens
  MAP TO AC008831.7; EXPRESSED IN PLACENTA, SIGNAL = 1.1; EXPRESSED IN ADULT LIVER, SIGNAL = 1.1; EXPRESSED IN BRAIN, SIGNAL = 1.1; EXPRESSED IN HELA, SIGNAL = 1.2; EXPRESSED IN FETAL LIVER, SIGNAL = 1.4; SWISSPROT HIT: Q02155, EVALUE 7.90e+00; NT HIT: Z19108.1, EVALUE 1.40e+00
ttaagggtactgtgcttcaaatgcatttactctatcaaaggcattcaattcataattctttaaaatctgcaagtagatcttgtagtgcaaccattcaggcttatagtaag

SEQ ID NO: 19272 - DNA, 231 bp, Homo sapiens
  MAP TO AC004202.1; EXPRESSED IN LUNG, SIGNAL = 2.6; EXPRESSED IN PLACENTA, SIGNAL = 3.8; EXPRESSED IN ADULT LIVER, SIGNAL = 2.8; EXPRESSED IN HEART, SIGNAL = 2.9; SWISSPROT HIT: P77333, EVALUE 1.40e+00; EST_HUMAN HIT: AW362922.1, EVALUE 1.00e-127; NT HIT: AF230387.1, EVALUE 1.00e-127
gaccaggtagaacatgagaagcaaaggatcctcacagaatttgaactcctgcatcaagtcctagaggaggagaagaatttcctgctatcacggatttactggctgggtcatgagggaacggaagcggggaaacactatgttgcctccactgagccacagttgaacgatctcaagaagctcgttgattccctgaagaccaagcagaacatgccacccaggcagctgctggag

SEQ ID NO: 19273 - DNA, 170 bp, Homo sapiens
  MAP TO AC008599.5; EXPRESSED IN HEART, SIGNAL = 1.2; EXPRESSED IN LUNG, SIGNAL = 1.6; EXPRESSED IN FETAL LIVER, SIGNAL = 1.2; EXPRESSED IN PLACENTA, SIGNAL = 1.2; EXPRESSED IN ADULT LIVER, SIGNAL = 1.5
atctgtaaacaacctactgctgcattcttcttcttcttcctcttcttcttcttcttcttttcttcttcttcttcttcttcttcttcttcttcttcttcttcttcttcttcttcttcttcttcctcttcctcttcttcttctttcctcttcctcttcttcttctttggctt

SEQ ID NO: 19274 - DNA, 118 bp, Homo sapiens
  MAP TO AC020908.5; EXPRESSED IN LUNG, SIGNAL = 1.1; EXPRESSED IN BRAIN, SIGNAL = 0.94; EXPRESSED IN PLACENTA, SIGNAL = 0.91; EXPRESSED IN ADULT LIVER, SIGNAL = 0.91; EST_HUMAN HIT: BF948084.1, EVALUE 5.70e-01; NT HIT: AJ229041.1, EVALUE 9.80e-02
agccctccgaaggcacgaaccctgccaacaccttgatcttgaatgtgatcttaaacgtctggcctctagaactgcaagccaatatacttctgtcgttctggccacccagcgtgcggtt

SEQ ID NO: 19275 - DNA, 201 bp, Homo sapiens
  MAP TO AC022085.4; EXPRESSED IN ADULT LIVER, SIGNAL = 0.99; EXPRESSED IN FETAL LIVER, SIGNAL = 1.1; EXPRESSED IN PLACENTA, SIGNAL = 0.94; EST_HUMAN HIT: BF125927.1, EVALUE 1.00e-107; NT HIT: gi11968022, EVALUE 1.00e-109
cgactttgttctttcctttgttttattaactgaatgagttccttgtcaaaataatcttcttcctcttcctctccttttccatcatcttctctttcctgggcatcaacgttatctttgtgcaactggccagaaatgtgctttgcatatgcagaaagacccacttctgtgaccccgcacactcggcactcatgactaatgtcc

SEQ ID NO: 19276 - DNA, 288 bp, Homo sapiens
  MAP TO AL031713.6; EXPRESSED IN ADULT LIVER, SIGNAL =   1; EXPRESSED IN PLACENTA, SIGNAL = 1.1; SWISSPROT HIT: P75410, EVALUE 4.30e+00; EST_HUMAN HIT: BI832036.1, EVALUE 3.00e-05
aacggccaggctgctcctctccgtggctgcacgtcctggccaccccgaggccgcagcactttcagcagctccgtctccacgtagtcgcccacgaggtaagggtgccagcattgctcgtggtactgcaggttgttggtggcgatggagaagggcacggtcatggtgtccgaggcatgacacagctgcggctccggggccagcagcaggcgggtctcagcggcggtgctaccacctcccactcaggctccaacttccagccgcgcgtgtcctacggctgccgcccaccct

SEQ ID NO: 19277 - DNA, 495 bp, Homo sapiens
  MAP TO AC008696.5; EXPRESSED IN ADULT LIVER, SIGNAL = 2.2; EXPRESSED IN FETAL LIVER, SIGNAL = 1.7; EXPRESSED IN HELA, SIGNAL =   9; SWISSPROT HIT: Q13077, EVALUE 5.00e-21; NT HIT: gi4759251, EVALUE 0.00e+00; EST_HUMAN HIT: AL546722.1, EVALUE 0.00e+00
atggcacggcatgtggaggacagtgtgaagccacatctggccatgatgtgtgctctgttgagttggcaatggcaggagctgcaggaccttcagcaagagctggaggagctatcagtgggcagtgatggtatgctcatctggaagattggcagctatggtcggtggctacagaaggccaaggccaagcccaaccttgagtgcttcagcccagccttctacacacataagtatggttacaagctgcaggtgtctgcattcctcaatggcaatggcagtggcgagggcacacacctctcactgtacgttggcttgctgcctggtgcctttgacaatctccttgagtggccctttgcccactgtgtcaccttctccctgctggatcagagcaaccctgggctggctaaaccacagcatgtcactgagaccttccacccctgcctaaactggaagccgggcacttggagtgggggctccctggatgagagatcttcctaa

SEQ ID NO: 19278 - DNA, 141 bp, Homo sapiens
  MAP TO AC005203.1; EXPRESSED IN BONE MARROW, SIGNAL = 0.65; EXPRESSED IN ADULT LIVER, SIGNAL = 0.45; EXPRESSED IN FETAL LIVER, SIGNAL = 0.37; EXPRESSED IN LUNG, SIGNAL = 0.55; SWISSPROT HIT: Q12931, EVALUE 4.00e-20; NT HIT: gi14778058, EVALUE 7.00e-74; EST_HUMAN HIT: BG770090.1, EVALUE 1.00e-73
ctggatggtgatggtgcctttctcggcattggtctgcaagtgaatctccatttctggcagtgcttggccgtcagacaccagtttgtgacgcagtttttccaaggcatcgctggcattggagatcagctcccgtataaacac

SEQ ID NO: 19279 - DNA, 165 bp, Homo sapiens
  MAP TO AJ250235.1; EXPRESSED IN BRAIN, SIGNAL = 0.61; EXPRESSED IN HELA, SIGNAL = 0.81; EXPRESSED IN ADULT LIVER, SIGNAL = 0.81; NT HIT: gi4557592, EVALUE 4.00e-88; EST_HUMAN HIT: T87808.1, EVALUE 6.00e-88; SWISSPROT HIT: P22830, EVALUE 5.00e-27
gttggtccgatgccctggttgggtcctcaaacagacgaatctatcaaagggctttgtgagagggggaggaagaatatcctcttggttccgatagcatttaccagtgaccatattgaaacgctgtatgagctggacatcgagtactctcaagttttagccaaggag

SEQ ID NO: 19280 - DNA, 208 bp, Homo sapiens
  MAP TO AC006167.1; EXPRESSED IN ADULT LIVER, SIGNAL = 1.5; EXPRESSED IN HEART, SIGNAL = 3.2; EXPRESSED IN BRAIN, SIGNAL = 1.5; EXPRESSED IN PLACENTA, SIGNAL =   2; NT HIT: AL163246.2, EVALUE 1.00e-48; EST_HUMAN HIT: BE276179.1, EVALUE 2.00e-64; SWISSPROT HIT: Q13437, EVALUE 2.60e-01
atgtggaagcaactttggaactgggtaacaggtagcaactggaacagtttggagggctcagaagacaggaaagtgtgggaaagtatggaacttcctagagacttgttgaatggctttgaccaaaatcctgataatgatatggacaatgaaatacaggctgaggtggtctcaaatggagatgaggaacttgttgggaactggagtaaag

SEQ ID NO: 19281 - DNA, 231 bp, Homo sapiens
  MAP TO AF260011.1; EXPRESSED IN ADULT LIVER, SIGNAL = 1.1; EXPRESSED IN PLACENTA, SIGNAL = 1.3; EXPRESSED IN HEART, SIGNAL = 0.93; EXPRESSED IN FETAL LIVER, SIGNAL = 1.6; EXPRESSED IN HELA, SIGNAL = 0.88; SWISSPROT HIT: O94822, EVALUE 5.00e-29; NT HIT: AL163249.2, EVALUE 1.00e-127; EST_HUMAN HIT: AU135670.1, EVALUE 1.00e-125
acttgtaatttcatccttacaaaatgctatggcttcaggttgcttgcttggaggaaaagccgcttcaaatgcatcttttgctgcaaacgcagctggtgtgtaagtatcacactgagccattagccaatatcccattaaactttttaagtagggagccaactgtttctttactttaaggataagtttttcaaaagcttgttgtgtggcttctcggacgcgacggtcatgatc

SEQ ID NO: 19282 - DNA, 124 bp, Homo sapiens
  MAP TO AC005524.1; EXPRESSED IN LUNG, SIGNAL = 0.7; EXPRESSED IN FETAL LIVER, SIGNAL = 0.37; EXPRESSED IN ADULT LIVER, SIGNAL = 0.44; SWISSPROT HIT: P56271, EVALUE 3.50e+00; NT HIT: gi13376069, EVALUE 3.00e-17; EST_HUMAN HIT: BI861779.1, EVALUE 5.00e-17
cttccaactcaatggagtcaacactgcactccattatgccacataccacaaaatggtcaggacaaacgataacagtgtcaccttcatagcaggcatttataacagataatggatcaccgaagaa

SEQ ID NO: 19283 - DNA, 124 bp, Homo sapiens
  MAP TO AF001551.1; EXPRESSED IN HEART, SIGNAL = 4.4; EXPRESSED IN BRAIN, SIGNAL = 5.7; EXPRESSED IN FETAL LIVER, SIGNAL = 5.3; EXPRESSED IN ADULT LIVER, SIGNAL = 4.9; EXPRESSED IN PLACENTA, SIGNAL = 5.7; NT HIT: AJ400877.1, EVALUE 7.00e-03; EST_HUMAN HIT: AW953045.1, EVALUE 2.00e-16
atgatcatccctgaaccaatgactgtggacaggcaaatcttcattgcctctaacacgcagaactcctcatcacctccttacagccagactggagcttccaaggacattcaagttggcaaagact

SEQ ID NO: 19284 - DNA, 96 bp, Homo sapiens
  MAP TO AC040163.3; EXPRESSED IN BONE MARROW, SIGNAL =   4; EXPRESSED IN PLACENTA, SIGNAL = 2.5; EXPRESSED IN ADULT LIVER, SIGNAL = 3.1; SWISSPROT HIT: P38291, EVALUE 4.70e+00
tttcgaaatcgagacctcattgtctgtgtccttattggcataatcaggttcttctggtctgtgaagtggcactgtaattccattacagtctctctt

SEQ ID NO: 19285 - DNA, 149 bp, Homo sapiens
  MAP TO AC018725.1; EXPRESSED IN PLACENTA, SIGNAL = 1.2; EXPRESSED IN ADULT LIVER, SIGNAL = 1.3; SWISSPROT HIT: O36015, EVALUE 3.40e+00; NT HIT: M67508.1, EVALUE 4.00e-14; EST_HUMAN HIT: AL043679.1, EVALUE 3.00e-71
agaccctgaggtttgttcttcatcccctgctgcctcttgactacatctgtcctctcgcccttgcatcatcttttccagccacgttgtcctccctgctgttactctgtcctgtcatggacactgtattccctgttgctggtaacaaataa

SEQ ID NO: 19286 - DNA, 140 bp, Homo sapiens
  MAP TO AL031592.1; EXPRESSED IN BRAIN, SIGNAL = 1.9; EXPRESSED IN HELA, SIGNAL = 2.5; EXPRESSED IN PLACENTA, SIGNAL = 2.3; EXPRESSED IN ADULT LIVER, SIGNAL = 1.8; SWISSPROT HIT: Q92797, EVALUE 4.50e+00; NT HIT: gi14735555, EVALUE 7.40e+00
atgaatggataccctcacacattaagcaacttgccttctgaaactgcattgccagggcctccagactgtgacaaggaggatgttttcaggcagagagcaggggaaaggctcaacctaagtttccaggaacaaaagcacag

SEQ ID NO: 19287 - DNA, 187 bp, Homo sapiens
  MAP TO AC006942.1; EXPRESSED IN FETAL LIVER, SIGNAL = 2.4; EXPRESSED IN BONE MARROW, SIGNAL =   4; EXPRESSED IN PLACENTA, SIGNAL = 3.4; EXPRESSED IN ADULT LIVER, SIGNAL = 3.3; EXPRESSED IN HEART, SIGNAL = 4.6; SWISSPROT HIT: Q04638, EVALUE 8.50e-01; NT HIT: AF289221.1, EVALUE 1.00e-101
cttgttcctctatctggtgaattttcctgcggaaaattctgcagaaaaatctgcggaaccattttttgctggaacgcttgacagctcttgcatacacttgaaaacacgtcacattctaggaaacgtggtgattggtgctcctgtgagctgctggctggcatctgtcagtggtggagagctctggggg

SEQ ID NO: 19288 - DNA, 198 bp, Homo sapiens
  MAP TO AC018555.4; EXPRESSED IN ADULT LIVER, SIGNAL = 1.1; EXPRESSED IN FETAL LIVER, SIGNAL = 0.98; EXPRESSED IN BRAIN, SIGNAL = 0.89; SWISSPROT HIT: P52591, EVALUE 8.40e-01; NT HIT: X71604.1, EVALUE 7.00e-04; EST_HUMAN HIT: BI490042.1, EVALUE 6.60e-02
cacagttcctgtggtcatggaaacaagagtacttgcaacaccacacccccagttccaggaggttcagcacaaagagagagtccctttgtttgggaaaaagcaagggaaaataacaagaaatctcttcctggggaaccagatcctattcaagaccaccaaggcagtgcatctacgagtctgcaaaaacccaagtccctt

SEQ ID NO: 19289 - DNA, 200 bp, Homo sapiens
  MAP TO AL096870.3; EXPRESSED IN LUNG, SIGNAL = 1.7; EXPRESSED IN BONE MARROW, SIGNAL = 2.1; EXPRESSED IN PLACENTA, SIGNAL = 2.8; EXPRESSED IN ADULT LIVER, SIGNAL = 1.8; EXPRESSED IN HEART, SIGNAL = 2.2; EST_HUMAN HIT: BF726084.1, EVALUE 1.00e-108; SWISSPROT HIT: Q14934, EVALUE 3.00e-32; NT HIT: gi14750673, EVALUE 1.00e-109
ttggccgccatgttgttctcaggcagcagagtcatctccaacaccttggtgccactgactacggcttcatagctggccgtggccaccatcttgcctgtgatacggtgcacctgatagaaggcatgaggccgcaggttcctttcatctgcagtgccgatgaacatctgtagggtcagtggcttctcactgtagcctaggag

SEQ ID NO: 19290 - DNA, 139 bp, Homo sapiens
  MAP TO AL031845.6; EXPRESSED IN BRAIN, SIGNAL = 0.74; EXPRESSED IN PLACENTA, SIGNAL = 0.61; EXPRESSED IN HEART, SIGNAL =   1; EXPRESSED IN ADULT LIVER, SIGNAL = 0.8; EST_HUMAN HIT: BF509163.1, EVALUE 6.00e-26; SWISSPROT HIT: Q9XF62, EVALUE 3.40e+00; NT HIT: D87675.1, EVALUE 2.00e-22
gaaagaagctgtctccataacagaaaagtgcaaggtgaaggggcaagtgctgatggagaagctgcaacaaatcatccagaagatctggttaagatcattgatgaaggtggccacactaaacaacaaattttcaaggtag

SEQ ID NO: 19291 - DNA, 118 bp, Homo sapiens
  MAP TO AC026733.3; EXPRESSED IN BONE MARROW, SIGNAL = 5.9; EXPRESSED IN PLACENTA, SIGNAL = 3.4; EXPRESSED IN ADULT LIVER, SIGNAL = 4.4; EXPRESSED IN BRAIN, SIGNAL = 3.8; EST_HUMAN HIT: AV709300.1, EVALUE 1.00e-04; SWISSPROT HIT: Q9Y487, EVALUE 2.00e+00; NT HIT: AF217403.1, EVALUE 9.80e-02
agatcctgttacagagggtccctctcaacttcaagcccagacaaatctccaggcacttggagcacctgctcaactggctctgcagcctgagccacctcaccctcgccatgcggacact

SEQ ID NO: 19292 - DNA, 123 bp, Homo sapiens
  MAP TO AC008959.4; EXPRESSED IN ADULT LIVER, SIGNAL = 0.54; EXPRESSED IN LUNG, SIGNAL = 0.79; EXPRESSED IN BRAIN, SIGNAL = 0.42; EST_HUMAN HIT: AW753555.1, EVALUE 6.00e-01
atgacatattttgggggtctgacagctcagtttctggcaagcttggtaccataccctcctgactcaccatcattcccagacttacagggaaacaatctgaagtcacttcatcatacagggaag

SEQ ID NO: 19293 - DNA, 166 bp, Homo sapiens
  MAP TO AC006189.1; EXPRESSED IN HELA, SIGNAL = 0.6; EXPRESSED IN PLACENTA, SIGNAL = 0.9; EXPRESSED IN ADULT LIVER, SIGNAL = 0.86; EST_HUMAN HIT: AW600301.1, EVALUE 3.00e-22; SWISSPROT HIT: Q93073, EVALUE 3.40e+00; NT HIT: gi4758155, EVALUE 1.50e-01
atgacctggggacagcataatacaaagtggatggaatgggctgagaaaggagaggggttagattttccatttaaccatgaggaggtggtgtgtgagctgggtttggaggagaaagatttagataaaggaagaatgtgggaaagagcacagcaggctggagaatggc

SEQ ID NO: 19294 - DNA, 169 bp, Homo sapiens
  MAP TO AC006997.3; EXPRESSED IN BRAIN, SIGNAL = 1.9; EXPRESSED IN FETAL LIVER, SIGNAL = 1.3; EXPRESSED IN PLACENTA, SIGNAL = 2.5; EXPRESSED IN ADULT LIVER, SIGNAL = 1.8; EXPRESSED IN HEART, SIGNAL = 2.6; EST_HUMAN HIT: BF357724.1, EVALUE 2.00e-04; SWISSPROT HIT: Q9PQZ8, EVALUE 2.60e+00; NT HIT: gi8922643, EVALUE 6.00e-04
gaaaaaaaagtttggttcttcaaatagcccccctcatgatattggtggggaggagtccattggccttcatgatgatcctgtatgtgtgctagctctttgctactcaaagtgtgatctgtggaccagcaccaccaatgtctcctggcaggctgttggagatgcaggctaa

SEQ ID NO: 19295 - DNA, 254 bp, Homo sapiens
  MAP TO AC009757.8; EXPRESSED IN BRAIN, SIGNAL = 0.52; EXPRESSED IN PLACENTA, SIGNAL = 0.39; EXPRESSED IN ADULT LIVER, SIGNAL = 0.56; EXPRESSED IN HEART, SIGNAL = 1.3; EST_HUMAN HIT: AI091735.1, EVALUE 0.00e+00; SWISSPROT HIT: P75166, EVALUE 6.50e-01; NT HIT: gi13386177, EVALUE 2.30e-01
tcagaagatatcaggtagggtagcacagttattacagaaacgaatgaagacacatgttgttattctgacagtcacagtggggtcagtaattccgcagtataaagtaacttcaaaattttgcttgcttgacaaatggaaagtttgcatttcgtgtacatgtcctacgtagatcattagatcaatctgcccttggagtgactcagggatgtgagataatggaggcttgttgacatgagcatctgtgatcaccagag

SEQ ID NO: 19296 - DNA, 168 bp, Homo sapiens
  MAP TO AC025172.2; EXPRESSED IN BRAIN, SIGNAL =   1; EXPRESSED IN ADULT LIVER, SIGNAL =   1; NT HIT: gi15302034, EVALUE 5.80e-01; EST_HUMAN HIT: AI906093.1, EVALUE 2.00e-82; SWISSPROT HIT: P30754, EVALUE 1.30e-01
cccactgccggaacgggaccctctcgtgcctgcagatggcaaagctcctgagggcctgatggaccctccaatgtcccacggccacagtttccaccttgacgccgaagccctgggatggcccctctgcaacgcccagtgctccatcatgacctggccccaggacgctga

SEQ ID NO: 19297 - DNA, 294 bp, Homo sapiens
  MAP TO AL024494.1; EXPRESSED IN ADULT LIVER, SIGNAL = 1.2; EXPRESSED IN BRAIN, SIGNAL = 1.6; EXPRESSED IN LUNG, SIGNAL = 1.3; SWISSPROT HIT: Q13402, EVALUE 7.60e+00; NT HIT: M97615.1, EVALUE 2.70e-01
agcctcctcttttcctgtaggaaagttgaagtgctgaccttcatcattcctgagctgcccccttggacactgctctaacctcatttccatgactccaggctgaattctatctgtctctcccaacactgctcttggccttctgattgggtctttccagtcataattcctcaccagtatgaattttaggcacccctccttattccaagagaggccactaaaactgtgagacacaagcacaacatcatcatcatcatcatcatcatcatcatcacctctcaaggacaaacatttatc

SEQ ID NO: 19298 - DNA, 105 bp, Homo sapiens
  MAP TO AC008719.5; EXPRESSED IN ADULT LIVER, SIGNAL = 0.53; EXPRESSED IN HELA, SIGNAL = 0.42; EXPRESSED IN BONE MARROW, SIGNAL = 0.56; SWISSPROT HIT: Q9QXT8, EVALUE 1.00e-08; NT HIT: gi14723010, EVALUE 2.00e-52; EST_HUMAN HIT: AL538404.1, EVALUE 2.00e-52
gagatgatggacattgtcaaagccatctatgacatgatggggaaatacacatatcctgtgctcaaagaggacactccaaggcagcatgtggacgtcttcttccag

SEQ ID NO: 19299 - DNA, 290 bp, Homo sapiens
  MAP TO AC026745.3; EXPRESSED IN HEART, SIGNAL =   1; EXPRESSED IN ADULT LIVER, SIGNAL = 0.92; EXPRESSED IN BRAIN, SIGNAL =   1; EXPRESSED IN FETAL LIVER, SIGNAL = 1.4; EXPRESSED IN HELA, SIGNAL = 1.6; EXPRESSED IN PLACENTA, SIGNAL = 1.4; EST_HUMAN HIT: AI264325.1, EVALUE 1.00e-16; SWISSPROT HIT: P75245, EVALUE 9.80e+00; NT HIT: D87675.1, EVALUE 4.00e-03
aaccatcccagaagaaggaacatcatcacaaaggatgtgtgtggcagagaagggggtgagccaggggctggggggctgcagcctctggtacagagagctgactccaaaacagtctttaaaaggcctggttctacaggttctgctgaactaaatggtgcaaacgtttccagtgactactgccctgcctatctgacacagctagaaggtggctgtcttcaagccaagaagagagccctcatcagaaaccgaatggtgtttgacttgatcttgcacttccagcctccagatct

SEQ ID NO: 19300 - DNA, 238 bp, Homo sapiens
  MAP TO AC005328.1; EXPRESSED IN BONE MARROW, SIGNAL = 0.91; EXPRESSED IN PLACENTA, SIGNAL = 0.6; EXPRESSED IN ADULT LIVER, SIGNAL = 0.63; EST_HUMAN HIT: BG754698.1, EVALUE 1.00e-110; SWISSPROT HIT: P43563, EVALUE 7.00e-16; NT HIT: gi13639766, EVALUE 4.00e-03
cgtaaccgcacgccctcagccccaagcccgcgcaccagtggctccagctccttggtgtcgatgaggccgaactccttgacgaaatagtagaagtgcttgtagcaggtgttcacgtgggcctcggagcccatctgcgcgatgcggtcaaagtggtggatgtagacgtgcacgaacacgcggaacagccgcgacaggatcttccgcaccgtctgcaggaagttcttgggaaacggagtgc

SEQ ID NO: 19301 - DNA, 256 bp, Homo sapiens
  MAP TO AF020803.1; EXPRESSED IN BRAIN, SIGNAL = 2.2; EXPRESSED IN FETAL LIVER, SIGNAL = 2.6; EXPRESSED IN BONE MARROW, SIGNAL = 2.2; EXPRESSED IN PLACENTA, SIGNAL = 2.5; EXPRESSED IN HEART, SIGNAL = 2.3; EXPRESSED IN ADULT LIVER, SIGNAL = 2.5; EST_HUMAN HIT: AW852552.1, EVALUE 6.00e-77; SWISSPROT HIT: P08547, EVALUE 2.00e-23; NT HIT: AJ229041.1, EVALUE 0.00e+00
catttcaatctcactgcttgttattagtctgtttggggtatctaattcttcctgatttaggctaggagggttgtatttttccaggaatttgtccatctcttttaggtttgctagtttatgtccgtaaaggtgttcatagtagccttgaaagatcttttgtatttccatggtgttagttgtaatatctcctgtttcatttcttaatgaggttatttggattttctctcttcttttcttggttaatcttcctaatggc

SEQ ID NO: 19302 - DNA, 546 bp, Homo sapiens
  MAP TO AC022336.12; EXPRESSED IN FETAL LIVER, SIGNAL = 1.4; EXPRESSED IN LUNG, SIGNAL = 0.57; EXPRESSED IN HELA, SIGNAL = 0.78; EXPRESSED IN PLACENTA, SIGNAL = 1.1; EXPRESSED IN ADULT LIVER, SIGNAL = 0.83; EST_HUMAN HIT: R19772.1, EVALUE 1.00e-112; SWISSPROT HIT: O75962, EVALUE 2.00e-59; NT HIT: gi5902139, EVALUE 0.00e+00
cctgaaaacctgctcattgacctacggattccagtgcctcgagtgaagctcattgacttggaggatgctgtccagatctcgggtcacttccacattcaccacctgctggggaaccctgagtttgctgccccagaagtcattcaaggcatccccgtctccctggggacagacatctggagcatcggggttctgacatatgtcatgctgagtggggtctcccccttcttggatgagagcaaagaggagacatgtatcaacgtatgcagggtggatttcagcttcccccatgaatacttctgtggtgtgagcaatgctgccagagatttcatcaatgtgatcttacaggaagattttcggaggcggcccacagcagccacatgcttgcagcatccatggctgcagccccataatggcagctactctaagatccccctggacacctcccgcctagcatgcttcatagaacgtcgcaagcaccagaatgatgtgcggcctattcccaatgtcaagagctacattgtcaaccgggtgaaccaagggacgtag

SEQ ID NO: 19303 - DNA, 181 bp, Homo sapiens
  MAP TO AC026736.3; EXPRESSED IN BONE MARROW, SIGNAL =   1; EXPRESSED IN PLACENTA, SIGNAL =   2; EXPRESSED IN ADULT LIVER, SIGNAL = 1.3; EXPRESSED IN HEART, SIGNAL = 2.8; EXPRESSED IN FETAL LIVER, SIGNAL = 2.9; SWISSPROT HIT: Q9UKP4, EVALUE 2.50e+00; NT HIT: gi8394534, EVALUE 4.10e-02
agcctctggggccgctggctgccagcctgctgcagcatctggggcaatgaacatccttggaagccccttccccaagctgactctcctcttacttgtctttccctttgtttcttccttcctacttgtgcctgggttattgcaacagtgtccaggtgtcccatctgttcttgcttcaagagac

SEQ ID NO: 19304 - DNA, 234 bp, Homo sapiens
  MAP TO AL078589.8; EXPRESSED IN BRAIN, SIGNAL = 2.9; EXPRESSED IN PLACENTA, SIGNAL = 2.2; EXPRESSED IN HEART, SIGNAL = 2.6; EXPRESSED IN ADULT LIVER, SIGNAL = 2.1; EXPRESSED IN LUNG, SIGNAL = 4.2; SWISSPROT HIT: Q9P2K6, EVALUE 1.90e-01; NT HIT: AB067487.1, EVALUE 1.00e-118; EST_HUMAN HIT: BG181952.1, EVALUE 1.00e-118
gaattaaatagctttaattacttggatctgtacagacttgctgacctctttaacctcactttgttggagaaggcagtgatcgatttcttagtgaaacatctctctgaactcctgaagagccgcccagaagaagttctaacgcttccctattgcctgcttcaggaggtgctgaagagcgaccgcctgacctccctgagtgaagagcagatctggcaggtaagggcgctgtgcacg

SEQ ID NO: 19305 - DNA, 368 bp, Homo sapiens
  MAP TO AC012467.9; EXPRESSED IN BONE MARROW, SIGNAL = 0.69; EXPRESSED IN PLACENTA, SIGNAL = 0.54; EXPRESSED IN ADULT LIVER, SIGNAL = 0.65; SWISSPROT HIT: Q01668, EVALUE 5.00e-64; NT HIT: gi4502526, EVALUE 0.00e+00; EST_HUMAN HIT: BE175413.1, EVALUE 0.00e+00
cttttcacactggaccttctctgaggctcccggtcatgcttgtgggaagaatgatgcccattttcagacacatgctcaaggttcccaatgctgggccgctttccatgggcagctttggacatattggcattattgagattggcatttgttgaggtgggaacttgctttcctatggaattatggttatgatggttatgacacaccgaatttcctgctggaggaaacagcggtttctcagtatcacttgcaggtggaattgaaggcctttggacatgcaggggacggtgggtggtattggtctgctgaagggaatctctcctatcactattaacatgattgacatggtttccaagcagggcaccatttct

SEQ ID NO: 19306 - DNA, 252 bp, Homo sapiens
  MAP TO AL117187.3; EXPRESSED IN HEART, SIGNAL = 1.2; EXPRESSED IN ADULT LIVER, SIGNAL = 0.92; EXPRESSED IN FETAL LIVER, SIGNAL = 0.94; EST_HUMAN HIT: AW971153.1, EVALUE 3.40e-01; SWISSPROT HIT: P31695, EVALUE 1.10e-02
agggcgttgccaaattcctcagccagctgccaggtactgctaattccactgcctgaacagctggagaatccatctccatgaccaccactccggcgaaggccgccactgcctgacacctgtatcaccgaggccagcagggccgcctgacagcctgcctcactcctctgatcacttctccacaccacaactaaagggacaatctgatccctgtttaagtcctccaaaagctccttgatgtcctttcgataaggt

SEQ ID NO: 19307 - DNA, 175 bp, Homo sapiens
  MAP TO AC008772.5; EXPRESSED IN ADULT LIVER, SIGNAL = 0.39; EXPRESSED IN BONE MARROW, SIGNAL = 0.5; NT HIT: AF278739.1, EVALUE 1.50e-01; SWISSPROT HIT: Q62377, EVALUE 6.60e-01
atgaatgggattggaggcagtggggcacagagaacattccaagctgagaaggcaaggtcaggaaaggaagccgcgtgggaggagcagagtgtggagcacagagtctgccatcaacagaagagacaggaacacaggttgaagcaactgatggggcctgaattaggactctttcaac

SEQ ID NO: 19308 - DNA, 152 bp, Homo sapiens
  MAP TO AL049753.1; EXPRESSED IN ADULT LIVER, SIGNAL =  12; EXPRESSED IN HEART, SIGNAL =  12; EXPRESSED IN BONE MARROW, SIGNAL =  12; EXPRESSED IN BRAIN, SIGNAL =  11; EXPRESSED IN PLACENTA, SIGNAL =  15; EST_HUMAN HIT: BF089084.1, EVALUE 7.70e-01; NT HIT: AF067775.1, EVALUE 8.10e+00
ttcttccatcagtaatgacaacttccacaaaacagatcattggaaggtctgtgtatagttcgatgtagggatcaggatagaagcagcacaggctgaacagattggcaattgcactattttctaggacattacctccatacaaaggattcact

SEQ ID NO: 19309 - DNA, 189 bp, Homo sapiens
  MAP TO AF031075.1; EXPRESSED IN BONE MARROW, SIGNAL = 2.8; EXPRESSED IN PLACENTA, SIGNAL = 2.6; EXPRESSED IN ADULT LIVER, SIGNAL = 2.4; EXPRESSED IN BRAIN, SIGNAL = 2.1; EST_HUMAN HIT: BG938770.1, EVALUE 1.00e-100; SWISSPROT HIT: P51617, EVALUE 2.00e-33; NT HIT: gi14768302, EVALUE 1.00e-102
ctccttcagcctcttcacagcatacaccgtgttcctcatcaccgcccggtacacgcacccaaagccaccctccccgatcttgagctcctccgagaagttgtgggtgccccgggaaatctcacagaggggccagcaaaacggaaaggggcgggctccctgcaggagggacactgagctctctgggcctgg

SEQ ID NO: 19310 - DNA, 88 bp, Homo sapiens
  MAP TO AC006277.1; EXPRESSED IN BONE MARROW, SIGNAL = 1.3; EXPRESSED IN PLACENTA, SIGNAL = 1.7; EXPRESSED IN ADULT LIVER, SIGNAL = 1.5; EXPRESSED IN HEART, SIGNAL = 1.8; EXPRESSED IN BRAIN, SIGNAL = 1.5; NT HIT: Z31369.1, EVALUE 4.30e+00
gcccctgaactttggcccccccgagtctgagcaagcagtaagtgtggagtcccctgtcacctcccctgagctagctgaccacgaggag

SEQ ID NO: 19311 - DNA, 83 bp, Homo sapiens
  MAP TO AL109825.23; EXPRESSED IN BRAIN, SIGNAL = 1.6; EXPRESSED IN PLACENTA, SIGNAL = 2.9; EXPRESSED IN ADULT LIVER, SIGNAL =   2; EXPRESSED IN HEART, SIGNAL =   2; EST_HUMAN HIT: BF345903.1, EVALUE 1.50e+00; NT HIT: gi16160051, EVALUE 1.00e+00
ctttggtgcatctcccccatggtcagtgccagcctagtcatggatctcgacctgatcagtggacttttctccataaactttcc

SEQ ID NO: 19312 - DNA, 314 bp, Homo sapiens
  MAP TO AL118556.2; EXPRESSED IN PLACENTA, SIGNAL = 2.6; EXPRESSED IN ADULT LIVER, SIGNAL =   2; NT HIT: AB010403.1, EVALUE 1.10e+00; EST_HUMAN HIT: BF917548.1, EVALUE 0.00e+00; SWISSPROT HIT: P04025, EVALUE 8.00e-09
gggaagattctgagatcacccaaacaatccagaagttacataaggtacagataggccagaacccctataacagccctgtgtggcctgtgaaaaagccaaatggcacttggaaaatgatggtagactaccatgagctaaatgaggtggtgctgcttgtatctgctgccgtacccaatattactcaactgccacagcaagtagtccttaagctgggaagtgtccgtgctatgattgacttggattatgccttttccagtattcctttagtggaagatttacaagaccagtttgccttcacttgggagggccaataa

SEQ ID NO: 19313 - DNA, 195 bp, Homo sapiens
  MAP TO AC003004.1; EXPRESSED IN ADULT LIVER, SIGNAL = 1.3; EXPRESSED IN BONE MARROW, SIGNAL = 1.4; NT HIT: D55649.1, EVALUE 6.00e-57; EST_HUMAN HIT: BI910195.1, EVALUE 2.00e-69; SWISSPROT HIT: P49641, EVALUE 3.00e-17
cttgccttggcttgtggtgcagttgaagcccaagttcttggcctccaggccgcagtcaaaacccttgcggtgtaagatgagtgcggtctccgccgagggtagggtgtcctcctggatgacagacagtgcccagggaagtgggcgcagggctttcagagatcggagatgcagcagcgcctctgcccagaggcagtg

SEQ ID NO: 19314 - DNA, 75 bp, Homo sapiens
  MAP TO AC005947.1; EXPRESSED IN HELA, SIGNAL = 0.71; EXPRESSED IN FETAL LIVER, SIGNAL = 0.49; EXPRESSED IN BRAIN, SIGNAL = 0.7; EXPRESSED IN ADULT LIVER, SIGNAL = 0.66; SWISSPROT HIT: Q00887, EVALUE 4.20e-01; NT HIT: U04325.1, EVALUE 3.00e-25; EST_HUMAN HIT: BG623707.1, EVALUE 3.00e-32
tgtctctgttgtggcagtcatgaatgagactctgtcagatctccatggcagggacctgattgacagaaggcccag

SEQ ID NO: 19315 - DNA, 108 bp, Homo sapiens
  MAP TO AC012601.5; EXPRESSED IN BONE MARROW, SIGNAL = 0.52; EXPRESSED IN ADULT LIVER, SIGNAL = 0.56; SWISSPROT HIT: O75366, EVALUE 1.60e+00; NT HIT: AL163281.2, EVALUE 2.00e-09; EST_HUMAN HIT: BI464417.1, EVALUE 9.00e-12
gtccctcctacaacacatggagattatgcgagttacaattccagatgagattttgatgaggagacagccaaacagtatcaaaaggtatcatgtcttttgcaagaacat

SEQ ID NO: 19316 - DNA, 304 bp, Homo sapiens
  MAP TO AC006291.1; EXPRESSED IN ADULT LIVER, SIGNAL = 0.43; EXPRESSED IN FETAL LIVER, SIGNAL = 0.4; EST_HUMAN HIT: AL559045.1, EVALUE 1.00e-103; SWISSPROT HIT: P02680, EVALUE 7.10e-01; NT HIT: gi8923180, EVALUE 1.00e-103
tcacatgagcagccttttcagaaagtagtctctgtactgtagtaagccgatttttttcagcagcccaaagaagcaatttgcttgggtctttttccattgttttttcttgcaattgataccactcttcatttttttcatcttgctcttcgtcttcttcagaattgcctacccaaagactttgagcaccagtaggaataaggtgtccatgtgtttccaaaaattcaagttggttaaagtgttcggaaaaatccaagaaattcccttggtctggtattccatcatcatttcctttttctttttccat

SEQ ID NO: 19317 - DNA, 183 bp, Homo sapiens
  MAP TO AC008705.4; EXPRESSED IN HELA, SIGNAL = 0.58; EXPRESSED IN ADULT LIVER, SIGNAL = 0.66; EST_HUMAN HIT: BE890342.1, EVALUE 2.40e-01; SWISSPROT HIT: P16230, EVALUE 1.90e+00
tggaagtgcagaggccggaaagtacgaggtgtagaagagggagctatgagaaagagcagatgggaagatggggacggaacagaagaaagctattatgtcaagaagaaagtgacgggagaaggggggcctgaagagtcaaatgacatcaacgatgaagggcaaaaatggcataaagatcgatga

SEQ ID NO: 19318 - DNA, 178 bp, Homo sapiens
  MAP TO AC008455.5; EXPRESSED IN PLACENTA, SIGNAL = 0.39; EXPRESSED IN ADULT LIVER, SIGNAL = 0.89; EST_HUMAN HIT: BF944542.1, EVALUE 8.00e-23; SWISSPROT HIT: P03371, EVALUE 4.40e-02; NT HIT: AF003528.1, EVALUE 5.00e-23
tattacccgcagggacccactaacaaaatttttgctttctgttctcataaccttatgctctggtggcctagggatctcagttcctaagggaagaatgctcccaccaggagacacaaaaatgattccattgaactggaaattaagattgccacctggcccctttgagcttctcatgact

SEQ ID NO: 19319 - DNA, 196 bp, Homo sapiens
  MAP TO AC007207.22; EXPRESSED IN PLACENTA, SIGNAL = 1.9; EXPRESSED IN ADULT LIVER, SIGNAL = 2.7; EST_HUMAN HIT: BI835093.1, EVALUE 1.00e-101; SWISSPROT HIT: O06167, EVALUE 1.90e+00; NT HIT: AF198490.1, EVALUE 7.00e-78
agacaaaggagacacgttttatccgtggacccaaaactccggcgccagtcacggactgggaaggcagccttcccttggtgtttaatcagtgcagggacgcctctctgattatacacccacgtttcaagggtgtcagaccacgcagggacgcctgccttggtccttcaacctcagcggcaagtcccgcttttctggg

SEQ ID NO: 19320 - DNA, 104 bp, Homo sapiens
  MAP TO AF045450.1; EXPRESSED IN PLACENTA, SIGNAL = 2.5; EXPRESSED IN HEART, SIGNAL = 1.5; EXPRESSED IN ADULT LIVER, SIGNAL = 1.5; EXPRESSED IN BONE MARROW, SIGNAL = 1.2; NT HIT: AL163280.2, EVALUE 6.00e-52; EST_HUMAN HIT: BF591249.1, EVALUE 1.00e-26; SWISSPROT HIT: O95838, EVALUE 6.10e+00
atgggcgcctcactggatcaggagcacagcagatactctgccggatctggaggaatggaagtcagcggcgggtctgcgatggtggcaaacagcagtggtggacg

SEQ ID NO: 19321 - DNA, 110 bp, Homo sapiens
  MAP TO AC010163.7; EXPRESSED IN PLACENTA, SIGNAL = 0.39; EXPRESSED IN ADULT LIVER, SIGNAL = 0.49; EXPRESSED IN LUNG, SIGNAL = 0.61; EXPRESSED IN FETAL LIVER, SIGNAL = 0.53; EXPRESSED IN BRAIN, SIGNAL = 0.7; NT HIT: AF013987.1, EVALUE 3.60e-01; SWISSPROT HIT: P37714, EVALUE 7.90e+00
gtgctccacatacatcacccacacccactgcttggaacacagcatgtttgccctgctggttcccttccaagatgacaaccataaactctgcagtctgaaggagaccctct

SEQ ID NO: 19322 - DNA, 125 bp, Homo sapiens
  MAP TO AC010219.4; EXPRESSED IN BONE MARROW, SIGNAL = 1.2; EXPRESSED IN ADULT LIVER, SIGNAL = 1.2; EXPRESSED IN PLACENTA, SIGNAL = 1.1; EXPRESSED IN HEART, SIGNAL = 1.6; NT HIT: AL163283.2, EVALUE 1.00e-16; EST_HUMAN HIT: AA172302.1, EVALUE 3.00e-15
ttgttctcttgttcctgcttttgccatgtaatgtgcctgctcctgctttgcatttcaccatgattgtaagcttcctgaggccctcaccagaagctgagcagatgttggtgtcatgactatacagc

SEQ ID NO: 19323 - DNA, 210 bp, Homo sapiens
  MAP TO AC009007.4; EXPRESSED IN ADULT LIVER, SIGNAL = 2.4; EXPRESSED IN HEART, SIGNAL = 3.3; EXPRESSED IN FETAL LIVER, SIGNAL = 2.7; EXPRESSED IN PLACENTA, SIGNAL = 1.6; NT HIT: AF151074.1, EVALUE 1.00e-115; EST_HUMAN HIT: BG180936.1, EVALUE 1.00e-114; SWISSPROT HIT: P14612, EVALUE 3.20e+00
cagcgtccagaggacatagatggtgaagagggcgatggtgagggcaatgagacccacggcctccagctggctgtggagccggaggtggtcctgggccccgcgcaggcacaaccagcctgagatggcggccagcggtgtgatgaacaggaaacacaccatgtcgcagcacagtgtccgcttctccgtccgcggccccgggtccttcagcca

SEQ ID NO: 19324 - DNA, 199 bp, Homo sapiens
  MAP TO AL121868.11; EXPRESSED IN ADULT LIVER, SIGNAL = 0.81; EXPRESSED IN BRAIN, SIGNAL = 0.74; EXPRESSED IN HELA, SIGNAL = 1.2
aagactggtgtcccagctcaatatcccagtcaggctgagaagggatagattctccttttctctctgccttttgttccttggtcattgttgtcgtcatctttgttgtcatcatctccattgtggctgcctcctccttctcttcctctgtctctctgtttctgtgtctgagtctgtccctctctcttactctcctcactcc

SEQ ID NO: 19325 - DNA, 162 bp, Homo sapiens
  MAP TO AC008509.5; EXPRESSED IN PLACENTA, SIGNAL = 0.39; EXPRESSED IN ADULT LIVER, SIGNAL = 0.65; EXPRESSED IN HELA, SIGNAL = 0.46; SWISSPROT HIT: P38888, EVALUE 4.40e+00; EST_HUMAN HIT: BE674849.1, EVALUE 4.00e-86; NT HIT: gi14734568, EVALUE 3.00e-86
gtttatacagtgggtccagattatgcccatgctgaagctcgaaaatctccagcacttgatggcaaggtggaacgagacagtgaaggaaaagaagtaagataccctgttattctcaatgcacgagagaaattaattgcttggaaagtctgccttgcttttaag

SEQ ID NO: 19326 - DNA, 270 bp, Homo sapiens
  MAP TO AL118558.2; EXPRESSED IN LUNG, SIGNAL = 8.6; EXPRESSED IN BONE MARROW, SIGNAL = 4.6; EXPRESSED IN PLACENTA, SIGNAL = 4.3; EXPRESSED IN ADULT LIVER, SIGNAL = 4.4; SWISSPROT HIT: Q9JHU4, EVALUE 1.00e-39; EST_HUMAN HIT: BF947324.1, EVALUE 1.00e-130; NT HIT: gi9506548, EVALUE 6.00e-73
tcttaacgctatcatctcattctcagcctctgcccccattacttgtgagctgctgaacaaacaagtcaaggtgagcccggacatggccatcttcatcaccatgaaccctgcgtacgcgggccggtctaaccttcctgacaacttgaagaagctgttccggagcttggccatgaccaagcccgaccggcagttaatcgcccaggtcatgctgtactcacagggtttccgcactgctgaagtgcttgccaacaaaatcgtcccgttttttaa

SEQ ID NO: 19327 - DNA, 369 bp, Homo sapiens
  MAP TO AL109767.3; EXPRESSED IN ADULT LIVER, SIGNAL = 3.3; EXPRESSED IN FETAL LIVER, SIGNAL = 2.7; EXPRESSED IN LUNG, SIGNAL = 2.5; EXPRESSED IN BRAIN, SIGNAL =   3; EXPRESSED IN BONE MARROW, SIGNAL = 3.4; EXPRESSED IN PLACENTA, SIGNAL = 2.5; EXPRESSED IN HEART, SIGNAL = 1.5; SWISSPROT HIT: Q01642, EVALUE 5.80e-01; EST_HUMAN HIT: AW163793.1, EVALUE 9.00e-12; NT HIT: gi14754516, EVALUE 0.00e+00
cagaggctgaccatgtggaggccgccatcctcgaagaagacgagggtctggagatagaggagccaagtggcctggggctgatggtgggtggccccgaccctgacctgctcacctgtggccagtgtcaaatgaacttccccttgggggacatcctggtttttatagagcacaaaaggaagcagtgtggcggcagcttgggtgcctgctatgacaaggccctggacaaggacagcccgccaccctcctcacgctccgagctcaggaaagtgtccgagccggtggagatcgggatccaagtcacccccgacgaagatgaccacctgctctcacccacgaaaggcatctgtcccaagcaggagaacattgcag

SEQ ID NO: 19328 - DNA, 256 bp, Homo sapiens
  MAP TO AC010271.5; EXPRESSED IN PLACENTA, SIGNAL = 1.6; EXPRESSED IN ADULT LIVER, SIGNAL = 1.6; EXPRESSED IN HEART, SIGNAL =   2; NT HIT: gi14787060, EVALUE 0.00e+00; SWISSPROT HIT: Q63425, EVALUE 2.00e-32; EST_HUMAN HIT: AA069154.1, EVALUE 1.40e+00
gggaccagctgctgagtgcccgagtgttcttcgagaacttcaagtacgaggacgcactacgcctgctgcaatgcgccgagccttacaaagtctccttctgcctgaagcgcactgtgcccaccggggacctggctctgcggcccgggaccgtgtctggctacgagatcaagggcccgcgggccaaggtggccaagctggtacgcgtgcttagcccggccccggccctggactgccccagcgatccggtctctgcgcc

SEQ ID NO: 19329 - DNA, 121 bp, Homo sapiens
  MAP TO AC018427.3; EXPRESSED IN BONE MARROW, SIGNAL = 2.4; EXPRESSED IN PLACENTA, SIGNAL = 2.5; EXPRESSED IN ADULT LIVER, SIGNAL = 2.5; EXPRESSED IN HEART, SIGNAL =  11; EXPRESSED IN BRAIN, SIGNAL = 3.3; EXPRESSED IN LUNG, SIGNAL = 4.1; EXPRESSED IN FETAL LIVER, SIGNAL = 2.2; NT HIT: gi9628002, EVALUE 6.20e+00; SWISSPROT HIT: O43516, EVALUE 3.50e+00; EST_HUMAN HIT: BE502860.1, EVALUE 1.50e-01
gtgaatggcctgctcctcacgtctcttagcaaaggagagcaggcagaagagagcaccttcgtctccctgccaccagccctccaggcccctctcctcggctcccggcctcccgctcctatgg

SEQ ID NO: 19330 - DNA, 284 bp, Homo sapiens
  MAP TO AC009123.6; EXPRESSED IN PLACENTA, SIGNAL = 1.1; EXPRESSED IN ADULT LIVER, SIGNAL =   1; EXPRESSED IN HEART, SIGNAL =   1; EXPRESSED IN BRAIN, SIGNAL = 1.3; NT HIT: gi5032144, EVALUE 0.00e+00; SWISSPROT HIT: Q22306, EVALUE 4.80e-01; EST_HUMAN HIT: BI767277.1, EVALUE 1.00e-127
cagaggcgagcccgctggaatctcctgtctcgcaagaaaggatacgcagcctgtcctgggcgcctccagcagggtagaccagctgcccgaactggggtgtccttccaggaacccaggccagcgcgcccccagtgcaggcctcatccagaagcagctgctcccaccgcagcaccagctcctcgtgcagcagctctgccaagtggctcgccaccgacgtgcccaggatggggcccccgaggatagagaagcggcgctgtcggttgctgaggtaagcccagggacac

SEQ ID NO: 19331 - DNA, 152 bp, Homo sapiens
  MAP TO AC008427.5; EXPRESSED IN LUNG, SIGNAL = 0.87; EXPRESSED IN BRAIN, SIGNAL = 3.3; EXPRESSED IN HELA, SIGNAL = 2.4; EXPRESSED IN HEART, SIGNAL = 2.8; EXPRESSED IN ADULT LIVER, SIGNAL = 2.3; NT HIT: gi14726710, EVALUE 5.00e-78; EST_HUMAN HIT: AI221148.1, EVALUE 8.00e-78; SWISSPROT HIT: P16499, EVALUE 6.00e-13
gaattctcccgtttccacgaggagatcaccccaatgttggacgggatcaccaacaatcgcaaggagtggaaggcgcttgctgatgagtacgatgccaagatgaaggtgcaggaggagaagaagcagaaacagcagtcggccaagtcaggttt

SEQ ID NO: 19332 - DNA, 133 bp, Homo sapiens
  MAP TO AC012398.4; EXPRESSED IN LUNG, SIGNAL = 1.2; EXPRESSED IN BRAIN, SIGNAL = 0.73; EXPRESSED IN FETAL LIVER, SIGNAL = 0.44; EXPRESSED IN ADULT LIVER, SIGNAL = 0.73; EST_HUMAN HIT: R01053.1, EVALUE 7.00e-04; NT HIT: AL163201.2, EVALUE 9.00e-55; SWISSPROT HIT: P08970, EVALUE 4.50e+00
actagcttagccctgtaagggtcaggataatcaatatcactgtcttccatctcgaaatcttgtccaagtgaaaggtcttcagggtcttcagtggcaataacatacatgcagctgtcattttctatgataacaa

SEQ ID NO: 19333 - DNA, 167 bp, Homo sapiens
  MAP TO AC005797.1; EXPRESSED IN ADULT LIVER, SIGNAL = 1.1; EXPRESSED IN FETAL LIVER, SIGNAL = 0.72; EXPRESSED IN PLACENTA, SIGNAL = 1.3; SWISSPROT HIT: P50185, EVALUE 9.80e+00; EST_HUMAN HIT: BF878207.1, EVALUE 7.00e-17; NT HIT: gi16159625, EVALUE 2.30e+00
ctccctgaccctcactactgtgtgctctggtctggccccagctgccaggccattagtattggtctaagaaagcaagaccaggacgggcagctgagaggaaagtcagaggccaccaagcatgaaaagagagagatgaggctgtcattgctcaaagtcacccactctgg

SEQ ID NO: 19334 - DNA, 172 bp, Homo sapiens
  MAP TO AC008518.3; EXPRESSED IN PLACENTA, SIGNAL = 3.1; EXPRESSED IN ADULT LIVER, SIGNAL = 2.5; EXPRESSED IN BRAIN, SIGNAL = 2.1; EXPRESSED IN FETAL LIVER, SIGNAL = 2.5; SWISSPROT HIT: Q92610, EVALUE 2.20e-01; NT HIT: AF039954.1, EVALUE 1.50e-01
acaatactctgtaacttcccaggactgcctcctagaggtgctcttgcttctggcactggtgtccatgggacaccactgcagttctctgctcctggaagctcagtgtgtcttggccactctccactactatttccagctgcttcctcatggttttctccacaaattgaagtca

SEQ ID NO: 19335 - DNA, 231 bp, Homo sapiens
  MAP TO AC009087.4; EXPRESSED IN HELA, SIGNAL = 0.46; EXPRESSED IN ADULT LIVER, SIGNAL = 0.77; NT HIT: AB011651.1, EVALUE 3.30e+00; SWISSPROT HIT: P16720, EVALUE 3.10e-01; EST_HUMAN HIT: BG701795.1, EVALUE 1.20e+00
gttgggccacagagcacaattctgaggacacagtgtctctgtaaccacctgaccttctttgccagcgacttctttgtcgtgcccaggaccgtgaatgttgaagacacgatcaaactgttccttcgcgtgaccaacaatcctgttggggtgtcactgctggccagccttttaggattttatgtgatcacagttgtgtgggctcggaaaaaggatcaagcagatatgcagaag

SEQ ID NO: 19336 - DNA, 79 bp, Homo sapiens
  MAP TO AC007343.4; EXPRESSED IN LUNG, SIGNAL = 0.54; EXPRESSED IN FETAL LIVER, SIGNAL = 0.78; EXPRESSED IN PLACENTA, SIGNAL =   1; EXPRESSED IN BONE MARROW, SIGNAL = 0.61; EXPRESSED IN ADULT LIVER, SIGNAL = 1.2; NT HIT: AJ245708.1, EVALUE 3.70e+00; EST_HUMAN HIT: BF748072.1, EVALUE 1.40e+00
catgtagctatgtcccttgtaaacgcagagcctccttctggggccttcaccactgtcgtctaccacatcgaccttccag

SEQ ID NO: 19337 - DNA, 114 bp, Homo sapiens
  MAP TO AC010598.5; EXPRESSED IN ADULT LIVER, SIGNAL = 0.65; EXPRESSED IN LUNG, SIGNAL = 0.77; EXPRESSED IN BRAIN, SIGNAL = 0.42; NT HIT: AJ315644.1, EVALUE 1.50e+00; SWISSPROT HIT: P55978, EVALUE 7.90e+00; EST_HUMAN HIT: BI826707.1, EVALUE 2.00e-03
gagttaaaaaatgttagtgaaaccgtgcacaataaggataaaggtgactccagcgtgcttgcactagagttagatagtgctggtgaaatatctcatgctgttattggctcatga

SEQ ID NO: 19338 - DNA, 186 bp, Homo sapiens
  MAP TO AC011088.8; EXPRESSED IN FETAL LIVER, SIGNAL = 2.2; EXPRESSED IN HELA, SIGNAL = 4.8; EXPRESSED IN BRAIN, SIGNAL = 2.3; EXPRESSED IN PLACENTA, SIGNAL = 1.7; EXPRESSED IN HEART, SIGNAL = 2.1; EXPRESSED IN ADULT LIVER, SIGNAL = 2.7; SWISSPROT HIT: Q02592, EVALUE 3.30e+00; EST_HUMAN HIT: AW604885.1, EVALUE 9.60e-01
ctaccagttaaaggtgtttggcgatatttttatattgatcagagtttgtttcccagatctttgcaaaaccatacagatgattggtgcctcctcattccaccagttcaccttggaaaagagatacttataaagactgctggaatcaatcatctttcccaagcaaggtatattgttgcacaaattggt

SEQ ID NO: 19339 - DNA, 112 bp, Homo sapiens
  MAP TO AL117190.3; EXPRESSED IN BONE MARROW, SIGNAL = 4.4; EXPRESSED IN PLACENTA, SIGNAL = 3.9; EXPRESSED IN ADULT LIVER, SIGNAL = 3.9; EXPRESSED IN BRAIN, SIGNAL = 3.5; NT HIT: AF294352.1, EVALUE 9.20e-02; SWISSPROT HIT: P54435, EVALUE 7.90e+00; EST_HUMAN HIT: BE299712.1, EVALUE 3.40e-02
cttcctctcccaggtcctcagtttccccatgtctgcagggagggtttcggtggtggtcttctcactgtgctcctgtagctctggggttcctaagaggtgcctgcgggggtcc

SEQ ID NO: 19340 - DNA, 242 bp, Homo sapiens
  MAP TO AC010320.7; EXPRESSED IN HELA, SIGNAL = 2.2; EXPRESSED IN BONE MARROW, SIGNAL = 1.6; EXPRESSED IN PLACENTA, SIGNAL =   2; EXPRESSED IN ADULT LIVER, SIGNAL = 1.5; EXPRESSED IN HEART, SIGNAL = 2.8; SWISSPROT HIT: P20768, EVALUE 1.80e+00; EST_HUMAN HIT: AA021398.1, EVALUE 7.00e-27; NT HIT: AF114156.1, EVALUE 7.00e-23
ggaaataggaaaagtgcaaggtcctaagggctctccagctatgacagcagagcataaaattctttgtattagggtctcttatttctgccaccgaaggtggtggtacaaatgtttctgcaattggaggaggctgtatagcccaatttttatcctccttctcctgttttttattttcagttggagctgtgggtagagcaacatattctttcagatttttagattcagcttgctgtcccacagaa

SEQ ID NO: 19341 - DNA, 309 bp, Homo sapiens
  MAP TO AC007559.3; EXPRESSED IN PLACENTA, SIGNAL = 1.4; EXPRESSED IN ADULT LIVER, SIGNAL = 1.2; EXPRESSED IN HEART, SIGNAL = 5.8; SWISSPROT HIT: P31695, EVALUE 3.00e-05; EST_HUMAN HIT: BI667180.1, EVALUE 1.00e-128; NT HIT: AB016243.1, EVALUE 7.20e-02
ctccacttgatcccatttcatttctacaactttctgccctgttttcggctgccaggtaggcagtgtcaccgttgcctgagagcgaggcaggattttgtcaggctcctgagtagcaggaacaggctgaagctgtcggggtgccatggattcggtccagccagtggctgggagactgggaagtgcctgttcacagttgggaccttcatagccttcattgcaaatgcagaggtagccatcgctgctgctgctgctgctgctgctgcagttgccatggtgacaagggttgctggcacaaggatctgcaacaag

SEQ ID NO: 19342 - DNA, 234 bp, Homo sapiens
  MAP TO AC024561.4; EXPRESSED IN ADULT LIVER, SIGNAL = 0.76; EXPRESSED IN FETAL LIVER, SIGNAL = 2.3; EXPRESSED IN BRAIN, SIGNAL = 0.52; SWISSPROT HIT: Q60980, EVALUE 2.00e-05; EST_HUMAN HIT: BI090772.1, EVALUE 8.00e-36; NT HIT: AF285837.1, EVALUE 5.00e-36
gctggcagccttttgacgtgccacttgtccatgccgcagatgatggcagctgccctctcctggcacagaatatggagcctggggatcttgctggtcatccagccggtggtggtgcagcccatcccctttatgtacatgagtcacctccaggagcctctcatggtctccttgaggaggaggaggaggaagaggtcttccatggaggagatgaaaaattccagtagtagcatgcaa

SEQ ID NO: 19343 - DNA, 151 bp, Homo sapiens
  MAP TO AC010339.6; EXPRESSED IN ADULT LIVER, SIGNAL = 0.46; EXPRESSED IN FETAL LIVER, SIGNAL =   1; EXPRESSED IN HELA, SIGNAL = 0.61; EXPRESSED IN PLACENTA, SIGNAL = 0.69; SWISSPROT HIT: P76174, EVALUE 4.50e+00; NT HIT: AF034077.2, EVALUE 1.30e-01
atgagggcaccttatggccccttgattcggagggactcagtgtgtgaccttggcaagcacctgatcctccttgggcctcggtttttccgcgaatgcgacgggaataagaacagtgtctgctgcaggggtctcatggggtatctagtggaag

SEQ ID NO: 19344 - DNA, 209 bp, Homo sapiens
  MAP TO AC009265.5; EXPRESSED IN ADULT LIVER, SIGNAL = 0.99; EXPRESSED IN HEART, SIGNAL = 0.97; EXPRESSED IN PLACENTA, SIGNAL = 1.3; NT HIT: gi12723473, EVALUE 1.00e-114; SWISSPROT HIT: Q01459, EVALUE 1.00e-34; EST_HUMAN HIT: BG757157.1, EVALUE 1.00e-114
ctgtgatccctcaatttcacgatggaaagagtctgtagtttctttgactaaagcagttaatgcatcatattcaggtgataaacaattaacttcttgctctatatctatattaattccatccatatattgtgttttggccaaattaagtttttgagctatccaggatgctctgaaagcaggatcaatgatatcctttaaggatacatctc

SEQ ID NO: 19345 - DNA, 151 bp, Homo sapiens
  MAP TO AL117259.3; EXPRESSED IN PLACENTA, SIGNAL = 3.2; EXPRESSED IN ADULT LIVER, SIGNAL = 3.1; EXPRESSED IN HELA, SIGNAL = 1.9; EXPRESSED IN BRAIN, SIGNAL =   3; NT HIT: AE008685.1, EVALUE 9.00e-06; SWISSPROT HIT: P08548, EVALUE 5.00e-09; EST_HUMAN HIT: AW976597.1, EVALUE 8.00e-07
ctactgtgatgttatctgtaggttttttgtagatgttccctatcaagttgaggaagttctctattcctagcttactgatggtttttatcatgaataggtgttgggttttgtcaaatgtcttttcttcatgtattaccatgatcatgtgatt

SEQ ID NO: 19346 - DNA, 218 bp, Homo sapiens
  MAP TO AC016943.7; EXPRESSED IN PLACENTA, SIGNAL = 0.99; EXPRESSED IN ADULT LIVER, SIGNAL = 0.7; EXPRESSED IN LUNG, SIGNAL = 0.86; EXPRESSED IN HELA, SIGNAL = 0.52
aagaagaagaagaagaagaagaagaagaagaagaagaagaagaagaggaagaggaagaggaagaggaaggaggaggaggaggaggaggagaaggagaagaagaaaagaagaagaagaagaagaagaagaagaagaagaagaagaagaagaagaagaagaagaagaagaagaagaagaagaagaagaaggagaagaagaagaaagaagaaagtcataaa

SEQ ID NO: 19347 - DNA, 119 bp, Homo sapiens
  MAP TO AC009123.6; EXPRESSED IN FETAL LIVER, SIGNAL = 1.7; EXPRESSED IN ADULT LIVER, SIGNAL = 1.1; EXPRESSED IN HEART, SIGNAL = 1.5; NT HIT: gi16164368, EVALUE 2.50e-02; EST_HUMAN HIT: BF741040.1, EVALUE 1.00e-60
atgggggaggatggcaggtcggattgccgagccccttcctcctccctggtcctaagtgacagcggggagagctgtaagccgaggaagaagggccgtccatcctgcggcactcagcagag

SEQ ID NO: 19348 - DNA, 167 bp, Homo sapiens
  MAP TO AC001456.1; EXPRESSED IN ADULT LIVER, SIGNAL = 0.47; EXPRESSED IN HELA, SIGNAL = 0.65; NT HIT: gi14743552, EVALUE 2.30e+00; SWISSPROT HIT: Q9TV36, EVALUE 9.80e+00; EST_HUMAN HIT: BF953100.1, EVALUE 8.50e-01
atgggtctgtttggaatttctaagaggggcaattgttcctctcccccaggtgactttgctagggaagctttctcaggatttcccttaatcttcaccttgaacacgtgctgggattcagggaggacaagctgcagctcccagaagctacacattctgatgccagccat

SEQ ID NO: 19349 - DNA, 257 bp, Homo sapiens
  MAP TO AC010615.5; EXPRESSED IN HEART, SIGNAL = 1.9; EXPRESSED IN ADULT LIVER, SIGNAL = 1.4; EXPRESSED IN LUNG, SIGNAL = 2.2; EXPRESSED IN FETAL LIVER, SIGNAL = 0.95; EXPRESSED IN BRAIN, SIGNAL = 1.4; EXPRESSED IN PLACENTA, SIGNAL = 1.1; NT HIT: AJ278581.1, EVALUE 2.00e-75; SWISSPROT HIT: Q9PQW0, EVALUE 3.40e+00; EST_HUMAN HIT: AA663213.1, EVALUE 4.00e-78
atcaaggcagaccttgggaagctttcagatgatcttgataggtatacagatgtcctacagggtcgagggcaaaccttctatctcacttggagagatgtcatgctagtgttagatcaaaccctggcctttaatgaaaagaatgtggctttagctgcagcccaagagtttggagatacctggtatcttagtccagtaaatgatagaatgacagttgaagaaagggacaaattccttactagtcagcaagccgtatgtca

SEQ ID NO: 19350 - DNA, 178 bp, Homo sapiens
  MAP TO AC009265.5; EXPRESSED IN PLACENTA, SIGNAL = 0.95; EXPRESSED IN ADULT LIVER, SIGNAL = 1.5; EXPRESSED IN BRAIN, SIGNAL = 1.2; EST_HUMAN HIT: AU133150.1, EVALUE 1.00e-95; SWISSPROT HIT: P03654, EVALUE 1.10e+00; NT HIT: gi14723825, EVALUE 8.00e-96
agttcctgtactatcatctactctttctctaggtttcttcttttggggagaaagaagagaaatcatttcctttttcatttgttgaagaaccttcttaagttctgcattttccattaggatttgtttctgacgatattcataatcattcaagagaattttatacatttcatcttcattc

SEQ ID NO: 19351 - DNA, 321 bp, Homo sapiens
  MAP TO AC010643.5; EXPRESSED IN BONE MARROW, SIGNAL = 0.91; EXPRESSED IN PLACENTA, SIGNAL = 0.77; EXPRESSED IN ADULT LIVER, SIGNAL = 1.2; EXPRESSED IN HEART, SIGNAL = 1.5; EXPRESSED IN BRAIN, SIGNAL = 0.81; NT HIT: gi7657553, EVALUE 0.00e+00; SWISSPROT HIT: Q9UK85, EVALUE 5.00e-56; EST_HUMAN HIT: AI028601.1, EVALUE 0.00e+00
gtacccaggatggaggagaaggaggccctggtacccatccagaaggccacggacagcttccacacagaactccatccccgggtggccttctggatcattaagctgccacggcggaggtcccaccaggatgccctggagggcggccactggctcagcgagaagcgacaccgcctgcaggccatccgggatggactccgcaaggggacccacaaggacgtcctagaagaggggaccgagagctcctcccactccaggctgtccccccgaaagacccacttactgtacatcctcaggccctctcggcagctgtaggggtgggga

SEQ ID NO: 19352 - DNA, 267 bp, Homo sapiens
  MAP TO AC010327.5; EXPRESSED IN FETAL LIVER, SIGNAL = 1.5; EXPRESSED IN BONE MARROW, SIGNAL = 0.89; EXPRESSED IN PLACENTA, SIGNAL = 0.97; EXPRESSED IN ADULT LIVER, SIGNAL = 1.3; EXPRESSED IN HELA, SIGNAL = 0.59; NT HIT: gi4506312, EVALUE 0.00e+00; SWISSPROT HIT: P54755, EVALUE 2.00e-04; EST_HUMAN HIT: AI672964.1, EVALUE 4.00e-75
ctcccaacccagtgaggaacctgagagtggaggctcagaccaacagctccatcgccctgacctgggaggtccccgacggcccagacccacagaactccacctacggggttgagtacactggagatggtggcagagcagggactcgaagcacagcacacactaacatcaccgtggatggacttgaacccgggtgtttgtatgcgttttccatgtgggtgggaaagaatggaatcaacagctcccgggagactcgaaatgccaccacag

SEQ ID NO: 19353 - DNA, 91 bp, Homo sapiens
  MAP TO AC010371.5; EXPRESSED IN ADULT LIVER, SIGNAL =   2; EXPRESSED IN HELA, SIGNAL = 1.6; EXPRESSED IN BRAIN, SIGNAL = 1.6; EXPRESSED IN BONE MARROW, SIGNAL = 1.3; EXPRESSED IN PLACENTA, SIGNAL = 2.6; NT HIT: AL163203.2, EVALUE 4.40e+00
ctttcattaatttttgattccgattttatatgtgtggtagatttcttagtttctaggagctgctgtaagaaatcagcatgaacttggttgc

SEQ ID NO: 19354 - DNA, 455 bp, Homo sapiens
  MAP TO AC005329.1; EXPRESSED IN ADULT LIVER, SIGNAL = 0.81; EXPRESSED IN BRAIN, SIGNAL = 1.1; NT HIT: gi14764834, EVALUE 0.00e+00; SWISSPROT HIT: P34468, EVALUE 6.10e-01; EST_HUMAN HIT: BF528066.1, EVALUE 0.00e+00
gccctccccagccgacgacagccaccggagaggagatcggaacacgattgtctcagatgcagggcgctgtgcgggacgaagccgcaaggactctcgtatcgggcccttgggactcgggaggtgccagaggcggcggctgctctggacctcggtgttcactgacctttgtttcacttgcctctgctcgactccgagagcaggaaacccggccgtggcctggcagctccgcctcccatgcccgcacgctggggtctgtcttgtctggagcagtggggcacaccccggaggaggcgggggtcagggctgtcggccttggccccctgctggtcgctgtttcggggactcggggcggccagtaccaccgcctgaggcggggctcagcagcgttgcatgtacgggcctcgtactgcctcatggaaaatcctccggagccgccctccattgtgggttcctga

SEQ ID NO: 19355 - DNA, 154 bp, Homo sapiens
  MAP TO AC008993.3; EXPRESSED IN ADULT LIVER, SIGNAL =   1; NT HIT: gi14768786, EVALUE 1.00e-81; SWISSPROT HIT: P34474, EVALUE 5.10e-01; EST_HUMAN HIT: BG477079.1, EVALUE 2.00e-81
gcaccatgactcctgtgaggatgcagcactccctggcaggtcagacctatgccgtgcccttcatccagccagacctgcggcgagaggaggccgtccagcagatggcggatgccctgcagtacctgcagaaggtctctggagacatcttcagcag

SEQ ID NO: 19356 - DNA, 122 bp, Homo sapiens
  MAP TO AC000077.2; EXPRESSED IN ADULT LIVER, SIGNAL = 0.84; SWISSPROT HIT: Q01670, EVALUE 1.20e+00; EST_HUMAN HIT: BG335257.1, EVALUE 9.30e+00
ctgggacctggtgttcatggggtgggggccgatgtccaccttgggcctgttgttcatctgtggcctggtattcacctgggccctgagagtcaacctggtgcctgatagccacctggggccta

SEQ ID NO: 19357 - DNA, 190 bp, Homo sapiens
  MAP TO AL031186.8; EXPRESSED IN ADULT LIVER, SIGNAL = 2.3; EXPRESSED IN LUNG, SIGNAL = 0.96; EXPRESSED IN FETAL LIVER, SIGNAL = 3.2; EXPRESSED IN PLACENTA, SIGNAL = 2.6; NT HIT: AF223563.3, EVALUE 2.60e+00; SWISSPROT HIT: P17589, EVALUE 4.90e-01
cttcctgcccctcttctacctgcacttctgcccctgcttgctgcttgcctgggaggggacccactgggctgggggctgcatgaagctttgggggctgggggaacagctctgttggggacaggtgggaatgaggttcagtgctggcaaggtccccgagggctcctatgtacacttcaccaaccaactccct

SEQ ID NO: 19358 - DNA, 167 bp, Homo sapiens
  MAP TO AL080273.10; EXPRESSED IN BRAIN, SIGNAL = 1.6; EXPRESSED IN BONE MARROW, SIGNAL = 1.2; EXPRESSED IN ADULT LIVER, SIGNAL = 1.6; EXPRESSED IN PLACENTA, SIGNAL = 1.5; NT HIT: AF323786.1, EVALUE 4.00e-05; EST_HUMAN HIT: BE787562.1, EVALUE 6.00e-05; SWISSPROT HIT: P31047, EVALUE 4.40e+00
gcctctctttgaccaccaggataccctttcttatgcatcagaagggcatcaccagcatagtcttggcttcagctctccactcctgcataaaatgtgtatgttcccctgcctctggaacctttattgttggtggtactgctgctgctgctgatgatgatgatatttag

SEQ ID NO: 19359 - DNA, 179 bp, Homo sapiens
  MAP TO AC010203.13; EXPRESSED IN HEART, SIGNAL = 6.2; EXPRESSED IN BRAIN, SIGNAL =   5; EXPRESSED IN PLACENTA, SIGNAL = 5.9; EXPRESSED IN ADULT LIVER, SIGNAL = 4.3; NT HIT: AL163282.2, EVALUE 2.00e-44; EST_HUMAN HIT: BF203746.1, EVALUE 1.00e-52; SWISSPROT HIT: P44012, EVALUE 1.50e+00
gaaatttcttccacaagataacctaaatcatctctcaagttcagagttccacagatctctagggcaggggcaaaatgctgcccgtctgctaaaacataacaagagtcacctttcttccagttcccaacaagttcctcatctccatctgagaccacctcagcccggaccttactgttcat

SEQ ID NO: 19360 - DNA, 455 bp, Homo sapiens
  MAP TO AC010506.6; EXPRESSED IN LUNG, SIGNAL = 1.1; EXPRESSED IN BONE MARROW, SIGNAL = 0.7; EXPRESSED IN PLACENTA, SIGNAL = 0.71; EXPRESSED IN ADULT LIVER, SIGNAL = 0.78; NT HIT: AF114156.1, EVALUE 1.00e-81; EST_HUMAN HIT: BG540272.1, EVALUE 7.00e-47; SWISSPROT HIT: P31622, EVALUE 2.00e-07
aaattccatgtcaggtatacactagcagacaaacaagtgcaagccaaatgctttacatcaaagggtagaaggtgcatagcaccaaatacagattctagcaatcctaaagtgaatgggctctgtattccattattaagtacactagctcttaattccttcaacaacttaaactctagtggggtgtgttgatgaataagctgctgtgggctatttgtatcgggccttatggagataggaaaagcacagggtcctaagagctctccagctatggcagcagagcataaaattctctctattggggtttctatttctgctaccgaaggaggcggtacagatgtttctgcaattggagggggcggtacaggccaatttttatactccctctcctgttttttattttcaactggtgctgtgggtgggacaacagattctttcagatttttagactcagaaca

SEQ ID NO: 19361 - DNA, 78 bp, Homo sapiens
  MAP TO AC000095.3; EXPRESSED IN ADULT LIVER, SIGNAL = 0.64; EXPRESSED IN LUNG, SIGNAL = 0.99; NT HIT: gi14776963, EVALUE 1.00e-36; EST_HUMAN HIT: BG913391.1, EVALUE 2.00e-36; SWISSPROT HIT: Q9Y2N3, EVALUE 2.50e-01
cccgcagtgcgcttttgcaccagagtgccaccttcttctccaggtccaggtcttcagcagtgaccccagaccccagct

SEQ ID NO: 19362 - DNA, 142 bp, Homo sapiens
  MAP TO AC008999.5; EXPRESSED IN PLACENTA, SIGNAL = 1.8; EXPRESSED IN ADULT LIVER, SIGNAL = 1.4; EXPRESSED IN HEART, SIGNAL = 1.6; EXPRESSED IN BRAIN, SIGNAL = 1.4; NT HIT: M59262.1, EVALUE 3.00e-61; EST_HUMAN HIT: BF747506.1, EVALUE 6.00e-60; SWISSPROT HIT: P06731, EVALUE 1.30e-01
ggccactgtcggcatcatgattggagtgctggttggggttgctctgatatagcagccctggtgtagtttcttcatttcaggaagactggtaggtataatggcctttcctcttgttctgtttcctgcagtgctgactgccatg

SEQ ID NO: 19363 - DNA, 88 bp, Homo sapiens
  MAP TO AC010077.1; EXPRESSED IN ADULT LIVER, SIGNAL = 0.77; EXPRESSED IN FETAL LIVER, SIGNAL = 1.1; EXPRESSED IN LUNG, SIGNAL = 0.56; EST_HUMAN HIT: AW503606.1, EVALUE 3.00e-42; SWISSPROT HIT: P26358, EVALUE 8.00e-11; NT HIT: gi14756621, EVALUE 2.00e-42
tttctcgtctccatcttcgtcctcgtcagcctgcacgcctgccctggcttctctgtccggctcctccttcagtttctgtttgggtgtt

SEQ ID NO: 19364 - DNA, 186 bp, Homo sapiens
  MAP TO AC010422.6; EXPRESSED IN LUNG, SIGNAL = 1.9; EXPRESSED IN FETAL LIVER, SIGNAL = 1.1; EXPRESSED IN HELA, SIGNAL = 0.63; EXPRESSED IN PLACENTA, SIGNAL = 0.96; EXPRESSED IN ADULT LIVER, SIGNAL =   1; NT HIT: gi10834967, EVALUE 1.00e-100; EST_HUMAN HIT: T16846.1, EVALUE 1.00e-98; SWISSPROT HIT: O00754, EVALUE 5.00e-22
gtggtaatatttcccagctcagacagccaggcgcaccctccggagctgctgttctcagcctcactgcccgccctgggcttcagcacctattcagtagcccaggtgcctcgctggaagccccaggcccgcgcaccacagcccatccccagaagatcctggtcccctgctttaaccatcgaaaatgag

SEQ ID NO: 19365 - DNA, 80 bp, Homo sapiens
  MAP TO AC009024.6; EXPRESSED IN ADULT LIVER, SIGNAL = 1.2; EXPRESSED IN BRAIN, SIGNAL = 1.4; EXPRESSED IN HELA, SIGNAL = 1.4; EXPRESSED IN BONE MARROW, SIGNAL = 0.46
ttaagtcttggctatgatactttctagtgggtagtcctgggtgaagtcactcaatccttctggagcctgtgctttcatgt

SEQ ID NO: 19366 - DNA, 181 bp, Homo sapiens
  MAP TO AC011471.5; EXPRESSED IN BONE MARROW, SIGNAL = 0.92; EXPRESSED IN PLACENTA, SIGNAL = 1.8; EXPRESSED IN HEART, SIGNAL = 1.6; EXPRESSED IN ADULT LIVER, SIGNAL = 1.1; EXPRESSED IN FETAL LIVER, SIGNAL = 2.1; EXPRESSED IN HELA, SIGNAL = 2.3; NT HIT: gi13633717, EVALUE 1.00e-97; EST_HUMAN HIT: BF748184.1, EVALUE 1.00e-36; SWISSPROT HIT: Q03111, EVALUE 1.00e-32
cgcgtctgggcttggggaagctgtcgtgcagccagaagaccaccttctccacgaagtgctggatgtcacattgctcggggccgcggacaaacaccatccagtcgtgagtgaacccctccgtggtgggcttcttgcgcagttgggcgcgatgccccagctctaacctcacctggacggtgca

SEQ ID NO: 19367 - DNA, 137 bp, Homo sapiens
  MAP TO AC010444.4; EXPRESSED IN BRAIN, SIGNAL = 1.7; EXPRESSED IN HELA, SIGNAL = 1.7; EXPRESSED IN PLACENTA, SIGNAL = 3.1; EXPRESSED IN HEART, SIGNAL = 2.2; EXPRESSED IN ADULT LIVER, SIGNAL = 2.2; EST_HUMAN HIT: AW794796.1, EVALUE 1.10e-02
cccatttgactgctgctaatttggacatggaagccagtgactttaccactgacagccagcaggacaggcttcatgggcatgtgacctgtgtagtaacccatggccccatccttgaaagcagcccatatctggtttaa

SEQ ID NO: 19368 - DNA, 277 bp, Homo sapiens
  MAP TO AL118557.2; EXPRESSED IN LUNG, SIGNAL = 0.66; EXPRESSED IN PLACENTA, SIGNAL =   2; EXPRESSED IN HEART, SIGNAL =   2; EXPRESSED IN ADULT LIVER, SIGNAL = 1.1; EXPRESSED IN BRAIN, SIGNAL =   1; EXPRESSED IN FETAL LIVER, SIGNAL = 1.6; NT HIT: AJ223500.1, EVALUE 1.00e-129; SWISSPROT HIT: Q14112, EVALUE 5.00e-28; EST_HUMAN HIT: N32450.1, EVALUE 1.00e-111
caccagtgccattctgcttcttgagccccaggcctaagctcacctggtgatggtccacagtgaggcggggtggagccaggtggagtctgggtaccaggaacttcatgaccatcagggtccacgcaccagcagaaaccagtgctgccatgacactgtaggggcaggaagttgccctgctcgtcgcattgggggatgtggaaccgggccccagggtaggcatactgggcctgggcatggcgctgctgttgttcacagggtgtcaggcttgaggtggagt

SEQ ID NO: 19369 - DNA, 121 bp, Homo sapiens
  MAP TO AC002055.2; EXPRESSED IN LUNG, SIGNAL = 0.72; EXPRESSED IN PLACENTA, SIGNAL = 0.95; EXPRESSED IN ADULT LIVER, SIGNAL = 0.93; NT HIT: gi14779806, EVALUE 5.00e-62; SWISSPROT HIT: Q40607, EVALUE 7.90e+00; EST_HUMAN HIT: BI829081.1, EVALUE 8.00e-62
agagcctacgactagatttgcatctttacgtcctgcgcggaggctgctacacacatgcagaagtcatgctggtggcctggacagtgaagggagagaagtggatttgggagacatttaggag

SEQ ID NO: 19370 - DNA, 266 bp, Homo sapiens
  MAP TO AC010513.5; EXPRESSED IN LUNG, SIGNAL = 3.1; EXPRESSED IN BRAIN, SIGNAL = 1.7; EXPRESSED IN BONE MARROW, SIGNAL = 1.3; EXPRESSED IN PLACENTA, SIGNAL = 0.96; EXPRESSED IN ADULT LIVER, SIGNAL = 2.1; NT HIT: gi14769146, EVALUE 0.00e+00; SWISSPROT HIT: P42226, EVALUE 1.60e+00; EST_HUMAN HIT: BE383485.1, EVALUE 0.00e+00
ggggggctgtcggggggctgttaggtgcctggatgacaagtggacagtttaagccggttcctcagatcctaatggagctgccccctgccgagcaacagaggctctttaacgaagccgcagccatcatcaggcacctggagtggacggacgccgtgcagctgaccgcgctggtcatgggcagcgaggccctgcagcagcagctgctggccatgctggtgaactacgtcaccaaggagctgcgggccgagatccagtatgatgactag

SEQ ID NO: 19371 - DNA, 195 bp, Homo sapiens
  MAP TO AC004826.3; EXPRESSED IN BRAIN, SIGNAL = 1.8; EXPRESSED IN BONE MARROW, SIGNAL = 1.4; EXPRESSED IN PLACENTA, SIGNAL = 2.3; EXPRESSED IN ADULT LIVER, SIGNAL = 1.8; NT HIT: gi5032012, EVALUE 1.00e-106; SWISSPROT HIT: O95235, EVALUE 3.00e-34; EST_HUMAN HIT: BI858221.1, EVALUE 1.00e-105
aaacaagtcatcgatgggcacagccagacactgccccactacctgtcccggcaaacattcgcttctccatctggatctcattctttgagatctacaacgaactgctttatgacctattagaaccgcctagccaacagcgcaagaggcagactttgcggctatgcgaggatcaaaatggcaatccctatgtgaaag

SEQ ID NO: 19372 - DNA, 204 bp, Homo sapiens
  MAP TO AC000087.2; EXPRESSED IN PLACENTA, SIGNAL =   9; EXPRESSED IN ADULT LIVER, SIGNAL =  10; EXPRESSED IN HEART, SIGNAL = 6.4; EXPRESSED IN LUNG, SIGNAL = 7.2; NT HIT: gi7706436, EVALUE 1.80e-01; SWISSPROT HIT: P26410, EVALUE 1.10e+00; EST_HUMAN HIT: AA846482.1, EVALUE 2.70e-01
catcacttactatgcagtcactgcagaggagcaatgtgggtctgcatcccttggccaggcccagtcccagacaattactgcaggggaggtatcttgtatgtgaagataccagtggttttcaccatgtggaccttgggtctgagctgcttagtgatctggggctgggcccagtggcctacccaacactacggcttctgcaagatg

SEQ ID NO: 19373 - DNA, 110 bp, Homo sapiens
  MAP TO AC006332.3; EXPRESSED IN PLACENTA, SIGNAL = 1.8; EXPRESSED IN ADULT LIVER, SIGNAL =   2; EXPRESSED IN HEART, SIGNAL = 2.6; EXPRESSED IN LUNG, SIGNAL = 1.3; EXPRESSED IN FETAL LIVER, SIGNAL = 1.4; EXPRESSED IN BRAIN, SIGNAL = 2.1; SWISSPROT HIT: P39738, EVALUE 3.50e+00; EST_HUMAN HIT: BG058261.1, EVALUE 5.20e-01; NT HIT: AL139079.2, EVALUE 9.00e-02
ctggcttcacctttggcaagtttcctaacatctatgagaatggtactaatcttcaagtggggataaatggctttacagtagaattgtttgaaaatttgttcagataacat

SEQ ID NO: 19374 - DNA, 83 bp, Homo sapiens
  MAP TO AC006505.1; EXPRESSED IN FETAL LIVER, SIGNAL = 1.7; EXPRESSED IN BRAIN, SIGNAL = 3.5; EXPRESSED IN BONE MARROW, SIGNAL = 2.4; EXPRESSED IN PLACENTA, SIGNAL = 2.7; EXPRESSED IN HEART, SIGNAL = 4.2; EXPRESSED IN ADULT LIVER, SIGNAL = 3.2; SWISSPROT HIT: O04425, EVALUE 1.60e+00; EST_HUMAN HIT: BG702991.1, EVALUE 2.00e-39; NT HIT: gi16163263, EVALUE 2.00e-39
gctgtgccttcctcacctactgtgccagggattccgccatcaaagctcagactgccctgcacgagcagaagaccttgcccgga

SEQ ID NO: 19375 - DNA, 121 bp, Homo sapiens
  MAP TO AC004858.2; EXPRESSED IN FETAL LIVER, SIGNAL = 2.3; EXPRESSED IN BONE MARROW, SIGNAL =   2; EXPRESSED IN PLACENTA, SIGNAL =   2; EXPRESSED IN ADULT LIVER, SIGNAL = 2.4; NT HIT: AF109907.1, EVALUE 5.00e-62; EST_HUMAN HIT: BF871558.1, EVALUE 9.00e-31
gctgctcctcaccaggccgagccaggtcccaattcttcctcggcctccactcccccaccctataatccttctatcacctcccctcctcatacctggtctggcttacagttttgtttcgtga

SEQ ID NO: 19376 - DNA, 174 bp, Homo sapiens
  MAP TO AC011519.6; EXPRESSED IN HEART, SIGNAL =   1; EXPRESSED IN ADULT LIVER, SIGNAL = 0.84; EXPRESSED IN LUNG, SIGNAL = 0.57; EXPRESSED IN HELA, SIGNAL = 0.52; EXPRESSED IN BRAIN, SIGNAL = 0.56; EXPRESSED IN PLACENTA, SIGNAL =   1; NT HIT: L08835.1, EVALUE 1.00e-02; SWISSPROT HIT: P08392, EVALUE 1.10e-02; EST_HUMAN HIT: AL048259.1, EVALUE 1.40e-02
ggctccttggctgagcccggatgggggccgggggtatcctcatctaaaagtggagggaacactggggaaggtgaggcccctaatgcagcacctgacccccgggtgggggctcgcccagcaccttccccttctgcacagtgagaggatggtggaggtcccaggccccacacccag

SEQ ID NO: 19377 - DNA, 184 bp, Homo sapiens
  MAP TO AC006479.2; EXPRESSED IN ADULT LIVER, SIGNAL = 6.7; EXPRESSED IN HEART, SIGNAL =  11; EXPRESSED IN LUNG, SIGNAL = 3.4; EXPRESSED IN BRAIN, SIGNAL = 5.8; EXPRESSED IN FETAL LIVER, SIGNAL =  10; EXPRESSED IN BONE MARROW, SIGNAL = 5.1; EXPRESSED IN PLACENTA, SIGNAL = 9.4; NT HIT: gi16196212, EVALUE 2.00e-99; SWISSPROT HIT: Q59188, EVALUE 1.90e+00; EST_HUMAN HIT: BG619581.1, EVALUE 5.00e-67
ctataacctaggagtcttgcgttctagtctaataactgttctcaaaaatatcattaactttttgggtataataaacagcaaactgcagaataaattgcacatactaaagagtaagcaacaaaacaaattgcacatgctgtgcagtatgcaaagccacagaattatcaatctgagaaacaactga

SEQ ID NO: 19378 - DNA, 168 bp, Homo sapiens
  MAP TO AC011539.5; EXPRESSED IN ADULT LIVER, SIGNAL = 0.98; EXPRESSED IN LUNG, SIGNAL = 2.3; EXPRESSED IN FETAL LIVER, SIGNAL = 0.8; EXPRESSED IN BRAIN, SIGNAL = 1.6; EXPRESSED IN PLACENTA, SIGNAL = 0.78; NT HIT: gi13430867, EVALUE 6.00e-35; SWISSPROT HIT: Q20799, EVALUE 6.00e-13; EST_HUMAN HIT: BF526089.1, EVALUE 8.00e-35
ctcatagacagccaggtcggtgcaggcataggggatgatgccgagcatattgggcaggtagccgcggtaaagggcgcgggtgccctctcgctgcaagatctgcctggcgcagtccagcagccccttgtactggcccgtccgacgcaaggtcaaccgcgtcttcagcac

SEQ ID NO: 19379 - DNA, 106 bp, Homo sapiens
  MAP TO AC006167.1; EXPRESSED IN BRAIN, SIGNAL = 0.5; EXPRESSED IN PLACENTA, SIGNAL = 0.92; EXPRESSED IN ADULT LIVER, SIGNAL = 0.64; NT HIT: AF260225.1, EVALUE 3.00e-17; SWISSPROT HIT: P28621, EVALUE 8.00e+00; EST_HUMAN HIT: AL046939.1, EVALUE 4.00e-17
ttactgctcattgacaatgtagttggccacccaagagctctgatgcagagatacaaggagataaatgttgttttcatgcttggtaacacagtgtccattctgcagc

SEQ ID NO: 19380 - DNA, 290 bp, Homo sapiens
  MAP TO AC006573.1; EXPRESSED IN BRAIN, SIGNAL = 1.1; EXPRESSED IN PLACENTA, SIGNAL = 1.4; EXPRESSED IN HEART, SIGNAL = 1.9; EXPRESSED IN ADULT LIVER, SIGNAL = 1.1; EST_HUMAN HIT: AI246772.1, EVALUE 2.00e-06; NT HIT: AJ251973.1, EVALUE 2.00e-05; SWISSPROT HIT: O09037, EVALUE 6.60e-01
ttagtcagggttctccagagaaacagaaccaatagtatacacagagatgtacaagaggggatttattatgcgaattgactcatggcatcgtggaggctgagaaagttccaggatgggccctctgcacactggaaaaccaggagcctgatgggataattcagtccaagtctgaaggcctgagggaccaagggagtgaattaatggtgaaattctcagtccaaggccaaaagcctgagaaactgggctgcaaacctgaagtccgaaggctggagaacctggagctctgatgt

SEQ ID NO: 19381 - DNA, 85 bp, Homo sapiens
  MAP TO AC012315.4; EXPRESSED IN BRAIN, SIGNAL = 0.98; EXPRESSED IN HELA, SIGNAL = 0.58; EXPRESSED IN ADULT LIVER, SIGNAL = 1.1; EST_HUMAN HIT: BE006752.1, EVALUE 9.60e-02; NT HIT: AF055066.1, EVALUE 2.60e-01
ccaacagaatttgtggatgcattggatgtgaagagtgagaaagaagaatcaagaataactcttaagtttgtggacttagcaacag

SEQ ID NO: 19382 - DNA, 97 bp, Homo sapiens
  MAP TO AC004091.1; EXPRESSED IN ADULT LIVER, SIGNAL = 1.1; EXPRESSED IN HEART, SIGNAL =   2; NT HIT: AL163210.2, EVALUE 5.00e-03; EST_HUMAN HIT: BE146882.1, EVALUE 3.00e-05
aagactcagcaagttgatgtctcccacgcacctttttctgcctgctttattcaagctgcgatggaagctgatcggatggtgcccatccacactgaag

SEQ ID NO: 19383 - DNA, 248 bp, Homo sapiens
  MAP TO AC011749.2; EXPRESSED IN HELA, SIGNAL = 1.8; EXPRESSED IN BONE MARROW, SIGNAL = 2.4; EXPRESSED IN PLACENTA, SIGNAL = 1.4; EXPRESSED IN ADULT LIVER, SIGNAL = 2.2; EXPRESSED IN FETAL LIVER, SIGNAL = 1.6; SWISSPROT HIT: P26808, EVALUE 3.00e-14; NT HIT: X57147.1, EVALUE 1.00e-24; EST_HUMAN HIT: BF904693.1, EVALUE 3.00e-29
tcagattagcacaatgaattctgctaactgagcactggtccctagaggaagaagtttattttcaagtactgctgtatcactaactatggcatagcctgccttttgtacccaattttctacaaatgaacttccatcagagtacagattaaggtcagggttagttaaggggacttctaagagatcttttcgggtggcaaaagtatgagctaaaatttgttggcagtcatactcaattggttcctcaccct

SEQ ID NO: 19384 - DNA, 146 bp, Homo sapiens
  MAP TO AC010598.5; EXPRESSED IN FETAL LIVER, SIGNAL =   1; EXPRESSED IN PLACENTA, SIGNAL = 1.1; EXPRESSED IN ADULT LIVER, SIGNAL = 1.2; SWISSPROT HIT: P98158, EVALUE 2.00e+00; NT HIT: gi14589963, EVALUE 1.30e-01
aagcatttataatgttgaccaccagagaccgccagagagccatccatcacccggtaggcacagagacactccttaatgtacctgccattgtggaaatcggcaaggaaggcaccaggctgtctgtaaagggctttggcatcggttaa

SEQ ID NO: 19385 - DNA, 154 bp, Homo sapiens
  MAP TO AC005791.1; EXPRESSED IN HELA, SIGNAL = 0.55; EXPRESSED IN FETAL LIVER, SIGNAL = 1.4; EXPRESSED IN PLACENTA, SIGNAL =   1; EXPRESSED IN ADULT LIVER, SIGNAL = 0.78; SWISSPROT HIT: P51006, EVALUE 4.40e+00; EST_HUMAN HIT: R02796.1, EVALUE 8.00e-04
ctgatggaaattcgaagtctctagggcatgactggaggatatcagccccacagcaggttgaggatggagtcatgagtgaaatgggtgaaatgagcccatgggctttggaaactgcagatctgtccttctgcctctgaccccctggtgagtccat

SEQ ID NO: 19386 - DNA, 128 bp, Homo sapiens
  MAP TO AC008507.6; EXPRESSED IN BONE MARROW, SIGNAL = 0.47; EXPRESSED IN PLACENTA, SIGNAL = 0.7; EXPRESSED IN ADULT LIVER, SIGNAL = 1.1; SWISSPROT HIT: Q00566, EVALUE 6.90e-01; EST_HUMAN HIT: AL576514.1, EVALUE 1.60e-01
ctggaggctctgcttgcaaatgtggggctggtgcttggaattcaagatgcccaataaaggatccatccacagcggctgcccacgggagccatctctctgtggctcccaggagccaggagggcctggag

SEQ ID NO: 19387 - DNA, 198 bp, Homo sapiens
  MAP TO AC024126.1; EXPRESSED IN ADULT LIVER, SIGNAL = 3.1; EXPRESSED IN HEART, SIGNAL = 4.4; EXPRESSED IN BRAIN, SIGNAL = 2.4; EXPRESSED IN LUNG, SIGNAL = 1.7; EXPRESSED IN BONE MARROW, SIGNAL = 2.5; NT HIT: gi14766523, EVALUE 1.00e-107; SWISSPROT HIT: Q07954, EVALUE 7.00e-19; EST_HUMAN HIT: BF445906.1, EVALUE 1.00e-107
gtacatgtactggacagactggggtgagacgccccggattgagcgggcagggatggatggcagcacccggaagatcattgtggactcggacatttactggcccaatggactgaccatcgacctggaggagcagaagctctactgggctgacgccaagctcagcttcatccaccgtgccaacctggacggctcgttccg

SEQ ID NO: 19388 - DNA, 299 bp, Homo sapiens
  MAP TO AC012331.9; EXPRESSED IN ADULT LIVER, SIGNAL = 0.92; EXPRESSED IN FETAL LIVER, SIGNAL = 0.59; EXPRESSED IN BRAIN, SIGNAL = 0.88; NT HIT: Z73666.1, EVALUE 0.00e+00; SWISSPROT HIT: P01717, EVALUE 1.00e-25; EST_HUMAN HIT: BG755759.1, EVALUE 1.00e-53
tgagggattgtcctcatccccagacaaacagtaatagtcagcctcgtcttcggtcaggaccctgctgatggtcagggtggtcgtgttccctgaggtggacccagagaatcgttcagggattccagggtaccgctcactatcttcgtatatcaccaactcaggggcctggcctggcttctgctggtaccagtcagcataattttcccccagtacatctccagagcaggtgatcctggctgtctgtcctggggacactgacaccgagggtagctgtgtcagctcataggaggcaacagagc

SEQ ID NO: 19389 - DNA, 115 bp, Homo sapiens
  MAP TO AC016629.5; EXPRESSED IN ADULT LIVER, SIGNAL = 1.5; EXPRESSED IN BRAIN, SIGNAL = 1.7; EXPRESSED IN PLACENTA, SIGNAL = 1.1; EST_HUMAN HIT: BI826852.1, EVALUE 8.60e+00; SWISSPROT HIT: Q07230, EVALUE 4.00e-04; NT HIT: gi6677606, EVALUE 1.00e-04
cagtcttcaacatctgggtgaagtcctccaccagcgccatagcctcctcactgctctcagggcactggggctccacccagacacagatggcaggtggcaggacacccaggtacat

SEQ ID NO: 19390 - DNA, 190 bp, Homo sapiens
  MAP TO AC006189.1; EXPRESSED IN HELA, SIGNAL = 0.97; EXPRESSED IN BRAIN, SIGNAL = 0.79; EXPRESSED IN PLACENTA, SIGNAL = 0.88; EXPRESSED IN ADULT LIVER, SIGNAL = 0.92; EXPRESSED IN FETAL LIVER, SIGNAL = 0.65; SWISSPROT HIT: P54317, EVALUE 1.00e-20; NT HIT: gi15299937, EVALUE 4.00e-70; EST_HUMAN HIT: BG661239.1, EVALUE 1.00e-103
aaaatgtttgaagtggagaaggtgaactgcatctgtgtggactggaggcacgggtcccgggcaatgtacacccaagccgtgcaaaacattcgggttgttggggcggagacagctttcttaatacaagcactgtcggtaaaaccctgcctgggccctgtcctgtgggtaggggtcagagaggggcagggag

SEQ ID NO: 19391 - DNA, 420 bp, Homo sapiens
  MAP TO AC040171.3; EXPRESSED IN BONE MARROW, SIGNAL =   1; EXPRESSED IN ADULT LIVER, SIGNAL = 0.92; SWISSPROT HIT: P03356, EVALUE 9.00e-22; NT HIT: D11078.1, EVALUE 0.00e+00; EST_HUMAN HIT: BF920079.1, EVALUE 0.00e+00
tctgataacgggccagcctttactagtcaaatcacccaagcagtttctcaggctcttggtattcagtggaaccttcatatcgcttaccatcctcagtcttcaggaaaggtagaatggactaatggtcttttaaagacacacctcaccaagctcagcctccaacttaaaaaggactggacagtacttttacctcttgcccttctcagaattagagcctgtcctcgagatgctacagggtacagtccatttgaacttttatatggacgcactttcttgcttgggcccaacctcttcacagacaccagccctctaggtgactatcttccagtcctccaacaggctagacaggaaattccccagactgctaatcttctcttgcttactccagatccccagccatatgaagacaccctagctgga

SEQ ID NO: 19392 - DNA, 169 bp, Homo sapiens
  MAP TO AC004170.1; EXPRESSED IN ADULT LIVER, SIGNAL = 0.55; EXPRESSED IN HELA, SIGNAL = 0.57; SWISSPROT HIT: P94364, EVALUE 5.00e-01; NT HIT: AF055066.1, EVALUE 1.00e-85; EST_HUMAN HIT: BE559642.1, EVALUE 8.60e-01
ctcttctgactggggtcattggccacttgacaggcagtgccctccttgtcagtcagcctgtctacctggtttcctctcagggtgtgtggcttgactgggttaaccatccccagccccagcagaaacagggagaagtgactcagcaaatcccccaagagcagcgggatcc

SEQ ID NO: 19393 - DNA, 259 bp, Homo sapiens
  MAP TO AC016543.5; EXPRESSED IN HEART, SIGNAL = 2.4; EXPRESSED IN FETAL LIVER, SIGNAL = 3.1; EXPRESSED IN BRAIN, SIGNAL = 3.7; EXPRESSED IN ADULT LIVER, SIGNAL =   4; SWISSPROT HIT: P28797, EVALUE 5.10e-01; EST_HUMAN HIT: AA858297.1, EVALUE 3.50e-01
ggccttcggattcaggtcacagatagacttgcacctccagaggctgcctgtggggcctgagccccccatcttacagatgcctcaggagggggcttgtagaggtgacccaggaccccctagcggccaagaccccagtcaacggcacccagcaggccagtcccccagggccagtctgggcagcagaacctcctggagtgaccgctctgactttccttctctgccctctgatgctacccacgcaaaacagccaaagcgccag

SEQ ID NO: 19394 - DNA, 131 bp, Homo sapiens
  MAP TO AC013737.4; EXPRESSED IN HEART, SIGNAL = 1.6; EXPRESSED IN FETAL LIVER, SIGNAL = 0.95; EXPRESSED IN LUNG, SIGNAL = 1.2; EXPRESSED IN PLACENTA, SIGNAL =   1; EXPRESSED IN ADULT LIVER, SIGNAL = 0.78; NT HIT: AB043547.1, EVALUE 1.00e-26; SWISSPROT HIT: P46738, EVALUE 7.80e+00; EST_HUMAN HIT: AA663520.1, EVALUE 2.00e-19
atgtggtgttgggcctgcaggtacatagaagacaagagttgagctttgggaacctccaccttggtttcagaggatgtgtgaaaatgccagcatgtccaggcagatatctgctgcaggggtggagccctcat

SEQ ID NO: 19395 - DNA, 129 bp, Homo sapiens
  MAP TO AC010320.7; EXPRESSED IN PLACENTA, SIGNAL = 1.9; EXPRESSED IN ADULT LIVER, SIGNAL = 1.9; EXPRESSED IN BRAIN, SIGNAL = 1.5; SWISSPROT HIT: Q14586, EVALUE 2.30e-01; NT HIT: gi15301350, EVALUE 1.00e-66; EST_HUMAN HIT: BG825906.1, EVALUE 1.00e-66
ctgtgttgatatctttgataccttcccacctatctggattttttgctactttcatttcattctccacagtccagggctctgtcctttgcttcatcatggagataatactcaggtcaggaagacagattc

SEQ ID NO: 19396 - DNA, 440 bp, Homo sapiens
  MAP TO AC016778.2; EXPRESSED IN PLACENTA, SIGNAL =   6; EXPRESSED IN ADULT LIVER, SIGNAL = 5.7; EXPRESSED IN BRAIN, SIGNAL = 5.9; SWISSPROT HIT: P42701, EVALUE 1.80e+00; NT HIT: AL163218.2, EVALUE 7.00e-77; EST_HUMAN HIT: BE420422.1, EVALUE 5.00e-88
ggacttggtgccctgtgtcccagcttctccggtgtggctgaaagggaccaatgtagagctcgggctgtggcttcagagggtgcaagcctcaagccttggcagcttccacatggtgttgagcctgtgggtgcacagaagtcaagaactggggtttgggaacctccgcctagatttcagaggatgtatggaaatgcctggatgtctaggcagaagtatgctgtaggggcagggctctcatggagaacctctgctaaggcagtgtggaagggaaatgtggggtcacagcccccatacagagttcctactggggcactgcctagtggagctgtgagaagaggccaccctccagacaccagaaatgacagatccattgacagcttgcactgtgtgcctggaaaagccacaaacactcaatgtcagccaatgaaagcagctgggag

SEQ ID NO: 19397 - DNA, 156 bp, Homo sapiens
  MAP TO AC005947.1; EXPRESSED IN BRAIN, SIGNAL = 2.5; EXPRESSED IN PLACENTA, SIGNAL =   2; EXPRESSED IN ADULT LIVER, SIGNAL =   2; EXPRESSED IN LUNG, SIGNAL =   2; EXPRESSED IN FETAL LIVER, SIGNAL = 1.2; SWISSPROT HIT: P05156, EVALUE 5.10e-01; EST_HUMAN HIT: BF699285.1, EVALUE 2.00e-01
atggccggaggaggcctgaaaaagatcatctctgccacagagaagaagctggctcagatgcttgtggccactgtggagacagggagacccagggagacaacagtattcactcaaggaggaatgggtggtgatgcaaacttgggtggaggccacagg

SEQ ID NO: 19398 - DNA, 347 bp, Homo sapiens
  MAP TO AC008455.5; EXPRESSED IN ADULT LIVER, SIGNAL = 1.5; EXPRESSED IN BONE MARROW, SIGNAL = 0.47; EXPRESSED IN BRAIN, SIGNAL = 1.3; NT HIT: X95752.1, EVALUE 8.20e-02; SWISSPROT HIT: P35123, EVALUE 4.00e-01; EST_HUMAN HIT: BE160491.1, EVALUE 3.00e-45
tgcatgctcatcctaccatacccccagctgatgtgtgggcagcctgctatgctggcatgaatgcacacaggaatactggcaacctcatccccactggtgccctgcccctgctgtactgctaccatgcaccgccagcaggttgctgccaccctgctccttctggagccccaccccagctgacacatgggcacacggccatgctgccacagctgctgtcacataaaagtgacgatggatcctgctgccaccaccccaacaaagagctttggctggcattcccccatcggagtgttgtggacaatatagagcatgaacactttggcccctccagtgcagcagatgcctaa

SEQ ID NO: 19399 - DNA, 257 bp, Homo sapiens
  MAP TO AC009003.7; EXPRESSED IN BONE MARROW, SIGNAL = 1.7; EXPRESSED IN PLACENTA, SIGNAL = 1.6; EXPRESSED IN ADULT LIVER, SIGNAL = 1.6; EXPRESSED IN FETAL LIVER, SIGNAL = 2.5; EXPRESSED IN BRAIN, SIGNAL = 2.1; NT HIT: gi14757758, EVALUE 1.00e-113; SWISSPROT HIT: Q9U969, EVALUE 7.00e-05; EST_HUMAN HIT: AL121522.1, EVALUE 1.00e-108
gacgtgagcctgcacttcgtgctctggggctgcctgcacgtgtaccagcgcatgatcgacaaggcggaggacgtgtgcctgttcgtagcgcagcccggggaactggtggggcagctggcggtgctcactggcgaacctctcatcttcacactgcgagcccaacgcgactgcaccttcctgcggatctccaagtccgacttctatgagtatgacagcccgaagttggagtgtgggtggcactcggaggaccccaaccc

SEQ ID NO: 19400 - DNA, 92 bp, Homo sapiens
  MAP TO AC010219.4; EXPRESSED IN HELA, SIGNAL = 1.2; EXPRESSED IN BONE MARROW, SIGNAL = 1.6; EXPRESSED IN BRAIN, SIGNAL = 1.3; EXPRESSED IN PLACENTA, SIGNAL = 1.3; EXPRESSED IN ADULT LIVER, SIGNAL =   1; NT HIT: AB054293.1, EVALUE 2.90e-01; SWISSPROT HIT: P25058, EVALUE 3.60e+00; EST_HUMAN HIT: BG705226.1, EVALUE 1.10e-01
cgctttctggggaggtctcttctgtggctcctcagacagtggctcccccgatagctcctccgaggggcctcccatgtgtctctgaaggaacc

SEQ ID NO: 19401 - DNA, 162 bp, Homo sapiens
  MAP TO AL118556.2; EXPRESSED IN BRAIN, SIGNAL = 2.7; EXPRESSED IN ADULT LIVER, SIGNAL =   2; NT HIT: J05073.1, EVALUE 1.40e-01; EST_HUMAN HIT: BG676427.1, EVALUE 2.10e-01; SWISSPROT HIT: P49868, EVALUE 8.70e-01
aaaggccagactcctctccaccatccaagccagaacaatggttcaggacagcacgtacttccttgtgctgctctctttcagactgagacttgtgtgcgtaagtctggttggaggagtctgcaccgtagctgctaggtgttgggaaagggagttgggcttctt

SEQ ID NO: 19402 - DNA, 243 bp, Homo sapiens
  MAP TO AC007782.20; EXPRESSED IN LUNG, SIGNAL = 1.1; EXPRESSED IN HELA, SIGNAL = 0.79; EXPRESSED IN FETAL LIVER, SIGNAL = 0.41; EXPRESSED IN BONE MARROW, SIGNAL = 0.52; EXPRESSED IN PLACENTA, SIGNAL = 0.91; EXPRESSED IN ADULT LIVER, SIGNAL = 0.76; NT HIT: AL163209.2, EVALUE 4.00e-77; EST_HUMAN HIT: AA001786.1, EVALUE 1.00e-77; SWISSPROT HIT: P70213, EVALUE 2.00e-13
atggaccatatgtggagaaccaatgaacataatgaagctgatcagttgctcctaaggtcagtggacaaagtgatgaaagaaaatgataaactcagggattctgtctcccagcttcagaagcagatactgagcctcaaatctgctaagattgccatgagtgagagtcttatctcccacagagaaagagctgaaattgtggaaaaactgacacaagctcttatcatgccagtgtctgacctgcaa

SEQ ID NO: 19403 - DNA, 381 bp, Homo sapiens
  MAP TO AC016940.7; EXPRESSED IN PLACENTA, SIGNAL =  10; EXPRESSED IN ADULT LIVER, SIGNAL = 9.7; EXPRESSED IN BRAIN, SIGNAL = 9.3; EXPRESSED IN BONE MARROW, SIGNAL = 6.9; NT HIT: gi14766890, EVALUE 0.00e+00; SWISSPROT HIT: P13983, EVALUE 1.00e-02; EST_HUMAN HIT: AW801156.1, EVALUE 0.00e+00
ttagagttctactgccatccttactttcaaagagactcccctcacctcctcgtgaggatgaagagaagagtgggtgtcaagtctgcaccaagacatcaggaggaggacaagccagaagctgctggatcctgtctggcaccagcagacactgagcaacaagatcacacgtctccgaatgagaatgaccaggtcacaccgcaacaccgggaaccggccggtcccaacacccaaatcaggagtggctctgctccaccagcaactcctgtgatggtgcctgattccgccgtggcgagtgacaacagtccagtgacccagccggccggcgagtggtcagagggcagccaggctcacgtcactccggtggccgctgtccctgggcct

SEQ ID NO: 19404 - DNA, 416 bp, Homo sapiens
  MAP TO AC002321.1; EXPRESSED IN PLACENTA, SIGNAL = 1.9; EXPRESSED IN ADULT LIVER, SIGNAL = 2.1; EXPRESSED IN HEART, SIGNAL = 3.2; EXPRESSED IN HELA, SIGNAL = 2.5; EXPRESSED IN FETAL LIVER, SIGNAL = 2.6; SWISSPROT HIT: O53304, EVALUE 2.80e-01; EST_HUMAN HIT: BI517515.1, EVALUE 0.00e+00; NT HIT: gi11428396, EVALUE 0.00e+00
ggctcggatgtgcccacggttgagccacctgtctcctctccagaccgcaacgtcacggggactcctctcaccggggacaaggatgacgaagaggttgacacccacttcgcctcccaggagttcttctcggctaacgccatctctgaccagctgctgggcgcaggctctgacttgaaggacttcaccctcaatgagactgtgaacagcatctttgcacagggcgccccaaggagctccctggccgagagcttcttcgtggattatgaggagaacgagggggctggcccttacctgctcaacgggtcctacctggagctgagcagcgacagggttgccaacagctcctccgaggccccattccccaacgttagcaccagcctgctcacctcggccgggaacaggactcacaaggccag

SEQ ID NO: 19405 - DNA, 117 bp, Homo sapiens
  MAP TO AC008821.4; EXPRESSED IN BONE MARROW, SIGNAL = 1.6; EXPRESSED IN ADULT LIVER, SIGNAL = 1.4; EXPRESSED IN FETAL LIVER, SIGNAL = 1.7; EXPRESSED IN HELA, SIGNAL =   2; SWISSPROT HIT: O00472, EVALUE 7.00e-18; EST_HUMAN HIT: BI494288.1, EVALUE 2.00e-59; NT HIT: gi13646934, EVALUE 1.00e-59
tctagtcccaattaccatgaagaaaaatacagatgtgaatatcttcataacaagctggctcacatcaaaaggctaataggtgaatttgaccaacagcaagcagagtcatggtcctag

SEQ ID NO: 19406 - DNA, 169 bp, Homo sapiens
  MAP TO AC007206.1; EXPRESSED IN PLACENTA, SIGNAL = 0.65; EXPRESSED IN ADULT LIVER, SIGNAL = 0.98; NT HIT: AB063285.1, EVALUE 1.50e-01; SWISSPROT HIT: P54705, EVALUE 4.40e+00; EST_HUMAN HIT: BG336067.1, EVALUE 2.20e-01
agatggtcttatcacaacagcactgtgtggtcattctcctgagtgctgctgccctgcagataggtccaaagcccaacttgcagagtcacttcttcacgttgcggcccaagatgcacaggacttctgaggtgctgaggttgaggaaagaccggatacaagaacacctcaa

SEQ ID NO: 19407 - DNA, 459 bp, Homo sapiens
  MAP TO AC010168.6; EXPRESSED IN HELA, SIGNAL = 4.5; EXPRESSED IN BONE MARROW, SIGNAL = 0.91; EXPRESSED IN PLACENTA, SIGNAL = 0.46; EXPRESSED IN ADULT LIVER, SIGNAL = 0.56; NT HIT: X02218.1, EVALUE 6.00e-62; SWISSPROT HIT: P02304, EVALUE 1.00e-40; EST_HUMAN HIT: AV764584.1, EVALUE 0.00e+00
atgtctccagaggtggggcctagagctccgcccacttttttgatgttttcaaacaggtccgcatcgagagactataagccctggtctgcgactggcaatcacagtgggcagcccgattttctgctgagtaggcgctgtgatttcagaatgtctgggcgaggtaaaggtggcaaggggctgggtaagggaggcgccaagcgccaccggaaggtgctgcgggacaatatccaaggcattacaaagccggcgattcgccgtctcgcccgacgtgggggcgtcaagcgcatttctggtctcatctacgaggagacccggggagtcctcaaagtcttcctggagaacgtgatccgtgacgcggtgacttacacggagcacgccaagcgcaagaccgtcacggccatggatgtggtgtacgcgctgaaacgccagggtcgcaccctttatggtttcggcggttga

SEQ ID NO: 19408 - DNA, 115 bp, Homo sapiens
  MAP TO AC016597.4; EXPRESSED IN BRAIN, SIGNAL = 0.65; EXPRESSED IN PLACENTA, SIGNAL = 0.7; EXPRESSED IN ADULT LIVER, SIGNAL = 0.87; EXPRESSED IN FETAL LIVER, SIGNAL = 0.58; EXPRESSED IN HELA, SIGNAL = 0.67; NT HIT: gi15318237, EVALUE 2.00e-58; SWISSPROT HIT: Q9L6B7, EVALUE 3.50e+00; EST_HUMAN HIT: BE888977.1, EVALUE 3.00e-58
ctgcggacgatcctcagaagtgttgtttgcctggagagtcacatccccacacagctcaaaatcatcagaatagtccacaggaggttcgatgtggagccgtgggccagcttctgtt

SEQ ID NO: 19409 - DNA, 231 bp, Homo sapiens
  MAP TO AC012156.14; EXPRESSED IN ADULT LIVER, SIGNAL = 1.2; EXPRESSED IN HEART, SIGNAL = 1.2; EXPRESSED IN FETAL LIVER, SIGNAL = 1.5; EXPRESSED IN BRAIN, SIGNAL = 1.3; EXPRESSED IN HELA, SIGNAL = 1.3; EXPRESSED IN PLACENTA, SIGNAL = 1.4; SWISSPROT HIT: P20740, EVALUE 7.00e-09; EST_HUMAN HIT: BF669756.1, EVALUE 7.80e-02
caaataattgaagtctgctgtgtaggttttgtcttcaaagtcttccatattgagaatgcagtgcactagcaccctcttctgctggttgcatctcagttcttccatctcttggacaatctttaggaagctattcatcttggagtaaaatcgatatgcaaagtactcgggctgagggtattgaggcaacacccagccatgagcctggcaattttcattggccttgtaggctgc

SEQ ID NO: 19410 - DNA, 275 bp, Homo sapiens
  MAP TO AC004189.1; EXPRESSED IN ADULT LIVER, SIGNAL = 1.2; EXPRESSED IN HEART, SIGNAL = 1.2; EXPRESSED IN BRAIN, SIGNAL = 1.3; EXPRESSED IN LUNG, SIGNAL = 0.56; NT HIT: gi14761262, EVALUE 0.00e+00; EST_HUMAN HIT: BG386415.1, EVALUE 0.00e+00; SWISSPROT HIT: Q62191, EVALUE 8.00e-07
ccggtagggctgaatggcctcgtccaggaaccccacggtgtgcgcctggtgcgtgggaccctccctgcagaacacacagaggaactcggcatcgttctcgcagaagaagtagatcttctcgccgtgctcctcgcagtaagtttctcccagcgggcccaggggcacaggggccatgggagtctctgcctgctcctcctcttggcagagcgggcagagcaggatcttgcccgaggattgggcccccatctgggagagcgcggggaggcagagccggc

SEQ ID NO: 19411 - DNA, 201 bp, Homo sapiens
  MAP TO AC004202.1; EXPRESSED IN ADULT LIVER, SIGNAL = 0.75; EXPRESSED IN HEART, SIGNAL = 1.1; EXPRESSED IN HELA, SIGNAL = 0.81; EST_HUMAN HIT: BG287658.1, EVALUE 1.00e-109; SWISSPROT HIT: O70468, EVALUE 7.30e+00; NT HIT: AF230386.1, EVALUE 1.00e-109
gcggcagaactacatcggggccaccaaatcaccactcttcagccccatcccactccctgtttcgggcctcgtctgctgggaaagtcacttttccagtatgtctcctggcctcttatgatgagatttctggtcaaggagcgagctctcaggatacgaagacatttgacgttgcgctgtccgaggagctccatgcggcactga

SEQ ID NO: 19412 - DNA, 178 bp, Homo sapiens
  MAP TO AC006334.3; EXPRESSED IN LUNG, SIGNAL = 2.6; EXPRESSED IN BRAIN, SIGNAL = 1.1; EXPRESSED IN ADULT LIVER, SIGNAL = 1.5; EST_HUMAN HIT: AI807266.1, EVALUE 1.50e-02; SWISSPROT HIT: P98193, EVALUE 2.50e+00; NT HIT: U93163.1, EVALUE 2.00e-07
tcatgattcccttaaaatctcaagcccagaactccttggggagatggatttgagggttcttcctgtctcctcactcggcttctctgcactcattaaactctttctctgctgcaaactctgctgtctccatgtaattggtctgttgctgtccagtgggcctatgaccctagtggtcctg

SEQ ID NO: 19413 - DNA, 237 bp, Homo sapiens
  MAP TO AL109839.11; EXPRESSED IN HEART, SIGNAL =  14; EXPRESSED IN ADULT LIVER, SIGNAL =  17; EXPRESSED IN FETAL LIVER, SIGNAL =  14; EXPRESSED IN LUNG, SIGNAL =  21; EXPRESSED IN HELA, SIGNAL =  13; EXPRESSED IN BRAIN, SIGNAL =  18; EXPRESSED IN BONE MARROW, SIGNAL =  17; EXPRESSED IN PLACENTA, SIGNAL =  22; EST_HUMAN HIT: N23875.1, EVALUE 1.00e-101; SWISSPROT HIT: Q13043, EVALUE 5.00e-30; NT HIT: gi13653714, EVALUE 1.00e-104
aaatatgtatgcttggtctaagaagtcagtgaatttactcagagccttacttttcatagttccttcctcttcctcatcctctgcattgatcaccatggtgcccagttgtgatggcaacgtgtcatcgtgctcaatcatagtattggctccatcagtcatggtgctggctactcggacagtgcccatctcatcacccactgctcgaaccatcgtgccagaatccatttcatcctcttc

SEQ ID NO: 19414 - DNA, 139 bp, Homo sapiens
  MAP TO AC012313.5; EXPRESSED IN FETAL LIVER, SIGNAL = 1.3; EXPRESSED IN HELA, SIGNAL = 1.2; EXPRESSED IN BONE MARROW, SIGNAL = 0.88; EXPRESSED IN BRAIN, SIGNAL = 1.5; EXPRESSED IN LUNG, SIGNAL = 0.94; EXPRESSED IN PLACENTA, SIGNAL = 1.3; EXPRESSED IN ADULT LIVER, SIGNAL = 1.3; SWISSPROT HIT: O75820, EVALUE 2.00e-09; NT HIT: gi16162715, EVALUE 1.00e-38; EST_HUMAN HIT: BI520241.1, EVALUE 6.00e-66
ccagggccttaccaagtgaggtcacaagtgtgaagttttccagcatcacgtggcggtacagggccctctgcgctgtgtccaggagcccccactcctcctgggagaagtacacggccacatcctcgaaggtcatcaggtc

SEQ ID NO: 19415 - DNA, 166 bp, Homo sapiens
  MAP TO AC016613.5; EXPRESSED IN PLACENTA, SIGNAL = 1.6; EXPRESSED IN ADULT LIVER, SIGNAL = 1.5; EXPRESSED IN BRAIN, SIGNAL = 1.5; EXPRESSED IN FETAL LIVER, SIGNAL = 0.84; EXPRESSED IN LUNG, SIGNAL = 1.5; EXPRESSED IN HELA, SIGNAL =   1; SWISSPROT HIT: Q9NPA2, EVALUE 2.60e+00; NT HIT: AL163300.2, EVALUE 9.00e-03
ctgggtgctcatcatctttccatagaatcacactactctttgtttgaaggatggcaaattggcaatgaatttgcagacggagaccaggaggacccatgagagagcacaggacatccatctggacattttcttggtatgtgaactgatggatgctggtccacaccag

SEQ ID NO: 19416 - DNA, 125 bp, Homo sapiens
  MAP TO AL109940.18; EXPRESSED IN FETAL LIVER, SIGNAL = 2.3; EXPRESSED IN BRAIN, SIGNAL = 4.4; EXPRESSED IN PLACENTA, SIGNAL = 2.9; EXPRESSED IN HEART, SIGNAL =   3; EXPRESSED IN ADULT LIVER, SIGNAL = 2.3; SWISSPROT HIT: Q08642, EVALUE 7.80e+00; NT HIT: AF146518.1, EVALUE 1.00e-01
ggaccccgggtggctacgcgaatgtggctctgaagacaacactcttcactgagctgcagctctggccagacactgctggactccaaggccatgtgggtgcacaagcttctctaccccccgaggag

SEQ ID NO: 19417 - DNA, 186 bp, Homo sapiens
  MAP TO AC012319.5; EXPRESSED IN FETAL LIVER, SIGNAL = 2.4; EXPRESSED IN BRAIN, SIGNAL = 2.7; EXPRESSED IN BONE MARROW, SIGNAL = 1.9; EXPRESSED IN LUNG, SIGNAL = 2.1; EXPRESSED IN PLACENTA, SIGNAL = 2.6; EXPRESSED IN ADULT LIVER, SIGNAL = 2.1; EXPRESSED IN HEART, SIGNAL = 2.5; SWISSPROT HIT: P19785, EVALUE 2.50e+00; NT HIT: AY028079.1, EVALUE 3.00e-03
gtgtttacagctgtcctctttggacccaggaaattgttcattgccattctcattggagcttcccagatattcaaagccattctcatcaaggcatatctggtttttaaagctgtctgcattggccctgacaaagtattcacagcttttaaaatattggccagtgcaggtgttcacagctgtcctcat

SEQ ID NO: 19418 - DNA, 138 bp, Homo sapiens
  MAP TO AC016627.5; EXPRESSED IN PLACENTA, SIGNAL = 3.1; EXPRESSED IN ADULT LIVER, SIGNAL = 2.3; EXPRESSED IN HEART, SIGNAL = 2.5; EXPRESSED IN BRAIN, SIGNAL = 4.4; EXPRESSED IN FETAL LIVER, SIGNAL = 3.5; EXPRESSED IN BONE MARROW, SIGNAL =   2; EXPRESSED IN LUNG, SIGNAL = 2.1; SWISSPROT HIT: P48634, EVALUE 1.20e+00; NT HIT: gi14747301, EVALUE 7.30e+00; EST_HUMAN HIT: BF104158.1, EVALUE 6.90e-01
atggctgaaggcctgaaggagggcccccagatcaagaacaggatgctctctgacaaggccatcacccctggggagaatgaggtggaggaagccctcttgctgtggggtggcagtaaggagggcagaaccctgctgtag

SEQ ID NO: 19419 - DNA, 114 bp, Homo sapiens
  MAP TO AC012384.16; EXPRESSED IN BRAIN, SIGNAL = 1.1; EXPRESSED IN FETAL LIVER, SIGNAL = 1.4; EXPRESSED IN BONE MARROW, SIGNAL = 0.96; EXPRESSED IN PLACENTA, SIGNAL = 1.3; EXPRESSED IN LUNG, SIGNAL = 0.95; EXPRESSED IN ADULT LIVER, SIGNAL = 1.2; EXPRESSED IN HEART, SIGNAL =   1; SWISSPROT HIT: Q9WTI7, EVALUE 3.00e-11; NT HIT: Z99124.1, EVALUE 5.80e+00
ttgcctaacttgtattcctcgggtttgtagccgatgtacttgatcagccgttccacgccctctgctggaggcccgtgccagtgcggccaggtgtctgggcataaggacttgtac

SEQ ID NO: 19420 - DNA, 345 bp, Homo sapiens
  MAP TO AC004826.3; EXPRESSED IN BRAIN, SIGNAL =   4; EXPRESSED IN LUNG, SIGNAL = 2.6; EXPRESSED IN ADULT LIVER, SIGNAL = 3.6; EXPRESSED IN PLACENTA, SIGNAL = 3.4; EST_HUMAN HIT: BF795325.1, EVALUE 1.00e-44; SWISSPROT HIT: O95235, EVALUE 8.00e-11; NT HIT: gi5032012, EVALUE 9.00e-45
tcaataaattcgaactcagatcatcggtgtggcaagccacatttgcaggataatgacgagacagggaagggtgacaaagtagtaaaaatgtccatgtgggttggaatgattgtggaaccaaagagtagctgcacagagacatttgaggtgaaatggggtagtgttatcatagttcctagaaactactgtttgcccatttgctcagaggtaactgctgaaattaatctgtggttctgggctgggattctgccacaggttccatctgaggacagtatggagaaggtgaaagtatacttgagggttaggcccttgttaccttcagagttggaacgacaggaagatcag

SEQ ID NO: 19421 - DNA, 141 bp, Homo sapiens
  MAP TO AC006997.3; EXPRESSED IN PLACENTA, SIGNAL = 3.7; EXPRESSED IN ADULT LIVER, SIGNAL =   3; EXPRESSED IN FETAL LIVER, SIGNAL =   2; EXPRESSED IN BRAIN, SIGNAL = 4.4; EST_HUMAN HIT: BE420422.1, EVALUE 5.00e-42; SWISSPROT HIT: P49800, EVALUE 7.70e+00; NT HIT: AL163227.2, EVALUE 1.00e-32
gcaaatttctgcagcaggcttgaatttctcctcagaaaatgggattttcttttctactgcactgtcaggctgcagattttccaaacttttatgctctgctccccttacaaaactgaatgcctttaacagcacccaaatcat

SEQ ID NO: 19422 - DNA, 144 bp, Homo sapiens
  MAP TO AL049175.11; EXPRESSED IN ADULT LIVER, SIGNAL = 1.1; EXPRESSED IN LUNG, SIGNAL = 1.5; EXPRESSED IN FETAL LIVER, SIGNAL = 0.88; EXPRESSED IN BONE MARROW, SIGNAL = 1.4; EXPRESSED IN PLACENTA, SIGNAL =   1; EST_HUMAN HIT: BG221932.1, EVALUE 7.20e-01; SWISSPROT HIT: P37520, EVALUE 6.80e-01; NT HIT: M98509.1, EVALUE 4.90e-01
tcaatggatgaaaaaggcctttctgctgttcaggtctgcctgtttctctggatgatcaggttccttgtgagtttgggcattgacattccagtcattcatttgggcctgggctttaggcagctggactattggtgctgtaatcac

SEQ ID NO: 19423 - DNA, 168 bp, Homo sapiens
  MAP TO AC000028.1; EXPRESSED IN BONE MARROW, SIGNAL = 1.9; EXPRESSED IN ADULT LIVER, SIGNAL = 1.6; EXPRESSED IN HEART, SIGNAL = 1.5; EXPRESSED IN BRAIN, SIGNAL = 1.9; SWISSPROT HIT: Q12999, EVALUE 6.00e-04; EST_HUMAN HIT: BI793069.1, EVALUE 1.00e-89; NT HIT: U01160.1, EVALUE 7.00e-90
ctggtgagcttgttgctcattggagtggctgcttggggcaagggcctgggtctggtgtccagcatccacatcatcggcggagtcattgctgtgggagtcttccttctccttattgcagtggctggactggtgggtgctgtcaaccaccaccaagtcctgctgttcttt

SEQ ID NO: 19424 - DNA, 179 bp, Homo sapiens
  MAP TO AC018846.2; EXPRESSED IN ADULT LIVER, SIGNAL = 1.1; EXPRESSED IN HEART, SIGNAL = 1.6; EXPRESSED IN LUNG, SIGNAL = 0.86; EXPRESSED IN BRAIN, SIGNAL = 1.2; EXPRESSED IN FETAL LIVER, SIGNAL = 1.8; SWISSPROT HIT: P37222, EVALUE 4.30e+00; NT HIT: AL163207.2, EVALUE 4.00e-11; EST_HUMAN HIT: AA496028.1, EVALUE 2.00e-11
tctgtttctgctactataacataaataccttagactcgctggtttataaacaacaggaatttatttctcatatttctggagtttgggaagttgaagatcaaggcaccgaaaagtttggtgttggcgagggcctgttcctcattgatgacacgttctatgtgggcttacacagcagaagg

SEQ ID NO: 19425 - DNA, 236 bp, Homo sapiens
  MAP TO AC004181.1; EXPRESSED IN BONE MARROW, SIGNAL = 1.9; EXPRESSED IN ADULT LIVER, SIGNAL = 1.6; EXPRESSED IN HEART, SIGNAL = 3.3; EXPRESSED IN FETAL LIVER, SIGNAL = 2.8; SWISSPROT HIT: Q12778, EVALUE 6.50e-02; NT HIT: AF029062.1, EVALUE 1.00e-123; EST_HUMAN HIT: AL596519.1, EVALUE 1.00e-123
gggtgggggcctttggcacctcaatccccgataccctactccttcccacccacatctccttgcacccatctggaacctcggttgatgtgagccggcaacagagaagcaccgtggcgcggcgagggaatgcagacggcacccagcggtggatggcggcagcggaggccgcggggaaacctgaccaggaagctgaggaccaaaccagcctctttttccgttcccggtttttttcctga

SEQ ID NO: 19426 - DNA, 154 bp, Homo sapiens
  MAP TO AL049753.1; EXPRESSED IN ADULT LIVER, SIGNAL = 5.1; EXPRESSED IN BRAIN, SIGNAL = 2.1; EXPRESSED IN FETAL LIVER, SIGNAL = 6.6; EXPRESSED IN PLACENTA, SIGNAL = 2.6; EST_HUMAN HIT: AA134738.1, EVALUE 2.00e-01; SWISSPROT HIT: O24585, EVALUE 2.00e+00; NT HIT: gi7305028, EVALUE 1.30e-01
ggtataaagtcgacttgcccaaacgctgagcaagcattagcggagagtcatgggcattttccagaagcttctgcttgttctcctgagaatcaaccactttgcctgcatgaagattgtcctcaagggttatcagagccgttttcttccagctttc

SEQ ID NO: 19427 - DNA, 191 bp, Homo sapiens
  MAP TO AC007162.1; EXPRESSED IN HEART, SIGNAL = 1.8; EXPRESSED IN ADULT LIVER, SIGNAL = 1.2; EXPRESSED IN FETAL LIVER, SIGNAL = 0.83; EXPRESSED IN BRAIN, SIGNAL = 2.1; EST_HUMAN HIT: BG910819.1, EVALUE 1.00e-103; SWISSPROT HIT: Q99758, EVALUE 2.00e-31; NT HIT: gi14776777, EVALUE 1.00e-103
catggaggagtgtgaggccctgtgcacccggctggccatcatggtgcaggggcagttcaagtgcctgggcagcccccagcacctcaagagcaagttcggcagcggctactccctgcgggccaaggtgcagagtgaagggcaacaggaggcgctggaggagttcaaggccttcgtggacctgacctttccag

SEQ ID NO: 19428 - DNA, 178 bp, Homo sapiens
  MAP TO AL109753.9; EXPRESSED IN HEART, SIGNAL = 1.1; EXPRESSED IN ADULT LIVER, SIGNAL = 0.73; EXPRESSED IN BONE MARROW, SIGNAL = 0.94; EST_HUMAN HIT: AL566115.1, EVALUE 1.00e-95; SWISSPROT HIT: P46100, EVALUE 1.00e-28; NT HIT: gi14757756, EVALUE 8.00e-96
ctggatcaaccaaagctttgttaaatatttctttaagtttccgactcttcacattccttccttgagcaagatttctatacatctcatagcctatgatcataacaccaccatcttcttgccacctctgcagcatgtagcttctctcctgaggacgtttcacagttgctaattcagaaac

SEQ ID NO: 19429 - DNA, 82 bp, Homo sapiens
  MAP TO AL035658.7; EXPRESSED IN BONE MARROW, SIGNAL = 4.1; EXPRESSED IN PLACENTA, SIGNAL =   4; EXPRESSED IN ADULT LIVER, SIGNAL = 4.5; EXPRESSED IN FETAL LIVER, SIGNAL = 4.2; EXPRESSED IN BRAIN, SIGNAL = 4.3; EST_HUMAN HIT: AA889875.1, EVALUE 9.00e-39
caggacaatggcctgttggactccaaagccattcctttccatgtcctttatctcctttacagcagagaagccccactggtgg

SEQ ID NO: 19430 - DNA, 190 bp, Homo sapiens
  MAP TO AC005781.1; EXPRESSED IN ADULT LIVER, SIGNAL = 6.1; EXPRESSED IN FETAL LIVER, SIGNAL =  11; SWISSPROT HIT: P06732, EVALUE 4.00e-33; NT HIT: M21493.1, EVALUE 1.00e-103; EST_HUMAN HIT: BF843371.1, EVALUE 1.00e-103
ctgtacccctcttctgcagacgcaggcgggtgaggatctcctcgaacttggggtgcttgctcaggtgcgccagcttcacatgcacgcctccacgcagcccagtgcccaggttggatgggcaggtgagcacgtagcccaggtgctggttccacatgaaggggtggccagctttcttaaagatctcctcaat

SEQ ID NO: 19431 - DNA, 159 bp, Homo sapiens
  MAP TO AC005321.1; EXPRESSED IN ADULT LIVER, SIGNAL = 0.44; EXPRESSED IN HELA, SIGNAL = 0.56; SWISSPROT HIT: P12614, EVALUE 2.00e+00; NT HIT: gi14769805, EVALUE 1.40e-01; EST_HUMAN HIT: AW500977.1, EVALUE 2.00e-01
atgcttctggggcaccacagagcccttccttgttggggggctgacgagatcccgcaaagcctcccacttcgatctgcctctaatgtctggcgatggggggtgggacagcagggccctgtggcccgcccgcgagcagacaaacctgaggctgaagagaat

SEQ ID NO: 19432 - DNA, 254 bp, Homo sapiens
  MAP TO AC005081.2; EXPRESSED IN PLACENTA, SIGNAL = 0.8; EXPRESSED IN ADULT LIVER, SIGNAL = 0.92; EXPRESSED IN BRAIN, SIGNAL = 1.1; EXPRESSED IN HELA, SIGNAL = 0.64; SWISSPROT HIT: O88573, EVALUE 1.10e-01
aaccaaatggaactccaaaccccacttctgtgccccctcctcccaaaccaggagaacagagtctctgctcagcagaggcggccggggaacccagggcaagagcggcccggatggcttaccctggaaagaacagagccagctccccatggagaagcccgtggccaggccaccaggcaggcagacaggtgctggcagccggacccccgccccgtcagatcgatcctggaccacgtcagggacattaggaggcagcc

SEQ ID NO: 19433 - DNA, 184 bp, Homo sapiens
  MAP TO AC022336.12; EXPRESSED IN FETAL LIVER, SIGNAL = 0.71; EXPRESSED IN BRAIN, SIGNAL = 1.2; EXPRESSED IN BONE MARROW, SIGNAL = 1.3; EXPRESSED IN PLACENTA, SIGNAL = 0.75; EXPRESSED IN ADULT LIVER, SIGNAL =   1; SWISSPROT HIT: O75962, EVALUE 9.80e-02; NT HIT: gi5902139, EVALUE 8.00e-87; EST_HUMAN HIT: BE739153.1, EVALUE 7.00e-82
taaagaaatgcattcacaaagctacccgcaaagatgtggctgtgaaatttgttagcaaaaaaatgaagaagaaagaacaggctgcccacgaggctgccctgcttcagcacctacagcacccccagtacatcactctccatgacacctatgagtcccccacatcctacatcctgatcttggaact

SEQ ID NO: 19434 - DNA, 181 bp, Homo sapiens
  MAP TO AL109835.13; EXPRESSED IN PLACENTA, SIGNAL = 3.9; EXPRESSED IN HEART, SIGNAL = 3.5; EXPRESSED IN ADULT LIVER, SIGNAL = 3.5; EXPRESSED IN BRAIN, SIGNAL = 2.6; EXPRESSED IN FETAL LIVER, SIGNAL = 5.1; EXPRESSED IN BONE MARROW, SIGNAL = 3.3; NT HIT: L03352.1, EVALUE 6.30e-01; SWISSPROT HIT: P08858, EVALUE 7.40e+00
aatattgtgactatgagtgatggctctgcacctgctgagattaaaaagagtaaatgggcacctcctttccttctcatgaggatgtacagaagagcagtggttgaacagaggcatctcatttttatgcttctaggggcttctgcttgtcctacctctggcccacatggtgctcccaatcaag

SEQ ID NO: 19435 - DNA, 456 bp, Homo sapiens
  MAP TO AC005785.1; EXPRESSED IN LUNG, SIGNAL = 3.4; EXPRESSED IN FETAL LIVER, SIGNAL = 1.7; EXPRESSED IN ADULT LIVER, SIGNAL = 1.4; EST_HUMAN HIT: BI223474.1, EVALUE 0.00e+00; NT HIT: gi14761769, EVALUE 0.00e+00; SWISSPROT HIT: O43823, EVALUE 5.00e-70
tcattctgtgggaacagcgtctttagactctgcatcagtttgttccacttcagcatccgcggcagctggggcaggagcaactctggtttgggcactttctgcctctgctgccattgtctcggcgccatttccagcctctgcagcctcacttctggccttggggacgcccttctcatgtgccgttccacagggcacctgctcttccagcagctgttcggcttgaggatcactaccggcctccgctgtgtccgtggggccttcgtcctcagccggctccccgctgctctctggagcgggcgctccttccccatctacggccctcactgctgctgtaatcacctctgctaagacgtccgcggccacctcctcaggtgtctctttcttatcctcacctcctaaattgtcatctccttccatttctggatcaacagtttcactggtgaaagggtcctcacc

SEQ ID NO: 19436 - DNA, 132 bp, Homo sapiens
  MAP TO AL023880.1; EXPRESSED IN BONE MARROW, SIGNAL =   2; EXPRESSED IN ADULT LIVER, SIGNAL = 1.9; EXPRESSED IN PLACENTA, SIGNAL = 2.3; EXPRESSED IN BRAIN, SIGNAL = 1.8; NT HIT: AE006590.1, EVALUE 4.40e-01; EST_HUMAN HIT: BI561156.1, EVALUE 2.00e-68; SWISSPROT HIT: P16861, EVALUE 2.00e+00
atattggatcagaaaggtacactttcagcttcaccattcgggattcaccagcacattttgtaaatgcagcttcctggggcaatgaagattacatcaagtctctttctgacagctttagggttggtgactgtg

SEQ ID NO: 19437 - DNA, 249 bp, Homo sapiens
  MAP TO AC020663.1; EXPRESSED IN ADULT LIVER, SIGNAL = 1.6; EXPRESSED IN FETAL LIVER, SIGNAL = 1.3; EXPRESSED IN HELA, SIGNAL = 1.7; EXPRESSED IN BRAIN, SIGNAL = 1.4; NT HIT: gi14779883, EVALUE 0.00e+00; EST_HUMAN HIT: BF197433.1, EVALUE 0.00e+00; SWISSPROT HIT: P25992, EVALUE 8.30e-01
atgtcggagccccacagggtccagttcacctctctcccaggttccctgaatcctgcgtttttgaagaagtcccggaaggaggaggctggggcaggagaacagcatcaggactgtgagccggctgcagcagctgttcggattacactcaccctctttgaaccagatcacaaacgctgcccagagttcttctacccagagctggtgaagaatatccgagggaaggtaaaaggccttcagcctggagataag

SEQ ID NO: 19438 - DNA, 153 bp, Homo sapiens
  MAP TO AC020893.4; EXPRESSED IN ADULT LIVER, SIGNAL = 0.88; EXPRESSED IN LUNG, SIGNAL = 1.1; EXPRESSED IN HELA, SIGNAL = 1.1; EXPRESSED IN BRAIN, SIGNAL = 0.91; EXPRESSED IN PLACENTA, SIGNAL = 1.3; SWISSPROT HIT: P54497, EVALUE 3.90e-01; NT HIT: gi16159662, EVALUE 6.00e-81; EST_HUMAN HIT: AI563885.1, EVALUE 8.00e-81
actaaagaagaagttgcaggaactctggaagctgtccaaaccattcagagcataactcaggccctccagaaatccaaggaaaattacaatgccaagtgtgtagaacaggagcgtttgaaaaaggaaggagctacacaaagagaaatagaaaag

SEQ ID NO: 19439 - DNA, 132 bp, Homo sapiens
  MAP TO AC000392.1; EXPRESSED IN BRAIN, SIGNAL = 0.61; EXPRESSED IN BONE MARROW, SIGNAL = 0.59; EXPRESSED IN ADULT LIVER, SIGNAL = 0.51; SWISSPROT HIT: Q9RSK7, EVALUE 7.90e-02; NT HIT: AL603647.1, EVALUE 4.40e-01; EST_HUMAN HIT: AW069362.1, EVALUE 7.00e-38
ctctgacctatgtccaaagcaaccatcgtactaatgccccgttcaccccgagggtgctgctgctcgggcctgtgggcagtgggaaaagtctgcaggccgccctcctggcccagaaatacaggcttgtcaatg

SEQ ID NO: 19440 - DNA, 166 bp, Homo sapiens
  MAP TO AC008536.5; EXPRESSED IN ADULT LIVER, SIGNAL =   1; EXPRESSED IN BRAIN, SIGNAL = 0.97; EXPRESSED IN BONE MARROW, SIGNAL = 0.66; NT HIT: U02280.1, EVALUE 1.50e-01; EST_HUMAN HIT: AL524644.1, EVALUE 9.00e-81; SWISSPROT HIT: P06274, EVALUE 3.40e+00
tcttgttacatacccgaatttctcttctagtttttgggttaaattttgtgtcttttggaattcctggaatgatgtacaaacgagcaagctggtcattgattcgaagttcaatgtaatcatccttacaaatatagtctttgatatcaaaaccagtttcttcaaagac

SEQ ID NO: 19441 - DNA, 188 bp, Homo sapiens
  MAP TO AC004213.1; EXPRESSED IN PLACENTA, SIGNAL = 0.49; EXPRESSED IN ADULT LIVER, SIGNAL = 0.5; EXPRESSED IN BRAIN, SIGNAL = 0.93; EXPRESSED IN LUNG, SIGNAL = 1.5; NT HIT: gi13435156, EVALUE 2.60e+00; EST_HUMAN HIT: AA350148.1, EVALUE 9.70e-01; SWISSPROT HIT: Q02817, EVALUE 8.50e-01
ggtttttcagggagaagttgcttaaggaggctcctgcgtggaccgagtccttcctgagggtttgctggatgcccccggacactgtgcagctgtgtcctccggggtccctaaagctggcacgttctgctgtgtacccagaggtggggacagatgctgccagctccaccttacagctgctacatgaaatt

SEQ ID NO: 19442 - DNA, 255 bp, Homo sapiens
  MAP TO AC024077.2; EXPRESSED IN PLACENTA, SIGNAL = 1.5e+02; EXPRESSED IN ADULT LIVER, SIGNAL = 0.65; EXPRESSED IN FETAL LIVER, SIGNAL = 0.6; EXPRESSED IN LUNG, SIGNAL = 0.62; EXPRESSED IN HELA, SIGNAL = 0.58; NT HIT: gi14764628, EVALUE 0.00e+00; EST_HUMAN HIT: BE930990.1, EVALUE 0.00e+00; SWISSPROT HIT: P11465, EVALUE 2.00e-45
atggtccagacctccccagaattcacccttcatacaccaattaccgttcaggagataacctctacttgtcttgcttcgcgaactctaacccaccggcacagtattcttggacaattaatgggaagtttcagcaatcaggacaaaatctgtttatcccccaaattactacaaagcatagcgggctctatgtttgctctgttcgtaactcagccactggcgaggaaagctccacatcgttgacagtcaaagtctctg

SEQ ID NO: 19443 - DNA, 228 bp, Homo sapiens
  MAP TO AC020908.5; EXPRESSED IN HEART, SIGNAL = 0.98; EXPRESSED IN BRAIN, SIGNAL = 0.66; EXPRESSED IN PLACENTA, SIGNAL =   1; EXPRESSED IN BONE MARROW, SIGNAL = 0.69; EXPRESSED IN ADULT LIVER, SIGNAL = 0.99; NT HIT: gi15302735, EVALUE 1.00e-125; SWISSPROT HIT: Q9V776, EVALUE 3.00e-01
atcctcggctcccgggacttcgacatctgcgtgagggacatgatcccagcggacgtccctgagcacttccggggcagggtcagcatctgggccatggtgaccagtgtggacgggagccagcaggtcgcgttcgatgactccacccccgtgcagaggcagctggtggacatccggtactccaaggacacgaggaagcagttcaagccgggcctggcctacgtggggaag

SEQ ID NO: 19444 - DNA, 129 bp, Homo sapiens
  MAP TO AC004754.1; EXPRESSED IN ADULT LIVER, SIGNAL = 4.1; EXPRESSED IN HEART, SIGNAL = 2.7; EXPRESSED IN BRAIN, SIGNAL = 3.2; EST_HUMAN HIT: BE773955.1, EVALUE 1.60e-01; NT HIT: AL161565.2, EVALUE 2.80e-02; SWISSPROT HIT: Q15427, EVALUE 1.50e+00
gttcctgaagctctggctacggctcctggtatttttaatgaccgcagtagagaaaaacattggtatcttcttgctgttgatgagcaaatctttggacctgtctcatggtgtctttatttgcaaactggt

SEQ ID NO: 19445 - DNA, 181 bp, Homo sapiens
  MAP TO AL035450.1; EXPRESSED IN BRAIN, SIGNAL =  10; EXPRESSED IN LUNG, SIGNAL =  18; EXPRESSED IN FETAL LIVER, SIGNAL = 9.2; EXPRESSED IN PLACENTA, SIGNAL = 8.6; EXPRESSED IN ADULT LIVER, SIGNAL =  12; EXPRESSED IN HELA, SIGNAL = 7.3; EXPRESSED IN BONE MARROW, SIGNAL =  14; EXPRESSED IN HEART, SIGNAL = 4.5; SWISSPROT HIT: P40051, EVALUE 2.00e-07; EST_HUMAN HIT: BE788822.1, EVALUE 5.00e-95; NT HIT: gi14779135, EVALUE 1.00e-97
gttcaccgcacctcaggcagaactctatgaagccgttctagagatccaaagagattgtttggccctctgcttccctgggacaagcttggagaacatctacagcatgatgctgaccctgataggacagaagcttaaagacttggggatcatgaagaacattaaggaaaataatgccttcaag

SEQ ID NO: 19446 - DNA, 177 bp, Homo sapiens
  MAP TO AC024561.4; EXPRESSED IN ADULT LIVER, SIGNAL = 0.36; SWISSPROT HIT: Q39043, EVALUE 1.90e+00; EST_HUMAN HIT: AI024830.1, EVALUE 5.00e-95; NT HIT: AF005731.1, EVALUE 6.20e-01
attgtcacctgtaatgtcaaagtcacggaagagatctttgagttcctgtttttgaatattgaagagaaatctgtacatttcgaagttttttgcaccaattctcagatcccctttcaggtcaagcaggtcaaagacaggccgggaatgacgatacataaactgtccttccaaatggtt

SEQ ID NO: 19447 - DNA, 250 bp, Homo sapiens
  MAP TO AC018725.1; EXPRESSED IN FETAL LIVER, SIGNAL = 2.7; EXPRESSED IN BRAIN, SIGNAL = 1.9; EXPRESSED IN HELA, SIGNAL = 3.2; EXPRESSED IN PLACENTA, SIGNAL = 1.9; EXPRESSED IN BONE MARROW, SIGNAL = 1.8; EXPRESSED IN ADULT LIVER, SIGNAL = 1.8; NT HIT: gi7706778, EVALUE 0.00e+00; SWISSPROT HIT: Q12901, EVALUE 6.00e-48; EST_HUMAN HIT: AW949677.1, EVALUE 0.00e+00
aaccatcagcgagtccacagtggagaaaaaagcttcaaatgtgaagaatgtgggaagggattttatacaaattcacaactgtcttcccatcagagatcccacagtggtgaaaagccatataaatgtgaggagtgtgggaagggctatgttactaagtttaatcttgacttgcaccagagggtccacacgggagagagaccttataattgtaaggaatgtgggaagaactttagccgggcctcaagtattt

SEQ ID NO: 19448 - DNA, 159 bp, Homo sapiens
  MAP TO AC005266.1; EXPRESSED IN LUNG, SIGNAL = 0.6; EXPRESSED IN FETAL LIVER, SIGNAL = 0.55; EXPRESSED IN BONE MARROW, SIGNAL = 0.6; EXPRESSED IN ADULT LIVER, SIGNAL = 0.84; EST_HUMAN HIT: BF216471.1, EVALUE 2.00e-01; NT HIT: Z46777.1, EVALUE 1.40e-01; SWISSPROT HIT: P48054, EVALUE 1.50e+00
ggggctgttggagaccttggagaaggacaagttcagctgtcctcaggcctgagagcagaacctgctcaattgtcattcctgagcttcccccatgagctcacgctacagatgggtgcacatcagaaccgcacatcagaggcatgcaaagtcatccactga

SEQ ID NO: 19449 - DNA, 275 bp, Homo sapiens
  MAP TO AC008981.4; EXPRESSED IN BRAIN, SIGNAL = 0.57; EXPRESSED IN BONE MARROW, SIGNAL = 0.79; EXPRESSED IN ADULT LIVER, SIGNAL = 0.79; EST_HUMAN HIT: BF732934.1, EVALUE 4.00e-10; NT HIT: AF367979.1, EVALUE 1.60e-02; SWISSPROT HIT: P03340, EVALUE 1.20e-02
atgaatgcagcatttgtaaggcaagcccagggtgacatcagagagaagctgcaaaagctagagggttttgcaggcatgaatgccacccagcttatagaagtggccaccgaggtgtacattaactgtgaccaagaggcaaaaaaggaaacagagcagaggcttaggaaaaaggccaacctgttagcggcagccctcacaaaaaggaaaattaacattgtaaagggacgcgaatgttcacatgggtgtgggcatggaagaggccaagttgaacagcg

SEQ ID NO: 19450 - DNA, 154 bp, Homo sapiens
  MAP TO AC010169.7; EXPRESSED IN ADULT LIVER, SIGNAL = 0.6; EXPRESSED IN BRAIN, SIGNAL = 0.54; EXPRESSED IN HELA, SIGNAL = 0.58; EXPRESSED IN BONE MARROW, SIGNAL = 0.6; NT HIT: X75299.1, EVALUE 1.00e-81; EST_HUMAN HIT: BI910800.1, EVALUE 2.00e-81; SWISSPROT HIT: P32241, EVALUE 3.00e-18
cccagccgatgagtatgtacccccagaagtacttccgctcagagaagaaggagacggcaagcagggtgtacaggtagaggccctccaccagcagccagaagaagttagccatgacacaatattggaaaaagaccatggctgccttacagcccac

SEQ ID NO: 19451 - DNA, 86 bp, Homo sapiens
  MAP TO AL034409.4; EXPRESSED IN LUNG, SIGNAL = 3.2; EXPRESSED IN FETAL LIVER, SIGNAL = 2.8; EXPRESSED IN ADULT LIVER, SIGNAL = 2.9; EXPRESSED IN HEART, SIGNAL = 1.6; EST_HUMAN HIT: AW858844.1, EVALUE 3.00e-17; NT HIT: L39792.1, EVALUE 3.00e-22
ttaaacaccaagggaagactttctttccgagtccgtgactggagccggcgttttgggttcacggataaaacgcatctcctctgtct

SEQ ID NO: 19452 - DNA, 195 bp, Homo sapiens
  MAP TO AC022154.3; EXPRESSED IN ADULT LIVER, SIGNAL = 0.8; EXPRESSED IN HEART, SIGNAL = 1.1; EXPRESSED IN FETAL LIVER, SIGNAL = 1.1; EXPRESSED IN BRAIN, SIGNAL = 0.93; EXPRESSED IN HELA, SIGNAL =   1; EXPRESSED IN PLACENTA, SIGNAL = 1.3; EST_HUMAN HIT: R73584.1, EVALUE 1.00e-105; NT HIT: U92322.1, EVALUE 1.00e-106; SWISSPROT HIT: P50234, EVALUE 1.00e-06
gctccaggctggtgttgggctcaaggctgggcttgggctcaggctcagggctgggctcaggatctgggctgccgtcctcctccgggtcttcatcccaggggaaggtcggcatcccccgcatctgcttgcggtaggcacgatcgaaggcttcgctctgggccaccgtgaagtggttcttccagtcgccacagaccc

SEQ ID NO: 19453 - DNA, 264 bp, Homo sapiens
  MAP TO AL031600.4; EXPRESSED IN BRAIN, SIGNAL = 4.7; EXPRESSED IN FETAL LIVER, SIGNAL = 4.1; EXPRESSED IN LUNG, SIGNAL = 1.3; EXPRESSED IN BONE MARROW, SIGNAL =   3; EXPRESSED IN PLACENTA, SIGNAL = 2.8; EXPRESSED IN ADULT LIVER, SIGNAL = 2.1; EXPRESSED IN HEART, SIGNAL = 5.9; NT HIT: AF236365.1, EVALUE 1.60e-02; EST_HUMAN HIT: BI022243.1, EVALUE 0.00e+00
ctcagggaagggaagagcagcacacacgttggggccccagggaagggtctcatgtcgttggggtagctgctctcactcttcccagcccagacacagatcaaggacgtggtggaggcggaggtggagatggaaggaggggagggcagagtgaggagatggaaggaggggcggagtggggtgagggtgcccaggcctgtgctggtaggtcaggagcagcaccccagggctctgggggtgaagaggccctggtgtgtctgctcctcc

SEQ ID NO: 19454 - DNA, 196 bp, Homo sapiens
  MAP TO AF187320.1; EXPRESSED IN ADULT LIVER, SIGNAL = 3.7; EXPRESSED IN HEART, SIGNAL = 3.5; EXPRESSED IN FETAL LIVER, SIGNAL = 6.8; EXPRESSED IN PLACENTA, SIGNAL = 4.1; EST_HUMAN HIT: BF514758.1, EVALUE 1.00e-106; SWISSPROT HIT: P02786, EVALUE 5.00e-33; NT HIT: gi14720544, EVALUE 1.00e-106
gatttatgattggctacttgggctattgtaaaggggtagaaccaaaaactgagtgtgagagactggcaggaaccgagtctccagtgagggaggagccaggagaggacttccctgcagcacgtcgcttatattgggatgacctgaagagaaagttgtcggagaaactggacagcacagacttcaccggcaccatcaa

SEQ ID NO: 19455 - DNA, 191 bp, Homo sapiens
  MAP TO AL096870.3; EXPRESSED IN LUNG, SIGNAL = 1.8; EXPRESSED IN PLACENTA, SIGNAL = 1.2; EXPRESSED IN ADULT LIVER, SIGNAL = 3.9; EST_HUMAN HIT: BG420177.1, EVALUE 1.00e-103; SWISSPROT HIT: Q9UHD4, EVALUE 2.00e-30; NT HIT: gi14750730, EVALUE 1.00e-103
agtggagtgctgtcatatggcctgggacgggagaggcccaagcacagcaaggacatcgcccgattcacctttgacgtgtacaagcaaaaccctcgagacctctttggcagcctgaatgtcaaagccacattctacgggctctactctatgagttgtgactttcaaggacttggcccaaagaaagtactcag

SEQ ID NO: 19456 - DNA, 225 bp, Homo sapiens
  MAP TO AF274858.1; EXPRESSED IN BONE MARROW, SIGNAL = 1.4; EXPRESSED IN PLACENTA, SIGNAL = 1.4; EXPRESSED IN ADULT LIVER, SIGNAL = 1.4; EXPRESSED IN HEART, SIGNAL = 1.3; EXPRESSED IN BRAIN, SIGNAL = 1.6; EXPRESSED IN FETAL LIVER, SIGNAL = 1.7; SWISSPROT HIT: O75909, EVALUE 7.30e-01; EST_HUMAN HIT: AW651798.1, EVALUE 1.00e-109; NT HIT: gi15314108, EVALUE 1.00e-109
gtccagtgtgccaagcagccacctcacctgccaccacggcttctcagcctcgacctcggcgggcacctcaactccgtagacctgcagggccaggtagagcaccgccacggcgatgtgctgggcctggaagcggaggcacagcgccccatggtagctgtcccgcagcagggcccaggcggtgacggcaacaggggtccgctgccagctgtggcggttcagccagtt

SEQ ID NO: 19457 - DNA, 302 bp, Homo sapiens
  MAP TO AC016749.4; EXPRESSED IN FETAL LIVER, SIGNAL = 1.6; EXPRESSED IN BONE MARROW, SIGNAL = 0.79; EXPRESSED IN PLACENTA, SIGNAL = 1.3; EXPRESSED IN ADULT LIVER, SIGNAL = 0.88; EXPRESSED IN HEART, SIGNAL = 1.6; NT HIT: AF059571.1, EVALUE 2.80e-01; SWISSPROT HIT: P24789, EVALUE 4.70e+00; EST_HUMAN HIT: BF209906.1, EVALUE 1.60e+00
actgccaagcatccaaattgcccatttctcgttcttggagaatggatgcctggattgtccctgcaccataatttgtattagggctggcttgcataattcctctaccataattaagaggcagacaagcctggatcgttcccccactgtaactggctgttgggtgagcctgaagcttccctttgccatagttaatggtggagtatgcaacaatgggagcagcaagccgagtctcaggctcccattccaaaaattcaaaaggctgagctgggggtggccattccagatgttctgctaaaggcaca

SEQ ID NO: 19458 - DNA, 250 bp, Homo sapiens
  MAP TO AC005163.2; EXPRESSED IN HEART, SIGNAL = 2.2; EXPRESSED IN BRAIN, SIGNAL = 1.9; EXPRESSED IN HELA, SIGNAL = 2.3; EXPRESSED IN PLACENTA, SIGNAL = 2.1; EXPRESSED IN ADULT LIVER, SIGNAL = 1.9; NT HIT: U51472.2, EVALUE 3.00e-65; SWISSPROT HIT: P04461, EVALUE 3.00e-21; EST_HUMAN HIT: BF826960.1, EVALUE 9.00e-05
cccatgggcatcttctccatcttggaggaacagtgcgtcttccccaaagccaccgatgccacgttcaaggcagccctgtacgacaaccacctgggcaagtccagcaacttcctgaagcccaaggggggcaagagcaaggggcccgaggtccacttcgagctggttcactacgcaggcaccgtgagtactggcctcagggtccctctgtgtttcaggtcccagctggctgccatcactgccgctgttgtag

SEQ ID NO: 19459 - DNA, 217 bp, Homo sapiens
  MAP TO AC022336.12; EXPRESSED IN ADULT LIVER, SIGNAL = 1.7; EXPRESSED IN FETAL LIVER, SIGNAL = 1.7; EXPRESSED IN BRAIN, SIGNAL = 1.4; EXPRESSED IN LUNG, SIGNAL = 1.5; EXPRESSED IN PLACENTA, SIGNAL = 1.6; EXPRESSED IN BONE MARROW, SIGNAL = 1.4; NT HIT: gi14743858, EVALUE 3.00e-22; EST_HUMAN HIT: BG461372.1, EVALUE 1.00e-15; SWISSPROT HIT: P70394, EVALUE 5.00e-13
gcttcgcatacagcttgggaagaacataggaggcaaagttgctcactgcagtaatgtccctgactgctgcggcctctactatgttttgcacgacgagcttcttaatggtcttttccttgggcatgcatcggacatagtatgtgccactactggccacagccctttttggcacgatcattgttcctttcttttctttgtcatcttggaagtaaggacc

SEQ ID NO: 19460 - DNA, 112 bp, Homo sapiens
  MAP TO AC005582.1; EXPRESSED IN BONE MARROW, SIGNAL = 0.46; EXPRESSED IN ADULT LIVER, SIGNAL = 0.62; EXPRESSED IN FETAL LIVER, SIGNAL = 0.41; NT HIT: M19496.1, EVALUE 3.60e-01; EST_HUMAN HIT: BE858657.1, EVALUE 5.40e-01; SWISSPROT HIT: P57544, EVALUE 7.90e+00
gattctttcagactgggggtgtagctccagcaggctgtggaaatcctggagctgatcagaaaaggaagtgtgaagacagtgtcagaagtcattttgctattaaccagcaaag

SEQ ID NO: 19461 - DNA, 84 bp, Homo sapiens
  MAP TO AC004400.1; EXPRESSED IN BONE MARROW, SIGNAL = 0.71; EXPRESSED IN PLACENTA, SIGNAL =   1; EXPRESSED IN HEART, SIGNAL = 1.4; EXPRESSED IN ADULT LIVER, SIGNAL = 0.65; EXPRESSED IN BRAIN, SIGNAL = 0.73; EXPRESSED IN FETAL LIVER, SIGNAL = 0.78; NT HIT: gi13752570, EVALUE 6.50e-02; EST_HUMAN HIT: BE565717.1, EVALUE 6.00e-03; SWISSPROT HIT: O32419, EVALUE 6.20e+00
ctgcacgcgcggggaggagctgacatcccaaaaggccacgcagaggtgggagctggaggacacagccctgcagtatctgctggg

SEQ ID NO: 19462 - DNA, 179 bp, Homo sapiens
  MAP TO AC005486.2; EXPRESSED IN PLACENTA, SIGNAL = 0.48; EXPRESSED IN ADULT LIVER, SIGNAL = 0.61; EXPRESSED IN LUNG, SIGNAL = 2.2; SWISSPROT HIT: Q9Y5A7, EVALUE 5.00e-27; NT HIT: gi14740080, EVALUE 2.00e-96; EST_HUMAN HIT: AA862416.1, EVALUE 3.00e-96
ttagtttttctttgttgctgacttcctattttctacataggataggtactctgcaataataatttcttcatcttccagagttgagtcaagatagtcttcctcatgctctggaatgtcttccagtatctcattgacggcctctgtctccatgtcttcgtctgttgaggcactagaggttc

SEQ ID NO: 19463 - DNA, 88 bp, Homo sapiens
  MAP TO AC003111.1; EXPRESSED IN HELA, SIGNAL = 0.52; EXPRESSED IN ADULT LIVER, SIGNAL = 0.45; EXPRESSED IN LUNG, SIGNAL = 0.93; NT HIT: U56907.1, EVALUE 2.70e-01; EST_HUMAN HIT: BG177687.1, EVALUE 1.60e+00; SWISSPROT HIT: P21551, EVALUE 8.10e+00
cctggatgtcactgttttgagtggtgctgccattggcctccttgaacttttagcatcgacagtagtcggctgttgtggagacacccag

SEQ ID NO: 19464 - DNA, 112 bp, Homo sapiens
  MAP TO AC006126.1; EXPRESSED IN ADULT LIVER, SIGNAL =   2; EXPRESSED IN FETAL LIVER, SIGNAL = 0.77; EXPRESSED IN BONE MARROW, SIGNAL = 1.3; NT HIT: AF255556.1, EVALUE 2.30e-02; SWISSPROT HIT: P02467, EVALUE 4.70e-02
cttaacatctgtgacgcattcatcctccaaaccccgcagggtgccaggggagagaaggggccccagctccccattctccagggcggccatgtccaccagccctaggacctct

SEQ ID NO: 19465 - DNA, 184 bp, Homo sapiens
  MAP TO AC036102.3; EXPRESSED IN FETAL LIVER, SIGNAL = 1.5; EXPRESSED IN BONE MARROW, SIGNAL = 1.4; EXPRESSED IN PLACENTA, SIGNAL = 1.5; EXPRESSED IN ADULT LIVER, SIGNAL = 1.1; EXPRESSED IN BRAIN, SIGNAL = 1.4; NT HIT: gi16191883, EVALUE 5.00e-94; SWISSPROT HIT: Q15647, EVALUE 1.00e-27; EST_HUMAN HIT: BI907326.1, EVALUE 2.00e-94
caaacttgcctctgataactcccataatcagtggatgagggatggcagacttgatgtgaagtgactgttcatagagtgctttaagttttttgttatttttctgtgctgtgtacatttgaatttccaaagcatatatttctaataactgtgtaccttttttcagatcatcttctccatcatcagt

SEQ ID NO: 19466 - DNA, 146 bp, Homo sapiens
  MAP TO AC020663.1; EXPRESSED IN PLACENTA, SIGNAL = 2.4; EXPRESSED IN ADULT LIVER, SIGNAL = 2.2; EXPRESSED IN LUNG, SIGNAL = 1.7; EXPRESSED IN FETAL LIVER, SIGNAL = 2.6; EXPRESSED IN HELA, SIGNAL = 1.4; NT HIT: U85493.1, EVALUE 1.30e-01; SWISSPROT HIT: Q9UH03, EVALUE 9.00e-09; EST_HUMAN HIT: BI832349.1, EVALUE 6.00e-60
cccagccctgcccgggcatccagatcaccctgcgcctgaaggcctctcgctcctccatggtcaggctgtcggccctggcaatcacgggcaccacattcacagtccggcacagccgctgcaggaactcaatgtccaggggccgcagg

SEQ ID NO: 19467 - DNA, 132 bp, Homo sapiens
  MAP TO AL031709.10; EXPRESSED IN BRAIN, SIGNAL = 2.3; EXPRESSED IN ADULT LIVER, SIGNAL = 2.8; EXPRESSED IN PLACENTA, SIGNAL = 2.2; EXPRESSED IN HEART, SIGNAL = 2.6; EXPRESSED IN FETAL LIVER, SIGNAL = 3.4; NT HIT: gi14776618, EVALUE 2.00e-68; EST_HUMAN HIT: AI800313.1, EVALUE 2.00e-68; SWISSPROT HIT: P50617, EVALUE 1.50e+00
ggccatgagaagttgctgaggacactttttgaggatgctggctacttaaagaccccagaagaaaatgaacccacccagctggagggaggtcctgacagcttggggtttgagaccctggaaaactgcaggaag

SEQ ID NO: 19468 - DNA, 143 bp, Homo sapiens
  MAP TO AF087017.1; EXPRESSED IN ADULT LIVER, SIGNAL = 1.8; EXPRESSED IN HELA, SIGNAL =   2; EXPRESSED IN BONE MARROW, SIGNAL = 1.1; EXPRESSED IN PLACENTA, SIGNAL = 1.9; EST_HUMAN HIT: AI796495.1, EVALUE 1.80e-01; SWISSPROT HIT: P08572, EVALUE 2.60e+00
cttggaggccaccatgggctggagcccagcacagccaccatcgcatcttggctgtccagctcaggacggccagttccaaggcgtccaggctggagctctgggggcggaagagcacaagctcctgaagagcctctggtccagcc

SEQ ID NO: 19469 - DNA, 182 bp, Homo sapiens
  MAP TO AC004471.2; EXPRESSED IN BONE MARROW, SIGNAL =   3; EXPRESSED IN PLACENTA, SIGNAL = 4.4; EXPRESSED IN HEART, SIGNAL = 4.1; EXPRESSED IN ADULT LIVER, SIGNAL = 2.7; EXPRESSED IN FETAL LIVER, SIGNAL = 4.1; EXPRESSED IN BRAIN, SIGNAL = 3.4; SWISSPROT HIT: P34420, EVALUE 1.00e-07; NT HIT: L77570.1, EVALUE 3.00e-98; EST_HUMAN HIT: BI824601.1, EVALUE 3.00e-90
agggtcctcatacagggtggcgggggctcccgggacatcttgcccaaggcagagccaaacttgatggcaatctggcgcatccgttccaagtctccattctcctcggcttccaggtactccttctgtgcctggagcttctccacatcaggaaagaaatccctttggatgaccgtctggaggcc

SEQ ID NO: 19470 - DNA, 141 bp, Homo sapiens
  MAP TO AC009320.7; EXPRESSED IN HEART, SIGNAL = 1.1; EXPRESSED IN BRAIN, SIGNAL = 0.95; EXPRESSED IN LUNG, SIGNAL = 0.78; EXPRESSED IN FETAL LIVER, SIGNAL = 0.71; EXPRESSED IN PLACENTA, SIGNAL =   1; EXPRESSED IN ADULT LIVER, SIGNAL = 0.99; EST_HUMAN HIT: BE612417.1, EVALUE 1.00e-73; SWISSPROT HIT: O43765, EVALUE 1.00e-01; NT HIT: gi14764139, EVALUE 7.00e-74
ggaaaatatgtgtctgcaagagcttattatgagagagccttacagctggttccagacagcaaactgctgaaggaaaatcttgccaaattggatcgcctagaaaaacgattacaagaagttcgagaaaaggatcaaacatag

SEQ ID NO: 19471 - DNA, 232 bp, Homo sapiens
  MAP TO AL031719.10; EXPRESSED IN PLACENTA, SIGNAL = 2.9; EXPRESSED IN ADULT LIVER, SIGNAL = 3.8; EXPRESSED IN HEART, SIGNAL = 3.2; EXPRESSED IN BRAIN, SIGNAL = 4.2; NT HIT: gi14774693, EVALUE 1.00e-128; EST_HUMAN HIT: BG202414.1, EVALUE 1.00e-125; SWISSPROT HIT: O84880, EVALUE 2.00e+00
gttttgtcctggtcatcgggctcgtgactttctacagaattggcccatacaccaacctgtcctggtcctgctacctgaacattggcgcctgccttctggccacgctggcggcagccatgctcatctggaacattctccacaagagggaggactgcatggccccccgggtgattgtcatcagccgctccctgacagcgcgctttcgccgtgggctggacaatgactacgtgga

SEQ ID NO: 19472 - DNA, 260 bp, Homo sapiens
  MAP TO AC008821.4; EXPRESSED IN BONE MARROW, SIGNAL = 0.82; EXPRESSED IN PLACENTA, SIGNAL = 1.7; EXPRESSED IN ADULT LIVER, SIGNAL = 1.2; EXPRESSED IN HEART, SIGNAL = 1.5; EXPRESSED IN BRAIN, SIGNAL = 1.1; EXPRESSED IN LUNG, SIGNAL = 0.93; NT HIT: gi13646934, EVALUE 0.00e+00; EST_HUMAN HIT: AW366279.1, EVALUE 0.00e+00; SWISSPROT HIT: O00472, EVALUE 2.00e-43
ggaaaagagtgcaaattcggaaagcacctcaagctgtttcagatacagttcctgagaggaaaaggtcaacccccatgaaccctgcaaatacaattcgaaagacacatagcagcagcaccatctctcagaggccatacagggacagggtgattcacttactggccctgaaggcctacaagaaaccggagctacttgctagactccagaaagatggtgtcaatcaaaaagacaagaactccctgggagcaattctgcaacag

SEQ ID NO: 19473 - DNA, 228 bp, Homo sapiens
  MAP TO AL118558.2; EXPRESSED IN HEART, SIGNAL = 4.9; EXPRESSED IN ADULT LIVER, SIGNAL = 3.8; EXPRESSED IN FETAL LIVER, SIGNAL = 4.3; EXPRESSED IN BRAIN, SIGNAL = 6.4; EXPRESSED IN PLACENTA, SIGNAL = 5.6; NT HIT: gi9506548, EVALUE 1.00e-42; EST_HUMAN HIT: BF747695.1, EVALUE 6.00e-98; SWISSPROT HIT: Q9JHU4, EVALUE 4.00e-39
gttatggtagcatgctttgaagtttttcagacttgggatgatgagtatgagaaacttcaggtattgttgagagacatcgtcaaaagaaaaagggaagaaaatctgaagatggtgtggcgtatcaaccctgcccacaggaagctgcaggcccgccttgaccagatgagaaaatttagacgccagcatgaacagctaagagctgttatcgtcagggtcctgaggccacag

SEQ ID NO: 19474 - DNA, 208 bp, Homo sapiens
  MAP TO AC020728.4; EXPRESSED IN BONE MARROW, SIGNAL = 0.99; EXPRESSED IN PLACENTA, SIGNAL = 1.5; EXPRESSED IN ADULT LIVER, SIGNAL =   1; EXPRESSED IN BRAIN, SIGNAL = 0.89; EXPRESSED IN FETAL LIVER, SIGNAL = 1.6; EXPRESSED IN HELA, SIGNAL = 1.5; NT HIT: gi14721268, EVALUE 2.00e-72; SWISSPROT HIT: P42285, EVALUE 1.00e-20; EST_HUMAN HIT: AL120792.1, EVALUE 3.00e-72
tattttatgatgttgcccttaaagtaaaagtggatactgcagaattcattccaaactatttacttttcaggaaacgttttgatggtaaattacaatcagaatcaactaataatggaaaaaataagagagatgtagatttcgaaggtacagatgaacccatttttggaaagaagcccaggatagaagagtcaataactgaagacttaag

SEQ ID NO: 19475 - DNA, 294 bp, Homo sapiens
  MAP TO AC024070.2; EXPRESSED IN BRAIN, SIGNAL = 0.86; EXPRESSED IN HELA, SIGNAL = 0.78; EXPRESSED IN FETAL LIVER, SIGNAL = 0.89; EXPRESSED IN BONE MARROW, SIGNAL = 0.76; EXPRESSED IN PLACENTA, SIGNAL = 0.94; EXPRESSED IN ADULT LIVER, SIGNAL = 0.93; NT HIT: D64136.1, EVALUE 6.90e-02; EST_HUMAN HIT: AI684831.1, EVALUE 1.00e-117; SWISSPROT HIT: O88884, EVALUE 6.70e-01
gacattggtgtgtcatttctataccatctggctacgagaggagccgactgaaagtcacactgccggaggaggggagaggtgctcttccgtttctggtgtctgtagccatctccagtggtagctgcagtgataataatgctgcggtgccgacagttctggaaggagcaacaacagtgatttcagcagcagcagtattgcgggatccccacgatggagcaagggaaataattctggaagcaatgacaatatcagctgtggctatagcagctgagatgtgagttctcacggtggcag

SEQ ID NO: 19476 - DNA, 451 bp, Homo sapiens
  MAP TO AF006501.4; EXPRESSED IN HEART, SIGNAL = 1.9; EXPRESSED IN ADULT LIVER, SIGNAL = 2.3; EXPRESSED IN BONE MARROW, SIGNAL =   2; EXPRESSED IN PLACENTA, SIGNAL = 1.1; NT HIT: gi14778835, EVALUE 0.00e+00; EST_HUMAN HIT: BE897246.1, EVALUE 0.00e+00; SWISSPROT HIT: P56693, EVALUE 3.00e-65
agggaggtgtaggcgatctgtgaggtggatggctggtcggtgtagtgtgggggcccctggggccccgcggtctctgtcttcacctgggctttggcatccacaccaggtggtgagaccgtgggcagagccacgcctggtggcttggagatccaggcggagtgtccactggccacggccagggcactgcccagcccatagccggctgctgagtagctgctcacgtggcctgggtgcccattgggcggcaggtactggtccaactcagccacatcaaaggtctccatgttggacattacctcgtggctgatctcaccaatgtccacgttgccgaagtcgatgtgaggcttcccgccctcccccatggagcgcccgtcccgcttcgggtctgccttgcccgactgcagctctgtcttcggggtggttggaggggtgggtgggccatggctctggc

SEQ ID NO: 19477 - DNA, 206 bp, Homo sapiens
  MAP TO AC004790.1; EXPRESSED IN BRAIN, SIGNAL = 1.1; EXPRESSED IN BONE MARROW, SIGNAL = 0.8; EXPRESSED IN PLACENTA, SIGNAL = 0.87; EXPRESSED IN ADULT LIVER, SIGNAL =   1; NT HIT: X63596.1, EVALUE 3.00e-03; SWISSPROT HIT: Q92997, EVALUE 1.40e+00; EST_HUMAN HIT: BG957204.1, EVALUE 4.20e+00
atggggctcacccggccggcggtgtctcagagcccccgggagcggttcagatgttctctgaagcgctcaggtgcagcgttgcctttgggcgatgttgtctcacaggatggacgtggaggaagacgtggctaccctacttgcacaggagcagggggcatcattgcccagtgtgagcaggtacaggtcgggctgctccctcgagagag

SEQ ID NO: 19478 - DNA, 206 bp, Homo sapiens
  MAP TO AL118559.4; EXPRESSED IN FETAL LIVER, SIGNAL =   3; EXPRESSED IN PLACENTA, SIGNAL = 3.4; EXPRESSED IN ADULT LIVER, SIGNAL = 2.6; SWISSPROT HIT: P12883, EVALUE 1.40e+00; EST_HUMAN HIT: BG739870.1, EVALUE 2.70e-01
ctcattaatgatgatcctgctggccatccgtagtcgggtcctgggtccaaacttattggtgatcatgattcgtaagcctgcttcagggaaggtgaacttgggagggctggagctcataatctcgtccaccatcaccacggggttcttgccatactgtggcttctccttcactgttgagcgcaacaccgtgattagtgctgatctct

SEQ ID NO: 19479 - DNA, 79 bp, Homo sapiens
  MAP TO AC006163.1; EXPRESSED IN ADULT LIVER, SIGNAL = 0.78; NT HIT: M58318.1, EVALUE 2.00e-11; EST_HUMAN HIT: AA996191.1, EVALUE 4.00e-13
agcagggctgttactggcggtgaatccgtaggtgtctgcagcaacctcaattcctacctcctcagaagaaagaatttga

SEQ ID NO: 19480 - DNA, 114 bp, Homo sapiens
  MAP TO AC006231.18; EXPRESSED IN ADULT LIVER, SIGNAL = 0.82; EXPRESSED IN PLACENTA, SIGNAL = 0.59; NT HIT: AL161558.2, EVALUE 3.70e-01; EST_HUMAN HIT: BI036308.1, EVALUE 5.50e-01
ctagatgctgcctgccttatggcctccatccttcatctttaaagccaggaagtgtgtcaagtcctcatgattctgcatcttttctatctcttctgcctcctcctcttttgccat

SEQ ID NO: 19481 - DNA, 213 bp, Homo sapiens
  MAP TO AF254983.1; EXPRESSED IN PLACENTA, SIGNAL = 1.1; EXPRESSED IN ADULT LIVER, SIGNAL = 0.9; EXPRESSED IN HEART, SIGNAL = 0.92; NT HIT: gi16189075, EVALUE 1.00e-116; EST_HUMAN HIT: AV703537.1, EVALUE 1.00e-102
acccacccaagacttatacccaggatgatgtgtgtttgattgaatcagggatgactcagttacagagcctcacagttacagttccaagaagaaaactgtcaaaaccaaaactgaaattgaagattataaatcagaatagcgtggccgtccttcagacccctccagacatccaatcagaacattcaagggatggtgatatggatgatagtcgag

SEQ ID NO: 19482 - DNA, 242 bp, Homo sapiens
  MAP TO AL110121.1; EXPRESSED IN BRAIN, SIGNAL = 1.2; EXPRESSED IN ADULT LIVER, SIGNAL = 0.8; EST_HUMAN HIT: BI821887.1, EVALUE 8.20e-02; SWISSPROT HIT: O83759, EVALUE 7.40e-01
ttggatgctccagggaggcaggaaggtgcaggggtggacactatagatgtggaaggtaggaattctcagcgtgattcccattctggatacctcccaggaaccagcctggaggatgagggcaggggcagtatagcccaggacacaggtacagaggcgggaagtcaccagcacagcaggatggtctgtaccacaagccatggaggggtgtgggtgccacctttggagaaggaaagaggtagcat

SEQ ID NO: 19483 - DNA, 85 bp, Homo sapiens
  MAP TO AC012398.4; EXPRESSED IN ADULT LIVER, SIGNAL = 0.85; EXPRESSED IN LUNG, SIGNAL = 0.84; EXPRESSED IN FETAL LIVER, SIGNAL = 0.66; EXPRESSED IN BONE MARROW, SIGNAL = 0.83; EXPRESSED IN PLACENTA, SIGNAL = 0.85; EST_HUMAN HIT: BI561135.1, EVALUE 4.00e-10; NT HIT: K03394.1, EVALUE 1.00e+00
gtggtgcaggtggcccctctgaggcgtgaatctagtaagtattctggaatcacttaccaagaaaacaatctggatgccaagaaag

SEQ ID NO: 19484 - DNA, 150 bp, Homo sapiens
  MAP TO AL050302.2; EXPRESSED IN PLACENTA, SIGNAL = 0.6; EXPRESSED IN ADULT LIVER, SIGNAL = 0.64; EXPRESSED IN FETAL LIVER, SIGNAL = 0.68; EXPRESSED IN HELA, SIGNAL = 0.7; EST_HUMAN HIT: BE968588.1, EVALUE 9.00e-16; SWISSPROT HIT: Q9CX84, EVALUE 6.70e-01; NT HIT: AL163203.2, EVALUE 3.00e-79
ttaaagctttatagcactttgcatattttggagaatgtcaactatatttttatcagagctgatttgttccagtggaacaacagtggcatagacatcgcccacaaggttctgcatactcaggaagactgggttacacgtccacagcagggt

SEQ ID NO: 19485 - DNA, 112 bp, Homo sapiens
  MAP TO AC010163.7; EXPRESSED IN BONE MARROW, SIGNAL = 0.5; EXPRESSED IN ADULT LIVER, SIGNAL = 0.69; EXPRESSED IN BRAIN, SIGNAL = 0.52; NT HIT: AF368292.1, EVALUE 3.60e-01; EST_HUMAN HIT: BI457152.1, EVALUE 1.40e-01
cactgctgctgtatgccacactgcttcctgcctggtccatcaatgtccccagcaggtgaccttggacagcatcccaggagccaaatgtggtcccagggtcagactgacatga

SEQ ID NO: 19486 - DNA, 168 bp, Homo sapiens
  MAP TO AL031300.1; EXPRESSED IN ADULT LIVER, SIGNAL = 1.6; EXPRESSED IN PLACENTA, SIGNAL = 1.8; EXPRESSED IN HEART, SIGNAL = 1.9; EXPRESSED IN BONE MARROW, SIGNAL = 2.1; SWISSPROT HIT: P43798, EVALUE 7.50e+00; NT HIT: gi8923825, EVALUE 1.50e-01; EST_HUMAN HIT: BG222054.1, EVALUE 1.00e-89
gtccaagtatgggcgtctgacccagttctggaaaatgagacgctcagggaagtctacttggtgcttctgggaaagctatttctccctagtaagagagagacaccctcttccttactgctggatcattgtggtgaggatctgatgactcacttagaagacatcacctag

SEQ ID NO: 19487 - DNA, 183 bp, Homo sapiens
  MAP TO AC008580.5; EXPRESSED IN BRAIN, SIGNAL = 1.2; EXPRESSED IN BONE MARROW, SIGNAL = 0.54; EXPRESSED IN PLACENTA, SIGNAL = 1.3; EXPRESSED IN ADULT LIVER, SIGNAL = 1.3; SWISSPROT HIT: Q9Y5H8, EVALUE 6.50e-01; NT HIT: AE001484.1, EVALUE 6.40e-01; EST_HUMAN HIT: AW974729.1, EVALUE 9.50e-01
tcaggtacggacatgtgacccaacaggcccattcgaacatttcctgagagtattactggagcttttgaaagagggctccgtgtcattgaggactgctagctctagtgctctgagctgccatgggctgtctttgaccccaggtcgaaagagcttgtcaaaaaacaaattcgatgcagagaaaaa

SEQ ID NO: 19488 - DNA, 201 bp, Homo sapiens
  MAP TO AC007181.1; EXPRESSED IN PLACENTA, SIGNAL = 1.5; EXPRESSED IN ADULT LIVER, SIGNAL = 1.8; EXPRESSED IN HEART, SIGNAL = 2.1; EXPRESSED IN LUNG, SIGNAL =   2; EXPRESSED IN FETAL LIVER, SIGNAL = 1.8; SWISSPROT HIT: Q9Y4W6, EVALUE 2.00e-23; NT HIT: gi15317433, EVALUE 1.00e-109; EST_HUMAN HIT: BG424659.1, EVALUE 1.00e-06
ctgggcgtaggcactctgggtgaccttcctcaggtcgtcctgagcccccatagtgatctacccggagcacagctgctcggctacccggcccccgagcatcatgcacgtgcggtcgaagagctgctcctgggtgtagagctgctgctcccggggcaggtactgtgcgtagcggagccccttgccctggggtatgatggacac

SEQ ID NO: 19489 - DNA, 393 bp, Homo sapiens
  MAP TO AF134576.1; EXPRESSED IN PLACENTA, SIGNAL = 1.9; EXPRESSED IN ADULT LIVER, SIGNAL = 1.1; EXPRESSED IN FETAL LIVER, SIGNAL = 1.6; EST_HUMAN HIT: BE734462.1, EVALUE 1.00e-106; SWISSPROT HIT: P43359, EVALUE 3.00e-57; NT HIT: U10690.1, EVALUE 0.00e+00
gccagtgggtctccattgcccagctcctgcccacactcctgcctgttgcggtgaccagagtcgtcatgtctcttgagcagaagagtcagcactgcaagcctgaggaaggccttgacacccaagaagaggccctgggcctggtgggtgtgcaggctgccactactgaggagcaggaggctgtgtcctcctcctctcctctggtcccaggcaccctgggggaggtgcctgctgctgggtcaccaggtcctctcaagagtcctcagggagcctccgccatccccactgccatcgatttcactctatggaggcaatccattaagggctccagcaaccaagaagaggaggggccaagcacctcccctgacccagagtctgtgttccgagcagcactca

SEQ ID NO: 19490 - DNA, 118 bp, Homo sapiens
  MAP TO AF216808.2; EXPRESSED IN ADULT LIVER, SIGNAL = 0.98; EXPRESSED IN FETAL LIVER, SIGNAL = 1.1; EXPRESSED IN PLACENTA, SIGNAL = 0.98; NT HIT: M30114.1, EVALUE 1.50e+00
cttttaatctctgcacatggcatgcccgctgttgggctaccttctccaacttgcccagttggtcagcacatttatccagactgtgatgaggggtaatcttccctgtgatgcctgccat

SEQ ID NO: 19491 - DNA, 179 bp, Homo sapiens
  MAP TO AL031598.4; EXPRESSED IN ADULT LIVER, SIGNAL = 2.6; EXPRESSED IN PLACENTA, SIGNAL = 3.7; EXPRESSED IN HEART, SIGNAL = 3.8; EXPRESSED IN BRAIN, SIGNAL = 4.4; EXPRESSED IN FETAL LIVER, SIGNAL = 4.4; EXPRESSED IN BONE MARROW, SIGNAL = 5.9; NT HIT: Y11145.2, EVALUE 4.00e-02; EST_HUMAN HIT: BF355848.1, EVALUE 9.20e-01; SWISSPROT HIT: P70728, EVALUE 8.60e-01
ctccatcttgtgcaccgagcagccccgcaaggcacagctgagctcgctcctgaccaagcagagggtcctccagggcttggggcgagtggctgagggccccccgctgcagcaggcctggggccctcctccagggcacgtcttgatcacggccagagtcccagaagtgccaccactcagcc

SEQ ID NO: 19492 - DNA, 260 bp, Homo sapiens
  MAP TO AC008456.4; EXPRESSED IN BONE MARROW, SIGNAL = 0.88; EXPRESSED IN PLACENTA, SIGNAL = 0.87; EXPRESSED IN ADULT LIVER, SIGNAL = 0.95; EXPRESSED IN HELA, SIGNAL = 0.62; NT HIT: AB018258.1, EVALUE 1.00e-110; EST_HUMAN HIT: AA627630.1, EVALUE 2.00e-09; SWISSPROT HIT: O94823, EVALUE 2.00e-35
gagctggtgaccggctgcacatggagccccactcacaaggccatgctctctgcctgcagtgctacgtcaacctgctcttctggtatcagttcttctgtggtttctccagctccaccatgattgattactggcagatgatattcttcaatctcttctttacctccttgcctcctcttgtctttggagtccttgacaaagacatctctgcagaaacactcctggcattgcctgagctatacaagagtggccagaactctgag

SEQ ID NO: 19493 - DNA, 163 bp, Homo sapiens
  MAP TO AF227509.1; EXPRESSED IN HEART, SIGNAL = 1.3; EXPRESSED IN ADULT LIVER, SIGNAL = 1.1; EXPRESSED IN BONE MARROW, SIGNAL = 1.4; EXPRESSED IN PLACENTA, SIGNAL =   2; NT HIT: AL163209.2, EVALUE 7.00e-87; EST_HUMAN HIT: AW938021.1, EVALUE 2.10e-01; SWISSPROT HIT: Q10234, EVALUE 2.60e+00
ctcctagacttgtgctttctccagctttgcatgctctcttgattactattaaaccttttcggtttatctctagaatatgacttggaagccaaggtggttttgtgaaatgggtctgagtttttccattgatgatatttgagttcaaatcctggttcagtttcat

SEQ ID NO: 19494 - DNA, 267 bp, Homo sapiens
  MAP TO AL109839.11; EXPRESSED IN BONE MARROW, SIGNAL = 4.3; EXPRESSED IN PLACENTA, SIGNAL = 3.9; EXPRESSED IN ADULT LIVER, SIGNAL = 4.1; EXPRESSED IN HEART, SIGNAL = 3.3; NT HIT: AF032896.1, EVALUE 5.00e-15; EST_HUMAN HIT: BI013430.1, EVALUE 1.00e-115; SWISSPROT HIT: P11940, EVALUE 4.00e-33
ctggggcatggcaggcaggaagtagctggagggctgctgaaaggagcccaggagggggttgctcagggtccgcatggtggagaggcgctgcatgtactggttggtcaagatggccttccgctcctctttgcgctgggccagtgccacgtagagtggcttggtgcccacgatgcgcccgttcatctctgtcacggcctttgtcgcctcttctggggaggaaaaacacacaaagccaaaccccttgctgtggccaccctctgtcatcac

SEQ ID NO: 19495 - DNA, 261 bp, Homo sapiens
  MAP TO AC007920.18; EXPRESSED IN HEART, SIGNAL = 4.6; EXPRESSED IN FETAL LIVER, SIGNAL = 4.2; EXPRESSED IN BRAIN, SIGNAL = 2.7; EXPRESSED IN BONE MARROW, SIGNAL = 1.9; EXPRESSED IN PLACENTA, SIGNAL = 3.9; EXPRESSED IN ADULT LIVER, SIGNAL = 2.9; SWISSPROT HIT: P56517, EVALUE 2.30e-01; NT HIT: gi13928793, EVALUE 2.40e-01
ttaagccaccggcaacatttgatgcagccaatctttgcttcctccttgaggcatttcctttccttggcttgtgggacagcaccactttgtctttctttgtcctttttcactgactgctccttctcattctcatcttctctgagactcctgacattggagcccacagggccctgtccttggtcctcctctgtgtgtgcatacatttcctcagcaagctcttccaggcttaaggttttaactaccacttgtgtaccaaagact

SEQ ID NO: 19496 - DNA, 184 bp, Homo sapiens
  MAP TO AF274858.1; EXPRESSED IN ADULT LIVER, SIGNAL = 1.1; EXPRESSED IN BRAIN, SIGNAL = 1.1; SWISSPROT HIT: P93411, EVALUE 2.00e-04; NT HIT: gi15314108, EVALUE 2.00e-99; EST_HUMAN HIT: BE513130.1, EVALUE 3.00e-99
ctgttggacacattgatgatgtcacgagtccgcaggtgctgctcttccactttgccggccaagtaaattgaagacatggcaatcaggtaagggtcataggcgtccaggttggtctcgcaaaagaacttatggtaaatggtgcaagcagtggcaatgggaatggaccgcatccctagcttgacac

SEQ ID NO: 19497 - DNA, 236 bp, Homo sapiens
  MAP TO AC004191.1; EXPRESSED IN ADULT LIVER, SIGNAL = 0.7; EXPRESSED IN LUNG, SIGNAL = 0.55; EXPRESSED IN HELA, SIGNAL = 0.81; EXPRESSED IN FETAL LIVER, SIGNAL = 0.38; SWISSPROT HIT: P06682, EVALUE 6.40e+00; NT HIT: AF035260.1, EVALUE 2.10e-01; EST_HUMAN HIT: AA773362.1, EVALUE 1.20e+00
gccacaccgtagtcatagagcaagaggactcagatacagtttggttggtcctttaccttcaaaagttcaagtgctggctgccgagacttctccaactcagtgatcagggtcccaagctggaccacctcctcagaatccttgatgacacggctgttcctccttttggtgagttcttgctctagccctaccagctgctccaacaggtactgttccctttctctcaaaaaccgatggcc

SEQ ID NO: 19498 - DNA, 109 bp, Homo sapiens
  MAP TO AL033544.15; EXPRESSED IN ADULT LIVER, SIGNAL = 2.1; EXPRESSED IN PLACENTA, SIGNAL = 2.3; EXPRESSED IN HEART, SIGNAL = 1.2; EXPRESSED IN FETAL LIVER, SIGNAL = 2.6; EXPRESSED IN BRAIN, SIGNAL = 2.4; EXPRESSED IN LUNG, SIGNAL = 1.6; EXPRESSED IN HELA, SIGNAL = 2.2; EST_HUMAN HIT: AA777415.1, EVALUE 2.00e-03; NT HIT: AF047829.1, EVALUE 8.90e-02
aaacatcttccaagagcctgccatcagctctgccatcagccctgccatcagctctgccatcagctctgccagtactgacaaggactcccttggaggcacttccccttag

SEQ ID NO: 19499 - DNA, 282 bp, Homo sapiens
  MAP TO AL079302.4; EXPRESSED IN HEART, SIGNAL = 1.2; EXPRESSED IN ADULT LIVER, SIGNAL = 1.1; EXPRESSED IN FETAL LIVER, SIGNAL = 0.98; EXPRESSED IN BRAIN, SIGNAL = 0.92; EXPRESSED IN PLACENTA, SIGNAL = 0.77; EST_HUMAN HIT: BI833584.1, EVALUE 6.00e-37; SWISSPROT HIT: P23631, EVALUE 2.00e-09; NT HIT: gi14748444, EVALUE 0.00e+00
cgtacttggctaagaacctcaaggcctccaactgtccactctgggcggccacgaacaagggggtgatgccgtaggcgttcttggattccaccttggctcctccgctcaccaggatctgcatgacctccaggtcattgcgagacacagactcgtgcagagcggtccagccgcggttgcagcggtggttggtgtctgcattgtgctgcaccagaatcttcacggcctccgcgttcttgcgctcgcaggctgtgctcagggggaagcagggatggtcagcagggc

SEQ ID NO: 19500 - DNA, 165 bp, Homo sapiens
  MAP TO AC008488.6; EXPRESSED IN PLACENTA, SIGNAL = 0.65; EXPRESSED IN ADULT LIVER, SIGNAL = 0.97; EXPRESSED IN BRAIN, SIGNAL = 0.89; NT HIT: AJ312685.1, EVALUE 1.40e-01; EST_HUMAN HIT: BE878557.1, EVALUE 5.40e-02; SWISSPROT HIT: P19838, EVALUE 1.20e-02
atgaggcagtatatggctgcagcttgtcagagtgatagattctctttttctgtcttcttggggaagcacggcttgacagtaattcaccttgcagcctggtctgggagccttgaggtcatgctcatgctggttaaagctggagcagaccagagagccaagaatcag

SEQ ID NO: 19501 - DNA, 103 bp, Homo sapiens
  MAP TO AL118559.4; EXPRESSED IN HELA, SIGNAL = 1.1; EXPRESSED IN FETAL LIVER, SIGNAL = 1.3; EXPRESSED IN BONE MARROW, SIGNAL = 1.1; EXPRESSED IN PLACENTA, SIGNAL = 1.6; EXPRESSED IN ADULT LIVER, SIGNAL = 0.77; EXPRESSED IN HEART, SIGNAL = 1.3; NT HIT: X56512.1, EVALUE 2.10e-02; EST_HUMAN HIT: AI341308.1, EVALUE 2.00e-03
agccaaggacaaagaggacatagtccttgccctcaaggagctcaaaggcaagaagggaaagaatggcaaatacctacattcttatcatcgcaatctgccatga

SEQ ID NO: 19502 - DNA, 186 bp, Homo sapiens
  MAP TO AC007343.4; EXPRESSED IN HEART, SIGNAL = 1.7; EXPRESSED IN BRAIN, SIGNAL = 1.5; EXPRESSED IN FETAL LIVER, SIGNAL = 0.87; EXPRESSED IN PLACENTA, SIGNAL = 1.5; EXPRESSED IN ADULT LIVER, SIGNAL = 1.5; NT HIT: gi15302941, EVALUE 1.70e-01; EST_HUMAN HIT: AV760016.1, EVALUE 1.60e-02; SWISSPROT HIT: P51957, EVALUE 7.40e+00
atgcaccgggacacggcaatgaatagaacagatgcagcctctcaggagcaaatgatccaggcgacaaggaggcagttacagcagcacgtcaacaagggcaaaatgtgttcatcttccgtgagaactggcgaggagagcaacccagtgctttgggagcctgtagggcaaaaatccctggtcagcaaa

SEQ ID NO: 19503 - DNA, 229 bp, Homo sapiens
  MAP TO AC008010.10; EXPRESSED IN FETAL LIVER, SIGNAL = 1.3; EXPRESSED IN BONE MARROW, SIGNAL = 2.5; EXPRESSED IN PLACENTA, SIGNAL = 1.5; EXPRESSED IN ADULT LIVER, SIGNAL = 2.3; EXPRESSED IN HEART, SIGNAL = 2.5; NT HIT: AE006808.1, EVALUE 3.20e+00; SWISSPROT HIT: P20740, EVALUE 1.00e-17
ctctacacatgtattcaggtagctgaaggcattgacaatcaaatcaaattgttcattttgaacaaccgaaaagggtgaggcaatttcaataaagaaaggttgggagacttctagagtggttgtagaggaaatgccaaatccaacgtcgccattcacacaaaagccacttgcctcccattgggttatcgtatcaggaatgaggaacgaaagattggcagagcctgaggaa

SEQ ID NO: 19504 - DNA, 457 bp, Homo sapiens
  MAP TO AC016627.5; EXPRESSED IN BRAIN, SIGNAL = 0.88; EXPRESSED IN LUNG, SIGNAL = 1.3; EXPRESSED IN PLACENTA, SIGNAL = 1.2; EXPRESSED IN ADULT LIVER, SIGNAL = 0.85; NT HIT: gi7662075, EVALUE 0.00e+00; EST_HUMAN HIT: AI264333.1, EVALUE 0.00e+00; SWISSPROT HIT: O15063, EVALUE 7.00e-80
ctcttgcatttcctgatcagttggtaagttcatacccttctcatccttgccgtcatctccatgcaggaagttctcacgcctctccatgagaaagccattggccactgtattactggaattctgagctgactgtgaagggtctgtagtcctggggaaattaccaatgttcaaaatgctttgtaaccttgtatcaatattgccaggcattttggccttctcttcggaacatccagctatgaagatgtttttggaaggggtattttggatggaataatttgtgctgctgctggagctggtacatgaagctttcttggtgaaccgggatgtcagtttggagaatgtcttctgcaggccacctgaagatttgtttccatttccagaaggcaggtcagcctggttgccaaaatcacagatctccctttgcagctggatctgtatgcagggtaaagcttgctcc

SEQ ID NO: 19505 - DNA, 205 bp, Homo sapiens
  MAP TO AC000958.1; EXPRESSED IN BONE MARROW, SIGNAL = 1.5; EXPRESSED IN PLACENTA, SIGNAL = 1.3; EXPRESSED IN ADULT LIVER, SIGNAL = 1.3; EXPRESSED IN BRAIN, SIGNAL = 1.3; EXPRESSED IN FETAL LIVER, SIGNAL = 1.1; SWISSPROT HIT: P42566, EVALUE 4.30e-02; NT HIT: AF057300.1, EVALUE 1.00e-112; EST_HUMAN HIT: AU139365.1, EVALUE 1.00e-111
atacattaaagccttagaaacacttcggcaggtacgtcagacacaaggtcagaaagtaaaagaatatcaaatggaactaaaatatctgaagcaatataaggaaaaagcttgtgagattcgtgatcagattacaagtaaggaagcccagttaacatcttcaaaggaaattgtcaaatcctatgagaatgaacttgatccattgaag

SEQ ID NO: 19506 - DNA, 276 bp, Homo sapiens
  MAP TO AC005626.1; EXPRESSED IN ADULT LIVER, SIGNAL = 3.4; EXPRESSED IN FETAL LIVER, SIGNAL = 4.4; EXPRESSED IN BONE MARROW, SIGNAL = 5.8; EXPRESSED IN BRAIN, SIGNAL = 3.3; EXPRESSED IN PLACENTA, SIGNAL = 4.3; SWISSPROT HIT: P16573, EVALUE 2.00e-25; NT HIT: gi15302288, EVALUE 0.00e+00; EST_HUMAN HIT: AW175952.1, EVALUE 0.00e+00
agtcagtggctcagccctccatccaagccagcagcaccacagtcacagagaagggctccgtggtcctgacctgccacacaaataacactggaacctctttccagtggattttcaacaaccagcgtctgcaggtcacgaagaggatgaagctgtcctggtttaaccatatgctcaccatagaccccatcaggcaggaggacgctggggagtatcagtgtgaggtctccaacccagtcagctccaacaggagcgaccccctcaagctgactgtaaaat

SEQ ID NO: 19507 - DNA, 157 bp, Homo sapiens
  MAP TO AC003987.1; EXPRESSED IN HEART, SIGNAL = 1.2; EXPRESSED IN PLACENTA, SIGNAL = 0.87; EXPRESSED IN ADULT LIVER, SIGNAL = 0.88; NT HIT: AL163218.2, EVALUE 9.00e-03; EST_HUMAN HIT: AL543828.1, EVALUE 8.00e-01
tcccctacctaaccacagtgcaaccatgaaaaccaggacactgacagcaagcacgacctcaccgccccccacaactcatgcaagtttctccaattgtcctaatactgtctttcagggcaaaaggatctacttcagaatcacacagagcattcagtag

SEQ ID NO: 19508 - DNA, 92 bp, Homo sapiens
  MAP TO AC016545.4; EXPRESSED IN BONE MARROW, SIGNAL = 3.2; EXPRESSED IN PLACENTA, SIGNAL = 1.6; EXPRESSED IN ADULT LIVER, SIGNAL = 2.3; EXPRESSED IN BRAIN, SIGNAL = 2.4; EXPRESSED IN LUNG, SIGNAL = 1.9; EXPRESSED IN FETAL LIVER, SIGNAL = 1.6; NT HIT: L06845.1, EVALUE 4.50e+00; EST_HUMAN HIT: AU123763.1, EVALUE 6.60e+00; SWISSPROT HIT: P08159, EVALUE 8.10e+00
ctgagtgcttctcatatgctgggcctttgctgagctcttccaaaccaccctttggataatggtttgaaagggctctggctaggatatccacc

SEQ ID NO: 19509 - DNA, 147 bp, Homo sapiens
  MAP TO AC000354.1; EXPRESSED IN FETAL LIVER, SIGNAL = 0.45; EXPRESSED IN BRAIN, SIGNAL = 0.79; EXPRESSED IN ADULT LIVER, SIGNAL = 0.6; EXPRESSED IN PLACENTA, SIGNAL = 0.8; NT HIT: AL161589.2, EVALUE 5.00e-01; SWISSPROT HIT: P23552, EVALUE 6.80e-01
ctaggaataagcagggaaaaaaatgttccctgtcatattcactgcttcctttatatctaccttctgaatttgttcttctccagtcagcttttggatggcagctgccacagcagaaggcccagcaaacaactgaacaatagctaatat

SEQ ID NO: 19510 - DNA, 157 bp, Homo sapiens
  MAP TO AB023060.1; EXPRESSED IN PLACENTA, SIGNAL =   1; EXPRESSED IN ADULT LIVER, SIGNAL = 0.82; EXPRESSED IN BRAIN, SIGNAL = 0.82; EST_HUMAN HIT: BF902421.1, EVALUE 3.00e-03; NT HIT: gi15304354, EVALUE 2.00e-83; SWISSPROT HIT: P13889, EVALUE 3.00e-01
accgcctagaacggatcctcctcaacctccccggcctgacgacccttggccggcaggaccccagcccccagaaaacccctggcctcctgcccctgaggtggacaaccgacctcaggaggagccagacctagacccaccccgggaagagtacagataa

SEQ ID NO: 19511 - DNA, 199 bp, Homo sapiens
  MAP TO AC020939.5; EXPRESSED IN HELA, SIGNAL = 1.1; EXPRESSED IN BONE MARROW, SIGNAL = 1.6; EXPRESSED IN ADULT LIVER, SIGNAL = 1.3; EXPRESSED IN FETAL LIVER, SIGNAL =   1; EST_HUMAN HIT: BF347229.1, EVALUE 6.00e-30; NT HIT: AF375663.1, EVALUE 6.00e-29; SWISSPROT HIT: Q57896, EVALUE 7.30e+00
agaaaaggttttcaatttactttgcacagatccatcagaaatatcactatctttggcagctataaccttattaagcatatttcttaaataataatacatgaaagtcaaacttactccttgatctgtgggctgcagaatagatgctgtgttagcaagaataaaagcaacattaatctcctcaaacatctccatcagagct

SEQ ID NO: 19512 - DNA, 324 bp, Homo sapiens
  MAP TO AC006183.1; EXPRESSED IN ADULT LIVER, SIGNAL = 2.5; EXPRESSED IN FETAL LIVER, SIGNAL = 1.1; EXPRESSED IN LUNG, SIGNAL = 0.58; EXPRESSED IN HELA, SIGNAL = 0.64; EXPRESSED IN BRAIN, SIGNAL = 1.6; EST_HUMAN HIT: U69206.1, EVALUE 0.00e+00; NT HIT: AF029729.1, EVALUE 0.00e+00; SWISSPROT HIT: P29503, EVALUE 2.00e-15
  unsure 86
tcaccaagcagctggagccccgcgtgaggccgtagacgtccaccagggcccagagcgggtcggccgtcggaccccgctgaagaacngcataacagccgagtcgttgatgcggtggaagacacggcccttcttgtccacccagaatgcgatgatgttgccctcattggcaaactcctcaggcagcgccttggcccagaagccactctgggacaccaggtcggggcaggcgtacttgggcagcgagtcagggtggatgcgggacgggtccttgctggtgaagcccagccgcagggccccgctccagcagcactgcttcttggtgat

SEQ ID NO: 19513 - DNA, 165 bp, Homo sapiens
  MAP TO AC000358.1; EXPRESSED IN BRAIN, SIGNAL = 0.46; EXPRESSED IN ADULT LIVER, SIGNAL = 0.54; SWISSPROT HIT: P05613, EVALUE 3.40e+00; EST_HUMAN HIT: BF856336.1, EVALUE 8.40e-01; NT HIT: AY036109.1, EVALUE 1.40e-01
cgtctgtcaccactgaagatggtgcagcggcgcgctgcagccggcatgctgcaccgaagctgtacccttcaacggctacttttgtgtgctgagaacattttactgaggagggaacggctgcacaaaggtagggctacagggcatgtgcagcaagatgtgcaactg

SEQ ID NO: 19514 - DNA, 368 bp, Homo sapiens
  MAP TO AC005574.1; EXPRESSED IN BRAIN, SIGNAL = 0.87; EXPRESSED IN BONE MARROW, SIGNAL = 0.46; EXPRESSED IN ADULT LIVER, SIGNAL = 0.75; NT HIT: AL163203.2, EVALUE 7.00e-61; EST_HUMAN HIT: AA286854.1, EVALUE 1.00e-57
gttattatctcaaaccctcaagttctcccccttttctaagccagttcccttcttctatgggggctgaggtttcagggacagaccctattagattatttgaaatgcgtttctttgatcccccgccacctgcaccttcctctaagccttcttccaaaacttctcacaagggaacaattgctccttctccatctaatgacacgactgagatagctatcgtagaagttaaagacttaaaacaaactttggcaattaagacaggataccaagatgcaaatgcctggttggaatggatcaaatattccattcacacgttaaacaaaagcaattgttatgcttgtgcgcacagcaggccagaggcccagactgtc

SEQ ID NO: 19515 - DNA, 203 bp, Homo sapiens
  MAP TO AC004826.3; EXPRESSED IN BONE MARROW, SIGNAL = 0.97; EXPRESSED IN ADULT LIVER, SIGNAL = 1.4; EXPRESSED IN HEART, SIGNAL = 1.1; EXPRESSED IN BRAIN, SIGNAL = 1.1; EST_HUMAN HIT: AW630100.1, EVALUE 6.00e-98; SWISSPROT HIT: P93164, EVALUE 5.50e+00; NT HIT: gi15295188, EVALUE 2.00e-50
aatcataagatctgaaatctgcattgctccaaaacccaaaactttttcagcaccaatgacactcaaagcaccaatgacactcactgcagcattttttatttcaaccagtaagtataatgcaaatataccaaaatctgaaaaaaatctgaaatctgaaacacttttggtcccaagcacttcaaataagggatactcaacctgta

SEQ ID NO: 19516 - DNA, 79 bp, Homo sapiens
  MAP TO AC005321.1; EXPRESSED IN ADULT LIVER, SIGNAL = 3.5; EXPRESSED IN HEART, SIGNAL = 2.4; EXPRESSED IN HELA, SIGNAL =   4; EXPRESSED IN BRAIN, SIGNAL =   4; EXPRESSED IN FETAL LIVER, SIGNAL = 4.1; EXPRESSED IN BONE MARROW, SIGNAL = 5.3; EXPRESSED IN PLACENTA, SIGNAL = 3.4; NT HIT: gi14769683, EVALUE 4.00e-37; EST_HUMAN HIT: BI906508.1, EVALUE 5.00e-37
ctccgagtcccggtcccaggaatgtggatgaagagaggctgctgtgcgactcagtgaagtgggtgccctcgctgaaggt

SEQ ID NO: 19517 - DNA, 80 bp, Homo sapiens
  MAP TO AL109800.25; EXPRESSED IN BRAIN, SIGNAL =   2; EXPRESSED IN BONE MARROW, SIGNAL = 2.6; EXPRESSED IN PLACENTA, SIGNAL = 1.6; EXPRESSED IN ADULT LIVER, SIGNAL = 1.9; NT HIT: AB060588.1, EVALUE 2.40e-01; EST_HUMAN HIT: BI010126.1, EVALUE 6.00e-03
gcatttgaaatggttgatcactccctcctccttgaaaagttctcttcccttggcttctagcataaaatttccatgctttt

SEQ ID NO: 19518 - DNA, 189 bp, Homo sapiens
  MAP TO AC010649.5; EXPRESSED IN HEART, SIGNAL = 1.2; EXPRESSED IN HELA, SIGNAL = 1.2; EXPRESSED IN BONE MARROW, SIGNAL = 1.1; EXPRESSED IN ADULT LIVER, SIGNAL = 0.81; SWISSPROT HIT: P28659, EVALUE 1.90e-02; EST_HUMAN HIT: BE258336.1, EVALUE 1.00e-77; NT HIT: gi13123779, EVALUE 7.00e-78
ctcccagcccgtttccctccctgctcgccgctgcccctgcagggagcctcctccagcctggtggtcaagttcgccgacacggacaaggagcggacgctccggcgcatgcagcagatggtgggccagctgggcatcctgacgccgtccctcacattgcccttcagcccctacagtgcctacgcccaggct

SEQ ID NO: 19519 - DNA, 96 bp, Homo sapiens
  MAP TO AL121902.13; EXPRESSED IN ADULT LIVER, SIGNAL = 0.67; EXPRESSED IN FETAL LIVER, SIGNAL = 0.5; EXPRESSED IN BONE MARROW, SIGNAL = 0.71; EXPRESSED IN PLACENTA, SIGNAL = 0.78; EST_HUMAN HIT: AW862461.1, EVALUE 3.00e-05; NT HIT: gi14861872, EVALUE 5.00e-03
ctagctagttggagttcattggcttgtggcagcataactctatctttacatggctttctcccagggcccccggacatggctgagtccaaatttatc

SEQ ID NO: 19520 - DNA, 317 bp, Homo sapiens
  MAP TO AC010593.4; EXPRESSED IN BRAIN, SIGNAL =   2; EXPRESSED IN LUNG, SIGNAL = 1.8; EXPRESSED IN HELA, SIGNAL = 4.9; EXPRESSED IN FETAL LIVER, SIGNAL = 5.6; EXPRESSED IN BONE MARROW, SIGNAL = 2.8; EXPRESSED IN ADULT LIVER, SIGNAL = 1.6; SWISSPROT HIT: P12750, EVALUE 4.00e-42; EST_HUMAN HIT: BI496104.1, EVALUE 6.00e-99; NT HIT: AB015610.1, EVALUE 4.00e-99
ctggttccacgatgctcacaccatccactaccttgactccttcgtcaaggtgaatgacactgtttagactggcaagatcactgatttcatcaagtttgacactggtaacctgtgtatggtgattggagatactaacctgggaagaattggtgtgatcaccaacagaaagaagcaccgtggatcttttgatgtggttcatgtgaaagatgccaatggcaacagatttgccccttggctttccaacatttttgttactggcaagtgcaacaaaccatggatttctcttccccgaggaaagggtatccgcctcaccattg

SEQ ID NO: 19521 - DNA, 84 bp, Homo sapiens
  MAP TO AL031393.1; EXPRESSED IN BONE MARROW, SIGNAL = 1.9; EXPRESSED IN PLACENTA, SIGNAL = 2.1; EXPRESSED IN ADULT LIVER, SIGNAL = 2.4; EXPRESSED IN HEART, SIGNAL = 4.1; EXPRESSED IN FETAL LIVER, SIGNAL = 1.8; NT HIT: AL163227.2, EVALUE 1.00e-24; EST_HUMAN HIT: AA383873.1, EVALUE 5.00e-28
atgctgatagtgatatggacaatgaagtccaggctgaagtggtctcagatggagatgcagaacttgttgggaactggagcaaag

SEQ ID NO: 19522 - DNA, 222 bp, Homo sapiens
  MAP TO AF187320.1; EXPRESSED IN BRAIN, SIGNAL = 2.3; EXPRESSED IN ADULT LIVER, SIGNAL = 2.6; EXPRESSED IN PLACENTA, SIGNAL = 5.4; EXPRESSED IN HEART, SIGNAL = 2.9; SWISSPROT HIT: P02786, EVALUE 2.00e-37; NT HIT: gi14720549, EVALUE 1.00e-122; EST_HUMAN HIT: AL601599.1, EVALUE 1.00e-122
gacacagattatccttatttgggtaccaccatggacacctataaggaactgattgagaggattcctgagttgaacaaagtggcacgagcagctgcagaggtcgctggtcagttcgtgattaaactaacccatgatgttgaattgaacctggactatgagaggtacaacagccaactgctttcatttgtgagggatctgaaccaatacagagcagacataaag

SEQ ID NO: 19523 - DNA, 346 bp, Homo sapiens
  MAP TO AC025182.2; EXPRESSED IN FETAL LIVER, SIGNAL = 1.4; EXPRESSED IN ADULT LIVER, SIGNAL = 1.9; EXPRESSED IN PLACENTA, SIGNAL = 1.2; SWISSPROT HIT: P15143, EVALUE 2.30e-01; NT HIT: AF181657.1, EVALUE 3.20e-01
cctactatgtttcggatctggatccagaatgtgttcttccatgacagtagctcccataggcaaagcagcatctggctctgtgggctctccaaatttgtgtaggtaagtctggctggaattattgcctccctcacctggaggttgctgcctcttctcccaggaggttctccatatttccaggacaggcttgttgccgccaggctgctcagccacctgtgttagcagagcttcccactgggataatcctgtgttgggcctcagataatgggtattgagcaactcattgcttaagacagcaagtaatgtaggctgattccccacatggaactgcggccatacattcctc

SEQ ID NO: 19524 - DNA, 354 bp, Homo sapiens
  MAP TO AC013294.3; EXPRESSED IN ADULT LIVER, SIGNAL = 0.68; SWISSPROT HIT: P23074, EVALUE 1.00e-16; EST_HUMAN HIT: AA984295.1, EVALUE 1.00e-75; NT HIT: AL163246.2, EVALUE 2.00e-88
ccggagagttgatatacccctgaggtaggaaagtaaaagtatattgctggccttgccagctgaaggcaaattgcttctggtgagctttatagacaggaatggagaaaaagacatttaccaagtcaatggccgcataccaggtaccaggagatgtgttaatttgctcaagcaatgaaaccacatctggtacagcagctgcaattggagtctccacttggttaagcttatgataattcactgtcattctccaagatccatctgtcttctgcaaaggccaaatgcttgatttgaatggggatgtggtgagaatcaccacccctgtttctttcaagtcctcaatggtggcactaatct

SEQ ID NO: 19525 - DNA, 161 bp, Homo sapiens
  MAP TO AC016613.5; EXPRESSED IN HEART, SIGNAL = 6.9; EXPRESSED IN ADULT LIVER, SIGNAL = 8.7; EXPRESSED IN LUNG, SIGNAL = 8.2; EXPRESSED IN BONE MARROW, SIGNAL = 7.3; EXPRESSED IN PLACENTA, SIGNAL = 9.4; NT HIT: AJ010977.1, EVALUE 8.70e+00
atttaaaaagaaaaaatagaggaggaggaggaggaagaggaggaggaggggaagaggaagaagaagaggaaggagaagaagaagaaggaggagaaggagaagaagaaagcagggaggatagggagtgctggttgggagctctgaacatttttggttgtgtg

SEQ ID NO: 19526 - DNA, 114 bp, Homo sapiens
  MAP TO AC000047.6; EXPRESSED IN BONE MARROW, SIGNAL = 1.9; EXPRESSED IN PLACENTA, SIGNAL =   3; EXPRESSED IN HEART, SIGNAL = 2.5; EXPRESSED IN ADULT LIVER, SIGNAL = 3.1; EXPRESSED IN BRAIN, SIGNAL = 2.6; EXPRESSED IN LUNG, SIGNAL = 3.5; EXPRESSED IN FETAL LIVER, SIGNAL = 1.6; SWISSPROT HIT: P43629, EVALUE 7.90e+00; EST_HUMAN HIT: BI062794.1, EVALUE 6.00e-10; NT HIT: AL163283.2, EVALUE 2.00e-06
tcagtggcctgccagtgtgctggtgcctgctgatgtgctcctctcaacatccagctgcctgtgtgttcctctgctgatgtggtcctctccacgttcagccgcctgtgtatctgc

SEQ ID NO: 19527 - DNA, 158 bp, Homo sapiens
  MAP TO AL109827.8; EXPRESSED IN BONE MARROW, SIGNAL =   2; EXPRESSED IN PLACENTA, SIGNAL = 1.1; EXPRESSED IN HEART, SIGNAL = 1.5; EXPRESSED IN ADULT LIVER, SIGNAL = 1.3; NT HIT: gi14772997, EVALUE 6.00e-84; SWISSPROT HIT: Q9Y697, EVALUE 9.00e-24; EST_HUMAN HIT: BG105831.1, EVALUE 9.00e-84
ctccatctcttgctgtgccacctcacacgcagcccccagccccaccactaagggtgtgggcactgtcccagaccgcataccccgctcctgcccccctccactctgcagggcctccacacgcacacggggccggcgacggatgtagatggcaccaaccc

SEQ ID NO: 19528 - DNA, 271 bp, Homo sapiens
  MAP TO AL117259.3; EXPRESSED IN HEART, SIGNAL = 3.7; EXPRESSED IN ADULT LIVER, SIGNAL = 2.8; EXPRESSED IN LUNG, SIGNAL = 1.9; EXPRESSED IN BONE MARROW, SIGNAL = 2.3; EXPRESSED IN PLACENTA, SIGNAL = 3.1; NT HIT: gi14748314, EVALUE 0.00e+00; SWISSPROT HIT: P20848, EVALUE 5.00e-49
gcaagtggaaagataaattcaaggctgagcgcattatggtagagggcttccatgtggatgataagaccatcatcagagtgcctatgataaaccacctgggtagatttgacatccaccgggacagggagttatccagctgggtgctggcacagcactatgtggggaacgccactgccttcttcatcctgcccgatccaaagaagatgtggcagttggaagaaaaattgacctacagccaccttgaaaatatccagagagcctttgacataag

SEQ ID NO: 19529 - DNA, 362 bp, Homo sapiens
  MAP TO AC010613.5; EXPRESSED IN BRAIN, SIGNAL = 0.81; EXPRESSED IN BONE MARROW, SIGNAL = 0.93; EXPRESSED IN PLACENTA, SIGNAL = 0.56; EXPRESSED IN ADULT LIVER, SIGNAL = 0.87; EXPRESSED IN HEART, SIGNAL =   1; EXPRESSED IN HELA, SIGNAL = 0.87; NT HIT: gi13384817, EVALUE 1.00e-03; SWISSPROT HIT: P26027, EVALUE 2.80e+00; EST_HUMAN HIT: H04548.1, EVALUE 5.00e-01
atgttcgggtttagagaaggataccaggacacagggcagtcagccaaggtcaactggggaagagctaaagaaaaaaatcaatcccatccacagtctctcatgaaaccacagagcctgttgaacacacaggcacttgggtttggaaagaccctagagaacacaattcctcaattcctgctgcagagaaatacagtttggatatttaaatccaggcatctcttgcccgtgggctatgtttccaaaggcaaatattgtcgaaggaatcatttcgtcatgctgtgccgtgggtggcagcaggctgagggcactgggaacagagccaagactggggaatatagcacaagggagacgtgggttgtagg

SEQ ID NO: 19530 - DNA, 203 bp, Homo sapiens
  MAP TO AL049779.5; EXPRESSED IN ADULT LIVER, SIGNAL = 0.96; EXPRESSED IN BRAIN, SIGNAL = 1.3; EXPRESSED IN PLACENTA, SIGNAL = 0.85; EXPRESSED IN BONE MARROW, SIGNAL = 1.8; EST_HUMAN HIT: AA580037.1, EVALUE 1.00e-110; NT HIT: U82256.1, EVALUE 1.00e-110; SWISSPROT HIT: P78540, EVALUE 9.00e-32
ggttgctatcagcactggatcttgttgaagtcaatcctcagttggccacctcagaggaagaggcgaagactacagctaacctggcagtagatgtgattgcttcaagctttggtcagacaagagaaggagggcatattgtctatgaccaacttcctactcccagttcaccagatgaatcagaaaatcaagcacgtgtgagaatt

SEQ ID NO: 19531 - DNA, 100 bp, Homo sapiens
  MAP TO AL109865.36; EXPRESSED IN BRAIN, SIGNAL = 1.9; EXPRESSED IN PLACENTA, SIGNAL = 1.1; EXPRESSED IN BONE MARROW, SIGNAL = 1.5; EXPRESSED IN ADULT LIVER, SIGNAL = 1.2; SWISSPROT HIT: Q9Y2N3, EVALUE 2.10e+00; EST_HUMAN HIT: AL042584.1, EVALUE 5.00e-47; NT HIT: gi14760906, EVALUE 8.00e-02
gagaaactgaaggcagccagttgacaagtccaaaatctccagagaatccaacttcagattcagcgagtcctcaggaaattatcgtgcctgttttccaaag

SEQ ID NO: 19532 - DNA, 543 bp, Homo sapiens
  MAP TO AF196968.1; EXPRESSED IN HELA, SIGNAL = 1.4; EXPRESSED IN BRAIN, SIGNAL = 5.8; EXPRESSED IN ADULT LIVER, SIGNAL =  49; EXPRESSED IN PLACENTA, SIGNAL = 2.2; EXPRESSED IN HEART, SIGNAL = 1.8; SWISSPROT HIT: P25304, EVALUE 3.40e-01; EST_HUMAN HIT: BE669558.1, EVALUE 1.90e-01; NT HIT: AK024477.1, EVALUE 1.30e-01
atgcagtgggggcgggcggccatgaccctgggggcaacactgctcctcatggcttcccgtggagacactctcccagggccaggctggccctttctcaccaagcgccagctccacacaaaggcacaatgggctgcaggctgccgggtcctggcttgggctggggtaatcagggaagaatgcgggaagcacaactgtttcccaagccctagccatggtgccgccctgacatggccatcaaaggccggcaaattgcctccaattgctggcgttgctttcatgttgggggccagactggaagaggggtctccacgctggtgggtggcttgcatgccccagtgggaactgaacccttgcaagcagcttggggtcactggcccctttgtggccctgtggggctggggccgctctagtcactccagcactacccactgctgtaaacaagcagttttggagagggttggaagagagccagagccaggggcaggggatctctttggggtcagcatcctggtgatgactgacagctgggagcctaaatggcag

SEQ ID NO: 19533 - DNA, 168 bp, Homo sapiens
  MAP TO AC004700.1; EXPRESSED IN ADULT LIVER, SIGNAL = 0.94; EXPRESSED IN HEART, SIGNAL = 1.1; EXPRESSED IN LUNG, SIGNAL = 0.7; EXPRESSED IN BRAIN, SIGNAL = 0.97; EXPRESSED IN BONE MARROW, SIGNAL = 0.69; NT HIT: AF325262.1, EVALUE 1.50e-01; SWISSPROT HIT: P08069, EVALUE 4.40e+00; EST_HUMAN HIT: AI991015.1, EVALUE 3.00e-62
cttcatatgcagaccctcatgtgtgggcacctgtgcctcctcggagctggcggtcagctctagaagctggttcaggacaggatactcccatccaatctgtgcccaccatagaaaagagtcagccaagtgcctgctaccacagggctcttcacacatggaaaagctgcc

SEQ ID NO: 19534 - DNA, 231 bp, Homo sapiens
  MAP TO AC004416.1; EXPRESSED IN BRAIN, SIGNAL = 0.42; EXPRESSED IN ADULT LIVER, SIGNAL = 0.49; EXPRESSED IN HEART, SIGNAL = 0.97; NT HIT: gi4557746, EVALUE 1.00e-127; SWISSPROT HIT: P08581, EVALUE 2.00e-38; EST_HUMAN HIT: BF695365.1, EVALUE 1.00e-100
atcagtttcctaattcatctcagaacggttcatgccgacaagtgcagtatcctctgacagacatgtcccccatcctaactagtggggactctgatatatccagtccattactgcaaaatactgtccacattgacctcagtgctctaaatccagagctggtccaggcagtgcagcatgtagtgattgggcccagtagcctgattgtgcatttcaatgaagtcataggaagag

SEQ ID NO: 19535 - DNA, 75 bp, Homo sapiens
  MAP TO AC025458.3; EXPRESSED IN FETAL LIVER, SIGNAL = 1.4; EXPRESSED IN BRAIN, SIGNAL = 1.1; EXPRESSED IN ADULT LIVER, SIGNAL = 0.92; EXPRESSED IN HEART, SIGNAL = 1.5; NT HIT: gi13591944, EVALUE 2.20e-01
atggcctcattaaagcatcattacatcatacttgctgaagtaatcaatgattctcatggaacaagagcacaggag

SEQ ID NO: 19536 - DNA, 273 bp, Homo sapiens
  MAP TO AC010393.4; EXPRESSED IN ADULT LIVER, SIGNAL = 0.95; EXPRESSED IN BRAIN, SIGNAL = 1.2; EXPRESSED IN LUNG, SIGNAL = 0.72; EXPRESSED IN FETAL LIVER, SIGNAL = 0.99; EXPRESSED IN BONE MARROW, SIGNAL = 0.82; EXPRESSED IN PLACENTA, SIGNAL = 1.1; NT HIT: gi15314650, EVALUE 6.40e-02; SWISSPROT HIT: Q9RR89, EVALUE 2.90e+00; EST_HUMAN HIT: BF809207.1, EVALUE 2.40e-02
atgcatgacaagcttctcaggttcaggctgccaagaggctctatctgcagtaagtccccatttgttaaagggacaggcgtggagctccacaccggtcctgggattaaagggaagcaagaaaaggaggaaagggagaaacaaggaaagtgggacaataggaagcaggaggagcctggggagcaggtggaaggcatcacacgctccatcttgacttacaacggagctgtgtcccaggggccccctccaagcatccaccggccccacaagtcctga

SEQ ID NO: 19537 - DNA, 197 bp, Homo sapiens
  MAP TO AF270510.1; EXPRESSED IN ADULT LIVER, SIGNAL = 3.9; EXPRESSED IN HEART, SIGNAL = 3.1; EXPRESSED IN BRAIN, SIGNAL =   3; EXPRESSED IN LUNG, SIGNAL = 3.6; EXPRESSED IN FETAL LIVER, SIGNAL = 3.6; EXPRESSED IN BONE MARROW, SIGNAL = 4.3; EXPRESSED IN PLACENTA, SIGNAL = 4.6; EST_HUMAN HIT: BF981537.1, EVALUE 4.00e-37; NT HIT: AL163303.2, EVALUE 2.00e-35; SWISSPROT HIT: P44933, EVALUE 2.50e+00
gagtttggaagaagtggattccaatcctcatggatgaggggttcaagattttagtgaaggaagcaactgcagatgtggtggaaacagcaatagaactagaattagaagtggagcctgaagatgtgattaaattgctgcaatctcataataaaactagaacaagtgaggagctgcttcatatagttgagcaaagaaag

SEQ ID NO: 19538 - DNA, 351 bp, Homo sapiens
  MAP TO AC012384.16; EXPRESSED IN PLACENTA, SIGNAL = 0.93; EXPRESSED IN HEART, SIGNAL = 1.4; EXPRESSED IN ADULT LIVER, SIGNAL = 1.1; EXPRESSED IN BRAIN, SIGNAL =   1; EXPRESSED IN HELA, SIGNAL = 0.6; SWISSPROT HIT: P53104, EVALUE 2.10e-02; EST_HUMAN HIT: BF803217.1, EVALUE 3.00e-08; NT HIT: U52111.2, EVALUE 1.00e-06
ctccttctgtgcagcccggttcgtaacaggccacggaccagtactggtcctcagcctggaggttgttgacctctgtaatagagcacacttcttcagccagggagaaaaggacagggttgttgtggccaacccagtctctggaggtggatctcctggttccacagctccctggctgggtgaccctagacaggcctgttcctctctggcctcagtgttctcgtctggcaaatgggaaggtggtgacgataacaatccctgcctgatcaggctcttgcaaggatgatgtgagatccagtgagaaagtggctttagctcagggctgggcgcacaccaggggcttgtccaccccat

SEQ ID NO: 19539 - DNA, 115 bp, Homo sapiens
  MAP TO AC003064.2; EXPRESSED IN LUNG, SIGNAL = 0.83; EXPRESSED IN FETAL LIVER, SIGNAL = 0.35; EXPRESSED IN BRAIN, SIGNAL = 0.9; EXPRESSED IN BONE MARROW, SIGNAL = 0.67; EXPRESSED IN ADULT LIVER, SIGNAL = 0.7; SWISSPROT HIT: Q9UGI0, EVALUE 6.10e-02; EST_HUMAN HIT: BF593272.1, EVALUE 1.40e-01; NT HIT: AL163203.2, EVALUE 6.00e-03
cactccagtcgagctgcagtctccgtcgctgccaccaatctcgtgagaccagctgcagagccatatgcaggctccagtttaccacaggtgactcttccttgtcctcctcctccat

SEQ ID NO: 19540 - DNA, 76 bp, Homo sapiens
  MAP TO AC022153.3; EXPRESSED IN PLACENTA, SIGNAL = 1.8; EXPRESSED IN ADULT LIVER, SIGNAL = 1.9; EXPRESSED IN LUNG, SIGNAL = 3.9; EXPRESSED IN FETAL LIVER, SIGNAL =   2; EST_HUMAN HIT: BG687097.1, EVALUE 3.00e-23; NT HIT: gi14732839, EVALUE 3.00e-19
tgcgaacgtctgcagcttcactcctgaagtcagcgagaccacagacccaccagatggaagaaactccagatacatc

SEQ ID NO: 19541 - DNA, 197 bp, Homo sapiens
  MAP TO AL049840.4; EXPRESSED IN HEART, SIGNAL =  10; EXPRESSED IN ADULT LIVER, SIGNAL = 5.2; EXPRESSED IN LUNG, SIGNAL = 7.5; EXPRESSED IN BRAIN, SIGNAL = 6.5; EXPRESSED IN BONE MARROW, SIGNAL = 6.3; EXPRESSED IN PLACENTA, SIGNAL =   5; NT HIT: AJ318887.1, EVALUE 1.00e-107; SWISSPROT HIT: Q13625, EVALUE 1.00e-06; EST_HUMAN HIT: AI792614.1, EVALUE 1.00e-107
ctgctgaaatagaaaggttcagtgccatgttccaggaaaagaagcaggaagtacagactgcaattttaagggttgatcagcttagtcagcaattggaagatttaaagaaaggaaaactgaatgggttccagtcttacaatggcaaattgacgggaccagcggcggtggagttaaaaagactgtaccaagaactacag

SEQ ID NO: 19542 - DNA, 268 bp, Homo sapiens
  MAP TO AC002100.1; EXPRESSED IN BONE MARROW, SIGNAL = 0.44; EXPRESSED IN ADULT LIVER, SIGNAL = 0.66; EXPRESSED IN LUNG, SIGNAL = 0.78; EST_HUMAN HIT: BG697313.1, EVALUE 2.30e-02; NT HIT: AB002059.1, EVALUE 1.00e-03; SWISSPROT HIT: Q09472, EVALUE 7.00e-03
ggatggaccagtgctgtgggcatggctgcaggagccagaacttgagccagctgtgtgggtgtggctggggtgctcataggggagccagctttacccctgtgcatggcaggaccttgaactcagagctgctggacaatgggagggtggtgatgttgggtggtgagctccctgtcactcgagagcctggcacaggcagaagctgggggccgctgcagatgagatccctgtggggttcgaggagtgagtctcaggagatgacaaggtcaag

SEQ ID NO: 19543 - DNA, 227 bp, Homo sapiens
  MAP TO AC016951.9; EXPRESSED IN HEART, SIGNAL = 0.99; EXPRESSED IN ADULT LIVER, SIGNAL = 0.9; EXPRESSED IN FETAL LIVER, SIGNAL = 1.1; EXPRESSED IN PLACENTA, SIGNAL = 0.99; EST_HUMAN HIT: BF765810.1, EVALUE 3.00e-01; NT HIT: gi16160946, EVALUE 8.10e-01; SWISSPROT HIT: P54424, EVALUE 1.00e-01
catcacttctgctctcagacagtggcacggggaccaacccagctggaagtgcgtgtggtgctgtgagatctggggattcctgcagaggacacgactctgggacccatgcccaccaccctctgggagcacgtactcagtgcccaaggggagatcgccgggaagggcacacgcatggtggagagagtgctggtgtgggcagaccaggtcccaagtcccatcttcactac

SEQ ID NO: 19544 - DNA, 175 bp, Homo sapiens
  MAP TO AL109944.19; EXPRESSED IN BRAIN, SIGNAL = 0.81; EXPRESSED IN PLACENTA, SIGNAL = 0.68; EXPRESSED IN BONE MARROW, SIGNAL = 0.69; EXPRESSED IN ADULT LIVER, SIGNAL = 0.59; EXPRESSED IN FETAL LIVER, SIGNAL = 0.64; SWISSPROT HIT: P51174, EVALUE 2.50e+00; EST_HUMAN HIT: BE044577.1, EVALUE 3.00e-62
cgtgagcactgctgtagaagaggaataaacaggacctgtagaatatcagaagaggagcatctcatccaagctgagaacattagggaaggcttcttggtggaggtaatacctgacctgaatcctgcaggaaaactaggaattagccaaaaggaagagagggagaaagcagcagcag

SEQ ID NO: 19545 - DNA, 235 bp, Homo sapiens
  MAP TO AC000081.2; EXPRESSED IN BONE MARROW, SIGNAL = 1.3; EXPRESSED IN PLACENTA, SIGNAL = 1.2; EXPRESSED IN ADULT LIVER, SIGNAL =   1; EXPRESSED IN HEART, SIGNAL = 1.3; EXPRESSED IN FETAL LIVER, SIGNAL = 0.48; SWISSPROT HIT: P53675, EVALUE 1.00e-42; EST_HUMAN HIT: AI018362.1, EVALUE 1.00e-129; NT HIT: gi4502902, EVALUE 1.00e-129
cttgatgagctcaaggtcacactgcccccgctcataggcaacacaggccagatgggggtctcgcttctcacagtagcggcccaccacgctgctgtcatagtaggcattctctctcaggaagcactcggggctgttgttgctgtcgatgtagattttagccagtgcattgtgagtggcaggctcctcacagccttcctgaatctgggactccagccagggaagcagcagcttgagc

SEQ ID NO: 19546 - DNA, 215 bp, Homo sapiens
  MAP TO AL121928.13; EXPRESSED IN FETAL LIVER, SIGNAL =   1; EXPRESSED IN BRAIN, SIGNAL = 0.92; EXPRESSED IN BONE MARROW, SIGNAL = 0.86; EXPRESSED IN PLACENTA, SIGNAL =   1; EXPRESSED IN ADULT LIVER, SIGNAL = 0.78; SWISSPROT HIT: Q64733, EVALUE 2.60e-01; EST_HUMAN HIT: AW827576.1, EVALUE 1.00e-12; NT HIT: AF001497.1, EVALUE 1.90e-01
ctgttgacatgctccattcccatctacatgcttttgactcccaaaagtctgtttgggagtcaggagcatatgggtggtaatgaatggctccagacccataggtccaaatgccagctcatcatcccactcagaaggctccgaggcaccaccagttccacgcacctcacactcatcatagactactgatctgcgcacatccccctccaaacacacat

SEQ ID NO: 19547 - DNA, 310 bp, Homo sapiens
  MAP TO AC022336.12; EXPRESSED IN ADULT LIVER, SIGNAL = 2.2; EXPRESSED IN FETAL LIVER, SIGNAL = 1.5; EXPRESSED IN LUNG, SIGNAL = 2.7; EXPRESSED IN HELA, SIGNAL = 2.7; EXPRESSED IN BONE MARROW, SIGNAL = 2.2; EXPRESSED IN PLACENTA, SIGNAL = 1.8; NT HIT: J05633.1, EVALUE 6.00e-92; SWISSPROT HIT: Q07441, EVALUE 9.00e-27; EST_HUMAN HIT: BI011053.1, EVALUE 8.00e-92
acataccgctgaactcaaccacgcctctgagcttgaagtctcctctgcttcccatttcccacgtgcttaccatttcatagcgggccctggatcgctcgctctgaaactttgcaaactccctccggtcgtggatggtgacaagcagcttccagatagccaggagtgcaagcccaacaaggaggatgctaccgaccacagccaggaggatggtcatggcgttgggggtgtttccacactctggggggaccagaagcatggtaagcaaagccactagcatcaccatgcccctctcacgcaactgcaggcattt

SEQ ID NO: 19548 - DNA, 393 bp, Homo sapiens
  MAP TO AC010206.8; EXPRESSED IN HEART, SIGNAL = 1.2; EXPRESSED IN BRAIN, SIGNAL =   1; EXPRESSED IN BONE MARROW, SIGNAL = 0.82; EXPRESSED IN PLACENTA, SIGNAL = 1.5; EXPRESSED IN ADULT LIVER, SIGNAL = 1.2; NT HIT: gi15305446, EVALUE 0.00e+00; SWISSPROT HIT: Q9NWB1, EVALUE 8.00e-06; EST_HUMAN HIT: AU122296.1, EVALUE 0.00e+00
agcagccttccaaacgcagaagggtcgagaacagcatccctgcagctggagaaacacaaaatgtagaagtagcagcagggcccgctgggaaatgtgctgccgtagatgtggagcccccttcgaagcagaaggagaaggcagcctccctgaagagggacatgcccaaggtgctgcacgacagcagcaaggacagcatcaccgtctttgtcagcaacctgccctacagcatgcaggagccggacacgaagctcaggccactcttcgaggcctgtggggaggtggtccagatccgacccatcttcagcaaccgtggggatttccgaggttactgctacgtggagtttaaagaagagaaatcagcccttcaggcactggagatggaccggaaaagtg

SEQ ID NO: 19549 - DNA, 116 bp, Homo sapiens
  MAP TO AC010276.5; EXPRESSED IN PLACENTA, SIGNAL =   3; EXPRESSED IN ADULT LIVER, SIGNAL = 3.1; EXPRESSED IN HEART, SIGNAL = 3.1; EXPRESSED IN HELA, SIGNAL = 2.2; EXPRESSED IN FETAL LIVER, SIGNAL = 2.6; EXPRESSED IN BRAIN, SIGNAL = 2.7; EXPRESSED IN BONE MARROW, SIGNAL = 2.5; NT HIT: U32813.1, EVALUE 5.90e+00; EST_HUMAN HIT: N39085.1, EVALUE 1.40e-01
atgtttgaacaatattttagaggaaattttgcatatgtataccaggaaagacataatgttcgtaacagtattgttcatagaattgaaaaaaacagaaatgatgcattgactagaat

SEQ ID NO: 19550 - DNA, 149 bp, Homo sapiens
  MAP TO AD000864.1; EXPRESSED IN PLACENTA, SIGNAL = 2.6; EXPRESSED IN ADULT LIVER, SIGNAL = 2.3; EXPRESSED IN HEART, SIGNAL = 2.2; EXPRESSED IN FETAL LIVER, SIGNAL = 1.7; EXPRESSED IN BRAIN, SIGNAL = 2.5; EXPRESSED IN HELA, SIGNAL = 1.8; EST_HUMAN HIT: BF825765.1, EVALUE 2.00e-78; NT HIT: gi14249329, EVALUE 1.00e-78; SWISSPROT HIT: P43151, EVALUE 3.00e-01
ctggctggtgtgattagcacccatttgcagcaacatgtggacacaatccagcctgtctcgggcctgtgtgctcagcacccggggacagaggtcggaagggcgcatagcaacgttaagggccaggatggccgtgtggagcggggtgaggc

SEQ ID NO: 19551 - DNA, 165 bp, Homo sapiens
  MAP TO AC004754.1; EXPRESSED IN LUNG, SIGNAL = 1.3; EXPRESSED IN BRAIN, SIGNAL = 0.83; EXPRESSED IN FETAL LIVER, SIGNAL = 0.85; EXPRESSED IN PLACENTA, SIGNAL = 0.64; EXPRESSED IN ADULT LIVER, SIGNAL = 0.72; EST_HUMAN HIT: BE273396.1, EVALUE 6.00e-88; NT HIT: gi15317796, EVALUE 4.00e-88; SWISSPROT HIT: Q01644, EVALUE 1.50e+00
ctgctgtgtcgggggccaacggcagcacgctctgggagagacctgtggcccaagacgtggccctcgtggagtgtgctgtgccccagccaagaggcagtgaggcaccttctgcctgcatcctggtgggcagacccagttctttcattgcagtcaacttgttcacag

SEQ ID NO: 19552 - DNA, 179 bp, Homo sapiens
  MAP TO AF002991.1; EXPRESSED IN ADULT LIVER, SIGNAL = 0.9; EXPRESSED IN PLACENTA, SIGNAL = 1.2; EXPRESSED IN HEART, SIGNAL = 1.1; EXPRESSED IN FETAL LIVER, SIGNAL =   1; EXPRESSED IN HELA, SIGNAL = 1.2; EXPRESSED IN BRAIN, SIGNAL =   1; EST_HUMAN HIT: AA418550.1, EVALUE 2.00e-05; NT HIT: U71187.1, EVALUE 4.00e-05; SWISSPROT HIT: P26634, EVALUE 3.30e+00
cacatggcatgattctgcacaatgtgctttctgtctctctggatttgcctcttctggacacgtttatgtaatggaatcctccaatatttgtcctttgatgtccgatttctgtcactgagcatgatgtcttcaaggttcttccacacttcagccagtgtcagagctttgttctttttcat

SEQ ID NO: 19553 - DNA, 238 bp, Homo sapiens
  MAP TO AC000391.1; EXPRESSED IN BRAIN, SIGNAL = 0.56; EXPRESSED IN ADULT LIVER, SIGNAL = 0.74; SWISSPROT HIT: Q28084, EVALUE 2.20e-02; NT HIT: L34160.1, EVALUE 3.40e+00
cgcctttctgcatgggcctctgtgtctggtgtgtggaccccgtgggggccctgcaatcagccctttcagagtctccactggaccttgggttctggaggggccttgtggctggcggctggccctgccctgggctgcctttgtgtccttgctggccgttgagggtgggggaagcaggagcgcctcgttctttaacttcccagggtcttcttgctgtgtggccgcctgcaggttgaggagc

SEQ ID NO: 19554 - DNA, 153 bp, Homo sapiens
  MAP TO AC025754.2; EXPRESSED IN BRAIN, SIGNAL = 2.8; EXPRESSED IN PLACENTA, SIGNAL = 2.5; EXPRESSED IN ADULT LIVER, SIGNAL = 1.4; EXPRESSED IN FETAL LIVER, SIGNAL = 1.8; SWISSPROT HIT: P22357, EVALUE 5.10e-01; NT HIT: X85980.1, EVALUE 2.10e+00
cttcagggctagcagctgtgatgggtagagatggagcccctctccctccaatgccctcagggctgcttggggtctcaggtggagcaggaacctggcagttcttgagtcctgtttttgccttctggggctactcatctcttgggagaagagcat

SEQ ID NO: 19555 - DNA, 87 bp, Homo sapiens
  MAP TO AC004778.1; EXPRESSED IN BRAIN, SIGNAL = 0.43; EXPRESSED IN ADULT LIVER, SIGNAL = 0.51; NT HIT: L16238.1, EVALUE 1.10e+00; EST_HUMAN HIT: BI046878.1, EVALUE 1.50e+00
ggaggcgagaaggagggctgcagagcccaccaccccagccagagctgcacacgagcaacaaggaggagaagccggaggagaagctct

SEQ ID NO: 19556 - DNA, 355 bp, Homo sapiens
  MAP TO AC004755.1; EXPRESSED IN ADULT LIVER, SIGNAL = 1.3; EXPRESSED IN HEART, SIGNAL = 1.2; EXPRESSED IN BRAIN, SIGNAL = 1.4; EXPRESSED IN BONE MARROW, SIGNAL = 1.2; NT HIT: U77383.1, EVALUE 5.20e+00; SWISSPROT HIT: Q91987, EVALUE 5.40e-01; EST_HUMAN HIT: AA383337.1, EVALUE 0.00e+00
ctacgtcactgctgaaccctggtcccctccgcagagggcaatgactgctcctctgggggcaaggatagctgctcctccccgggcaccagcagccactccatggatgatgatgactgcttctccgcgggccacagctccacctccataggctgctcgctcgtggacgtggacgattcttccagacttggtggcagagtctccacctgagatttgtgggtcttgtctggaagtggcaccgtcccctccttgggggtgtgaggctccttttgccagctcttccggaacggtgtggagggcttcaaaaatgctgacttctcctccgaggagtctggctggctctccaacgtcagctggc

SEQ ID NO: 19557 - DNA, 75 bp, Homo sapiens
  MAP TO AC010451.5; EXPRESSED IN HEART, SIGNAL = 1.2; EXPRESSED IN BRAIN, SIGNAL = 1.3; EXPRESSED IN BONE MARROW, SIGNAL = 1.1; EXPRESSED IN PLACENTA, SIGNAL = 0.89; EXPRESSED IN ADULT LIVER, SIGNAL = 1.3; NT HIT: gi4757727, EVALUE 2.20e-01; EST_HUMAN HIT: AA746086.1, EVALUE 1.00e-34
caaactcatggaggttgtctgcaggcagaaggtggctgaagaagctcttctcgcagtccacttccaggaaagaca

SEQ ID NO: 19558 - DNA, 80 bp, Homo sapiens
  MAP TO AC004471.2; EXPRESSED IN ADULT LIVER, SIGNAL = 0.39; EXPRESSED IN HEART, SIGNAL = 2.3; EXPRESSED IN BRAIN, SIGNAL = 0.4; SWISSPROT HIT: P57059, EVALUE 1.90e-01; NT HIT: L77570.1, EVALUE 1.00e-37; EST_HUMAN HIT: AI991174.1, EVALUE 1.00e-37
atggcgtgcaagatgttccaccaactctcctcagccattaaatactgccacgacctggacatcatgcaccagaacctcaa

SEQ ID NO: 19559 - DNA, 247 bp, Homo sapiens
  MAP TO AC022143.6; EXPRESSED IN FETAL LIVER, SIGNAL = 1.8; EXPRESSED IN PLACENTA, SIGNAL = 1.1; EXPRESSED IN HEART, SIGNAL = 1.3; EXPRESSED IN ADULT LIVER, SIGNAL = 0.59; SWISSPROT HIT: Q05890, EVALUE 2.80e-01; NT HIT: U66059.1, EVALUE 3.50e+00; EST_HUMAN HIT: BF826553.1, EVALUE 1.00e-113
cttctcagcagtggcatcacatccagccagctgctccagcccaaatgtgatgagatcattttgattccccttctctccacatcctctccccatattcaattcaacagcaggtgctgtcagtgctgccccagcctctgtctccctcgtgtctctccagggctgcactgtgacaaggccacggtgtctacctggacggccacagggactcccagttggtcttcctgcctctactgccgcccccgttgct

SEQ ID NO: 19560 - DNA, 221 bp, Homo sapiens
  MAP TO AC018427.3; EXPRESSED IN BONE MARROW, SIGNAL = 2.8; EXPRESSED IN BRAIN, SIGNAL = 0.6; EXPRESSED IN ADULT LIVER, SIGNAL = 0.87; EXPRESSED IN HELA, SIGNAL = 0.52; SWISSPROT HIT: P39935, EVALUE 1.80e+00; NT HIT: gi16166198, EVALUE 7.90e-01
ttagcacaggacactgctggcagctcacccatctcacaggaatgaactgcgaggaagaaccagtgaaggctggaaagccttttgatcgtcatgaaagattgttgccagatggagaaacagaactgttagaatataacgaagctgcactcaagataatcgccatcttgttcaacttttccctgcaactccatattagaggagagatttgtcatgtgctgtga

SEQ ID NO: 19561 - DNA, 176 bp, Homo sapiens
  MAP TO AF196968.1; EXPRESSED IN LUNG, SIGNAL = 1.3; EXPRESSED IN BONE MARROW, SIGNAL = 1.1; EXPRESSED IN PLACENTA, SIGNAL = 1.3; EXPRESSED IN HEART, SIGNAL = 1.1; EXPRESSED IN ADULT LIVER, SIGNAL = 1.3; SWISSPROT HIT: P16609, EVALUE 5.80e-02; NT HIT: gi14766357, EVALUE 6.10e-01
tgctgccagaccggggcctttactgtaacttcccaagggacctgctggtgcccctcctcccaggccacagaggcatcctgcatggggcacagctgctgagctatgataccggtggtgagtgtgggccgctgcactccctccacacagctatctctgggcctgggctctgtcttcat

SEQ ID NO: 19562 - DNA, 330 bp, Homo sapiens
  MAP TO AC017019.3; EXPRESSED IN HEART, SIGNAL = 1.8; EXPRESSED IN ADULT LIVER, SIGNAL = 2.2; EXPRESSED IN FETAL LIVER, SIGNAL =   2; EXPRESSED IN BRAIN, SIGNAL = 1.3; EXPRESSED IN PLACENTA, SIGNAL = 1.1; SWISSPROT HIT: P26805, EVALUE 1.90e-02; NT HIT: AJ278581.1, EVALUE 1.00e-100; EST_HUMAN HIT: AA663213.1, EVALUE 6.00e-56
ttgactaagataccaggtatctccaaactcctgggcagcagctaaagccacattcttttcattaaaggccaggatttgatctaacaatagcatggcatctgtccaagtgaggtcaaagttttgccctggaccctgcaggacatctatgtacctatcaggatcatctgaaaacttccccagctctgccttgattggctttaaatcagggagggagaaggggacttgtacccaggttgggccaaattctcctccccctacagcctgaaggggacagaatcgatagcccagggttttttgtggtcctttgcagatttctttgcttgtttcctt

SEQ ID NO: 19563 - DNA, 345 bp, Homo sapiens
  MAP TO AC009003.7; EXPRESSED IN BONE MARROW, SIGNAL = 1.1; EXPRESSED IN ADULT LIVER, SIGNAL = 1.3; EXPRESSED IN BRAIN, SIGNAL = 1.5; NT HIT: gi14757758, EVALUE 2.00e-42; EST_HUMAN HIT: BF983931.1, EVALUE 0.00e+00; SWISSPROT HIT: P04929, EVALUE 4.50e-02
acgcgctgcgtccgctcgggcggaactacgtttcccggcatgcactgcgggccgccgggcctcagggaagagtcgcgcccccggggagggagcagcactggcccattctgcagatggggacatcgagtcacgggctggctacgaactcctcgggggcgaaggtggcggagagggatgggttccaggacgtcctggcgcccggggaaggctcggcgggacggatttgcggtgcgcagccagtgccgttcgtccctcaggtgcttggcgtgatgatcggggccggagtggcggtggtggtcacggccgtgctcatcctcctggtggtgcggaggctgcgagtgccaa

SEQ ID NO: 19564 - DNA, 126 bp, Homo sapiens
  MAP TO AC010238.4; EXPRESSED IN BRAIN, SIGNAL = 1.8; EXPRESSED IN LUNG, SIGNAL = 1.3; EXPRESSED IN BONE MARROW, SIGNAL = 1.7; EXPRESSED IN PLACENTA, SIGNAL =   2; EXPRESSED IN ADULT LIVER, SIGNAL = 1.9; EXPRESSED IN HEART, SIGNAL =  15; SWISSPROT HIT: P48994, EVALUE 3.50e+00; EST_HUMAN HIT: AA568197.1, EVALUE 6.00e-04
ctgggtgtcctttgaggggaacatagggctgctttgggggtgctgcaggtgtgtgggggagatgagagcaaagctgtctctgtgtacagcaaggcctgtgcctcttcctggctgctgcctcttcat

SEQ ID NO: 19565 - DNA, 171 bp, Homo sapiens
  MAP TO AC012310.4; EXPRESSED IN HELA, SIGNAL = 0.88; EXPRESSED IN BRAIN, SIGNAL = 1.2; EXPRESSED IN FETAL LIVER, SIGNAL = 0.83; EXPRESSED IN BONE MARROW, SIGNAL =   1; EXPRESSED IN ADULT LIVER, SIGNAL = 1.2; EXPRESSED IN HEART, SIGNAL = 0.99; SWISSPROT HIT: P13489, EVALUE 1.00e-07; NT HIT: AF031169.1, EVALUE 2.30e+00
ttcaggctctgcaggttaccatctgggcgacccaaggcctcacacaggaacttgactccctcgtctctcaggctgttcttgctcagattcaggtgtgtcaggctcctgttctgcaggagagcatctgacaagtgcttgcaagcgggtgctgccagctggcaaaaccagagc

SEQ ID NO: 19566 - DNA, 178 bp, Homo sapiens
  MAP TO AC022078.12; EXPRESSED IN LUNG, SIGNAL = 0.77; EXPRESSED IN ADULT LIVER, SIGNAL = 0.46; EST_HUMAN HIT: BE671342.1, EVALUE 3.00e-50; SWISSPROT HIT: O29500, EVALUE 9.80e+00; NT HIT: AE007615.1, EVALUE 9.70e+00
gctaaacatatttttgactggtatgaacccattctactttcatgcagtaaatataattttacactgcttagtgactcttgtgctgatgtacacctgtgataaaactgtcttcaagaatcgtggacttgcttttgtaacggcattgctttttgctgtacatcctattcatactgaggcg

SEQ ID NO: 19567 - DNA, 142 bp, Homo sapiens
  MAP TO AC018757.4; EXPRESSED IN HEART, SIGNAL =   5; EXPRESSED IN ADULT LIVER, SIGNAL = 8.2; EXPRESSED IN HELA, SIGNAL = 3.4; EXPRESSED IN FETAL LIVER, SIGNAL = 5.3; EXPRESSED IN BRAIN, SIGNAL = 4.1; EXPRESSED IN BONE MARROW, SIGNAL = 3.4; EXPRESSED IN PLACENTA, SIGNAL =   5; SWISSPROT HIT: P36866, EVALUE 7.70e+00; NT HIT: gi14784857, EVALUE 3.10e-02; EST_HUMAN HIT: BE719513.1, EVALUE 1.10e-02
cttggtctcttttcagaagccagagcctttgttcataacacagtgctgcctgcagaagcccacttttccttgcagagacagcacaatgagaccattttctttttgctgagtttcccacacacagaaatcttgcaggtgcagc

SEQ ID NO: 19568 - DNA, 190 bp, Homo sapiens
  MAP TO AC016027.15; EXPRESSED IN ADULT LIVER, SIGNAL = 0.8; EXPRESSED IN HELA, SIGNAL = 0.54; EXPRESSED IN LUNG, SIGNAL = 1.1; EXPRESSED IN BRAIN, SIGNAL = 0.9; EXPRESSED IN FETAL LIVER, SIGNAL = 0.74; EXPRESSED IN PLACENTA, SIGNAL = 0.65; NT HIT: gi6678492, EVALUE 6.70e-01; SWISSPROT HIT: P54686, EVALUE 7.40e+00; EST_HUMAN HIT: BF956934.1, EVALUE 2.00e-82
cttatatgattgaggccaaatatgcaaagccccgtctcccagccatgtacacagtagctgctggctgaggacactgctgccaacgccacaggccccagcgaacagccctgactcttatgtgatgatctgcttttgggtcctgtcactatctgcgcacacagcacacgtccacatgtatcactgaccaacc

SEQ ID NO: 19569 - DNA, 127 bp, Homo sapiens
  MAP TO AC004176.1; EXPRESSED IN PLACENTA, SIGNAL = 1.7; EXPRESSED IN HEART, SIGNAL = 1.6; EXPRESSED IN ADULT LIVER, SIGNAL = 1.9; EXPRESSED IN BONE MARROW, SIGNAL = 1.4; EXPRESSED IN BRAIN, SIGNAL =   2; NT HIT: Z99124.1, EVALUE 6.60e+00; SWISSPROT HIT: P87368, EVALUE 3.50e+00
atgaactccttaaggggcagaaaaaacaaagatcaaagagaagttgggaagattcaaagcaaaagaagtattcagtgtaccatggctgtgtttcaagatggaggtggccatgagcaaaagaatgcag

SEQ ID NO: 19570 - DNA, 328 bp, Homo sapiens
  MAP TO AL096870.3; EXPRESSED IN BONE MARROW, SIGNAL = 2.6; EXPRESSED IN PLACENTA, SIGNAL = 1.7; EXPRESSED IN ADULT LIVER, SIGNAL =   2; EXPRESSED IN FETAL LIVER, SIGNAL = 1.7; EXPRESSED IN BRAIN, SIGNAL = 1.7; EXPRESSED IN HELA, SIGNAL = 1.7; EST_HUMAN HIT: BI770357.1, EVALUE 0.00e+00; NT HIT: gi11434029, EVALUE 0.00e+00; SWISSPROT HIT: Q13546, EVALUE 4.00e-10
ctctctcctggagtgtaggaaggcgatatccagggaggtcaaggccatggcaagtctggataacgaattcgtgctgcgcctagaaggggttatcgagaaggtgaactgggaccaagatcccaagccggctctggtgactaaattcatggagaacggctccttgtcggggctgctgcagtcccagtgccctcggccctggccgctcctttgccgcctgctgaaagaagtggtgcttgggatgttttacctgcacgaccagaacccggtgctcctgcaccgggacctcaagccatccaacgtcctgctggacccagagctgcacgtcaag

SEQ ID NO: 19571 - DNA, 273 bp, Homo sapiens
  MAP TO AC004493.1; EXPRESSED IN ADULT LIVER, SIGNAL = 1.5; EXPRESSED IN HEART, SIGNAL = 2.8; EXPRESSED IN FETAL LIVER, SIGNAL = 2.4; EXPRESSED IN LUNG, SIGNAL =   1; EST_HUMAN HIT: AW160794.1, EVALUE 0.00e+00; NT HIT: gi14777900, EVALUE 0.00e+00; SWISSPROT HIT: Q9TU66, EVALUE 2.20e+00
ccctgctcttccatcatctcctccagctcgaggcatcgcagctcgacgcgccgcttgcgctcgtggtccaggatgtcaggattaggccgcttcaccagggcagcctccaggcgccgcagttcctcctctcccttgtagtcaggccgctcaccccggcggccccgcaccagggacaggttgcgctggacgtagccgttggtgccgctgccccggggcgtcggcagcccgatcccgttgtacatggccccgtgcccggggggggcaccaccgctc

SEQ ID NO: 19572 - DNA, 195 bp, Homo sapiens
  MAP TO AC005546.1; EXPRESSED IN ADULT LIVER, SIGNAL = 2.1; EXPRESSED IN BRAIN, SIGNAL = 2.2; EXPRESSED IN BONE MARROW, SIGNAL = 2.4; EXPRESSED IN PLACENTA, SIGNAL = 1.3; EST_HUMAN HIT: BI832512.1, EVALUE 1.00e-105; NT HIT: gi14763529, EVALUE 1.00e-106; SWISSPROT HIT: Q9NXH9, EVALUE 3.00e-33
gtcaggtcccgattgaattcctgcaccgggttataaaagacctcgttggcactgggaaaggcgattttggcagccccctcggtgactgtcgtctcctggacttcacgtggacgttcttctccgtagggcccggtgccgttctccatcgctgctgtattcggcagccctggagactgccactcgaaaaaccgggct

SEQ ID NO: 19573 - DNA, 167 bp, Homo sapiens
  MAP TO AC004212.1; EXPRESSED IN BRAIN, SIGNAL = 1.2; EXPRESSED IN PLACENTA, SIGNAL = 1.3; EXPRESSED IN HEART, SIGNAL = 1.2; EXPRESSED IN ADULT LIVER, SIGNAL = 1.1; SWISSPROT HIT: P41217, EVALUE 1.50e+00
atggatgccacagacaaaatcaagtttccatggttgaaggagaagaggacgatagagtttggggaggcagcaggctacgtctgccacagaagatataaagatatggagccacacgagaagatgggggaggctgccaaaaaagtccactgggtacagatgaggagcag

SEQ ID NO: 19574 - DNA, 174 bp, Homo sapiens
  MAP TO AC010422.6; EXPRESSED IN LUNG, SIGNAL = 1.7; EXPRESSED IN BONE MARROW, SIGNAL = 1.2; EXPRESSED IN ADULT LIVER, SIGNAL = 1.2; EXPRESSED IN PLACENTA, SIGNAL = 1.3; EXPRESSED IN HEART, SIGNAL = 1.6; SWISSPROT HIT: P46965, EVALUE 4.40e+00; NT HIT: M63709.1, EVALUE 3.90e-02
tcaaccagggacgtccttggtgatgctctgctggtcctgcagcctgagggctttttccagacgctttgacctgtgcacttctgcccccacgcggccaatgcctgaactgcagcaacgtcctgcagacccagtttccttttttggtaccaggcatatgcagggcgtggacagatc

SEQ ID NO: 19575 - DNA, 169 bp, Homo sapiens
  MAP TO AF196971.1; EXPRESSED IN BRAIN, SIGNAL = 2.3; EXPRESSED IN FETAL LIVER, SIGNAL = 3.7; EXPRESSED IN PLACENTA, SIGNAL = 2.7; EXPRESSED IN HEART, SIGNAL = 3.2; EXPRESSED IN ADULT LIVER, SIGNAL = 2.2; EXPRESSED IN LUNG, SIGNAL = 2.4; NT HIT: gi16171680, EVALUE 2.00e-90; SWISSPROT HIT: Q9UBN7, EVALUE 1.00e-15; EST_HUMAN HIT: AW806812.1, EVALUE 6.00e-88
ctgagaccgtggagagggacaacatggaggaggacaatgtagaggagagcgaggaggaaggaccctgggagccccctgtgctcccaatcctgacatggccagtgctacagtctcgcacagggctggtctatgaccaaaatatgatgaatcactgcaacttgtgggacag

SEQ ID NO: 19576 - DNA, 262 bp, Homo sapiens
  MAP TO AC018359.7; EXPRESSED IN FETAL LIVER, SIGNAL = 3.5; EXPRESSED IN BRAIN, SIGNAL = 2.9; EXPRESSED IN BONE MARROW, SIGNAL = 2.3; EXPRESSED IN PLACENTA, SIGNAL = 2.8; EXPRESSED IN HEART, SIGNAL = 4.7; EXPRESSED IN ADULT LIVER, SIGNAL = 2.8; NT HIT: AF045453.1, EVALUE 6.10e-02; SWISSPROT HIT: P27315, EVALUE 4.00e-01; EST_HUMAN HIT: AI392740.1, EVALUE 3.50e-01
tagattcgttgttagtgatggtattgatgtatttctgaaactggaacgcattataggaaagagaaaatatattgctgttgttgaaattctgctaatagttggtattgatgttgtatttctgaaactggaacacattataggaaagagaaaatatattgctgttgttgaaattctgctgataattgggagaaggaaattaataatacagaatgtgagaaggataggaaaaagttgtgatgttagaattgaagttgaggtatta

SEQ ID NO: 19577 - DNA, 225 bp, Homo sapiens
  MAP TO AC009086.5; EXPRESSED IN PLACENTA, SIGNAL = 2.4; EXPRESSED IN ADULT LIVER, SIGNAL = 1.3; EXPRESSED IN BRAIN, SIGNAL = 1.6; EXPRESSED IN BONE MARROW, SIGNAL = 1.6; EST_HUMAN HIT: BG116881.1, EVALUE 1.00e-111; NT HIT: gi14775898, EVALUE 1.00e-111; SWISSPROT HIT: P10173, EVALUE 3.80e-01
cagcgtgagtaaattcaagactgagatgatataattggtaccacaagtctggcaattctccagttggtctaatccatatgtaatgaccatgtcacaatgtatagtcatgctaggatccaagctgccgagcaaaacaccaacacactcattagcagctgtcaacacagcctcagaaaaaaacacctggtttgcagccgtcacacatctcattactctgtacagaac

SEQ ID NO: 19578 - DNA, 193 bp, Homo sapiens
  MAP TO AC016605.4; EXPRESSED IN PLACENTA, SIGNAL = 0.97; EXPRESSED IN ADULT LIVER, SIGNAL = 0.91; EXPRESSED IN HEART, SIGNAL = 0.98; EXPRESSED IN FETAL LIVER, SIGNAL =   1; EXPRESSED IN HELA, SIGNAL =   1; EXPRESSED IN BRAIN, SIGNAL = 0.85; EXPRESSED IN BONE MARROW, SIGNAL = 0.61; EST_HUMAN HIT: BE893569.1, EVALUE 1.00e-104; NT HIT: gi7705936, EVALUE 1.00e-104; SWISSPROT HIT: Q56560, EVALUE 1.50e+00
cttttggacttcttggatcagcatcctttttcatttactcctctaattcagagatcactggaattttctgtaagctatgtttttacagaagttggtgaaggcgttacatttgaacgattcattgtccaatgtatgaatcttattaagatgattgtcaaaaattatgcttataagccatccaaaaattttgaag

SEQ ID NO: 19579 - DNA, 411 bp, Homo sapiens
  MAP TO AC005204.1; EXPRESSED IN BRAIN, SIGNAL = 0.79; EXPRESSED IN LUNG, SIGNAL = 0.85; EXPRESSED IN FETAL LIVER, SIGNAL = 0.66; EXPRESSED IN PLACENTA, SIGNAL = 0.77; EXPRESSED IN ADULT LIVER, SIGNAL = 0.69; EST_HUMAN HIT: BF897514.1, EVALUE 6.00e-75; NT HIT: U06673.1, EVALUE 0.00e+00; SWISSPROT HIT: P13688, EVALUE 2.00e-28
cagagctgtccaagccctccgtcaccagcaacaactccaaccccatggaggacaaggatgctgtggccttaacttgtgaacctgagacccagggcacaacctacctgtggtgggtaaatggtcagagcctcccggccagttccaggctgcagctgtccaataacaacaggaccctcactgtactcaatgtcacaaggaattacacaggaccctataagtgtgaaatctggaatcgagtgagtgtcagtcacagttaccctgtcaccctggatgtcctctgtagcccaggctgccaacccaaattgacatggccagaatccaggcctctcagtccttctcaggtccaagaacagagactctcagccctggatatcaaagctgtccatgactgcctgccccaggcaaattttg

SEQ ID NO: 19580 - DNA, 125 bp, Homo sapiens
  MAP TO AC004790.1; EXPRESSED IN HEART, SIGNAL = 1.6; EXPRESSED IN BRAIN, SIGNAL =   3; EXPRESSED IN LUNG, SIGNAL = 1.6; EXPRESSED IN FETAL LIVER, SIGNAL = 1.3; EXPRESSED IN ADULT LIVER, SIGNAL = 2.8; EST_HUMAN HIT: AA889338.1, EVALUE 1.00e-42; NT HIT: AF311743.1, EVALUE 1.00e-01; SWISSPROT HIT: Q02099, EVALUE 1.20e+00
ccactgctgcagccgcaacaggtgtcgcggccagtgcaggctttccagacggtggcagcgcccagcagccgttgcctcagctctttggtggcagccaggccaacaagggcagcaacgatgactag

SEQ ID NO: 19581 - DNA, 185 bp, Homo sapiens
  MAP TO AC005262.1; EXPRESSED IN BRAIN, SIGNAL =   4; EXPRESSED IN LUNG, SIGNAL = 6.5; EXPRESSED IN BONE MARROW, SIGNAL = 4.5; EXPRESSED IN PLACENTA, SIGNAL = 2.4; EXPRESSED IN ADULT LIVER, SIGNAL = 3.2; EXPRESSED IN HEART, SIGNAL = 2.4; EST_HUMAN HIT: AA593581.1, EVALUE 1.00e-100; NT HIT: AF011497.1, EVALUE 1.00e-100
gcacgggcgagagcgggaagagcacgttcatcaagcagatgcgcatcatccacggcgccggctactcggaggaggacaagcgcggcttcaccaagctcgtctaccagaacatcttcaccgccatgcaggccatgatccgggccatggagacgctcaagatcctctacaagtacgagcagaacaag

SEQ ID NO: 19582 - DNA, 95 bp, Homo sapiens
  MAP TO AJ250235.1; EXPRESSED IN LUNG, SIGNAL = 0.5; EXPRESSED IN PLACENTA, SIGNAL = 0.51; EXPRESSED IN ADULT LIVER, SIGNAL = 0.48; EST_HUMAN HIT: AU142744.1, EVALUE 2.00e-46; NT HIT: gi14763179, EVALUE 1.00e-46; SWISSPROT HIT: P22830, EVALUE 8.20e-02
ctaaacatgggaggccctgaaactcttggagatgttcacgacttccttctgagactcttcttggaccaagacctcatgacacttcctattcagaa

SEQ ID NO: 19583 - DNA, 108 bp, Homo sapiens
  MAP TO AF004877.1; EXPRESSED IN ADULT LIVER, SIGNAL = 2.1; EXPRESSED IN LUNG, SIGNAL = 4.3; EXPRESSED IN FETAL LIVER, SIGNAL = 5.9; EXPRESSED IN BRAIN, SIGNAL = 2.1; NT HIT: gi15299135, EVALUE 3.00e-54; EST_HUMAN HIT: AA852977.1, EVALUE 4.00e-54; SWISSPROT HIT: P40349, EVALUE 8.00e+00
ggctctgctgggccccaaggtcctcctggtcccagtggtgaagaaggaaagagaggccctaatggggaagctggatctgccggccctccaggacctcctgggctgaga

SEQ ID NO: 19584 - DNA, 175 bp, Homo sapiens
  MAP TO AC010252.3; EXPRESSED IN LUNG, SIGNAL = 0.58; EXPRESSED IN BONE MARROW, SIGNAL = 0.96; EXPRESSED IN ADULT LIVER, SIGNAL =   1; EXPRESSED IN BRAIN, SIGNAL = 0.79; SWISSPROT HIT: P36848, EVALUE 2.50e+00; NT HIT: AJ251155.1, EVALUE 2.40e+00
ccaagatacagaggaagctaatcatacccgtgacctcgacctcattaacattgtgctggaaccaaagagccagcattccatggtattgtttgactttggattgtctctgctgatttacgatcacgaggtctatagtcctgccctcgaagggaggcagatgttagagccagatgag

SEQ ID NO: 19585 - DNA, 125 bp, Homo sapiens
  MAP TO AC004173.1; EXPRESSED IN ADULT LIVER, SIGNAL = 0.76; EXPRESSED IN BRAIN, SIGNAL = 0.71; EXPRESSED IN PLACENTA, SIGNAL = 0.57; EST_HUMAN HIT: AI346483.1, EVALUE 6.00e-38; NT HIT: AF055066.1, EVALUE 2.00e-64
ggaaagggcatgaggagctcagtcctggtggactcgaggcagacgatggtgctgaggctgtgggagatgaaggaggaggagcaggggtggctgtcacctgggctctctccatggaggtgaagaca

SEQ ID NO: 19586 - DNA, 161 bp, Homo sapiens
  MAP TO AC010327.5; EXPRESSED IN FETAL LIVER, SIGNAL = 1.7; EXPRESSED IN BRAIN, SIGNAL = 1.6; EXPRESSED IN PLACENTA, SIGNAL = 1.9; EXPRESSED IN HEART, SIGNAL =   2; EXPRESSED IN ADULT LIVER, SIGNAL = 1.8; EST_HUMAN HIT: BF675639.1, EVALUE 1.30e-02; SWISSPROT HIT: P23467, EVALUE 5.00e-09; NT HIT: AF275148.1, EVALUE 1.00e-85
gtggaggagcagaagacactgtctgtgcgccaattccactaccaggcctggccggatcacggcgttccctcctccccagacaccttgctggctttctggaggatgcttcggcagtggctggatcagaccatggagggaggcccacccattgtgcactgcag

SEQ ID NO: 19587 - DNA, 284 bp, Homo sapiens
  MAP TO AC067969.1; EXPRESSED IN HEART, SIGNAL = 2.2; EXPRESSED IN FETAL LIVER, SIGNAL = 1.8; EXPRESSED IN PLACENTA, SIGNAL = 1.8; EXPRESSED IN ADULT LIVER, SIGNAL = 1.8; EST_HUMAN HIT: BI549601.1, EVALUE 1.00e-124; SWISSPROT HIT: P21817, EVALUE 3.00e-39; NT HIT: U48484.1, EVALUE 0.00e+00
tcagaggccggaggtggcatcagagcccatcgcacccctgcagtgttcgcacagcccattgtgagccgtgcacggccggagctcctgcagtcccacttcatcccaactatcgggcggctgcgcaagagggcagggaaggtggtgtccgaggaggagcagctgcgcctggaggccaaggcggaggcccaggagggcgagctgctggtgcgggacgagttctctgtgctctgccgggacctctacgccctgtatccgctgctcatccgctacgtggacaacaacag

SEQ ID NO: 19588 - DNA, 370 bp, Homo sapiens
  MAP TO AC026404.4; EXPRESSED IN BONE MARROW, SIGNAL = 1.1; EXPRESSED IN ADULT LIVER, SIGNAL = 0.93; EXPRESSED IN PLACENTA, SIGNAL = 2.4; EXPRESSED IN FETAL LIVER, SIGNAL = 0.8; SWISSPROT HIT: O93375, EVALUE 5.80e-01; NT HIT: U17590.1, EVALUE 3.50e-01
acgtcgggtggtatggttgtggtttccgcacagtgctttgttaggtggagaagagggaagggcaaaaggcatccctgagcctgttgcctggcaggtcttgaaagtggggtcgtgtagggggatgtgccttctaccttgttaccagagccagaatcctgagaggagctgagaacagtgagtggaagtggatcctttgagaagaggcccaaagaactgaaggctgtttgcttcaggaagcctggagaccctttgcacacatacttgatgaatccatctgaccagtgggttcggaattttgaagaaaaatgcatcctaatgctttcaagatatcgagccctccattggtatccaattttgctctccatttgct

SEQ ID NO: 19589 - DNA, 155 bp, Homo sapiens
  MAP TO AC018452.11; EXPRESSED IN LUNG, SIGNAL =  13; EXPRESSED IN FETAL LIVER, SIGNAL = 9.4; EXPRESSED IN BRAIN, SIGNAL = 7.7; EXPRESSED IN BONE MARROW, SIGNAL = 5.3; EXPRESSED IN ADULT LIVER, SIGNAL = 6.6; NT HIT: gi14730570, EVALUE 4.00e-82; EST_HUMAN HIT: AU125271.1, EVALUE 5.00e-82; SWISSPROT HIT: Q12774, EVALUE 4.00e-05
ctcttcttcttggtgataatgagcacatcgttaaagagaaagaagtagacttgctgtttggatgtccttcttgagaaaagcacagtgtcttcaacataggctgtcaattcacctctttttaccaaccaccgggaagaggagactaaaggaaaagg

SEQ ID NO: 19590 - DNA, 342 bp, Homo sapiens
  MAP TO AC004794.1; EXPRESSED IN BRAIN, SIGNAL = 0.74; EXPRESSED IN FETAL LIVER, SIGNAL = 0.47; EXPRESSED IN BONE MARROW, SIGNAL = 0.83; EXPRESSED IN ADULT LIVER, SIGNAL = 0.63; NT HIT: AL163302.2, EVALUE 3.20e-01; EST_HUMAN HIT: AL120991.1, EVALUE 0.00e+00; SWISSPROT HIT: Q46045, EVALUE 3.90e-01
gccacccagcccagcgcccagagcccagccctccagagccagagccccaggctcccgaagggtcccaggccggagcagaggggccctccagccccgaggcatcaaggagccctgcacggggagcctacctgcaaagcctggagcccagtagccgccgatgggtgctgggtggggccaagccagctgaggacacctctttagggcctggggtacctggcactggggagcccgccggcgagatctggtacaaccccatccctgaggaagaccccagacctccagcacctgagcccccggggccacagcctggctcagctgagtcagagggcctggccccccaag

SEQ ID NO: 19591 - DNA, 99 bp, Homo sapiens
  MAP TO AL021182.1; EXPRESSED IN BRAIN, SIGNAL = 1.2; EXPRESSED IN FETAL LIVER, SIGNAL = 1.5; EXPRESSED IN PLACENTA, SIGNAL = 1.1; EXPRESSED IN HELA, SIGNAL = 0.72; EXPRESSED IN BONE MARROW, SIGNAL = 1.4; EXPRESSED IN HEART, SIGNAL = 1.1; EXPRESSED IN ADULT LIVER, SIGNAL =   1; NT HIT: AB067778.1, EVALUE 1.20e+00
ctttgaagcgtttttcttcacttctgacttattcatccaagattcgttagtaagtctgacttctgatccagtgctctgaatgatagtttgttgatgcat

SEQ ID NO: 19592 - DNA, 180 bp, Homo sapiens
  MAP TO AC022103.4; EXPRESSED IN FETAL LIVER, SIGNAL = 0.48; EXPRESSED IN BRAIN, SIGNAL = 0.59; EXPRESSED IN HELA, SIGNAL = 0.57; EXPRESSED IN PLACENTA, SIGNAL = 0.66; EXPRESSED IN ADULT LIVER, SIGNAL = 0.6; SWISSPROT HIT: Q98943, EVALUE 2.90e-01; NT HIT: gi14249319, EVALUE 6.30e-01; EST_HUMAN HIT: AI991025.1, EVALUE 2.00e-94
ggaactggtcgaggtgcctggcttgagagaacaccagacaaccaaaggccacatgtggaattagcaatccactggtcccccaccaatgtacagcggcgggtgctggtgcaggtggatattggcaaagattgcagccttgtttacgggaacccggataagtttctgggcaaggttgcatag

SEQ ID NO: 19593 - DNA, 397 bp, Homo sapiens
  MAP TO AC011749.2; EXPRESSED IN BRAIN, SIGNAL = 1.1; EXPRESSED IN FETAL LIVER, SIGNAL = 0.82; EXPRESSED IN BONE MARROW, SIGNAL = 1.1; EXPRESSED IN PLACENTA, SIGNAL = 0.75; EXPRESSED IN ADULT LIVER, SIGNAL =   1; SWISSPROT HIT: P10272, EVALUE 1.00e-27; NT HIT: M32788.1, EVALUE 1.00e-50; EST_HUMAN HIT: AW237002.1, EVALUE 3.00e-61
ggcaaaaataaatgcattaacatctacactgacagcagatatacgtttgctactgtccatgtacacagagccatctatcaggagcatgggctactcacctcagaaggaaaaactatcaaaaataaagaagaaattttggccttgcttgaagctgtttggttccctcaacaggtggctgtaattcactgcgaaggacaacaaaaagaagatatggtcattgcttgtggtaaccaaagagcagattctgcagctaaaaagacagctcagtttccagtcatgcctttgactctgctgccctctatatcctttctgcagcctgactttcgagaccacccagaatactccctagaggaggaaaaagaggcttcagatcttcaggccagtaaaaatcaggaag

SEQ ID NO: 19594 - DNA, 191 bp, Homo sapiens
  MAP TO AC004224.1; EXPRESSED IN HELA, SIGNAL = 0.64; EXPRESSED IN FETAL LIVER, SIGNAL = 0.4; EXPRESSED IN PLACENTA, SIGNAL = 0.81; EXPRESSED IN ADULT LIVER, SIGNAL = 0.66; EST_HUMAN HIT: BE890269.1, EVALUE 8.00e-97; SWISSPROT HIT: P00340, EVALUE 1.90e+00; NT HIT: gi14778034, EVALUE 6.00e-97
gttgtccttacctttgagccaagatcaaacttgaacttgttgacatcttcctctactatttcagagccctccatccccttggtcttcatagcattataaaggacagatgtgatcttcagcagctcttttaccgcatacccatctgcttgataaagcttcttagtgttgagttttatatgtgccttggtggc

SEQ ID NO: 19595 - DNA, 173 bp, Homo sapiens
  MAP TO AC018514.6; EXPRESSED IN FETAL LIVER, SIGNAL = 1.6; EXPRESSED IN LUNG, SIGNAL = 0.69; EXPRESSED IN BRAIN, SIGNAL = 1.3; EXPRESSED IN BONE MARROW, SIGNAL = 1.2; EXPRESSED IN HEART, SIGNAL = 1.9; EXPRESSED IN ADULT LIVER, SIGNAL = 1.6; EST_HUMAN HIT: BF664905.1, EVALUE 3.50e+00; NT HIT: AB044709.1, EVALUE 2.00e-04
ctccctccaccccgtgccacgttggtttgggtggctgctccgcaccgggttcctcctcctctcctctttccctccagtccttcttattctcttcctctggctgcggtggctgctgctgctgctggttttcatccagttgggaaacccaggaagccggcggctgctccgtggcg

SEQ ID NO: 19596 - DNA, 116 bp, Homo sapiens
  MAP TO AL035532.1; EXPRESSED IN BONE MARROW, SIGNAL = 1.4; EXPRESSED IN PLACENTA, SIGNAL =   1; EXPRESSED IN ADULT LIVER, SIGNAL = 1.1; NT HIT: gi14737280, EVALUE 7.00e-12; EST_HUMAN HIT: AA886897.1, EVALUE 4.00e-14
agaagagactacgcaaggacatagtgagagggcagccatctgcgagccacaaacagaggcctcaccagaaaccaaccctgcaggcaccttgatcttggacttccagcttgcagact

SEQ ID NO: 19597 - DNA, 285 bp, Homo sapiens
  MAP TO AC019209.3; EXPRESSED IN HEART, SIGNAL = 1.6; EXPRESSED IN ADULT LIVER, SIGNAL = 2.2; EXPRESSED IN BRAIN, SIGNAL = 2.5; EXPRESSED IN HELA, SIGNAL =   3; EXPRESSED IN FETAL LIVER, SIGNAL = 2.3; EXPRESSED IN BONE MARROW, SIGNAL = 1.8; EXPRESSED IN PLACENTA, SIGNAL = 2.2; NT HIT: AE000971.1, EVALUE 2.60e-01; EST_HUMAN HIT: BF972452.1, EVALUE 9.80e-02; SWISSPROT HIT: P33753, EVALUE 5.50e+00
cgcagcttccacaagccctccactcggcagaagcagatgaagggctgtgcttgctcctccctcgactatttcctctctttgttttccttctctccctcccttattggttgcattcacattgcccgttgcacagtattcattatactcctgagcccgctcggttctatttactgaggagcctccattcattgtgggtgtaaacagaatacatccgattttgtccaataaataactgcctccaaatatttctgtggatcttctcctttcctccttgctgatcaactt

SEQ ID NO: 19598 - DNA, 119 bp, Homo sapiens
  MAP TO AC020939.5; EXPRESSED IN HELA, SIGNAL = 0.63; EXPRESSED IN BRAIN, SIGNAL = 0.51; EXPRESSED IN ADULT LIVER, SIGNAL = 0.76; NT HIT: D89572.1, EVALUE 3.90e-01; EST_HUMAN HIT: AU136619.1, EVALUE 9.00e+00
tttgaattgttgagcaagagaaacactcattgtttcagtgatcttggaggtagagatcctctgaccaccatcttgcccatgggaagcaagagtctctctggaaatggagccaacataca

SEQ ID NO: 19599 - DNA, 155 bp, Homo sapiens
  MAP TO AC004185.1; EXPRESSED IN HEART, SIGNAL = 1.1; EXPRESSED IN ADULT LIVER, SIGNAL = 0.95; EXPRESSED IN FETAL LIVER, SIGNAL = 0.73; EXPRESSED IN BRAIN, SIGNAL = 1.1; EXPRESSED IN PLACENTA, SIGNAL = 0.99; NT HIT: gi9631294, EVALUE 8.30e+00; SWISSPROT HIT: P26808, EVALUE 4.00e-03; EST_HUMAN HIT: BG285887.1, EVALUE 2.00e-01
atcctagtctggagtttgctattaacaccaatgacagtgtcgtgtttggtagacagaggcccagggcagacagtgagaactgacaggccagcctctgtctttaaaaggatattgatatttttgcctgtcatgtccagggtcatccgaggctccat

SEQ ID NO: 19600 - DNA, 310 bp, Homo sapiens
  MAP TO AC003966.1; EXPRESSED IN BONE MARROW, SIGNAL = 0.64; EXPRESSED IN PLACENTA, SIGNAL = 0.58; EXPRESSED IN ADULT LIVER, SIGNAL = 0.5; EXPRESSED IN LUNG, SIGNAL = 0.65; NT HIT: gi14781591, EVALUE 1.00e-123; SWISSPROT HIT: P14148, EVALUE 2.00e-27; EST_HUMAN HIT: BG179600.1, EVALUE 1.00e-123
tcactgggaggcaatttcatgaatgaggtcttccaagcaaatgacaccaaacttccccaggtgctcctcaatcactgtgttgtctgtcagagggatggtgttcttattgaccttggcttgtccatgtttcagaatgaattcccggacagacttcagatttggaaatccccagatcacataaggttccactatacgcagcatttttaggttctggggggtgacttttacaaagacaccactaaaaattttcttaagatgaagtcttgcaatggctgtctgcaccagtagactcacgccaacaatccttttg

SEQ ID NO: 19601 - DNA, 250 bp, Homo sapiens
  MAP TO AC012467.9; EXPRESSED IN PLACENTA, SIGNAL = 3.7; EXPRESSED IN HEART, SIGNAL = 3.5; EXPRESSED IN ADULT LIVER, SIGNAL = 4.5; EXPRESSED IN BRAIN, SIGNAL = 4.8; EXPRESSED IN LUNG, SIGNAL = 3.3; EXPRESSED IN FETAL LIVER, SIGNAL = 3.8; EXPRESSED IN BONE MARROW, SIGNAL = 5.1; NT HIT: D43729.1, EVALUE 0.00e+00; SWISSPROT HIT: Q01668, EVALUE 9.00e-24; EST_HUMAN HIT: AA927640.1, EVALUE 2.00e-36
tccgctcctgaccaagggacagaagccaaaacagtgtgtgactttaacctgatttttgtccagctcacagttcttatactctttttctccttgttcctgaaatgtaacgatgacaaagcccacaaagatgttcatcatgaagaaagctacaatgatgatgtagatgatgaagaagatggagatctccacgcggtggttgtagattgggccgatgttctctccattcgagtcgatggctttatacagcaac

SEQ ID NO: 19602 - DNA, 157 bp, Homo sapiens
  MAP TO AC008282.2; EXPRESSED IN HEART, SIGNAL = 6.2; EXPRESSED IN BRAIN, SIGNAL = 4.5; EXPRESSED IN LUNG, SIGNAL = 6.9; EXPRESSED IN FETAL LIVER, SIGNAL = 4.3; EXPRESSED IN PLACENTA, SIGNAL = 4.4; EXPRESSED IN ADULT LIVER, SIGNAL =   4; EXPRESSED IN HELA, SIGNAL = 4.1; EXPRESSED IN BONE MARROW, SIGNAL = 4.1; SWISSPROT HIT: P29130, EVALUE 8.80e-01; EST_HUMAN HIT: BF693566.1, EVALUE 3.10e+00; NT HIT: AF162137.2, EVALUE 2.10e+00
gcttactgactcaatccgtgggtttgggaaagacatcggcattcgtggaaagaaaccagtatcttgcatgagcatttcctggttaattctaatagcaaagaaagtgtgcagctctggagcctttaagcttctgagtgacccaaccaactggccaatg

SEQ ID NO: 19603 - DNA, 169 bp, Homo sapiens
  MAP TO AF207550.1; EXPRESSED IN ADULT LIVER, SIGNAL = 1.6; EXPRESSED IN LUNG, SIGNAL = 3.4; EXPRESSED IN HELA, SIGNAL = 2.3; EXPRESSED IN PLACENTA, SIGNAL = 1.2; SWISSPROT HIT: P54772, EVALUE 4.40e+00; EST_HUMAN HIT: BF919301.1, EVALUE 1.00e-83; NT HIT: AF207550.1, EVALUE 2.00e-90
aagggcacttcaagtggggatgggcaggcaggcaggcaggcagcaccttctcctccagcatccatttctcctgctgtgtctctgccagccgctgaaagagctcagccacttcctcatctgacagctctgctggccgagggggctgggcttgagggctgctggataagga

SEQ ID NO: 19604 - DNA, 143 bp, Homo sapiens
  MAP TO AC012467.9; EXPRESSED IN ADULT LIVER, SIGNAL = 0.99; EXPRESSED IN FETAL LIVER, SIGNAL = 0.87; EXPRESSED IN BRAIN, SIGNAL = 1.2; EXPRESSED IN BONE MARROW, SIGNAL = 1.4; EXPRESSED IN PLACENTA, SIGNAL = 0.64; NT HIT: gi14735870, EVALUE 5.00e-75; SWISSPROT HIT: P57078, EVALUE 2.00e+00; EST_HUMAN HIT: AV728939.1, EVALUE 7.00e-75
ctcaaacacctgagaaaacccgatgatagtgctgtgttggataagagccatgtatctgtttcccaggggagtggttgtgaagttcacttctactgtctcctcattcttcttacaagcagtgatgttcggatcccacaggcttc

SEQ ID NO: 19605 - DNA, 155 bp, Homo sapiens
  MAP TO AC016651.5; EXPRESSED IN BRAIN, SIGNAL = 1.9; EXPRESSED IN BONE MARROW, SIGNAL =   1; EXPRESSED IN ADULT LIVER, SIGNAL = 0.85; EXPRESSED IN LUNG, SIGNAL = 1.7; NT HIT: AE001143.1, EVALUE 2.10e+00; SWISSPROT HIT: P08199, EVALUE 2.60e+00
ctgaagtgctgcaagagcctctggctggtctctctgaagccactctgactcttattttccccagagttgccagagtagtattttgaaaatgtaatatttttcatatcacacccctgcttcaatgacttcttactgttgttgtcagataaagccat

SEQ ID NO: 19606 - DNA, 176 bp, Homo sapiens
  MAP TO AC004818.1; EXPRESSED IN BRAIN, SIGNAL = 0.44; EXPRESSED IN ADULT LIVER, SIGNAL = 0.51; NT HIT: AF112258.1, EVALUE 1.60e-01; SWISSPROT HIT: P41697, EVALUE 3.30e+00
cctcaggaagttccagagatagcacctgtgacatggactttggcattcatgtgatgggtggtggcacagataaggctgccctaagtggttctgagaccaacacacatgatcgagtgggaactgaagcagaagaggagaatcaggatggagaattcatgacgactgtggtgacagac

SEQ ID NO: 19607 - DNA, 535 bp, Homo sapiens
  MAP TO AC020923.4; EXPRESSED IN FETAL LIVER, SIGNAL = 1.7; EXPRESSED IN BRAIN, SIGNAL = 1.3; EXPRESSED IN ADULT LIVER, SIGNAL = 1.5; EXPRESSED IN PLACENTA, SIGNAL = 2.4; NT HIT: gi14733629, EVALUE 0.00e+00; EST_HUMAN HIT: BG724358.1, EVALUE 0.00e+00; SWISSPROT HIT: Q07075, EVALUE 4.00e-12
gcgtgggcagcacttgcagtttaaaagaaaaagagaaaaaaaaatacctcagttccccttccttggttctgtaggtgcttttgtaaaatccgtggaaagtctccgaaagattgccagcatagtgaatgacaactgtgtacgggagcccgacaaggaggggctcgggagccagcagtgcaatttgctcctgacgggggtgttccaggacctgcaggggttcttccgatagcctctctccagctcccttcctgagggtggccctagatatctgcaggtggtgactatgcaggatgatggtgctggtgggctgactggctgtgatttctactttcgtggttccccagaaggtcagcgtggtaaggtttgcatggatcaagagatcataatgaactgggatgacgtactcaggaagtcgtattttattccaaggaaatggtgtcccatcactacgttttggagatgcttcagtgctctgacaccatgaaggagtggacacagttaagagagccaacagtgaggaaagtagaaatgacat

SEQ ID NO: 19608 - DNA, 304 bp, Homo sapiens
  MAP TO AC016639.5; EXPRESSED IN PLACENTA, SIGNAL = 1.8; EXPRESSED IN ADULT LIVER, SIGNAL = 1.8; EXPRESSED IN FETAL LIVER, SIGNAL = 1.8; EXPRESSED IN BRAIN, SIGNAL = 1.9; SWISSPROT HIT: P98095, EVALUE 2.80e+00; NT HIT: U53477.1, EVALUE 1.10e+00; EST_HUMAN HIT: H18523.1, EVALUE 6.50e+00
gtcatagaacgctgagttcagactttggcttagaatgtagaaaactgcaagagaatgtatgtcacttctacactaacaacaaaagccagattacgtacacatatagtttggtggcctgtgttcctcttagtagtcatgctccaaagagggtgactacagggtacattgagggtggccaggtcttgggaacaggagctctcagccttgacaaagactccctgccccaggatggcacagcagcagcaaggctactggccccgaaagcactgcctatggagctgagagcaccacaactaacttggaa

SEQ ID NO: 19609 - DNA, 78 bp, Homo sapiens
  MAP TO AC004511.1; EXPRESSED IN ADULT LIVER, SIGNAL = 1.9; EXPRESSED IN HEART, SIGNAL = 4.4; EXPRESSED IN PLACENTA, SIGNAL = 2.4; NT HIT: AJ005654.1, EVALUE 2.30e-01; EST_HUMAN HIT: BI226333.1, EVALUE 3.40e-01
gcctggggcagccccaagctctcctgatggaggccctggctcctatccaggcctcttcctctaccagactggataagg

SEQ ID NO: 19610 - DNA, 98 bp, Homo sapiens
  MAP TO AC004012.1; EXPRESSED IN PLACENTA, SIGNAL = 0.45; EXPRESSED IN ADULT LIVER, SIGNAL = 0.45; EXPRESSED IN HELA, SIGNAL = 0.52; NT HIT: gi13376653, EVALUE 3.00e-04; EST_HUMAN HIT: BF433702.1, EVALUE 3.00e-48
gttcctgtatccaccatcacagtcaagataccgaacagttccaataccacagagaacccttctgttgcccttttataaccaacccaccatcctctcat

SEQ ID NO: 19611 - DNA, 315 bp, Homo sapiens
  MAP TO AC025172.2; EXPRESSED IN PLACENTA, SIGNAL =   2; EXPRESSED IN ADULT LIVER, SIGNAL = 1.7; EXPRESSED IN HEART, SIGNAL = 1.9; EST_HUMAN HIT: BI598149.1, EVALUE 0.00e+00; SWISSPROT HIT: Q27957, EVALUE 1.00e-30; NT HIT: gi16157036, EVALUE 0.00e+00
ttgatcttgctgaagacgatgtccacgtcagtgacggtcacgttcctgccgtcgatcacctggcagtccttgcacagcttcgaccagttcttgccgtgcatctccctcccggtggccctggcgtccccgtgcacggcaaagcgccggaaggcctcctccagggcactgagctcaggggatgcggctgccccctcaccggcaccctccgattccagcgacagcctcttggctgcccggtccttcgaggggtcccccggggacttggggggcgtcctgttggcagctttggcaggcttggccttgtcagccatgttg

SEQ ID NO: 19612 - DNA, 126 bp, Homo sapiens
  MAP TO AC025467.3; EXPRESSED IN BRAIN, SIGNAL = 1.4; EXPRESSED IN HELA, SIGNAL = 1.4; EXPRESSED IN PLACENTA, SIGNAL = 1.7; EXPRESSED IN HEART, SIGNAL = 2.1; EXPRESSED IN ADULT LIVER, SIGNAL = 1.1; SWISSPROT HIT: P23805, EVALUE 1.60e+00; EST_HUMAN HIT: BG488868.1, EVALUE 2.00e-62
ctctgcctgtgactcccccacacccacatccgggcctctgctggttcctgggtccatccatcccagcgcagccggcagggaggctccgagcagtgtgagatgcagccaaaagcctcctggtttcat

SEQ ID NO: 19613 - DNA, 129 bp, Homo sapiens
  MAP TO AC016698.2; EXPRESSED IN BONE MARROW, SIGNAL = 0.76; EXPRESSED IN PLACENTA, SIGNAL = 0.55; EXPRESSED IN ADULT LIVER, SIGNAL = 0.76; EXPRESSED IN HELA, SIGNAL = 0.56; EXPRESSED IN BRAIN, SIGNAL = 0.65; NT HIT: gi13540700, EVALUE 4.30e-01; EST_HUMAN HIT: AI697250.1, EVALUE 6.30e-01
ctgtatgtgtaatcaagagtcatgatcttaatctctggctgggcccaagcagtttttagaatatgagttagcgttgtaagctgctgtgagctttctgccactatgcaactcacaactttaagtattgcc

SEQ ID NO: 19614 - DNA, 89 bp, Homo sapiens
  MAP TO AC016552.5; EXPRESSED IN ADULT LIVER, SIGNAL = 3.1; EXPRESSED IN HEART, SIGNAL = 3.6; EXPRESSED IN HELA, SIGNAL = 4.5; EXPRESSED IN FETAL LIVER, SIGNAL = 3.5; EXPRESSED IN PLACENTA, SIGNAL = 3.1; NT HIT: D82351.1, EVALUE 2.80e-01; EST_HUMAN HIT: BF914786.1, EVALUE 4.00e-01; SWISSPROT HIT: P24881, EVALUE 2.80e+00
atgtgatggtttttccagcataatctctgtaattaattttatggaaactatgaaaaacaaagatcagttcactactttgaactgtcttc

SEQ ID NO: 19615 - DNA, 222 bp, Homo sapiens
  MAP TO AF241734.1; EXPRESSED IN LUNG, SIGNAL = 0.85; EXPRESSED IN BRAIN, SIGNAL = 0.39; EXPRESSED IN BONE MARROW, SIGNAL = 0.45; EXPRESSED IN HEART, SIGNAL = 0.96; EXPRESSED IN ADULT LIVER, SIGNAL = 0.88; SWISSPROT HIT: P33225, EVALUE 3.20e+00; NT HIT: gi8924207, EVALUE 3.10e+00
catggtggtggattctgagaggatgtgtccctgtcccaaaatcaagagtttcgagaggcaggaagaggaagccaccaggccaattaagggctacaccaggaacaagtatagattcatttccatcatactccattggtcaaaagagtcacagggcctcaccagattcaaaggagtgaagacagacttgatggatgagtggcaggtcacattgcagaagaccat

SEQ ID NO: 19616 - DNA, 259 bp, Homo sapiens
  MAP TO AL110118.3; EXPRESSED IN FETAL LIVER, SIGNAL =   9; EXPRESSED IN LUNG, SIGNAL = 8.3; EXPRESSED IN ADULT LIVER, SIGNAL = 8.6; EST_HUMAN HIT: AL532400.1, EVALUE 6.00e-77; SWISSPROT HIT: Q03350, EVALUE 1.00e-01; NT HIT: AL163249.2, EVALUE 8.00e-60
ggctcgggacctgcagcccgccatgcctgagcctcccaccccctccatggactcctgtgcagccccagcctccccgacgagtgccaccccctgctccacggcgcccagtcccatcgaccacccaagggctgaggagtgcgagcgcacggcagcgagggactggcaggcagctccacctgcagccctggtgccagttccgctgggtgaagccagctgggctcctgagtctggtggggatgtggagaatctttatgcctag

SEQ ID NO: 19617 - DNA, 139 bp, Homo sapiens
  MAP TO AC010332.6; EXPRESSED IN BRAIN, SIGNAL = 3.1; EXPRESSED IN LUNG, SIGNAL =  11; EXPRESSED IN FETAL LIVER, SIGNAL = 5.6; EXPRESSED IN BONE MARROW, SIGNAL = 3.5; EXPRESSED IN PLACENTA, SIGNAL = 3.6; EXPRESSED IN ADULT LIVER, SIGNAL = 5.1; EXPRESSED IN HEART, SIGNAL =   2; NT HIT: gi14754647, EVALUE 1.00e-72; SWISSPROT HIT: P08043, EVALUE 5.00e-16; EST_HUMAN HIT: AW887332.1, EVALUE 2.00e-26
aaaaaacatgagagaattcatactggggagaaaccgtacagatgtcatgaatgtggtaaggacttcactcgaaattcaaacctggcaaatcatcacagaatccatactggagagaaaccgtacagatgaaatgtgtgtg

SEQ ID NO: 19618 - DNA, 344 bp, Homo sapiens
  MAP TO AC008747.4; EXPRESSED IN PLACENTA, SIGNAL =   1; EXPRESSED IN ADULT LIVER, SIGNAL = 0.88; EXPRESSED IN BRAIN, SIGNAL = 1.2; EXPRESSED IN LUNG, SIGNAL = 1.3; EXPRESSED IN FETAL LIVER, SIGNAL =   1; NT HIT: gi14150140, EVALUE 0.00e+00; SWISSPROT HIT: P13285, EVALUE 8.90e-01; EST_HUMAN HIT: BI756748.1, EVALUE 0.00e+00
ctttgggaaagcaactgatccatggcaatgccttctctctgctgatagtccctcagaaggctgtgggcatgatccaggttgacaaagtccctgtaatcatcctcatctgcaacacagatgtagtagggcaggaagagcggcagcccaggaggcacaggatgggcagcacccaggacagcatcctgcaggcggaggtcttggagccgagcagtccagtctacgtctttggcactgctggcatcattcccaaaatccaaggtaaactgtggtgaaggcccctcctcagtatcacttccccagtcatcagcaccttcacaccagtcctcagctgcaaggctgtttcc

SEQ ID NO: 19619 - DNA, 81 bp, Homo sapiens
  MAP TO AL049869.5; EXPRESSED IN BONE MARROW, SIGNAL = 4.9; EXPRESSED IN PLACENTA, SIGNAL = 3.4; EXPRESSED IN ADULT LIVER, SIGNAL =   4; EXPRESSED IN HEART, SIGNAL = 3.7; EXPRESSED IN HELA, SIGNAL = 2.5; EXPRESSED IN FETAL LIVER, SIGNAL = 3.7; EXPRESSED IN LUNG, SIGNAL = 3.7; NT HIT: M65235.1, EVALUE 5.00e-21; EST_HUMAN HIT: N39020.1, EVALUE 2.00e-24
atgtcctgggccttcacattcactcaccacgcactcactgactcacccatagcaactccagtcctgcaagctccatttatg

SEQ ID NO: 19620 - DNA, 161 bp, Homo sapiens
  MAP TO AC004826.3; EXPRESSED IN BONE MARROW, SIGNAL = 0.58; EXPRESSED IN ADULT LIVER, SIGNAL = 0.43; NT HIT: gi14781185, EVALUE 1.00e-85; EST_HUMAN HIT: BI668959.1, EVALUE 1.00e-85
catttgctactgtgtagtaggccccgctcccgggtaaggcccgcaataagcagcagttgctttttaatttcccgcaaatctgagaaatcgctgtttatggacaggacaggcgccactgccgccgtcacagccaccgggaccatggaggtactcgcagccat

SEQ ID NO: 19621 - DNA, 208 bp, Homo sapiens
  MAP TO AC016698.2; EXPRESSED IN BONE MARROW, SIGNAL = 0.96; EXPRESSED IN PLACENTA, SIGNAL = 1.4; EXPRESSED IN ADULT LIVER, SIGNAL = 1.5; EXPRESSED IN FETAL LIVER, SIGNAL = 1.9; EXPRESSED IN BRAIN, SIGNAL = 1.3; EXPRESSED IN HELA, SIGNAL = 2.8; SWISSPROT HIT: P48845, EVALUE 1.60e-01; NT HIT: L41825.1, EVALUE 7.00e-38; EST_HUMAN HIT: AA618338.1, EVALUE 6.00e-30
actgggaccttttggcaatagctgttctaacccatctcagcatttacagttttgtacctggtggtcagagaaggcctatttgcaggctcagctaaatttgactaatggcattctaactactcaggctcagctcacagggtctgataatttctctgatacttatgcccaattaaactttgatgctcttaccacagaacaagtagcaaag

SEQ ID NO: 19622 - DNA, 162 bp, Homo sapiens
  MAP TO AC008985.5; EXPRESSED IN PLACENTA, SIGNAL = 5.8; EXPRESSED IN ADULT LIVER, SIGNAL = 4.5; EXPRESSED IN HEART, SIGNAL = 5.6; EXPRESSED IN FETAL LIVER, SIGNAL = 6.2; EXPRESSED IN BONE MARROW, SIGNAL = 3.8; SWISSPROT HIT: P94939, EVALUE 5.80e+00; NT HIT: gi13376649, EVALUE 6.00e-04; EST_HUMAN HIT: BF574673.1, EVALUE 8.20e-01
caaaggagaagtcacagaagaacagaaggccatgtgaagaaggaggcaaagcttaatgtcacgtggctacgagccaaggaccacctagagctccgggggctggaccaggcgaagaaggctctaggctcttccctagagcctcctgagggagcacagctctga

SEQ ID NO: 19623 - DNA, 81 bp, Homo sapiens
  MAP TO AC013248.5; EXPRESSED IN BONE MARROW, SIGNAL = 1.1; EXPRESSED IN ADULT LIVER, SIGNAL = 0.53; NT HIT: M88246.1, EVALUE 4.00e-03; EST_HUMAN HIT: AV756880.1, EVALUE 3.00e-14
ctcattcttcctgaacgcaggacaaaaaactcgggcaaaggcactgtggccacagaggtttctggccagaaaaatcgacat

SEQ ID NO: 19624 - DNA, 300 bp, Homo sapiens
  MAP TO AC025760.2; EXPRESSED IN FETAL LIVER, SIGNAL = 2.5; EXPRESSED IN BONE MARROW, SIGNAL = 1.8; EXPRESSED IN PLACENTA, SIGNAL = 2.4; EXPRESSED IN HEART, SIGNAL = 2.7; EXPRESSED IN ADULT LIVER, SIGNAL =   2; EXPRESSED IN BRAIN, SIGNAL = 2.2; EXPRESSED IN LUNG, SIGNAL = 2.3; EST_HUMAN HIT: AW383250.1, EVALUE 4.00e-81; SWISSPROT HIT: Q04833, EVALUE 8.00e+00
atgccgccctcgcctgcgtcctgcggccgtcccgaggtgtcacgctgtcaacaacacaaagtcgtagttgacgtcgaccatgagcacttagcaggagggcacgcacagggacttgtgcccggcggggtccagctcctgcaccttcagctgccactccatcctctgcacagcgttcagggccgcagcctcgtgctgctgccgcatgaggaggaaggtcttcctgcagtcatacttgtcatccaggtcctggagccaagagatgaactggcgggcgttgaactggtcgagcactgacttgtt

SEQ ID NO: 19625 - DNA, 319 bp, Homo sapiens
  MAP TO AC016830.5; EXPRESSED IN ADULT LIVER, SIGNAL = 1.6; EXPRESSED IN BRAIN, SIGNAL = 1.7; EXPRESSED IN BONE MARROW, SIGNAL = 1.2; NT HIT: AF063216.1, EVALUE 3.00e-01; SWISSPROT HIT: Q05306, EVALUE 2.60e-01
tcaatcagtggataatgatgatggcaggtgtgatcttgagcacatccccattctcagcttctctggaagaaaagtgtctggggcttggagagaggccaatggattatgaggacttgcaggagaccctgccactgggttcttcccaggagacaaggggtcccctgcaaagacggaagtcaaaagacggaaagtagaaacaggttgagcttcaaatgctacaccagagcaacagctgtcattgttcataaaattcaggcagttctcaatttgagaagtaactgccacatgctttccatatgccactcttgggatacaggaa

SEQ ID NO: 19626 - DNA, 267 bp, Homo sapiens
  MAP TO AC005081.2; EXPRESSED IN BONE MARROW, SIGNAL = 0.57; EXPRESSED IN ADULT LIVER, SIGNAL = 0.48; EXPRESSED IN BRAIN, SIGNAL = 0.7; SWISSPROT HIT: P22223, EVALUE 7.20e-01; EST_HUMAN HIT: BF209740.1, EVALUE 5.60e+00; NT HIT: AF289664.1, EVALUE 3.80e+00
atgtttccaaaatatacccgacccctcacgatcctcttggccccagcctccttggtggaggccgggctgtgcctcccactcccgggccccattgctgcccaccccaccggaccccacagaggacgcctggtctccacaaatcacaagggcacttttgtcccagctcgacaatatctgcttcatctgctgacaaaggccagcattctcagggtgtcaagactggcttttgcatttcacagaacagatcttggaagggaagctgggagg

SEQ ID NO: 19627 - DNA, 142 bp, Homo sapiens
  MAP TO AL031719.10; EXPRESSED IN BONE MARROW, SIGNAL =  12; EXPRESSED IN BRAIN, SIGNAL = 0.88; EXPRESSED IN FETAL LIVER, SIGNAL = 0.72; EXPRESSED IN ADULT LIVER, SIGNAL = 1.5; EXPRESSED IN PLACENTA, SIGNAL = 0.89; EXPRESSED IN HEART, SIGNAL = 1.4; EXPRESSED IN LUNG, SIGNAL = 3.9; NT HIT: AF252671.1, EVALUE 4.80e-01; SWISSPROT HIT: P04929, EVALUE 3.00e-01; EST_HUMAN HIT: BF516493.1, EVALUE 3.00e-74
caccaccgtgtcctttatgccaggtcctatgaaggtgaatgccagctcaggggtgtgtgtggagccggtgcgcccgcggtccaccgtggtggctgctggtgcagtagcatctgtgttggcttctgtggccatgcagggctgc

SEQ ID NO: 19628 - DNA, 241 bp, Homo sapiens
  MAP TO AC022073.13; EXPRESSED IN HEART, SIGNAL = 1.1; EXPRESSED IN ADULT LIVER, SIGNAL = 0.76; EXPRESSED IN LUNG, SIGNAL =   1; EXPRESSED IN HELA, SIGNAL = 0.51; EXPRESSED IN BONE MARROW, SIGNAL = 0.59; EXPRESSED IN PLACENTA, SIGNAL = 0.55; NT HIT: gi15300044, EVALUE 8.00e-29; SWISSPROT HIT: Q00681, EVALUE 2.30e+00; EST_HUMAN HIT: BG716229.1, EVALUE 7.00e-24
gatcaccccacagttcaccctttagagacactgcacacatcccagccagctggctgtcccgcagggcccccttgcaatgcagctgtttaatgtgctcctggatgcagttgtccaccacctccttgcccaggaagttttgcgggtagcagaagctgacttcccgcagacagcgcatgatgtactctagggaaattttctccaattcctgcctcatgatgtgtcccaggggcatttcacgcat

SEQ ID NO: 19629 - DNA, 202 bp, Homo sapiens
  MAP TO AC020663.1; EXPRESSED IN LUNG, SIGNAL = 1.8; EXPRESSED IN BRAIN, SIGNAL = 1.7; EXPRESSED IN PLACENTA, SIGNAL = 0.88; EXPRESSED IN HEART, SIGNAL = 1.2; EXPRESSED IN ADULT LIVER, SIGNAL = 1.3; SWISSPROT HIT: P13942, EVALUE 2.50e+00; NT HIT: gi10181121, EVALUE 2.80e+00
aggcacacactgccactggctcagtcaccttcccgggcccccactgactccaagacgctttagtaccacgctgcttcagtagaccttcaggccctccacgatccagggacaagcttcctttttctcggctttcctcactatcctctccctgttcgagagtatctccaccagcaccgagcctcacacgggctgtgccctccat

SEQ ID NO: 19630 - DNA, 300 bp, Homo sapiens
  MAP TO AF192304.2; EXPRESSED IN ADULT LIVER, SIGNAL = 1.6; EXPRESSED IN HEART, SIGNAL = 1.6; EXPRESSED IN BRAIN, SIGNAL = 1.1; EXPRESSED IN FETAL LIVER, SIGNAL = 1.4; EXPRESSED IN BONE MARROW, SIGNAL = 1.9; EXPRESSED IN PLACENTA, SIGNAL = 3.2; SWISSPROT HIT: P18406, EVALUE 1.00e-20; NT HIT: gi14748722, EVALUE 0.00e+00; EST_HUMAN HIT: BF510649.1, EVALUE 0.00e+00
gcagggaagaagtgtctggctgtgtaccagccagaggcatccatgaacttcacacttgcgggctgcatcagcacacgctcctatcaacccaagtactgtggagtttgcatggacaataggtgctgcatcccctacaagtctaagactatcgacgtgtccttccagtgtcctgatgggcttggcttctcccgccaggtcctatggattaatgcctgcttctgtaacctgagctgtaggaatcccaatgacatctttgctgacttggaatcctaccctgacttctcagaaattgccaactag

SEQ ID NO: 19631 - DNA, 396 bp, Homo sapiens
  MAP TO AC004017.1; EXPRESSED IN ADULT LIVER, SIGNAL = 1.5; EXPRESSED IN PLACENTA, SIGNAL = 0.93; EXPRESSED IN HEART, SIGNAL = 1.1; EXPRESSED IN LUNG, SIGNAL = 2.4; EXPRESSED IN HELA, SIGNAL = 1.1; EXPRESSED IN BRAIN, SIGNAL = 1.7; EXPRESSED IN BONE MARROW, SIGNAL = 1.6; SWISSPROT HIT: P49910, EVALUE 1.00e-08; NT HIT: AL163268.2, EVALUE 1.50e+00; EST_HUMAN HIT: AV654697.1, EVALUE 2.20e+00
atggctttagatctaagaaccatatttcagtgtgaaccatccgagaataatcttggatcagaaaattcagcgtttcaacaaagccaaggacctgctgttcagagagaagaagggatttctgagttctcaagaatggtgctcaattcatttcaagacagcaataattcatatgcaaggcaggaattgcaaagactttataggatctttcactcatggctgcaaccagaaaagcacagcaaggatgaaattatttctctattagtcctggagcagtttatgattggtggccactgcaatgacaaagccagtgtgaaagagaaatggaaatcaagtggcaaaaacttggagagattcatagaagacctgactgatgacagcataaatccacctgcctta

SEQ ID NO: 19632 - DNA, 100 bp, Homo sapiens
  MAP TO AC011904.3; EXPRESSED IN BONE MARROW, SIGNAL = 0.92; EXPRESSED IN PLACENTA, SIGNAL = 1.3; EXPRESSED IN ADULT LIVER, SIGNAL = 1.4; EXPRESSED IN FETAL LIVER, SIGNAL = 0.61; EXPRESSED IN BRAIN, SIGNAL = 1.3; EXPRESSED IN LUNG, SIGNAL = 1.7; SWISSPROT HIT: P08684, EVALUE 9.00e-10; NT HIT: AF280107.1, EVALUE 1.00e-49; EST_HUMAN HIT: AL531737.1, EVALUE 6.00e-22
catctggtttgtgaagacagagtaacattctttcactaacactgttttgatcatgtcgggatccatgatgaccagcatgggctgttgcccctcatacagc

SEQ ID NO: 19633 - DNA, 359 bp, Homo sapiens
  MAP TO AC025816.1; EXPRESSED IN PLACENTA, SIGNAL = 1.3; EXPRESSED IN HEART, SIGNAL = 1.3; EXPRESSED IN ADULT LIVER, SIGNAL = 1.4; EXPRESSED IN LUNG, SIGNAL = 1.8; EXPRESSED IN FETAL LIVER, SIGNAL = 1.3; EXPRESSED IN BRAIN, SIGNAL = 1.3; NT HIT: gi12232412, EVALUE 0.00e+00; SWISSPROT HIT: P42679, EVALUE 3.20e-01; EST_HUMAN HIT: AL557946.1, EVALUE 0.00e+00
agaccttcctgaactggtggttttttccctctctgtcaacagatttgccaacattacaacaaaggagatggaccccacggctcttgtgcctttcaaaagcagtgcatcaagctccatatctgccagtattttttacagggggaatgcaagtttggcactagctgtaagagatcccatgatttctctaattctgagaatctggaaaaattggagaagttgggtatgagctcagacctggtgagcaggctgcctaccatttatagaaatgcacatgacatcaagaataagagctctgcccccagcagagtgcctcctctttttgtcccacaggggacttctggtaaggctggtggggagtg

SEQ ID NO: 19634 - DNA, 180 bp, Homo sapiens
  MAP TO AC002319.1; EXPRESSED IN BRAIN, SIGNAL = 1.1; EXPRESSED IN BONE MARROW, SIGNAL = 0.66; EXPRESSED IN PLACENTA, SIGNAL = 0.93; EXPRESSED IN ADULT LIVER, SIGNAL = 0.9; NT HIT: gi8923845, EVALUE 6.30e-01; SWISSPROT HIT: P21414, EVALUE 3.40e-02; EST_HUMAN HIT: BF507432.1, EVALUE 4.00e-09
actttgggccccttttcagaaaaacacttttttactatgttatactgctccagtaaacttgttagggcgagatttgctttcaaagctaaaagggcacataaaatttttctcaggagaaataaccttagagtttcctgattctcctggactagaattgttatgctgtctacagacagaaat

SEQ ID NO: 19635 - DNA, 133 bp, Homo sapiens
  MAP TO AC034103.5; EXPRESSED IN PLACENTA, SIGNAL =   2; EXPRESSED IN ADULT LIVER, SIGNAL = 2.1; EXPRESSED IN HEART, SIGNAL = 2.1; EXPRESSED IN FETAL LIVER, SIGNAL = 2.1; NT HIT: X56737.1, EVALUE 4.50e-01; EST_HUMAN HIT: AL601700.1, EVALUE 6.60e-01
tgcaaaagaaaatcagtgcaaaatcagtctatctccccaccccaatgcactgattcgaaaatcagtgcaaaagaaagtagtcatttcaaaggtgattttgactacagccagcaggatcatggatgaccccgtg

SEQ ID NO: 19636 - DNA, 266 bp, Homo sapiens
  MAP TO AC016553.4; EXPRESSED IN BRAIN, SIGNAL = 1.4; EXPRESSED IN HELA, SIGNAL = 1.1; EXPRESSED IN BONE MARROW, SIGNAL = 0.65; EXPRESSED IN ADULT LIVER, SIGNAL = 1.1; SWISSPROT HIT: P07572, EVALUE 4.00e-08; NT HIT: AL163209.2, EVALUE 2.00e-57; EST_HUMAN HIT: AW998611.1, EVALUE 8.00e-70
ccattgacttggcaaatgcctttttctccattcctgtccataaggcctaccagaagcaatttgccttcagctggcaaggccagaaatataccttcactgtcctacctcaggggtatataaactctctggctttgtgtcataatcttattcagagagaccttgattgcttctcacttccgcaatatatcacactggtcctttacattgatggcgttatgttgactggatccagtgagcaagaagtagcaaacacactagacttactg

SEQ ID NO: 19637 - DNA, 219 bp, Homo sapiens
  MAP TO AL049779.5; EXPRESSED IN BONE MARROW, SIGNAL = 0.82; EXPRESSED IN ADULT LIVER, SIGNAL = 0.48; EXPRESSED IN FETAL LIVER, SIGNAL = 0.72; EXPRESSED IN BRAIN, SIGNAL = 0.39; EXPRESSED IN HELA, SIGNAL = 0.78; SWISSPROT HIT: P34468, EVALUE 3.00e+00; NT HIT: AB002319.1, EVALUE 1.00e-120; EST_HUMAN HIT: BI261469.1, EVALUE 1.00e-112
cttgttgagaaggtgcagaagagcttcccgcaggcagctgtgcctcacgtagaagctgatgatggccaggttggtgctatagttgtgcaggtagaagaggcattcctggtagtaggtgttgttcatgattttcccttcaggaatcactgccagagaaaggctctgcgtccgaagggtagcttccagttccctcagggtggcaaagtaatcgtcatcttg

SEQ ID NO: 19638 - DNA, 251 bp, Homo sapiens
  MAP TO AC003005.1; EXPRESSED IN ADULT LIVER, SIGNAL = 0.44; EXPRESSED IN BRAIN, SIGNAL = 0.47; EXPRESSED IN HELA, SIGNAL = 0.59; SWISSPROT HIT: O50224, EVALUE 2.40e+00; NT HIT: Z72475.1, EVALUE 2.30e-01; EST_HUMAN HIT: BI764961.1, EVALUE 1.30e+00
agaaacctctttactgtggccctgaagatcctcttcaattccttcaaaagaaggaaagattggggtatcagctgcaggaaactgaaatccaggcccatctccaaaaacagcagtttctggatgagtccgagagaagttctcaaccctaatttctcctccatctcctattccgttatctccatctccatcatcatctccatctccgtctccatctccatcatcatctatcatctccaatctccatctccgaa

SEQ ID NO: 19639 - DNA, 94 bp, Homo sapiens
  MAP TO AC004058.1; EXPRESSED IN ADULT LIVER, SIGNAL = 0.92; EXPRESSED IN BRAIN, SIGNAL = 0.94; EXPRESSED IN BONE MARROW, SIGNAL =   1; NT HIT: AL139075.2, EVALUE 1.20e+00; EST_HUMAN HIT: AA463441.1, EVALUE 1.70e+00
ttatgccatctccaactgggaatatgagttaaaagtattattataatcttgtggatgctggaagtcatccttgctgccataggaaaatgcctgc

SEQ ID NO: 19640 - DNA, 108 bp, Homo sapiens
  MAP TO AC005573.1; EXPRESSED IN LUNG, SIGNAL = 0.42; EXPRESSED IN ADULT LIVER, SIGNAL = 0.46; SWISSPROT HIT: P12823, EVALUE 8.00e+00; EST_HUMAN HIT: BF691227.1, EVALUE 3.30e-02; NT HIT: AF037218.1, EVALUE 2.20e-02
ctatggctctaaaatatcactggaaatgttgggaaaagttgaaaatgtttttgacatcactcctttcttggggacgctgtatgttttcatgtgatcgattttgacacc

SEQ ID NO: 19641 - DNA, 135 bp, Homo sapiens
  MAP TO AL121924.12; EXPRESSED IN BONE MARROW, SIGNAL = 1.2; EXPRESSED IN LUNG, SIGNAL = 1.1; EXPRESSED IN FETAL LIVER, SIGNAL = 0.79; EXPRESSED IN ADULT LIVER, SIGNAL = 0.85; SWISSPROT HIT: Q9ZC99, EVALUE 2.60e+00; NT HIT: AF336287.1, EVALUE 4.50e-01; EST_HUMAN HIT: AW272520.1, EVALUE 3.00e-03
tttctcgtggagatgtcagtaagtggttggaaatatgaatctgaagcttgggggagaagttggggttggagatacaaatgttggggtcattggcatggaattggtaattaaagccaaggggctggatgatgatac

SEQ ID NO: 19642 - DNA, 258 bp, Homo sapiens
  MAP TO AL031707.17; EXPRESSED IN FETAL LIVER, SIGNAL = 3.8; EXPRESSED IN BRAIN, SIGNAL = 2.9; EXPRESSED IN LUNG, SIGNAL = 1.5; EXPRESSED IN ADULT LIVER, SIGNAL = 2.3; EXPRESSED IN PLACENTA, SIGNAL = 2.6; SWISSPROT HIT: P40600, EVALUE 2.60e+00; NT HIT: AF224263.1, EVALUE 6.00e-02
ctggccacggtccccaacagccggttcagcaaaggacaggcagaccctacgggccaaggatgcgctggcctggccggtgcggggccaggcgggcagcttgccaggatttggggattttgagccagctgctgcagcaggtgtggccggcccagccaggcaagtcctgctgccgggagggtcgcccaccagctgctggagggtgtggggcggccgggctggccactcgccggcagcaaagccagcagagagtgggtgggg

SEQ ID NO: 19643 - DNA, 302 bp, Homo sapiens
  MAP TO AC004711.1; EXPRESSED IN BONE MARROW, SIGNAL = 0.83; EXPRESSED IN PLACENTA, SIGNAL = 1.4; EXPRESSED IN ADULT LIVER, SIGNAL =   1; EXPRESSED IN LUNG, SIGNAL = 0.61; SWISSPROT HIT: P38691, EVALUE 5.40e-01; EST_HUMAN HIT: AA081789.1, EVALUE 2.00e-58; NT HIT: gi16159721, EVALUE 9.00e-17
caatgcaagaacagactaatacagaaaatgggtacttggagtggtgcattgctataaagatacctaaaaatgtggaatcaaccttggaatcaggtaatgagcagaggttggaagagtacagagggctcagaagaggacagaaagatgagggaaagtttaaacttcctagagacttcctgaatggttgtgaccaaaatactcatagtgatatggacaatgaggcccaggactcagacagagatgaggaatatattggcaactggagaaaatgtcacttttgttatgtgttagcaaagagctaa

SEQ ID NO: 19644 - DNA, 147 bp, Homo sapiens
  MAP TO AL118521.15; EXPRESSED IN BRAIN, SIGNAL = 0.88; EXPRESSED IN ADULT LIVER, SIGNAL = 0.7; EXPRESSED IN FETAL LIVER, SIGNAL = 0.71; SWISSPROT HIT: O33565, EVALUE 5.90e+00; EST_HUMAN HIT: BI032596.1, EVALUE 7.40e-01; NT HIT: gi16163609, EVALUE 5.00e-01
ccagaattccgctcctgggtcacatgtcacttctaattgtgggcatgatgctcgagttccccttgggcctgaatttcatccgagtaaatcctctccttcagcagctgcaggattgtgtcagggagagtgatcttcaggcacacactt

SEQ ID NO: 19645 - DNA, 279 bp, Homo sapiens
  MAP TO AL031709.10; EXPRESSED IN BRAIN, SIGNAL = 2.8; EXPRESSED IN BONE MARROW, SIGNAL = 4.5; EXPRESSED IN LUNG, SIGNAL = 7.1; EXPRESSED IN PLACENTA, SIGNAL = 2.4; EXPRESSED IN ADULT LIVER, SIGNAL = 1.9; EXPRESSED IN HEART, SIGNAL = 4.4; SWISSPROT HIT: Q9WTV5, EVALUE 2.10e-01; EST_HUMAN HIT: AU125529.1, EVALUE 0.00e+00; NT HIT: gi14776632, EVALUE 0.00e+00
cctgcccagagcaggactcacgccgtccaccgcctccaggtccaggcgcagctgactctgcagcgagtgcagcttcggcaggggaatggtgccgatgtccccacagccccgcagccccggcagtgtggaggctacgcccaggccctccagctcctcctgcagctgcttcacctgtgcctccacctcctccttcttctgcagcgccagctgccggtcgctatcggccacacgggcacgctccttggcctcctgcgcctctcgctgccaggcatcgcagac

SEQ ID NO: 19646 - DNA, 283 bp, Homo sapiens
  MAP TO AL023495.1; EXPRESSED IN PLACENTA, SIGNAL =   5; EXPRESSED IN HEART, SIGNAL =   5; EXPRESSED IN ADULT LIVER, SIGNAL = 3.5; SWISSPROT HIT: P52296, EVALUE 8.10e-01; EST_HUMAN HIT: BE729262.1, EVALUE 2.00e-61; NT HIT: AL163282.2, EVALUE 4.00e-40
atggcctggagacatttcaccattgtcttggggattaacattcggctccttattacttatgcaaatttctgcaactggcttgaatttcttcttagaaaatgctattttattttctatggcattgtcaggctgcaaattttctgaacttttatggtctgtttcccttataaaactgaatgcctttaacagcacacgagtaacctcttgaatgcattgctgcttagaaatttcttccaccaggtaccccaaatcatcccgctcaagtccaaagtcccacaaatct

SEQ ID NO: 19647 - DNA, 192 bp, Homo sapiens
  MAP TO AC013620.2; EXPRESSED IN FETAL LIVER, SIGNAL = 0.87; EXPRESSED IN BONE MARROW, SIGNAL = 0.48; EXPRESSED IN PLACENTA, SIGNAL = 0.94; EXPRESSED IN ADULT LIVER, SIGNAL = 0.7; SWISSPROT HIT: P50526, EVALUE 1.10e+00; EST_HUMAN HIT: AA230165.1, EVALUE 1.00e-15; NT HIT: AL163201.2, EVALUE 5.00e-08
tgagtcaggaggaatgggatcatggacccaattaaagaagcagtctggccgctttttggtacagcaggtatgctctattggggaggaccctttctcgtccagatcttttggactttcaaagctggcaggctggaatggttgaattgactgaaccacagagatggcagccacccctcccaccaggagctccat

SEQ ID NO: 19648 - DNA, 220 bp, Homo sapiens
  MAP TO AL050328.24; EXPRESSED IN BRAIN, SIGNAL = 1.1; EXPRESSED IN HELA, SIGNAL = 0.61; EXPRESSED IN ADULT LIVER, SIGNAL =   1; EXPRESSED IN PLACENTA, SIGNAL = 0.85; NT HIT: Y09085.1, EVALUE 2.00e-01; SWISSPROT HIT: P32094, EVALUE 4.60e-01; EST_HUMAN HIT: BE737432.1, EVALUE 7.40e-02
cttcttcacccgtgcctccctccagcaatctctcttcatggcttcctgcagggtggcagctacctcgcccacccatgggagcgtcttctgtacaggttcgattggcttcagctgttcaaacatcttctcttctgtggtgtctctttctagctttatccactcctggcctggtgcccaggcctgactggattccttcctggggctatctacctcccagtaa

SEQ ID NO: 19649 - DNA, 126 bp, Homo sapiens
  MAP TO AC026733.3; EXPRESSED IN HEART, SIGNAL = 1.2; EXPRESSED IN ADULT LIVER, SIGNAL = 1.2; EXPRESSED IN HELA, SIGNAL = 0.84; EXPRESSED IN PLACENTA, SIGNAL = 1.1; NT HIT: X17014.1, EVALUE 1.70e+00; SWISSPROT HIT: P54688, EVALUE 1.60e+00; EST_HUMAN HIT: BG989173.1, EVALUE 1.60e-01
ccaattcctagatttagaaaagcttacagatacagatcaaagaaatgggttggaaatcaacagaaagcaagtcaatgaaaaggcttattttggatctatggagaaaatgaagggaatgccaaatgg

SEQ ID NO: 19650 - DNA, 211 bp, Homo sapiens
  MAP TO AL117259.3; EXPRESSED IN BONE MARROW, SIGNAL =   1; EXPRESSED IN ADULT LIVER, SIGNAL = 1.7; EXPRESSED IN BRAIN, SIGNAL = 1.8; EXPRESSED IN HELA, SIGNAL = 2.3; SWISSPROT HIT: P23515, EVALUE 1.40e+00; EST_HUMAN HIT: BI757472.1, EVALUE 1.10e+00; NT HIT: AE006501.1, EVALUE 7.50e-01
ttccttcttgcccagcttcaatgtcataatcagtcacagcctctgctcctttgtcctcctcttgctttatcagggctgcttgacaagtcctccaactctcttcctgttccgtgccaacactcgagctgttgaatgtagccagagaaaaccacactatgcaggctagccccgttttaaatccatgatcactaacctcaagagagcttggatc

SEQ ID NO: 19651 - DNA, 318 bp, Homo sapiens
  MAP TO AL023801.1; EXPRESSED IN HEART, SIGNAL = 1.5; EXPRESSED IN ADULT LIVER, SIGNAL = 1.7; EXPRESSED IN BONE MARROW, SIGNAL =   2; EXPRESSED IN PLACENTA, SIGNAL = 1.9; SWISSPROT HIT: Q9PJL4, EVALUE 1.20e-01; EST_HUMAN HIT: AA837401.1, EVALUE 4.30e-01
cccttgccaaacttcagtctgacaaatgataagagccttggagacgtcgctctggtgggtgtgagctcgctgccaggttgctgcttcccggtgctcacgctagagatccatatgggttgctctggggttttaaaaaagcgcatcgtgctcatgtcctccattttaccaaaggaggtaaatctggctttggcagcagacaaagtgcagagatttttatccggccatgagagcaggcgctgtcagtggctggggctccctctttcaggcagagcggtggagtggaggacagaggcactggagccggctttgcttctgccg

SEQ ID NO: 19652 - DNA, 138 bp, Homo sapiens
  MAP TO AC026730.3; EXPRESSED IN BONE MARROW, SIGNAL = 5.5; EXPRESSED IN ADULT LIVER, SIGNAL = 3.5; EXPRESSED IN BRAIN, SIGNAL = 4.1; EXPRESSED IN FETAL LIVER, SIGNAL = 3.2; SWISSPROT HIT: P29572, EVALUE 1.50e+00; NT HIT: gi16174379, EVALUE 1.80e+00; EST_HUMAN HIT: BI833212.1, EVALUE 1.70e-01
attccagtggctgtgattgccgtaaattctggcttctggtgttttcaaaacgatgagactgtgagtttttctattgaaatgttagccttcctgtcagatataaatttgggctatctcatgataaaaacaatgacatga

SEQ ID NO: 19653 - DNA, 121 bp, Homo sapiens
  MAP TO AF006752.1; EXPRESSED IN BRAIN, SIGNAL = 0.92; EXPRESSED IN HELA, SIGNAL = 0.46; EXPRESSED IN ADULT LIVER, SIGNAL = 0.85; SWISSPROT HIT: P09193, EVALUE 4.60e+00; NT HIT: AF268599.1, EVALUE 6.20e+00; EST_HUMAN HIT: T10707.1, EVALUE 9.20e+00
cgttcggggacaaagagatcgatcagaattttcttgcctcctcggacggcatctgacctggctaggttgcggggatctgttggagagagaagcgtgtcatggatcccgcatcgaaaacagc

SEQ ID NO: 19654 - DNA, 452 bp, Homo sapiens
  MAP TO AC009087.4; EXPRESSED IN ADULT LIVER, SIGNAL = 2.3; EXPRESSED IN FETAL LIVER, SIGNAL = 8.2; EXPRESSED IN BONE MARROW, SIGNAL = 1.9; EXPRESSED IN HELA, SIGNAL =  11; SWISSPROT HIT: P25705, EVALUE 9.00e-68; NT HIT: gi4757809, EVALUE 0.00e+00; EST_HUMAN HIT: BE784078.1, EVALUE 0.00e+00
tgtgggaaccaatgccgactggcattaaggctgtggatagcttggtgccaattggtcgtggtcagcatgagctcattattggtgaccgaaggactgggaaaacctcaattgctattgacacaatcattaaccagaaacatttcaatgatagatctgaagaaaagaagaagctgtactgtatctatgttgctattggtcgaaagagatccactgttgctcagttggtgaagagacttacagatgcagatgccgtgaagtacaccactgtggtgtcagctatggcctcagatgctgccctacttcagtacctggctccttactctgactgttccatgggagagtattttagagacgatggcaaatatactttgatcatctatgacgacttatccaaacaggctgtcgcttactgtcagatgtctctgttgctccaccgacccccctggtcgtaa

SEQ ID NO: 19655 - DNA, 185 bp, Homo sapiens
  MAP TO AL109754.13; EXPRESSED IN PLACENTA, SIGNAL = 1.5; EXPRESSED IN ADULT LIVER, SIGNAL =   2; EXPRESSED IN HEART, SIGNAL = 1.2; EXPRESSED IN BRAIN, SIGNAL = 2.5; EXPRESSED IN LUNG, SIGNAL = 2.2; EXPRESSED IN FETAL LIVER, SIGNAL = 2.2; EXPRESSED IN BONE MARROW, SIGNAL = 1.8; SWISSPROT HIT: Q04831, EVALUE 6.50e-01; NT HIT: gi14786580, EVALUE 6.50e-01; EST_HUMAN HIT: BG539084.1, EVALUE 1.00e-83
tcaaaagggagatggaaaaaaaactttgacttcaacaagcgccgaatctgggcgctggattctagcaatgctactgaggagcctttggcaggtggcgcagagaaagtcagctccaagctgcttcctgtccattgtccagctgtaggagaagggtctttcctgcccaaggacagtggtcctctctt

SEQ ID NO: 19656 - DNA, 232 bp, Homo sapiens
  MAP TO AC008546.5; EXPRESSED IN ADULT LIVER, SIGNAL = 0.97; EXPRESSED IN BONE MARROW, SIGNAL = 0.62; EXPRESSED IN PLACENTA, SIGNAL = 0.89; NT HIT: AF223391.1, EVALUE 1.00e-86; EST_HUMAN HIT: BG720192.1, EVALUE 5.00e-80; SWISSPROT HIT: O06432, EVALUE 1.20e+00
cttttttaaggaggaaggggtttttccacaggatcagtggtaggagcctttttagtctgggatgtttccttctgaaataggagatgtaagtcctccaatggttcacaggtgtatcgagggtggtctggctgatcttgggactcctgagctgagggtcctgcaggttcctcaggggatgtccaaagtttaactcgggtgtggtgagtccaagattccactcctgccaccttaa

SEQ ID NO: 19657 - DNA, 159 bp, Homo sapiens
  MAP TO AL035666.7; EXPRESSED IN BRAIN, SIGNAL = 5.2; EXPRESSED IN BONE MARROW, SIGNAL = 6.8; EXPRESSED IN PLACENTA, SIGNAL = 8.6; EXPRESSED IN ADULT LIVER, SIGNAL = 4.3; EXPRESSED IN HEART, SIGNAL =   4; SWISSPROT HIT: O75882, EVALUE 3.40e+00; EST_HUMAN HIT: BF915881.1, EVALUE 2.00e-01; NT HIT: D50868.1, EVALUE 2.00e-03
agcactcactgaccacagcttcctcccatggcttaacagtgccttctattgtggctgcctcgcccatcaggctgtaagggtactgatggcagcacccctcgttcacctctgcacctccagtgcctgtcacagggcctgccacagagtacttcacggcgg

SEQ ID NO: 19658 - DNA, 87 bp, Homo sapiens
  MAP TO AC016046.1; EXPRESSED IN BONE MARROW, SIGNAL =  12; EXPRESSED IN PLACENTA, SIGNAL =  15; EXPRESSED IN ADULT LIVER, SIGNAL =  13; EXPRESSED IN FETAL LIVER, SIGNAL =  18; EXPRESSED IN BRAIN, SIGNAL =  13; SWISSPROT HIT: P08547, EVALUE 1.10e-01; NT HIT: AJ251973.1, EVALUE 5.00e-06; EST_HUMAN HIT: BE149314.1, EVALUE 1.00e-10
ctacttttcagtgtagttgtaccattttacacttccagcagcaatgttggagtgatccagtttctctgtatccttggcagcataaca

SEQ ID NO: 19659 - DNA, 150 bp, Homo sapiens
  MAP TO AC005944.1; EXPRESSED IN BONE MARROW, SIGNAL = 0.99; EXPRESSED IN PLACENTA, SIGNAL = 1.1; EXPRESSED IN ADULT LIVER, SIGNAL = 1.2; NT HIT: gi13470324, EVALUE 5.10e-01; EST_HUMAN HIT: AW276590.1, EVALUE 3.00e+00
ctctgtgccaggaaatggccttgttctcaccccgggccctcataaaatccagttcctcaaggtccaggaggccaaggccacaaggaagggaggaggccgtggggagctgaggagggagggaggggccgccaacgccatgaaggcactgct

SEQ ID NO: 19660 - DNA, 152 bp, Homo sapiens
  MAP TO AC010505.6; EXPRESSED IN FETAL LIVER, SIGNAL = 1.3; EXPRESSED IN PLACENTA, SIGNAL = 0.98; EXPRESSED IN ADULT LIVER, SIGNAL = 1.1; EXPRESSED IN HEART, SIGNAL = 1.4; EXPRESSED IN BRAIN, SIGNAL = 0.99; SWISSPROT HIT: Q9JHY7, EVALUE 3.40e+00; NT HIT: AJ251760.1, EVALUE 8.10e+00
cccagtgccctgaagggtggcagccccactaggcgagtggagatggctccagccgtccaagctgctgaacaaggggctgtggacaaggccagcgtggccaaggaggcaggggctgcagctgaggtcttctcaggggaaaagggagcaggcag

SEQ ID NO: 19661 - DNA, 424 bp, Homo sapiens
  MAP TO AC006326.2; EXPRESSED IN HEART, SIGNAL = 2.5; EXPRESSED IN ADULT LIVER, SIGNAL = 1.5; EXPRESSED IN LUNG, SIGNAL = 2.2; EXPRESSED IN BRAIN, SIGNAL = 1.5; EXPRESSED IN PLACENTA, SIGNAL = 1.1; SWISSPROT HIT: Q28521, EVALUE 2.00e-05; EST_HUMAN HIT: BG283711.1, EVALUE 3.00e-27; NT HIT: gi14734195, EVALUE 3.00e-42
ttatttttcaggctttcctcttttgctaagcacttttttttggcagtaattaaaatcttctgccactgctatagcttctcctgatgctaatacaaccataaccaccttggttttgtggtttggcaaagtattggctctcccagtataagaaccggagcttctgctccatgatctccttcctttatgggtccagaatttgaagattattgtaattgccattgtccactgtcgcttccaccacctccaaaattgcttctatcattaccaacaccattataactatccccactggcatcatatccaccaccatcatggctgccaccaaagctatcacaaccattgtaatttcctccataattaaagttgccattccctctaaaataacctccacaacgactgctgaagttttcagaaccactttgac

SEQ ID NO: 19662 - DNA, 151 bp, Homo sapiens
  MAP TO AC010512.7; EXPRESSED IN FETAL LIVER, SIGNAL = 0.47; EXPRESSED IN ADULT LIVER, SIGNAL = 0.95; EXPRESSED IN HEART, SIGNAL = 0.92; SWISSPROT HIT: P10272, EVALUE 1.50e+00; EST_HUMAN HIT: BF932327.1, EVALUE 3.00e+00
tggtcatcaggaaatgccaggggattaacaccttctgggatggcccctaccaagtggcactggtggatcaataccccaactccttcacctcagatgggatcatggaatgggtgttttatgcagtctcccagagtaccagggaggccttgga

SEQ ID NO: 19663 - DNA, 147 bp, Homo sapiens
  MAP TO AC007206.1; EXPRESSED IN ADULT LIVER, SIGNAL = 0.64; EXPRESSED IN PLACENTA, SIGNAL = 0.56; NT HIT: AF260225.1, EVALUE 7.80e+00; EST_HUMAN HIT: BE784262.1, EVALUE 2.90e+00; SWISSPROT HIT: P23683, EVALUE 2.00e+00
ggcctactcccaaaagatgaaccttcaactgtctacattgcacgtctgggccttcagcatcgctgatgcgccagctggcaccagcttcagcagcccagcgcatctgctgtgcttgcatctgccatgtcatcgtggggtcctgggccc

SEQ ID NO: 19664 - DNA, 142 bp, Homo sapiens
  MAP TO AC006128.1; EXPRESSED IN HEART, SIGNAL = 2.5; EXPRESSED IN ADULT LIVER, SIGNAL = 1.1; EXPRESSED IN BRAIN, SIGNAL = 1.4; EXPRESSED IN FETAL LIVER, SIGNAL = 2.3; SWISSPROT HIT: Q9ULX6, EVALUE 3.00e-23; EST_HUMAN HIT: BG339752.1, EVALUE 3.00e-74; NT HIT: gi7657354, EVALUE 2.00e-74
ctgcagaaagtcagccgtctgcttagggagcttggtgcctacgtacttaaagtgttccttgtggaacttgctgtcaagatggctggccatctcgtcctcatagaaggtccggtatttgcacagagaacacacaaactggatc

SEQ ID NO: 19665 - DNA, 185 bp, Homo sapiens
  MAP TO AF212831.1; EXPRESSED IN BONE MARROW, SIGNAL =   1; EXPRESSED IN ADULT LIVER, SIGNAL = 0.92; EXPRESSED IN LUNG, SIGNAL = 0.77; EXPRESSED IN FETAL LIVER, SIGNAL = 0.58; SWISSPROT HIT: P08548, EVALUE 2.00e-12; NT HIT: AL163213.2, EVALUE 1.00e-100; EST_HUMAN HIT: AI473371.1, EVALUE 1.00e-21
ctgggacttccagtactatgttgaataacagtggtgaaagtggtcatccttgtcgtggtccagatcttaaagaaaatgttttcatgtttttcccatccagtattattgtacctatgggcctgttatatatggcttttattgtgttccttctacccccagattttttaaggatttttatcatgaag

SEQ ID NO: 19666 - DNA, 303 bp, Homo sapiens
  MAP TO AC010518.5; EXPRESSED IN PLACENTA, SIGNAL = 0.76; EXPRESSED IN ADULT LIVER, SIGNAL = 0.74; EXPRESSED IN BRAIN, SIGNAL = 1.2; EXPRESSED IN LUNG, SIGNAL = 1.9; SWISSPROT HIT: P43629, EVALUE 5.00e-17; NT HIT: gi14768931, EVALUE 0.00e+00; EST_HUMAN HIT: AW467285.1, EVALUE 0.00e+00
ctgagaccacgagctccagggggtcactggggtgagtcagcaggtaggggttggagctgagtgagccgtagcacctgtaggtccccgcgtgggccgaggtcacaggactcatggggaattcagcctggtacttatgagattggcgctttgattttagacgcagcggggaatcagctgccccctccttggtcaaaaggaaagtgtgcatccctccctgtgactgacacagcagggtcacgttctctcctgaggccactgtggggcccggccgcacggagaggaagggtctggcacggatctgtc

SEQ ID NO: 19667 - DNA, 93 bp, Homo sapiens
  MAP TO AC008982.4; EXPRESSED IN ADULT LIVER, SIGNAL = 1.2; EXPRESSED IN FETAL LIVER, SIGNAL = 0.85; EXPRESSED IN LUNG, SIGNAL =   1; EXPRESSED IN BRAIN, SIGNAL = 1.1; EST_HUMAN HIT: H38394.1, EVALUE 4.30e-01
ttcaactgtgaaatgggggtagtcctctaaggtcccgtttccattctctgcattcctcatgacgacccagacgaagctcctactgccatcccc

SEQ ID NO: 19668 - DNA, 231 bp, Homo sapiens
  MAP TO AC008620.5; EXPRESSED IN BONE MARROW, SIGNAL = 0.61; EXPRESSED IN PLACENTA, SIGNAL = 0.84; EXPRESSED IN ADULT LIVER, SIGNAL = 1.3; EXPRESSED IN HELA, SIGNAL = 1.3; EXPRESSED IN FETAL LIVER, SIGNAL =   1; SWISSPROT HIT: Q62203, EVALUE 2.00e+00; NT HIT: gi14732155, EVALUE 1.00e-127; EST_HUMAN HIT: BF036269.1, EVALUE 1.00e-127
ctggagcagccggagacccccctgctggctccgctcctgggcctctgccagcaggcggctgagctgggcggcctgttctgcaaggcgactagccgcggctcccgcacgccccagctgggcttcatgcatctctctgagacgccgttccagccctgcctgctcttcagccagaaaccgtgtcagtcgcccaaactccgaggccaccgctgccagctctgacttcatctggct

SEQ ID NO: 19669 - DNA, 213 bp, Homo sapiens
  MAP TO AC009087.4; EXPRESSED IN BONE MARROW, SIGNAL = 1.3; EXPRESSED IN ADULT LIVER, SIGNAL = 0.95; EXPRESSED IN BRAIN, SIGNAL = 0.87; EXPRESSED IN HELA, SIGNAL = 0.94; SWISSPROT HIT: Q02127, EVALUE 4.00e-35; NT HIT: M94065.1, EVALUE 1.00e-116; EST_HUMAN HIT: AU130529.1, EVALUE 1.00e-116
cagcatgtcagagtcttgaaatctggcccgtggaaggagccccagggaggtgaagcgaacagccagtctgtgggctgactccgggtccagcagcccctgcagagtcggcatcaggtgttcagcatagaaacgctcatctcccgtggccatcaggtaggaggcgaagagaagtcctcctccccccaggatgatcacagcatcctgggcccgctt

SEQ ID NO: 19670 - DNA, 228 bp, Homo sapiens
  MAP TO AL118559.4; EXPRESSED IN LUNG, SIGNAL = 0.76; EXPRESSED IN HELA, SIGNAL = 1.8; EXPRESSED IN BONE MARROW, SIGNAL = 1.7; EXPRESSED IN PLACENTA, SIGNAL = 1.9; EXPRESSED IN ADULT LIVER, SIGNAL = 1.6; EXPRESSED IN BRAIN, SIGNAL = 2.4; EST_HUMAN HIT: AI222304.1, EVALUE 1.00e-06; SWISSPROT HIT: O34971, EVALUE 1.20e+00; NT HIT: gi13375896, EVALUE 9.00e-07
gtggggcccgtgaccagctctcaccggtggaagcgacatgttcccttgcagaccctgggagcccagcagcaggtgcctttattccacctctttctctccatccattggatgcatgtccaagaccctgggcctgagaggagacaagctgcaagatggaaagagcctggatccctgaatgaccacatggaagaccaggaacacatgctgcagtgttgcataaatgaggcg

SEQ ID NO: 19671 - DNA, 211 bp, Homo sapiens
  MAP TO AC006133.1; EXPRESSED IN ADULT LIVER, SIGNAL = 1.9; EXPRESSED IN BRAIN, SIGNAL = 1.3; EXPRESSED IN FETAL LIVER, SIGNAL = 1.9; NT HIT: gi14763853, EVALUE 1.00e-115; EST_HUMAN HIT: AV713086.1, EVALUE 1.00e-115; SWISSPROT HIT: Q05315, EVALUE 3.00e-37
ctggtacttatctggcagcactgagatgctcagttcaaattcttggccatcctgaaagggcatattcttggattccacctgctgcttccaggccccatactcacggctgttcatgaccacacgacgaccaaagcacacttggaaatggaagacaatgtctgattcctccttcatctcagtgtggaaatccacctgcagatatggttcattc

SEQ ID NO: 19672 - DNA, 221 bp, Homo sapiens
  MAP TO AC011471.5; EXPRESSED IN ADULT LIVER, SIGNAL = 5.8; EXPRESSED IN HEART, SIGNAL = 6.6; SWISSPROT HIT: O88799, EVALUE 1.40e+00; NT HIT: gi14767579, EVALUE 2.00e-90; EST_HUMAN HIT: BG573431.1, EVALUE 3.00e-78
atcacgtggattgcaggagcagtgacaaaggactttaaactgacagacaagcatgagacggtggttagctacctcccactcagccatattgcagcacagatgatggacatctgggtacccataaagattggggcgctcacatactttgctcaagcagatgctctcaaggtaagattgagtaaggacctggggctccgacttcatcctcttgggcagcccag

SEQ ID NO: 19673 - DNA, 192 bp, Homo sapiens
  MAP TO AL031709.10; EXPRESSED IN FETAL LIVER, SIGNAL = 3.2; EXPRESSED IN ADULT LIVER, SIGNAL = 2.1; EXPRESSED IN HEART, SIGNAL = 1.2; NT HIT: gi15451913, EVALUE 1.00e-104; EST_HUMAN HIT: BI755009.1, EVALUE 1.00e-104; SWISSPROT HIT: Q9YA48, EVALUE 2.20e-01
ctctgcgtggtcctcaacaatgtggagctcgtgcgcaaggctgctgggcaggccttgaagggcctggcatggccagagggggccacggggcccgagggggtgctcccccgccctctgctcagctgcacacaggccctggacgatgatctgcaacgggaggcccacacggtgacagcgcacctgacctctaag

SEQ ID NO: 19674 - DNA, 113 bp, Homo sapiens
  MAP TO AC008971.5; EXPRESSED IN LUNG, SIGNAL =   1; EXPRESSED IN HELA, SIGNAL = 0.74; EXPRESSED IN BONE MARROW, SIGNAL = 0.77; EXPRESSED IN ADULT LIVER, SIGNAL = 0.89; EXPRESSED IN HEART, SIGNAL = 1.3; EXPRESSED IN PLACENTA, SIGNAL = 0.97; SWISSPROT HIT: P36772, EVALUE 2.10e+00; NT HIT: AL163204.2, EVALUE 1.00e-04; EST_HUMAN HIT: BE159667.1, EVALUE 2.00e-10
atggctaaaagggtcccagacatatgtcaggccactgctccagaggatgcaagctgtaagcctcagtggcttccacgtggtgttatgcctgcaggtgcacagagggcaatagc

SEQ ID NO: 19675 - DNA, 126 bp, Homo sapiens
  MAP TO AJ012008.1; EXPRESSED IN BONE MARROW, SIGNAL = 3.6; EXPRESSED IN ADULT LIVER, SIGNAL = 2.1; EXPRESSED IN PLACENTA, SIGNAL = 3.6; EXPRESSED IN HEART, SIGNAL = 3.3; EXPRESSED IN BRAIN, SIGNAL = 2.6; EXPRESSED IN FETAL LIVER, SIGNAL = 4.1; SWISSPROT HIT: Q29238, EVALUE 4.00e-19; NT HIT: AF034607.1, EVALUE 6.00e-65; EST_HUMAN HIT: BG477197.1, EVALUE 9.00e-65
gcggaccgagacagtgcagaagctgtgcccaggggggcagctcccattcctgctgtatggcactgaagtgcacacagacaccaacaagattgaggaatttctggaggcagtgctgtgccctcccag

SEQ ID NO: 19676 - DNA, 226 bp, Homo sapiens
  MAP TO AC007570.23; EXPRESSED IN ADULT LIVER, SIGNAL = 1.6; EXPRESSED IN FETAL LIVER, SIGNAL = 1.1; EXPRESSED IN PLACENTA, SIGNAL = 1.9; SWISSPROT HIT: O02666, EVALUE 1.90e+00; NT HIT: gi13994352, EVALUE 1.00e-124; EST_HUMAN HIT: AA024677.1, EVALUE 1.00e-124
agaccagtgcaactttgggtgcaaggctttgtttagggatcaagccttttgccaccttgggctggtctttggcctggtgctcactgggaccccatatgtctgcgtaggagcagaactttccatggcagtaagtgtccagctctgtttctggttctttccccaactccagccccgtccagttgttctcctgattgacccgactccactccaggaaggccatctgacc

SEQ ID NO: 19677 - DNA, 129 bp, Homo sapiens
  MAP TO AC010609.5; EXPRESSED IN ADULT LIVER, SIGNAL =   1; EXPRESSED IN HEART, SIGNAL = 1.2; EXPRESSED IN FETAL LIVER, SIGNAL = 0.76; EXPRESSED IN PLACENTA, SIGNAL = 0.94; NT HIT: AY040325.1, EVALUE 1.10e-01; EST_HUMAN HIT: AA883671.1, EVALUE 1.00e-66; SWISSPROT HIT: Q92908, EVALUE 1.50e+00
atggtggagaagcaaaacatagaggccaaagtggagaaagcccagggtggccaggagctggagatgatcagtggcactatgacatccgagaagacggagatgatcgtctttgaaaccaaatccatttaa

SEQ ID NO: 19678 - DNA, 179 bp, Homo sapiens
  MAP TO AC016630.5; EXPRESSED IN ADULT LIVER, SIGNAL = 4.5; EXPRESSED IN HEART, SIGNAL = 4.7; EXPRESSED IN FETAL LIVER, SIGNAL =   9; EXPRESSED IN BRAIN, SIGNAL = 5.6; EXPRESSED IN BONE MARROW, SIGNAL = 4.3; NT HIT: gi16162698, EVALUE 3.00e-58; EST_HUMAN HIT: BI868259.1, EVALUE 5.00e-58; SWISSPROT HIT: Q62318, EVALUE 3.00e-14
cccagacagcatcatcaatcagcagagggggctcagggacccttctcaccggcacaaggcttacctgggcatcattgaccagcacacggccccgcttattcagctccttcatgatctgcaggatggccatcttgacatccacttgcacacgcttctgtacgtcagacacctggcggatt

SEQ ID NO: 19679 - DNA, 177 bp, Homo sapiens
  MAP TO AL023494.12; EXPRESSED IN BONE MARROW, SIGNAL = 3.1; EXPRESSED IN ADULT LIVER, SIGNAL = 3.4; EXPRESSED IN FETAL LIVER, SIGNAL = 4.8; NT HIT: gi7656876, EVALUE 5.00e-23; EST_HUMAN HIT: BF308839.1, EVALUE 8.00e-23; SWISSPROT HIT: Q92080, EVALUE 6.60e-01
ctattggatcttgcaactgcactcttctggtccatgtttgttgcaactcgagctgagctttccatccaccactgctgttttgcctccgtcgctgacttccatccctctggatccagcagggtgtcctctgtgctcctgatacagcagggcgcccattgccgctcccgatcgggctaa

SEQ ID NO: 19680 - DNA, 206 bp, Homo sapiens
  MAP TO AC008795.5; EXPRESSED IN BONE MARROW, SIGNAL = 0.69; EXPRESSED IN PLACENTA, SIGNAL = 0.97; EXPRESSED IN ADULT LIVER, SIGNAL = 0.81; EXPRESSED IN HEART, SIGNAL = 0.97; EXPRESSED IN LUNG, SIGNAL = 0.86; EXPRESSED IN BRAIN, SIGNAL = 0.8; SWISSPROT HIT: Q05486, EVALUE 1.90e+00; NT HIT: gi13277373, EVALUE 4.70e-02; EST_HUMAN HIT: AW176580.1, EVALUE 2.70e-01
tttgttctgcccatggaaagggctcatttcaaaggccaggaaatggctcagaagttgtacaaaggcaccagcagcctgagctttccctgggcagcgcagtgggacagctgaggaggggccggtttgtcctaatttccctgcttgtaggacttgctctttctcccccaagactgcatcctccagggttaggaaaggtaagtgctcca

SEQ ID NO: 19681 - DNA, 288 bp, Homo sapiens
  MAP TO AC018555.4; EXPRESSED IN ADULT LIVER, SIGNAL = 0.84; SWISSPROT HIT: P35423, EVALUE 9.60e+00; EST_HUMAN HIT: BG704648.1, EVALUE 1.00e-13; NT HIT: AL163218.2, EVALUE 1.00e-12
catcatggcagaaggcgaaggagaagcaactaccttcttcacaatggtgtcaggagagagagcgagagcaagagcaagagtgcgagtgaaagcgcacgcgtgtgagagagagacagacagacagaaggggggagtgccacacacttttaaactatcagatctcatgggaacccactcattttcatgagaacagcatgggggaagttcaccccgtgatccaaccacctcccaccaggtttctcctccaatttgacctgagagtttggaaggaataccaatacaaaccat

SEQ ID NO: 19682 - DNA, 209 bp, Homo sapiens
  MAP TO AC008149.14; EXPRESSED IN BRAIN, SIGNAL = 2.2; EXPRESSED IN BONE MARROW, SIGNAL = 1.4; EXPRESSED IN ADULT LIVER, SIGNAL = 2.4; EXPRESSED IN PLACENTA, SIGNAL = 2.7; EXPRESSED IN HEART, SIGNAL = 2.9; EXPRESSED IN FETAL LIVER, SIGNAL = 2.3; SWISSPROT HIT: P41970, EVALUE 9.00e-28; NT HIT: gi11435887, EVALUE 1.00e-114; EST_HUMAN HIT: BI767724.1, EVALUE 1.00e-114
cttgtcataatagtatcgcagggctctgctcagcttatcatagttcatatttgttttgttttttcggagtccccacagcttggccacttcttctgctttgaggagcttgaattcaccatcgttcgaggtccagcagatcaaatgctcatgtttctgatccagcagcaactgcaacaggaactgccacagcgtgattgcactctccatac

SEQ ID NO: 19683 - DNA, 342 bp, Homo sapiens
  MAP TO AC010617.5; EXPRESSED IN ADULT LIVER, SIGNAL = 1.3; EXPRESSED IN HEART, SIGNAL = 1.2; SWISSPROT HIT: Q05319, EVALUE 8.00e-14; NT HIT: AB049453.1, EVALUE 5.00e-03; EST_HUMAN HIT: AI698086.1, EVALUE 2.00e-92
ggtgactcaggaggacccctggtctgcgaggagccctctggccggttctttctggctggcatcgtgagctggggaatcgggtgtgcggaagcccggcgtccaggggtctatgcccgagtcaccaggctacgtgactggatcctggaggccaccaccaaagccagcatgcctctggcccccaccatggctcctgcccctgccgcccccagcacagcctggcccaccagtcctgagagccctgtggtcagcacccccaccaaatcgatgcaggccctcagtaccgtgcctcttgactgggtcaccgttcctaagctacaaggtattttcggggcagaaaggtag

SEQ ID NO: 19684 - DNA, 157 bp, Homo sapiens
  MAP TO AL031007.1; EXPRESSED IN ADULT LIVER, SIGNAL =   1; EXPRESSED IN FETAL LIVER, SIGNAL = 1.4; EXPRESSED IN LUNG, SIGNAL =   1; EXPRESSED IN PLACENTA, SIGNAL = 0.82; SWISSPROT HIT: Q9CFG0, EVALUE 4.40e+00; NT HIT: AJ248286.1, EVALUE 8.40e+00; EST_HUMAN HIT: AI081609.1, EVALUE 8.00e-01
caacaacaaaataccctttaagaacacctcaaaggctgaggaaaactctagaaggaaaccacaaggggtagataccagtggaaaggaaaacaaggaagcatgttcctggtacttatcacaacaggcatctggaagtcagaagccagctgaacactaa

SEQ ID NO: 19685 - DNA, 219 bp, Homo sapiens
  MAP TO AC002481.1; EXPRESSED IN ADULT LIVER, SIGNAL = 0.9; EXPRESSED IN HEART, SIGNAL = 1.4; EXPRESSED IN FETAL LIVER, SIGNAL = 0.95; EXPRESSED IN BRAIN, SIGNAL = 1.1; EXPRESSED IN BONE MARROW, SIGNAL = 0.48; NT HIT: AF040708.1, EVALUE 5.00e-67; EST_HUMAN HIT: BI831674.1, EVALUE 1.00e-120; SWISSPROT HIT: P28478, EVALUE 2.70e-01
gcgccattgggcagagggattggcaagcttgcgtgccccagcgacacaggcctcgaggctgtctctgacaagtgttcacaggaggtggggacgcctctgcgcgaggaacgaggagctacgggcctgggcccggttattgccatgggcagcggctgccgcatcgaatgcatattcttcagcgagttccaccccacgctgggacccaagatcacctatcag

SEQ ID NO: 19686 - DNA, 206 bp, Homo sapiens
  MAP TO AC007136.1; EXPRESSED IN BONE MARROW, SIGNAL = 2.4; EXPRESSED IN PLACENTA, SIGNAL = 0.81; EXPRESSED IN HEART, SIGNAL = 1.6; EXPRESSED IN ADULT LIVER, SIGNAL = 1.4; EXPRESSED IN FETAL LIVER, SIGNAL = 0.86; SWISSPROT HIT: P31152, EVALUE 2.50e+00
gagagcgccatgggtcacctgcccgaaaaggcaggtccatcctctgcctgcagtcagaactcagggggatccctgaggccggcagcagagccacgaggacgcagtggcctggcggcgggtggggcagcgcgggagctgctttccaggccagacagacggagccgttctcctgccggccttcccgggagcaggatcccatccagtga

SEQ ID NO: 19687 - DNA, 210 bp, Homo sapiens
  MAP TO AC004176.1; EXPRESSED IN ADULT LIVER, SIGNAL = 0.61; EXPRESSED IN BRAIN, SIGNAL = 0.62; EXPRESSED IN FETAL LIVER, SIGNAL = 0.44; EXPRESSED IN HELA, SIGNAL = 0.74; NT HIT: AF055066.1, EVALUE 1.00e-110; EST_HUMAN HIT: BF959024.1, EVALUE 7.00e-05; SWISSPROT HIT: Q9KCB7, EVALUE 8.30e-01
gctgatgcaaaaataattgcagtttttgccattacaataattcttaccaagaactattcacattggaccaaagccaattgtaatgatccatgtgatggagagagccagaatgctatgaaagtggccttgaccagaaataggtcatttgatccttggctcattgacatctccatagattttcggtgtacaatgttcggtctgatgtgcaag

SEQ ID NO: 19688 - DNA, 435 bp, Homo sapiens
  MAP TO AC010642.4; EXPRESSED IN BRAIN, SIGNAL = 0.68; EXPRESSED IN LUNG, SIGNAL = 0.61; EXPRESSED IN HELA, SIGNAL = 0.74; EXPRESSED IN FETAL LIVER, SIGNAL = 0.53; EXPRESSED IN PLACENTA, SIGNAL = 0.6; EXPRESSED IN ADULT LIVER, SIGNAL = 0.74; SWISSPROT HIT: P10073, EVALUE 1.00e-53; NT HIT: gi9910605, EVALUE 2.00e-03; EST_HUMAN HIT: BF431722.1, EVALUE 2.00e-03
cacacacgtatggcttctcacctgtgtgcacacgctggtgcttggcaagggatgagctctctcggaagcacttgccacagtggccacacatgtagggcttctcgcctgtgtggacgtgccagtgcttgactagagatgaattgttgctgaaggtacacccacattcctggcatgcatacagcttctcactggtgtgctgaacaaggtgacttctctgtccaaaggccttgccacactcttcgcacgtacagggtctccttttgttgggaatctgctgatagctcacaaggcacgtgttcttgccaaaggtatcttcccacccactacatggcagtacaccctccccagcgtggactccttgtggctgattaaggtctgggaaacagctgcaggcctccccacatacaccctctccttggcaggagcacccccgat

SEQ ID NO: 19689 - DNA, 249 bp, Homo sapiens
  MAP TO AC012049.7; EXPRESSED IN HELA, SIGNAL = 1.6; EXPRESSED IN BONE MARROW, SIGNAL = 1.7; EXPRESSED IN ADULT LIVER, SIGNAL = 1.5; EXPRESSED IN HEART, SIGNAL = 2.7; SWISSPROT HIT: Q15404, EVALUE 4.00e-31; NT HIT: gi14742549, EVALUE 4.00e-55; EST_HUMAN HIT: AV718104.1, EVALUE 1.00e-56
tcaagagctgggtagaaagcaaaatccttcaggcaaagtatttagcccattcatgcccaggttcatgtgtttgagtttctgaaggctgccgatctgtgtgggcagctcctcaatctggctattaaggaagttgagcacttccaaattcttcagttctgctgtgtttggtggcaccactgtgagcttgttatggctgaggaccagttgtatggtatgggataaggaaaatgtgccattgacatacagcat

SEQ ID NO: 19690 - DNA, 261 bp, Homo sapiens
  MAP TO AL117382.28; EXPRESSED IN BRAIN, SIGNAL = 1.3; EXPRESSED IN PLACENTA, SIGNAL = 1.4; EXPRESSED IN HEART, SIGNAL = 1.6; EXPRESSED IN ADULT LIVER, SIGNAL = 1.3; SWISSPROT HIT: P35800, EVALUE 1.00e-01; NT HIT: AL163302.2, EVALUE 3.70e+00; EST_HUMAN HIT: BI490186.1, EVALUE 3.50e-01
atgcccctgctgcccagcaccgtgggcctggcaggcctgctcttctgggctggccaggcagtgaacgccttgataatgcctaatgctaccccagccccggcccagcccgagagcacggctatgcggctcctgagtggcctggaggtgcccaggtaccgccggaagcgccacatctctgtgagagacatgaatgccttactggattatcacaaccacatccgggccagtgtgtacccacctgccgccaacatggaatacatg

SEQ ID NO: 19691 - DNA, 189 bp, Homo sapiens
  MAP TO AL080273.10; EXPRESSED IN PLACENTA, SIGNAL = 1.2; EXPRESSED IN ADULT LIVER, SIGNAL =   1; EXPRESSED IN BRAIN, SIGNAL = 2.1; EXPRESSED IN FETAL LIVER, SIGNAL = 1.5; EST_HUMAN HIT: BE006097.1, EVALUE 3.00e-04; NT HIT: gi14861871, EVALUE 2.60e+00
tcaatggggcaaaataactccaagtgttgtctgtgaatggcggcagcaggagcagcggcggcagcagcagcatcagcgacagcagcagcacaggcagcagcagcacctgggagctagttagaaatgcagacgcttggatcccatcccaggcctacccagtcagagtctacattttaacaaggtccccag

SEQ ID NO: 19692 - DNA, 151 bp, Homo sapiens
  MAP TO AC007181.1; EXPRESSED IN PLACENTA, SIGNAL = 2.6; EXPRESSED IN HEART, SIGNAL = 3.6; EXPRESSED IN ADULT LIVER, SIGNAL =   3; EXPRESSED IN LUNG, SIGNAL =   4; EXPRESSED IN BONE MARROW, SIGNAL = 3.1; EXPRESSED IN BRAIN, SIGNAL = 2.7; SWISSPROT HIT: Q9Y4W6, EVALUE 2.00e-08; NT HIT: gi15317437, EVALUE 9.00e-80; EST_HUMAN HIT: BF110425.1, EVALUE 1.00e-79
cagacctctggccaggtaatactgtacaaagtgcttccacgtgatttctcttccaggatctcgaaaatagaggtagaaaaatcccatggcaacgcctgcccccaaaagggccagactgcggaaatcctcgtcatcccaggggaagtccccc

SEQ ID NO: 19693 - DNA, 263 bp, Homo sapiens
  MAP TO AC002050.5; EXPRESSED IN PLACENTA, SIGNAL = 0.77; EXPRESSED IN ADULT LIVER, SIGNAL = 0.51; SWISSPROT HIT: P36956, EVALUE 1.50e+00; NT HIT: D86220.1, EVALUE 9.50e-01; EST_HUMAN HIT: BE388677.1, EVALUE 1.00e-03
atgaagaatttcagtagtgataaggatcctgaagaaaataaatcatgcaagcgagtaacaggaatggcagtaggtaccattggcagagtagtcagagatgctgggtctgaggaaatgacattcaagccaaggcccaaatcagggaaagacgcagccacatggagatctggaggcagaacattctggacagagggtacaccaggcagaggtgcaaaagccctgatctggaacaagcttgccagagaagaggacgagaaagaaag

SEQ ID NO: 19694 - DNA, 434 bp, Homo sapiens
  MAP TO AC009494.2; EXPRESSED IN LUNG, SIGNAL = 3.3; EXPRESSED IN BRAIN, SIGNAL = 1.8; EXPRESSED IN BONE MARROW, SIGNAL = 1.5; EXPRESSED IN ADULT LIVER, SIGNAL = 1.9; EXPRESSED IN HEART, SIGNAL = 1.8; SWISSPROT HIT: Q9QXE7, EVALUE 9.00e-10; NT HIT: gi5032158, EVALUE 4.00e-26; EST_HUMAN HIT: T78159.1, EVALUE 5.00e-26
tttggatggacccagaaatgggtgactctatgagccacttctctatgggtctcatattgtgcagaagccatagttcaagtccttttctctgtggggtgaagagtaacacaaggcagttaaaattaccaaatgcaaagatggcaaggacagaaacaggcatccaacggtatgaaaaaaggcagaagagcacatgcggacaatgtcacctggccagagagcaagctgtggtgagcttttcatcccatttcaaccaaacgccagagcctcctgtgtttttattctgcagatctgaagactcaactgcaaagatatggaacctgaatgagaatggcaacagggcctccacccagcttatgttaaggcaccgtataccagaaggggccatgacatcccaagtaacaaagatgtcagatgtcatttcactggactggaac

SEQ ID NO: 19695 - DNA, 117 bp, Homo sapiens
  MAP TO AC010510.6; EXPRESSED IN PLACENTA, SIGNAL = 1.2; EXPRESSED IN ADULT LIVER, SIGNAL = 1.2; EST_HUMAN HIT: BG776077.1, EVALUE 1.40e-01; SWISSPROT HIT: P02671, EVALUE 4.60e+00
cttctctcctgctctgctccaacagctttgggatgtaggatgaataagggttccactgccctgtttttcctgacacttgagtccctggcccttgcactcagctcctccaatctgcac

SEQ ID NO: 19696 - DNA, 188 bp, Homo sapiens
  MAP TO AC002985.1; EXPRESSED IN HEART, SIGNAL = 5.6; EXPRESSED IN HELA, SIGNAL = 4.3; EXPRESSED IN ADULT LIVER, SIGNAL =   5; NT HIT: gi9506608, EVALUE 1.00e-102; EST_HUMAN HIT: BI757351.1, EVALUE 1.00e-101; SWISSPROT HIT: Q09903, EVALUE 2.00e-08
gtgatggatgaggcagaccggctgctggaacagggctgcactgacttcaccgtggacctggaggccatcctggcggctgtgccggcccgcaggcagacactgctgttcagcgccacgctgaccgacacactccgggagctgcagggtctggccaccaaccagcccttcttctgggaagcacaggcccc

SEQ ID NO: 19697 - DNA, 119 bp, Homo sapiens
  MAP TO AC013455.4; EXPRESSED IN BRAIN, SIGNAL = 1.4; EXPRESSED IN LUNG, SIGNAL = 0.83; EXPRESSED IN BONE MARROW, SIGNAL = 1.3; EXPRESSED IN ADULT LIVER, SIGNAL = 1.3; EXPRESSED IN PLACENTA, SIGNAL = 1.2; EST_HUMAN HIT: BF761392.1, EVALUE 1.50e-01
acagaaagacaagggaggagagaggggttctgtttcctccaatttggtgaccaacttcctcacctcttacatcgtcttcacccacatccttgtgatcattcacaatgactatggtttga

SEQ ID NO: 19698 - DNA, 169 bp, Homo sapiens
  MAP TO AC008886.4; EXPRESSED IN ADULT LIVER, SIGNAL = 1.3; EXPRESSED IN PLACENTA, SIGNAL = 0.81; EXPRESSED IN HEART, SIGNAL = 1.5; EXPRESSED IN BRAIN, SIGNAL = 0.98; EXPRESSED IN BONE MARROW, SIGNAL = 1.2; NT HIT: AF134409.1, EVALUE 9.10e+00; EST_HUMAN HIT: BF346695.1, EVALUE 2.20e-01; SWISSPROT HIT: P37810, EVALUE 4.40e+00
atgacagaagcaggcaatctgctgtttgtgcagaaggggcatagggaaggagagaagagagcatctgttctgagaaactgctgtttaaaaatgcaagaagaacacaaagcaaaggaggaaatctccattgtacaggccactggctctgaaaaccatgagaactggagag

SEQ ID NO: 19699 - DNA, 140 bp, Homo sapiens
  MAP TO AC004185.1; EXPRESSED IN ADULT LIVER, SIGNAL = 0.57; SWISSPROT HIT: O79677, EVALUE 3.40e+00
gctatcaggatgaactgataaatcagctgaagggagcaaagtcacagtgcgtgagaattgttttggagatttgtaagtggaagaatgagaggaaagggagagactcagtgatggaaaagaaaaccttaagccttaaagtg

SEQ ID NO: 19700 - DNA, 284 bp, Homo sapiens
  MAP TO AC010515.5; EXPRESSED IN BRAIN, SIGNAL =   2; EXPRESSED IN LUNG, SIGNAL = 2.4; EXPRESSED IN PLACENTA, SIGNAL = 1.4; EXPRESSED IN ADULT LIVER, SIGNAL = 2.3; SWISSPROT HIT: P10587, EVALUE 6.00e-08; NT HIT: gi14774851, EVALUE 4.00e-06; EST_HUMAN HIT: AW081820.1, EVALUE 1.00e-111
ggtttgtagaagcaaaggtggatggtgtagacagaggggtctggagggtggcctggtgggcatgcaaggggccagacctgtatgtgctgctgcagcctcttcttctcggtttgcatttgacggctgcactcctcctcctcgcccacgcgagcctccagctctgacaccaccagctccagctcctgcttgcgggctgccagcctcccccgcgtctcctcggcctctgcacacagttctgcctctgctcgcaattgctctgccaggcgggcgcgctcctcttccag

SEQ ID NO: 19701 - DNA, 209 bp, Homo sapiens
  MAP TO AC013602.2; EXPRESSED IN BRAIN, SIGNAL = 0.6; EXPRESSED IN LUNG, SIGNAL = 0.55; EXPRESSED IN PLACENTA, SIGNAL = 0.53; EXPRESSED IN ADULT LIVER, SIGNAL = 0.77; SWISSPROT HIT: P14728, EVALUE 3.20e+00; EST_HUMAN HIT: BF816157.1, EVALUE 4.30e+00
ttaggcatagctggcaaaatgactggcttgtagagtacagatggtacgttccccatccttactggtgtccatggcccagggggactgtgtgccagggatgtagcataggatattccaggaaagcaagaggatgagattcaacattgactcgaggtccctgctcatctggatagtatatgattcagtgaaggggctgcagaacaggagat

SEQ ID NO: 19702 - DNA, 154 bp, Homo sapiens
  MAP TO AC027663.12; EXPRESSED IN ADULT LIVER, SIGNAL = 1.7; EXPRESSED IN HEART, SIGNAL = 1.9; EXPRESSED IN BRAIN, SIGNAL = 2.2; EXPRESSED IN LUNG, SIGNAL = 1.5; SWISSPROT HIT: Q90953, EVALUE 7.60e+00; NT HIT: gi14861871, EVALUE 8.20e+00; EST_HUMAN HIT: BG259258.1, EVALUE 2.00e-01
atgctacattttatgggtaaggacaaatgatattacccacttacagctagtgacagactcagaatatgattccaggtcccttaactctgaaacccctgcacagacacttgagaacatgtcacagtatttgatgagctatgagtgctattcagat

SEQ ID NO: 19703 - DNA, 161 bp, Homo sapiens
  MAP TO AC005203.1; EXPRESSED IN ADULT LIVER, SIGNAL = 0.34; EST_HUMAN HIT: BG179591.1, EVALUE 1.00e-85; SWISSPROT HIT: Q12931, EVALUE 2.00e-24; NT HIT: gi14778058, EVALUE 1.00e-85
ccatctgaaagccactggtaacccaggctccccggggctgccgagcgggaatagacctccactctgtcagccaccatgaaagctgagtagaaacccactccaaactggccgatgatcttgctgctggcctcagcctggttctgcagagcatccaggaaggc

SEQ ID NO: 19704 - DNA, 179 bp, Homo sapiens
  MAP TO AL118559.4; EXPRESSED IN PLACENTA, SIGNAL = 0.62; EXPRESSED IN ADULT LIVER, SIGNAL = 0.82; EXPRESSED IN HELA, SIGNAL = 0.61; EST_HUMAN HIT: R71824.1, EVALUE 2.30e-01; SWISSPROT HIT: Q91062, EVALUE 3.30e+00; NT HIT: AF240786.1, EVALUE 1.60e-01
actccgatctccaatgcggagcatcatgagaaaatgcagcaagaactggtggtgctgagagttaaggaagggaacgtggagtgggagtggttgcaagagacttttctggaatccctgagacctctgcaaatcgtggaggaggtgctcagcccccgtctgacaggcacccagctctggga

SEQ ID NO: 19705 - DNA, 125 bp, Homo sapiens
  MAP TO AC004090.24; EXPRESSED IN ADULT LIVER, SIGNAL = 1.7; EXPRESSED IN FETAL LIVER, SIGNAL = 0.59; SWISSPROT HIT: P22809, EVALUE 1.60e+00; NT HIT: AL163284.2, EVALUE 8.00e-12; EST_HUMAN HIT: BG185523.1, EVALUE 5.00e-14
gctgtacaggaagcatggcaacactgcttggcttctgggaaggcgtcaggaaacttacagtcatggtagaaggggaaacgggagcaggcacttcacacggccagagcaggaagaagagagattga

SEQ ID NO: 19706 - DNA, 100 bp, Homo sapiens
  MAP TO AC006537.1; EXPRESSED IN FETAL LIVER, SIGNAL = 2.1; EXPRESSED IN LUNG, SIGNAL = 5.6; EXPRESSED IN BRAIN, SIGNAL =   4; EXPRESSED IN BONE MARROW, SIGNAL = 4.5; EXPRESSED IN PLACENTA, SIGNAL = 3.5; EXPRESSED IN ADULT LIVER, SIGNAL = 4.6; NT HIT: U00454.1, EVALUE 3.20e-01; EST_HUMAN HIT: BF310804.1, EVALUE 7.30e+00
cagccattagggtaatgagccgcatgctgtcccccatccagcgccctggtaaccaaggaggggggcattgctcgctctgcagggctgcgttttcctcctc

SEQ ID NO: 19707 - DNA, 272 bp, Homo sapiens
  MAP TO AL109865.36; EXPRESSED IN BONE MARROW, SIGNAL = 3.3; EXPRESSED IN PLACENTA, SIGNAL = 4.5; EXPRESSED IN ADULT LIVER, SIGNAL = 3.7; EXPRESSED IN BRAIN, SIGNAL = 3.7; SWISSPROT HIT: Q01572, EVALUE 7.60e-01
actccagtgaattatcactcttggcctttctggaacctcactgaaaagctctttttctctgagcgtgtctttgactggactcagctcactttgcttaaaaagctctatcttcatggtgtttgtaaaaaatcgttcctgccgttgtttaacacagcagttgcctgaggcatgtgggcctaaaaagcagctgactaaaaagtaggaaatgtagagggctttgaaaagttccattatgttcctgggaatctcgaaggccacacatttgtgcaaga

SEQ ID NO: 19708 - DNA, 458 bp, Homo sapiens
  MAP TO AC024077.2; EXPRESSED IN BONE MARROW, SIGNAL = 2.8; EXPRESSED IN ADULT LIVER, SIGNAL = 3.8; EXPRESSED IN HEART, SIGNAL = 3.5; EXPRESSED IN HELA, SIGNAL = 2.6; EXPRESSED IN BRAIN, SIGNAL = 3.6; NT HIT: U04324.1, EVALUE 0.00e+00; SWISSPROT HIT: Q15238, EVALUE 5.00e-39; EST_HUMAN HIT: AL549146.1, EVALUE 0.00e+00
ggagaataaggatgtattagccttcacctgtgaacctaagagtgagagctacacctacatttggtggctaaatggtcagagcctcccggtcagtcccagggtaaagcgacccattgaaaacaggatcctcattctacccagtgtcacgagaaatgaaacaggaccctatgaatgtgaaatacgggaccgatatggtggcatccacagtgacccagtcaccctgaatgtcctctgtatcttttgttcctctgtgggccaggccaccagcttaaatccaaatgaccaggggccaggcctctcagtctctctccggtccaagtatagacaactttacttctggacatccaagctggccatgactccctgccctgggaaaacctgggtaggcacagccttaaccaagaatataaggggagtggacggtcttgtcgtgggagacttggggcccacatcttgtg

SEQ ID NO: 19709 - DNA, 75 bp, Homo sapiens
  MAP TO AJ239328.2; EXPRESSED IN FETAL LIVER, SIGNAL = 1.2; EXPRESSED IN PLACENTA, SIGNAL = 0.84; EXPRESSED IN ADULT LIVER, SIGNAL = 0.87; SWISSPROT HIT: P57721, EVALUE 6.00e-09; NT HIT: gi10092616, EVALUE 9.00e-35; EST_HUMAN HIT: BE879569.1, EVALUE 1.00e-34
tccccaccgaaaggtgccaccattccctaccgcccaaagcccgcctccacccctgtcatttttgcaggtggtcag

SEQ ID NO: 19710 - DNA, 198 bp, Homo sapiens
  MAP TO AC025811.1; EXPRESSED IN BRAIN, SIGNAL = 1.3; EXPRESSED IN LUNG, SIGNAL = 0.99; EXPRESSED IN PLACENTA, SIGNAL = 1.4; EXPRESSED IN ADULT LIVER, SIGNAL = 1.5; SWISSPROT HIT: Q9WU82, EVALUE 1.10e+00; NT HIT: gi7669480, EVALUE 2.00e-04; EST_HUMAN HIT: BF947003.1, EVALUE 2.00e-33
ccaggaggcctgcaggctctcctcctgcagctcaggcttcattgtctgatgggacgctggagtgctgctgtggcaactggggttcatgtaagatgtgagctgccagtgacaagctttatgttgtggcctctgcgtcagtggcagatggtaggcgtcaagagaggacatggccatcaggagagggcaagcagggtgctc

SEQ ID NO: 19711 - DNA, 398 bp, Homo sapiens
  MAP TO AC024561.4; EXPRESSED IN ADULT LIVER, SIGNAL = 0.44; EXPRESSED IN BRAIN, SIGNAL = 0.57; EST_HUMAN HIT: AL574028.1, EVALUE 0.00e+00; SWISSPROT HIT: P13117, EVALUE 1.00e-05; NT HIT: gi14723126, EVALUE 0.00e+00
gtgcacttacagagtgctacgatgaactggggaacagatatcagcttccagtgtattgcttggcaccgccaatcaacatgatagaggaaaagagcgacatagagactctggatattcctgagccaccacccaattctggatatgaatgtcagcttcgtttgcgcctttccacaggcaaagacctcaagcttgtggttcgcagcacagacacagtattccacatgaagagacggttgcatgcagcagagggagtggaaccaggtagtcagcggtggtttttttctggcagacctctcactgacaaaatgaagttcgaagagctgaagatcccaaaggactatgttgtacaggttatagtgagccaacctgtgcagaacccaacaccagtggagaactga

SEQ ID NO: 19712 - DNA, 78 bp, Homo sapiens
  MAP TO AC004461.3; EXPRESSED IN ADULT LIVER, SIGNAL = 0.76; EXPRESSED IN FETAL LIVER, SIGNAL = 0.83; EXPRESSED IN HELA, SIGNAL = 1.9; EST_HUMAN HIT: AV657037.1, EVALUE 1.30e+00; NT HIT: L77570.1, EVALUE 9.00e-35
aagaaaaacacaaagagcaactgcggcaggtgaacccgggtaaaggtgcggcaggacactatcagctggtgaacccgg

SEQ ID NO: 19713 - DNA, 190 bp, Homo sapiens
  MAP TO AC018555.4; EXPRESSED IN BRAIN, SIGNAL = 1.1; EXPRESSED IN LUNG, SIGNAL = 0.51; EXPRESSED IN PLACENTA, SIGNAL =   1; EXPRESSED IN ADULT LIVER, SIGNAL = 1.1; EST_HUMAN HIT: T85747.1, EVALUE 3.90e+00; SWISSPROT HIT: Q57252, EVALUE 1.50e+00; NT HIT: AJ009633.1, EVALUE 2.60e+00
atagacctgatttacagtctaagcacacagtaaagctgaaacaaatagtcaaaggaataaataggggcttgcaggaaatctttgggaaatatcagacctatcacttcctgaagcaggttccctcatgctgtgggctagcaggactgccaggtcaccgagcattctttgtacatcctgtttattggaggca

SEQ ID NO: 19714 - DNA, 135 bp, Homo sapiens
  MAP TO AC002471.5; EXPRESSED IN PLACENTA, SIGNAL = 0.48; EXPRESSED IN ADULT LIVER, SIGNAL = 0.43; EXPRESSED IN HELA, SIGNAL = 0.57; EXPRESSED IN FETAL LIVER, SIGNAL = 0.92; NT HIT: gi16178657, EVALUE 6.00e-19
gcctggctcagtcaccagcaggaggagggcaccctccacagattgcaggagaaggggaaggactcctcctttccctaggtgcacctccactgctgccaccaaggcctggtacagtacccgcaggttcctccccat

SEQ ID NO: 19715 - DNA, 173 bp, Homo sapiens
  MAP TO AC026404.4; EXPRESSED IN BRAIN, SIGNAL = 1.4; EXPRESSED IN LUNG, SIGNAL = 1.3; EXPRESSED IN PLACENTA, SIGNAL = 3.4; EXPRESSED IN ADULT LIVER, SIGNAL = 1.4; SWISSPROT HIT: O43100, EVALUE 1.50e+00; NT HIT: L29052.2, EVALUE 2.40e+00; EST_HUMAN HIT: AW592144.1, EVALUE 8.90e-01
ggtaaagcctaaatctgatgtcctttctcagctgagcctcagagggccaactgtccagatcatagctgaagagcagaggtttccaaatgtattttatccagagaccttcatccaaatggaagccgacatggaagctcagcatgtgaaatgggaaaatatgacaattcattcag

SEQ ID NO: 19716 - DNA, 127 bp, Homo sapiens
  MAP TO AC010645.5; EXPRESSED IN ADULT LIVER, SIGNAL = 0.9; EXPRESSED IN HEART, SIGNAL = 1.1; SWISSPROT HIT: O75820, EVALUE 3.00e-08; NT HIT: U71363.1, EVALUE 4.00e-63; EST_HUMAN HIT: BE670481.1, EVALUE 2.00e-65
ggcacagtgacttttgaagacgtggctgtgaaatttacccaggaggaatggaatctccttagtgaggctcagagatgcctgtaccgtgatgtgacgctggagaacctggcacttatgtcctccctgg

SEQ ID NO: 19717 - DNA, 147 bp, Homo sapiens
  MAP TO AC005570.1; EXPRESSED IN ADULT LIVER, SIGNAL = 0.51; EXPRESSED IN BRAIN, SIGNAL = 0.54; EXPRESSED IN HELA, SIGNAL = 0.49; SWISSPROT HIT: P98074, EVALUE 1.00e-07; NT HIT: K02435.1, EVALUE 1.00e-04; EST_HUMAN HIT: BG762809.1, EVALUE 3.00e-77
ggtgattctgggggacctctgacctgcctgcagtctgggagctgggtcctggtgggcgtggtgagctggggcaagggttgtgccctgcccaaccgtccaggggtctacaccagtgtggccacatatagcccctggattcaggctcgc

SEQ ID NO: 19718 - DNA, 186 bp, Homo sapiens
  MAP TO AC008563.4; EXPRESSED IN PLACENTA, SIGNAL = 1.1; EXPRESSED IN ADULT LIVER, SIGNAL = 0.86; EST_HUMAN HIT: AL138393.1, EVALUE 1.00e-100; SWISSPROT HIT: P45969, EVALUE 5.00e-01; NT HIT: gi16158809, EVALUE 1.00e-100
ctcaaaaacatcatcatggttaacaatatgcttcaagttctcagaggctttcatatttgcagtcactggtaaactcccaggactaatctcagcttcaggttcactgatcttctgtacagagtttcctatcatatatttttctctttcatcaactttgctttttactgtagtagtactttctgaggt

SEQ ID NO: 19719 - DNA, 330 bp, Homo sapiens
  MAP TO AC003004.1; EXPRESSED IN PLACENTA, SIGNAL =  11; EXPRESSED IN ADULT LIVER, SIGNAL = 6.9; EXPRESSED IN HEART, SIGNAL =  13; EST_HUMAN HIT: AW500018.1, EVALUE 1.00e-112; SWISSPROT HIT: P49641, EVALUE 1.00e-36; NT HIT: gi5540099, EVALUE 1.00e-112
cgcaggtgggcttccaggactcggtctaagctcttgtagaagggccgggaagtgtaatagcctgtccagtaatgatcctcccggtccgcataggagaagaaatccccgctcagcacaggaaaccctggaggccgggcccctggctccacccctgtcctcttgtacagggcatcaaaatagtcagaaagagtgccaaactgggcctgtgggaaccccaaaaacccactcccatcagttctagagcctcctgcaaattgtggccacagtgctgcagttgggggtgaggcaggggctctggcctcagaagcaggaactgtacatcctgccatt

SEQ ID NO: 19720 - DNA, 518 bp, Homo sapiens
  MAP TO AC004189.1; EXPRESSED IN PLACENTA, SIGNAL = 0.4; EXPRESSED IN ADULT LIVER, SIGNAL = 0.68; SWISSPROT HIT: Q02084, EVALUE 1.00e-26; NT HIT: gi14761248, EVALUE 0.00e+00; EST_HUMAN HIT: H59224.1, EVALUE 6.00e-63
ctcacatttctctagaccctcagacttcccaccccaagctcctcttgtccgaggaccaccagcgagctcagttctcctacaaatggcagaactcaccagacaacccccagcgttttgaccgggccacctgtgttctggcccacactggcatcacaggggggagacacacgtgggtggtgagtatagacctggcccatgggggcagctgcaccgtgggcgtggtgagcgaggatgtgcagcggaagggggagcttcggctgcggccagaggagggggtgtgggctgtgaggctggcttggggcttcgtctcggctctgggctccttccccacacggctgaccctgaaggagcagccccggcaggtgagggtgtctcttgactatgaggtgggctgggtgaccttcaccaacgctgtcacccgagagcccatctacaccttcactgcctccttcactaggaaggtcattcccttctttgggctctggggccgagggtccagtttctccctgagctcctga

SEQ ID NO: 19721 - DNA, 531 bp, Homo sapiens
  MAP TO AC025182.2; EXPRESSED IN LUNG, SIGNAL = 0.61; EXPRESSED IN BONE MARROW, SIGNAL = 1.1; EXPRESSED IN PLACENTA, SIGNAL = 1.3; EXPRESSED IN ADULT LIVER, SIGNAL =   1; SWISSPROT HIT: P11365, EVALUE 1.00e-04; NT HIT: AJ298105.1, EVALUE 2.00e-12; EST_HUMAN HIT: AA190755.1, EVALUE 1.00e-08
ttgaaggacagctagtcctaaagtacaagtttattactcaggcagcccctgatattagaagaaaattacagaaacaggcaataggaccagacagtattctggagaacctcctcagggtagccacctcggtcttttacagcagggatcgggaggaggcccaggaaaaagagaggaagcacaggagaaggatggaatctctgatggctgctttagaggtctgtaaagtacaggatccactaattgctatccatgtggcaaaccagggcactttaagaaggactgtcctggcagtaagaagccacctcgaccctgtccagcctgtggcaaggacaactagaggtcggactgcctgcagagacggagagacatctccgtccagaactggtctcccaaatgctccagcagaactgatgggtcccagggctcaattcctcaactctagtggcccaaactgccgttacgcccaggagccctgggtgattctggaaattgaaggaaggagggtagacctccttctggacactggagctg

SEQ ID NO: 19722 - DNA, 81 bp, Homo sapiens
  MAP TO AC004004.1; EXPRESSED IN ADULT LIVER, SIGNAL = 2.9; EXPRESSED IN HEART, SIGNAL = 3.4; EXPRESSED IN LUNG, SIGNAL = 3.1; EXPRESSED IN BRAIN, SIGNAL = 2.8; EXPRESSED IN FETAL LIVER, SIGNAL = 2.9; EXPRESSED IN BONE MARROW, SIGNAL = 1.9; NT HIT: L78810.1, EVALUE 3.00e-19; EST_HUMAN HIT: AL557222.1, EVALUE 5.00e-22
gcctcagaagtcatgctgtgtccggaatgggtgggtgtcttggtctcactgacttcaagaatgaagccgcggaccctcgcg

SEQ ID NO: 19723 - DNA, 130 bp, Homo sapiens
  MAP TO AC007796.1; EXPRESSED IN FETAL LIVER, SIGNAL = 0.55; EXPRESSED IN PLACENTA, SIGNAL = 0.64; EXPRESSED IN ADULT LIVER, SIGNAL = 0.62; NT HIT: AL163227.2, EVALUE 2.00e-34; EST_HUMAN HIT: AI831462.1, EVALUE 7.00e-44
atgtgggaaagtttggaacttcctagagacttgttgaatggctttgcccaaaatgctgatatggacaataaaatccaggctgaggtggtctcagctggagatgaggaacttgttgggaactggatcaagg

SEQ ID NO: 19724 - DNA, 171 bp, Homo sapiens
  MAP TO AC005786.1; EXPRESSED IN LUNG, SIGNAL = 1.4; EXPRESSED IN FETAL LIVER, SIGNAL = 0.94; EXPRESSED IN BONE MARROW, SIGNAL = 0.73; EXPRESSED IN PLACENTA, SIGNAL = 0.42; EXPRESSED IN ADULT LIVER, SIGNAL = 0.4; EST_HUMAN HIT: BG680236.1, EVALUE 2.00e-91; SWISSPROT HIT: Q9XTQ7, EVALUE 1.70e-01
cgtgtggggaccgatgaggtcggccgtcatggccagcgaggtgacgaggatggtggcacagccagcacccagcagcacagccgctgcgtacacggccacacccagtccctccgccagcgccacccaggcggcaaaggccaggatcaccaggaggcctgagaagtaggtcat

SEQ ID NO: 19725 - DNA, 122 bp, Homo sapiens
  MAP TO AC010593.4; EXPRESSED IN BRAIN, SIGNAL = 0.95; EXPRESSED IN PLACENTA, SIGNAL = 0.69; EXPRESSED IN ADULT LIVER, SIGNAL = 0.89; NT HIT: AF020503.1, EVALUE 1.00e-01; EST_HUMAN HIT: BF106793.1, EVALUE 2.30e+00; SWISSPROT HIT: Q62885, EVALUE 5.30e-01
aaaggccccggcgcagtgccccctgctggtgagtggcagccaggcgcgtgcgtcatgtcagtgatggacacagtgggtccctttgctgacacggaccttgggggtgatgctgagcctgccag

SEQ ID NO: 19726 - DNA, 204 bp, Homo sapiens
  MAP TO AC005947.1; EXPRESSED IN ADULT LIVER, SIGNAL = 0.85; EXPRESSED IN LUNG, SIGNAL = 0.63; SWISSPROT HIT: P11465, EVALUE 5.00e-28; NT HIT: gi4506168, EVALUE 1.00e-111; EST_HUMAN HIT: BG571293.1, EVALUE 1.00e-111
caatgactctgattgtcaaggatgtggagctttcctcgccagtggctgagttacgagcagagcaagcatagagcccattatgctttggagtaatctgagggataaagagcttttgtcctgatagctgaaacttcccattaattgtccaagaatactgtgctggtgggttagagtttgcgaagcaggacaagtcgaggttctctc

SEQ ID NO: 19727 - DNA, 131 bp, Homo sapiens
  MAP TO AC025467.3; EXPRESSED IN BONE MARROW, SIGNAL = 1.5; EXPRESSED IN PLACENTA, SIGNAL = 1.3; EXPRESSED IN ADULT LIVER, SIGNAL = 1.3; EXPRESSED IN BRAIN, SIGNAL = 1.3; EXPRESSED IN LUNG, SIGNAL = 0.95; EST_HUMAN HIT: BG489430.1, EVALUE 3.00e-03
aaattctgcagaagaccagtgagaggtttggattggagagagcatgggggagtttagcatctgcgatgcggtacgagaatcaaaccgcgctgctagattcacccaagcaccctctgcatattgacggcagg

SEQ ID NO: 19728 - DNA, 201 bp, Homo sapiens
  MAP TO AC006138.1; EXPRESSED IN PLACENTA, SIGNAL = 0.58; EXPRESSED IN ADULT LIVER, SIGNAL = 0.77; EXPRESSED IN LUNG, SIGNAL = 1.7; EXPRESSED IN FETAL LIVER, SIGNAL = 0.68; EXPRESSED IN BONE MARROW, SIGNAL = 0.71; EST_HUMAN HIT: BG188405.1, EVALUE 1.00e-103; SWISSPROT HIT: Q9R1R0, EVALUE 7.30e+00; NT HIT: gi14752388, EVALUE 6.00e-94
agaaagataagaagaaacgtaaagatgaaggaaaaagtcgaactacccttcctgagcgacctttgacagaggtgaaggctgagacccgggctgaggaggccccagagaagaagagggagaagcccaagtctcttcgcaccacagcacccagtcatgccaagttccgttccactggtaagactggcggctggcctctggagg

SEQ ID NO: 19729 - DNA, 138 bp, Homo sapiens
  MAP TO AC006565.3; EXPRESSED IN ADULT LIVER, SIGNAL = 2.1; EXPRESSED IN PLACENTA, SIGNAL = 3.1; EXPRESSED IN BRAIN, SIGNAL = 2.5; EXPRESSED IN LUNG, SIGNAL = 2.8; EXPRESSED IN HELA, SIGNAL = 2.4; EXPRESSED IN FETAL LIVER, SIGNAL = 3.6; EST_HUMAN HIT: BG400025.1, EVALUE 6.90e-01; SWISSPROT HIT: P26810, EVALUE 3.00e-01; NT HIT: gi15208634, EVALUE 2.00e-28
cctctaccgagtactaacaaaaaggagagcccgaacaagatttctgccaattcccccagtctccttaacctactcagaaaattgttcagcccagggctccttcagaggaatgtctggaatggccacctcctcagccca

SEQ ID NO: 19730 - DNA, 232 bp, Homo sapiens
  MAP TO AC002103.1; EXPRESSED IN ADULT LIVER, SIGNAL =   1; EXPRESSED IN HEART, SIGNAL = 1.4; EXPRESSED IN BRAIN, SIGNAL = 1.1; EST_HUMAN HIT: BF516212.1, EVALUE 2.00e-02; SWISSPROT HIT: Q9VNA8, EVALUE 5.30e-01; NT HIT: gi16162782, EVALUE 1.30e-02
atgctggtcattggatttgcggcccaccctaagctgggatggcctcttcttgaggtccttacctcagttacatctgcaaagaccgttttcctaaatcaggtcacgtttggaggttctgggagtcaggacaagataggggacgtggtgcacagtccagcctctgcactgcttactctttcttccgtccagacggtcacggggtgcttggtgcctctgtgccctgggctccctg

SEQ ID NO: 19731 - DNA, 113 bp, Homo sapiens
  MAP TO AC024124.1; EXPRESSED IN BRAIN, SIGNAL = 1.7; EXPRESSED IN FETAL LIVER, SIGNAL = 2.8; EXPRESSED IN HELA, SIGNAL = 2.4; EXPRESSED IN PLACENTA, SIGNAL = 2.8; EXPRESSED IN BONE MARROW, SIGNAL = 1.5; EXPRESSED IN ADULT LIVER, SIGNAL =   2; NT HIT: AF283320.1, EVALUE 3.00e-57; EST_HUMAN HIT: AI123166.1, EVALUE 1.40e-01; SWISSPROT HIT: gi115305, EVALUE 2.10e+00
ctgcctctgctcctcaaggaggaacagagggagtaggaaaggccatcccaggaggcccagcaccccatgacctggctctggggccttgtgggtttatggattcccagtgctga

SEQ ID NO: 19732 - DNA, 189 bp, Homo sapiens
  MAP TO AC008149.14; EXPRESSED IN PLACENTA, SIGNAL = 3.6; EXPRESSED IN HEART, SIGNAL = 5.2; EXPRESSED IN ADULT LIVER, SIGNAL = 2.4; EXPRESSED IN FETAL LIVER, SIGNAL = 4.6; EXPRESSED IN BRAIN, SIGNAL = 2.2; SWISSPROT HIT: P51592, EVALUE 1.50e+00
atgttcagtgccagcaaggacaaaaggtctgctggacagaagaggatgaggggttgtgaaagcttccaggtctccttctgcaacaacagagagaacccgtgtcttcagcttctcgtgagcaaaagacagttgcccacattatggggataccagagcccatcctttttccctctccacctcatgctgaag

SEQ ID NO: 19733 - DNA, 203 bp, Homo sapiens
  MAP TO AC004780.1; EXPRESSED IN ADULT LIVER, SIGNAL = 0.5; EXPRESSED IN BRAIN, SIGNAL = 0.47; EST_HUMAN HIT: AL045936.1, EVALUE 4.20e+00; SWISSPROT HIT: O27607, EVALUE 5.50e+00; NT HIT: AF022463.1, EVALUE 1.80e-01
acgctaggccggatttccagagtgcctcatttcacccatccgggcatcctggtcacctgcagcacctccttcaccaccatctaccggatgcttcacacgcccctggatttggcagccagggacaccaagagtgtgctgattcagaccttccttggcaacactgaccacaagatcacaggtgaatccaatcaacaatctcagcc

SEQ ID NO: 19734 - DNA, 265 bp, Homo sapiens
  MAP TO AC006506.1; EXPRESSED IN ADULT LIVER, SIGNAL = 2.1; EXPRESSED IN BRAIN, SIGNAL = 2.5; EXPRESSED IN LUNG, SIGNAL = 1.3; EXPRESSED IN FETAL LIVER, SIGNAL = 1.5; EXPRESSED IN HELA, SIGNAL = 2.3; EXPRESSED IN PLACENTA, SIGNAL = 2.3; EST_HUMAN HIT: AV730663.1, EVALUE 9.00e-02; SWISSPROT HIT: P15368, EVALUE 2.10e+00; NT HIT: AF029308.1, EVALUE 1.00e-03
cctgacagcaagaaccttgtgggcggtgctgtcttcagcagaatccaactcacactctctctgggccctgtcctctcctacgcgggcttcgtgctggtgacttgggacccgatgttttgaaatgtaggttttattattattcagatatggcgtggccaacagggcaggagacaactgagattgaagggacagtttgttactcacagttcccaagaggaagacatgccatgccacgtggggatcacatggagaagcaccaggattc

SEQ ID NO: 19735 - DNA, 186 bp, Homo sapiens
  MAP TO AC008821.4; EXPRESSED IN HEART, SIGNAL = 4.5; EXPRESSED IN ADULT LIVER, SIGNAL =   4; EXPRESSED IN BRAIN, SIGNAL = 3.2; EXPRESSED IN PLACENTA, SIGNAL = 6.3; EXPRESSED IN BONE MARROW, SIGNAL = 2.5; SWISSPROT HIT: P10809, EVALUE 5.00e-16; NT HIT: gi14730099, EVALUE 5.00e-23; EST_HUMAN HIT: AV727748.1, EVALUE 7.00e-91
tcaagacttgtcaccatttcctttaaagagcatagcatcacctttggtcccaatgacctctccaacttttcctgtgttatgaggcctacccccttctccaaacactgcaccaccaacagcaagagccatatctttaagctggttctttctattgtcaacaaacctggagcttttactgctataacc

SEQ ID NO: 19736 - DNA, 79 bp, Homo sapiens
  MAP TO AC007093.3; EXPRESSED IN BRAIN, SIGNAL = 4.1; EXPRESSED IN LUNG, SIGNAL = 2.9; EXPRESSED IN FETAL LIVER, SIGNAL = 4.9; EXPRESSED IN PLACENTA, SIGNAL = 4.8; EXPRESSED IN HEART, SIGNAL =  11; EXPRESSED IN ADULT LIVER, SIGNAL = 3.4; NT HIT: AB031422.1, EVALUE 9.40e-01; EST_HUMAN HIT: AI902846.1, EVALUE 1.00e-13
attttagcagagttcaggctcctcccataatcctgttcttgtggcctttcgtcagtcttacaaaggcagtttttggtcc

SEQ ID NO: 19737 - DNA, 239 bp, Homo sapiens
  MAP TO AC002321.1; EXPRESSED IN BONE MARROW, SIGNAL = 0.55; EXPRESSED IN ADULT LIVER, SIGNAL = 0.58; SWISSPROT HIT: P05465, EVALUE 4.80e-01
atgaaggcttctgtctgcctcgttcacctgagatgcccagcgctcgtggtaggagccagggagaagccaaggcctacatcctcggcactggccgtgccctctggctcatccagccccgcgccttccaaaccaaccgggccccaggacggggagcctggtaaacacacagacgtcccgacggcagtgcagctgcacgggccctgcaatctgatggcttcacaagcggcccctctaaccag

SEQ ID NO: 19738 - DNA, 209 bp, Homo sapiens
  MAP TO AC006147.2; EXPRESSED IN HELA, SIGNAL = 0.73; EXPRESSED IN ADULT LIVER, SIGNAL = 0.55; NT HIT: S70572.1, EVALUE 2.00e-20; EST_HUMAN HIT: AV686737.1, EVALUE 2.00e-11; SWISSPROT HIT: P10272, EVALUE 3.00e-13
gatcagacaatggtcctgcatttgtggcagaagtagtactacagctgactcagcttttaaagatcaaatggaaactgcacacagcctactgaccacagagttcagggaaggcggaatggatgaaccagacactcaaacagctactaaaaatgttttgccaggaaactcacttacgatgggatcaggtcttgcccatggtcctcctccag

SEQ ID NO: 19739 - DNA, 239 bp, Homo sapiens
  MAP TO AC011452.5; EXPRESSED IN BRAIN, SIGNAL = 0.82; EXPRESSED IN PLACENTA, SIGNAL = 0.71; EXPRESSED IN HEART, SIGNAL = 0.96; EXPRESSED IN ADULT LIVER, SIGNAL = 0.85; SWISSPROT HIT: O09046, EVALUE 3.00e-14; NT HIT: AF293462.1, EVALUE 0.00e+00; EST_HUMAN HIT: AL554402.1, EVALUE 0.00e+00
ccctgcacctcctcgtcctcgtccccatcctcctcagcctggtggcctcccaggactggaaggctgaacgcagccaagaccccttcgagaaatgcatgcaggatcctgactatgagcagctgctcaaggtggtgacctgggggctcaatcggaccctgaagccccagagggtgattgtggttggcgctggtgtggccgggctggtggccgccaaggtgctcagcgatgctggacacaag

SEQ ID NO: 19740 - DNA, 154 bp, Homo sapiens
  MAP TO AC026796.2; EXPRESSED IN PLACENTA, SIGNAL = 0.95; EXPRESSED IN HEART, SIGNAL = 0.96; EXPRESSED IN ADULT LIVER, SIGNAL = 0.82; SWISSPROT HIT: P43469, EVALUE 7.60e+00; NT HIT: AF285175.1, EVALUE 2.10e+00; EST_HUMAN HIT: AA907002.1, EVALUE 7.80e-01
tcaagtgcattgctgaggaatggacaatagcctctgctgatccctctgatctaagctgctgctggcacggcagcattggaggctacatccattctcagcacatttggagtgcaatgatgctgcaggaacaaatcgcccaccttccaaatgccct

SEQ ID NO: 19741 - DNA, 153 bp, Homo sapiens
  MAP TO AC005680.1; EXPRESSED IN BRAIN, SIGNAL = 1.3; EXPRESSED IN PLACENTA, SIGNAL = 1.6; EXPRESSED IN HEART, SIGNAL = 2.3; EXPRESSED IN ADULT LIVER, SIGNAL = 1.5; SWISSPROT HIT: Q91736, EVALUE 2.60e+00; NT HIT: AE008686.1, EVALUE 5.20e-01; EST_HUMAN HIT: H72751.1, EVALUE 5.00e-08
ggccaaatcttctcatattgggaaaggaaattagctttgcttcaaagcactttctgaagagcaatttactaatgagcttaggaattctctgccctcataaccctcctatacattacctgaacgcagagaaacttgagacgttcagcaagggag

SEQ ID NO: 19742 - DNA, 81 bp, Homo sapiens
  MAP TO AL021812.1; EXPRESSED IN PLACENTA, SIGNAL = 0.82; EXPRESSED IN ADULT LIVER, SIGNAL = 0.69; NT HIT: gi13518298, EVALUE 6.20e-02
tcctgtttcctcagggctttcactgaccttatatgttggggtatattctgaaagtgagtaactttgggaagttttagcagc

SEQ ID NO: 19743 - DNA, 150 bp, Homo sapiens
  MAP TO AC007023.3; EXPRESSED IN ADULT LIVER, SIGNAL = 1.1; EXPRESSED IN BRAIN, SIGNAL = 1.2; EXPRESSED IN BONE MARROW, SIGNAL = 0.99; SWISSPROT HIT: P15710, EVALUE 5.80e+00; NT HIT: AE000822.1, EVALUE 3.30e-02; EST_HUMAN HIT: BG535106.1, EVALUE 1.20e-02
ttgggtaacacgacggaccccagtaaagacttcgacccacatgtctatctctttctgtcttcttcccaaccgccagttgagagtacatgtcctggatgactccccttcctcctgctggccctgaggtgtgctgccctcttctttctgggt

SEQ ID NO: 19744 - DNA, 174 bp, Homo sapiens
  MAP TO AC010320.7; EXPRESSED IN ADULT LIVER, SIGNAL = 1.7; EXPRESSED IN FETAL LIVER, SIGNAL = 2.3; EXPRESSED IN BONE MARROW, SIGNAL = 1.8; EST_HUMAN HIT: BF568203.1, EVALUE 3.00e-93; SWISSPROT HIT: P54613, EVALUE 5.00e-27; NT HIT: gi14754632, EVALUE 2.00e-93
cagctgtccagccaggaggggcatgtactcaatgatggccagccgcacccgccacttggcgtcctcagccagctccacaatggcagggagcagggactgggacagctgccggatgccaatcacctcgttcacacagtccaggttagagatgatgttcagccgtacctcagggca

SEQ ID NO: 19745 - DNA, 126 bp, Homo sapiens
  MAP TO AC010328.4; EXPRESSED IN HELA, SIGNAL = 1.2; EXPRESSED IN BRAIN, SIGNAL = 1.7; EXPRESSED IN BONE MARROW, SIGNAL = 1.5; EXPRESSED IN PLACENTA, SIGNAL = 1.4; EXPRESSED IN ADULT LIVER, SIGNAL = 1.8
ttagggtcttttattggccacgtgggtctgctgagcctcagacagggatcccatagtcagccagatgtgtttctgggtggacttgcgcttgcccttccacaggttggtaagcagagtggtctccat

SEQ ID NO: 19746 - DNA, 164 bp, Homo sapiens
  MAP TO AC008997.5; EXPRESSED IN BRAIN, SIGNAL = 0.86; EXPRESSED IN FETAL LIVER, SIGNAL = 0.74; EXPRESSED IN BONE MARROW, SIGNAL = 1.3; EXPRESSED IN ADULT LIVER, SIGNAL = 0.87; NT HIT: gi14762990, EVALUE 2.00e-87; EST_HUMAN HIT: BG571742.1, EVALUE 2.00e-87; SWISSPROT HIT: P05554, EVALUE 1.20e-02
ctggagtcagggtacttggtgagcgtggccaggctgctggtgtacatgtggccgcccacatcgatgtgcacaggtgcattggacttggtgagctgggctggcagggggatgccctgggcagccaggggagacacaggcgaccgggtgagagacagccgggacat

SEQ ID NO: 19747 - DNA, 196 bp, Homo sapiens
  MAP TO AF230666.1; EXPRESSED IN ADULT LIVER, SIGNAL = 2.3; EXPRESSED IN HEART, SIGNAL = 1.5; EXPRESSED IN BRAIN, SIGNAL = 2.2; EXPRESSED IN BONE MARROW, SIGNAL = 1.4; EXPRESSED IN PLACENTA, SIGNAL = 2.5; NT HIT: gi14748787, EVALUE 2.00e-65; EST_HUMAN HIT: AA261905.1, EVALUE 1.00e-106; SWISSPROT HIT: P24604, EVALUE 7.30e+00
gtcagaggtggagtgcaaaatatcgttatgataaggagtggttgaataatgggagaatgtgcgggttatcatttttcaaagaaaattattctcatctcaatgccaaaaagatagtttctacacatcacctgcttgctgatgtctatggtgttacagaagtgctacacgggctacagctgaagattggaatactaaa

SEQ ID NO: 19748 - DNA, 180 bp, Homo sapiens
  MAP TO AL121892.9; EXPRESSED IN BRAIN, SIGNAL = 0.38; EXPRESSED IN FETAL LIVER, SIGNAL = 0.56; EXPRESSED IN BONE MARROW, SIGNAL = 0.57; EXPRESSED IN ADULT LIVER, SIGNAL = 0.68; NT HIT: Y09472.1, EVALUE 7.00e-04; EST_HUMAN HIT: BG827894.1, EVALUE 9.30e-01; SWISSPROT HIT: P56846, EVALUE 1.50e+00
ttaggcagtgcagcatggtcccccatccgtggcagctgtagcagcagcatcactttggaacttgtcagaagggcagattctcaggcccatccagacctcctgaatcaggaactctttgtaggcccagcctcctgtgttgtcataagccctccaagtgattctcattgcactcaaggtgac

SEQ ID NO: 19749 - DNA, 171 bp, Homo sapiens
  MAP TO AC010336.5; EXPRESSED IN BRAIN, SIGNAL = 1.3; EXPRESSED IN BONE MARROW, SIGNAL = 2.1; EXPRESSED IN PLACENTA, SIGNAL = 1.3; EXPRESSED IN HEART, SIGNAL =   1; EXPRESSED IN ADULT LIVER, SIGNAL = 1.5; SWISSPROT HIT: O43615, EVALUE 4.00e-26; NT HIT: AF026030.1, EVALUE 4.00e-79; EST_HUMAN HIT: BF982989.1, EVALUE 9.00e-75
tccaaatcatattcttctggaaacagaaaaggctttctgtccggcttgctagataatgtcaaacaagaattagccaaaaacaaagaaatgaaagaaagtataaaaaaattccgtgacgaggccagaaggctagaagaatcagacgtgctccaggaggccagaaggaaatac

SEQ ID NO: 19750 - DNA, 472 bp, Homo sapiens
  MAP TO AC010979.3; EXPRESSED IN HEART, SIGNAL = 1.7; EXPRESSED IN ADULT LIVER, SIGNAL = 1.7; EXPRESSED IN HELA, SIGNAL = 2.1; EXPRESSED IN BRAIN, SIGNAL = 2.4; EXPRESSED IN BONE MARROW, SIGNAL = 2.4; SWISSPROT HIT: P23795, EVALUE 4.00e-16; NT HIT: gi16162880, EVALUE 0.00e+00; EST_HUMAN HIT: BI833967.1, EVALUE 0.00e+00
atgttgcgtccccagggactgctatggctccctttgttgttcacctctgtctgtgtcatgttaaactccaatgttcttctgtggataactgctcttgccatcaagttcaccctcattgacagccaagcacagtatccagttgtcaacacaaattatggtaaaatccagggcctaagaacaccattacccagtgagatcttgggtccagtggagcagtacttaggggtcccctatgcctcacccccaactggagagaggcggtttcagccaccagaatccccatcctcctggactggcatccgaaatgctactcagttttctgctgtgtgcccccagcacctggatgaaagattcttattgcatgacatgctgcccatctggtttaccaccagtttggatactttgatgacctatgttcaagatcaaaatgaagactgcctttacttaaacatctatgtgcccatggaagatg

SEQ ID NO: 19751 - DNA, 403 bp, Homo sapiens
  MAP TO AL022579.1; EXPRESSED IN BONE MARROW, SIGNAL = 0.9; EXPRESSED IN PLACENTA, SIGNAL = 1.8; EXPRESSED IN ADULT LIVER, SIGNAL = 1.9; EXPRESSED IN HEART, SIGNAL = 1.3; EXPRESSED IN BRAIN, SIGNAL =   1; EXPRESSED IN FETAL LIVER, SIGNAL = 1.5; EST_HUMAN HIT: BF971469.1, EVALUE 2.00e-90; SWISSPROT HIT: P31792, EVALUE 2.00e-11; NT HIT: AL163246.2, EVALUE 1.00e-111
atggctgacctggctactgccactgctgagtgcccaatttgccagcagcagaaaccaacactgaaccctcaatatggcatcattctttggggtgatcagccagttatctggtggcaggttgattatatcggacttcttccatcatggaaacggcagagatttgtcctcactgaaataaacacttactccagatatgggttttcctatcctgcacccaatgcttctgccaagactaccatccgtgggctcacagaatgccttattcaccatcatggtattccacacagcactgcctctgaccgaggcactcactttacggctaaagaagtgcagcagtgggctcatgctcatggaattcactggccttaccatgttcctcatcatcctgaagcagctggattga

SEQ ID NO: 19752 - DNA, 78 bp, Homo sapiens
  MAP TO AC007162.1; EXPRESSED IN ADULT LIVER, SIGNAL = 0.88; EXPRESSED IN LUNG, SIGNAL = 0.52; EXPRESSED IN FETAL LIVER, SIGNAL = 0.46; EXPRESSED IN BRAIN, SIGNAL = 0.85; EXPRESSED IN PLACENTA, SIGNAL = 0.83; NT HIT: AB012723.1, EVALUE 2.30e-01; EST_HUMAN HIT: AV728495.1, EVALUE 5.30e+00; SWISSPROT HIT: P15943, EVALUE 8.20e+00
cttagacctgggaaacgaggttttgacttcactgctctgcatggcctggtgcagggctcccgtgagcagacggcccat

SEQ ID NO: 19753 - DNA, 93 bp, Homo sapiens
  MAP TO AC008886.4; EXPRESSED IN BRAIN, SIGNAL = 0.87; EXPRESSED IN PLACENTA, SIGNAL = 0.62; EXPRESSED IN ADULT LIVER, SIGNAL = 0.86; EST_HUMAN HIT: BF802715.1, EVALUE 1.10e-01
ctgtttcttgttattgttgactgctctatagatactccaggcattgttagagggacagtttcttctctttactgtgttttccaccctccccat

SEQ ID NO: 19754 - DNA, 196 bp, Homo sapiens
  MAP TO AC009510.9; EXPRESSED IN PLACENTA, SIGNAL = 0.73; EXPRESSED IN ADULT LIVER, SIGNAL = 1.1; EXPRESSED IN FETAL LIVER, SIGNAL = 0.41; NT HIT: AL161555.2, EVALUE 1.70e-01; EST_HUMAN HIT: AI022484.1, EVALUE 4.00e+00; SWISSPROT HIT: Q01628, EVALUE 2.20e-01
ttgatgaagacaagcatggtgacctccagccattgtttgaagatgcagagccacaagattgagggacagtgggtttccgaatcatagtgtagagatgaggtgccactaatcagggacatttgtttcagacttgatgtgaacaagaaataagcttctactgtgtgtgagccactgttcatggctatggttatcttaa

SEQ ID NO: 19755 - DNA, 124 bp, Homo sapiens
  MAP TO AL096791.12; EXPRESSED IN ADULT LIVER, SIGNAL =  14; EXPRESSED IN PLACENTA, SIGNAL =  13; EXPRESSED IN HEART, SIGNAL = 3.5; EXPRESSED IN BRAIN, SIGNAL =  13; NT HIT: gi15308397, EVALUE 9.00e-64; EST_HUMAN HIT: AW949594.1, EVALUE 1.00e-63; SWISSPROT HIT: Q04735, EVALUE 4.00e-18
caaagtcagccagcttgagctctcccctctcgttgatgagcaggttctggggcttgaggtctcggtgtagcaccttctgccggtggcagtaggccaggccacggagcagctggaacaggaacag

SEQ ID NO: 19756 - DNA, 184 bp, Homo sapiens
  MAP TO AC011358.5; EXPRESSED IN ADULT LIVER, SIGNAL = 0.98; EXPRESSED IN LUNG, SIGNAL = 0.98; EXPRESSED IN BRAIN, SIGNAL = 1.1; EXPRESSED IN BONE MARROW, SIGNAL = 0.54; EXPRESSED IN PLACENTA, SIGNAL = 0.89; SWISSPROT HIT: P23116, EVALUE 2.50e+00; NT HIT: AF070933.1, EVALUE 6.40e-01
ggatggtgatgatgatgatgatgattataatgatgatgatgatgatgatgataatgatgatgatgatgatgatcatgatgataatggaaaagaagatagaggaggaagaagaggagacaatcatgatgttggaggtagactccaatcttcagaatcagaagctcagggttggaaaggaccttaa

SEQ ID NO: 19757 - DNA, 283 bp, Homo sapiens
  MAP TO AL118558.2; EXPRESSED IN BRAIN, SIGNAL = 4.8; EXPRESSED IN BONE MARROW, SIGNAL = 3.8; EXPRESSED IN PLACENTA, SIGNAL = 3.9; EXPRESSED IN ADULT LIVER, SIGNAL = 3.5; EXPRESSED IN HEART, SIGNAL = 3.5; SWISSPROT HIT: Q14204, EVALUE 1.00e-49; NT HIT: U53530.1, EVALUE 0.00e+00; EST_HUMAN HIT: BF333718.1, EVALUE 1.00e-56
attacagagttggttcaccagagagatgttacaaggtccttgatcaaaagcaagattgacaacgccaaatcttttgaatggctcagccagatgcgattttactttgaccctaagcaaactgatgtgttacagcagttgtcaattcaaatggcaaatgccaaatttaactatggctttgagtacctgggtgttcaggacaaactggtccagacccccctcactgaccgctgctatttgacaatgacacaagccttggaggccaggctggggggttccccatttg

SEQ ID NO: 19758 - DNA, 263 bp, Homo sapiens
  MAP TO AL118558.2; EXPRESSED IN ADULT LIVER, SIGNAL = 2.7; EXPRESSED IN HELA, SIGNAL = 6.4; EXPRESSED IN FETAL LIVER, SIGNAL = 4.8; NT HIT: gi15300984, EVALUE 1.00e-120; EST_HUMAN HIT: BE794473.1, EVALUE 1.00e-120; SWISSPROT HIT: Q9JHU4, EVALUE 6.00e-38
ggcaggcagaacatctcaccggataagatcccgtggtctgcactaaagaccttaatggcccagtccatttatggcgggcgcgtggacaacgagtttgaccagcgtctgctcaacaccttcctggagcgcctgttcacaaccaggagtttcgacagtgagtttaagctggcatgcaaggtcgacggacataaagacattcaaatgccagatggcatcaggtatgctgctgcctgctggaatggagacagttgtgatgtcagggc

SEQ ID NO: 19759 - DNA, 366 bp, Homo sapiens
  MAP TO AC004784.1; EXPRESSED IN ADULT LIVER, SIGNAL = 0.74; EXPRESSED IN FETAL LIVER, SIGNAL = 1.3; NT HIT: M69245.1, EVALUE 0.00e+00; EST_HUMAN HIT: AL543776.1, EVALUE 0.00e+00; SWISSPROT HIT: Q9UQ72, EVALUE 1.00e-67
ggtataaggtgaaggtgaaatatccagttactcctctagtcccatcacctcgctttatgatgtgtaaggtgtaggatcctgcgtcctcccgggtgacattctggatcagcagggatgcattggaatatactgtttctcgtccactgtatgccggtccatatataattatttgaccgtctactacatatgatgtaatgtaatggtagaggtccctgatttgccctttgtaccagatgtagccagtaagattctggggcaaattgtggacaagtagaagaacatccttcccctcggacactttgggtggctgggcttcaatcatgacttgggcagtggtaggcaagttccagaagtttaaaagtaatg

SEQ ID NO: 19760 - DNA, 186 bp, Homo sapiens
  MAP TO AC011400.4; EXPRESSED IN HEART, SIGNAL =  22; EXPRESSED IN ADULT LIVER, SIGNAL =  20; EXPRESSED IN LUNG, SIGNAL =  21; EXPRESSED IN BRAIN, SIGNAL =  21; EXPRESSED IN BONE MARROW, SIGNAL =  22; EXPRESSED IN PLACENTA, SIGNAL =  21; EST_HUMAN HIT: AI828744.1, EVALUE 6.20e-02; SWISSPROT HIT: P21743, EVALUE 2.50e+00
attcctgaatcttccgctggccaattacacacttcctgctgggctccgcctggttacctcggtatgaatgatactccacactcactgactgatggccccataacaattgcaaccaactggacaagggcttctggttgctgtttgggggatacccggacacagctccactgctctcagtgtagtcat

SEQ ID NO: 19761 - DNA, 157 bp, Homo sapiens
  MAP TO AL109856.3; EXPRESSED IN ADULT LIVER, SIGNAL = 1.3; EXPRESSED IN LUNG, SIGNAL = 1.6; EXPRESSED IN FETAL LIVER, SIGNAL = 1.2; EXPRESSED IN BONE MARROW, SIGNAL = 1.3; EXPRESSED IN PLACENTA, SIGNAL = 1.7; NT HIT: gi16168506, EVALUE 5.40e-01; EST_HUMAN HIT: AI972543.1, EVALUE 3.00e-03
atggtgccagcatctgcttctggtgagctcagcaaactttcagtcgtagtggaaggcaaagcaggaccagacaactcatggcaagagagggagcacaagagaggggatgaggtaccaggatgctttttagtgatcagatctcattgtaacgaacaga

SEQ ID NO: 19762 - DNA, 148 bp, Homo sapiens
  MAP TO AL049840.4; EXPRESSED IN BONE MARROW, SIGNAL = 2.9; EXPRESSED IN BRAIN, SIGNAL = 2.9; EXPRESSED IN PLACENTA, SIGNAL = 2.1; EXPRESSED IN ADULT LIVER, SIGNAL = 2.7; EXPRESSED IN FETAL LIVER, SIGNAL = 2.6; EXPRESSED IN LUNG, SIGNAL = 3.1; EST_HUMAN HIT: AI733804.1, EVALUE 8.00e-78; SWISSPROT HIT: P21328, EVALUE 3.90e-01; NT HIT: AJ318887.1, EVALUE 5.00e-78
atgatattaactgttttcttgagcaacaatgaacagattttaacagaagttcctataacaccggaaacaacctgtcgagatgttgtagaattttgcaaggaacctggagaaggcagctgccatttagctgaagtgtggaggggaaatg

SEQ ID NO: 19763 - DNA, 267 bp, Homo sapiens
  MAP TO AC008625.4; EXPRESSED IN LUNG, SIGNAL = 0.48; EXPRESSED IN BRAIN, SIGNAL = 0.63; EXPRESSED IN ADULT LIVER, SIGNAL = 0.92; EST_HUMAN HIT: BG428944.1, EVALUE 8.00e-98; SWISSPROT HIT: P12021, EVALUE 8.30e-02; NT HIT: gi13487858, EVALUE 3.80e+00
tcaaaagcaaacaaggagcactggcctggacatgctgtggcaaaagactctcagccctggagaggcatcttgttcccattcagggacccagatggctgtctgggtggagccatagatgacccacatcacccagaagccaggtggtgtgatgtgagtcttgccagcaatgccacatggctcctcagtacctattccatttgagtctgtcacagtgcctgaccttccaccactggttacccgattcttgtgggtcaccgctgtcctcct

SEQ ID NO: 19764 - DNA, 212 bp, Homo sapiens
  MAP TO AL049856.1; EXPRESSED IN FETAL LIVER, SIGNAL = 1.9; EXPRESSED IN BONE MARROW, SIGNAL = 2.3; EXPRESSED IN PLACENTA, SIGNAL = 1.8; EXPRESSED IN ADULT LIVER, SIGNAL = 2.1; SWISSPROT HIT: P11035, EVALUE 5.60e-01
ctgaggttctcatctgtctcactgggtacacacctgaggttctgacctgtctcactggctacacgcctgaggttctgacctgtctcaacaggtacacgcttgaggttctgacctgtctcaccgggtacacgcctgaggttctgatctgtctcatcgggtacatgcctgaggttctgatctatctcattggcatacacctgaggttctgacat

SEQ ID NO: 19765 - DNA, 155 bp, Homo sapiens
  MAP TO AC026432.2; EXPRESSED IN BONE MARROW, SIGNAL = 0.9; EXPRESSED IN PLACENTA, SIGNAL = 0.81; EXPRESSED IN ADULT LIVER, SIGNAL = 0.8; NT HIT: U07807.1, EVALUE 8.30e+00; EST_HUMAN HIT: BF573713.1, EVALUE 3.10e+00; SWISSPROT HIT: Q03350, EVALUE 1.50e+00
ttagttgtgtcctggtgtccacttgcctgtggtttcttgccatgcaaaccctgattttccgtagggccccagtgtgcccagcctgggtgatggatcatcctggtctctgattttccactcgcccttgcagctggggagggccatgtcagccagtt

SEQ ID NO: 19766 - DNA, 121 bp, Homo sapiens
  MAP TO AL021366.1; EXPRESSED IN PLACENTA, SIGNAL = 1.4; EXPRESSED IN HEART, SIGNAL = 1.2; EXPRESSED IN ADULT LIVER, SIGNAL = 1.9; NT HIT: gi13435395, EVALUE 5.00e-62; EST_HUMAN HIT: BE547724.1, EVALUE 8.00e-62; SWISSPROT HIT: O43189, EVALUE 3.00e-18
aggggaggtgccctgaagaagggcccctatgcccgggccatgctgggtatgaagctttctctgccatatggactgaaggggctggactgggatgctggacatctgagcaaccgacagcaga

SEQ ID NO: 19767 - DNA, 278 bp, Homo sapiens
  MAP TO AC009145.4; EXPRESSED IN ADULT LIVER, SIGNAL = 0.73; EXPRESSED IN FETAL LIVER, SIGNAL = 0.51; EXPRESSED IN BRAIN, SIGNAL = 0.61; NT HIT: gi15826865, EVALUE 1.00e+00; EST_HUMAN HIT: BI829925.1, EVALUE 3.80e-01; SWISSPROT HIT: Q07008, EVALUE 9.00e+00
agggttatggtgagaacttgcccaaagcaagaagcaaatggaaacaaggacacaaagaagagggaagaagaggatgaggagaaaggagaagaggaggaggaaaaggaggatgaggaagaaaaggaagagaaggaagagagggaggaagaggacagagaggaggagccaccagccagggttgcatgtgcgtgcccaagtacacaggacattctgcccttcacctgtcgtcttcaaagaccagaaaagaatgccactctcaagttctgcctttggcagga

SEQ ID NO: 19768 - DNA, 172 bp, Homo sapiens
  MAP TO AC008974.6; EXPRESSED IN BONE MARROW, SIGNAL = 0.87; EXPRESSED IN PLACENTA, SIGNAL = 0.55; EXPRESSED IN ADULT LIVER, SIGNAL = 0.8; NT HIT: gi15302254, EVALUE 3.00e-92; EST_HUMAN HIT: BF796285.1, EVALUE 4.00e-92; SWISSPROT HIT: O57932, EVALUE 1.10e+00
aggcgggaaacacgagccagacccgtgcctggagccagcccctggccgccgggtagccatgcggagcctgccatccaacggagagctggaccccgacgtcctagagagcatggcatcactgggctgcttcagggaccgcgagaggctgcatcgcgagctgcgcagtgaggag

SEQ ID NO: 19769 - DNA, 462 bp, Homo sapiens
  MAP TO AC010423.5; EXPRESSED IN PLACENTA, SIGNAL = 0.95; EXPRESSED IN HEART, SIGNAL = 1.1; EXPRESSED IN ADULT LIVER, SIGNAL = 1.2; EXPRESSED IN HELA, SIGNAL = 0.69; EXPRESSED IN BRAIN, SIGNAL =   1; SWISSPROT HIT: P53227, EVALUE 4.20e-01; NT HIT: gi13907843, EVALUE 1.10e-01
atgtgtgctgtcgagaaggagaagaattttgatacagtggtgatttatctaacctcgactctggagagaaagaaaaataagcctgacacactatctacagtcttagaagactgtgaggtagaatctgctatctctcggcagaaggtctttaaaattagtcagaacacccccagaaagaaacatttctctgagtctaagactcttctcaaaaaaattcttcctacttcacataatacccaaaagaccacaagtttaagtactgcagatttaagtaaaatgcctttcgaggattctaaggatgtggaaaaagagagaaaaatcaactttgatatcccaggaaatatcacatcagactcacatgtacagcaaagcacagaaggaataaattatttgccaagtaccattactgacatctttccactcaagatggcaaaaacttcacctttagttcttcatcttctg

SEQ ID NO: 19770 - DNA, 336 bp, Homo sapiens
  MAP TO AL022069.1; EXPRESSED IN PLACENTA, SIGNAL = 0.65; EXPRESSED IN ADULT LIVER, SIGNAL = 0.62; EXPRESSED IN LUNG, SIGNAL =   1; SWISSPROT HIT: P41950, EVALUE 5.70e-02; EST_HUMAN HIT: BE742264.1, EVALUE 4.60e-01
catgctcttcgggcagctggcgagtcacgctgccatctcactgtggccggggccgcccccctggcagattgcaggaccacactgccacctcgccgtggctggggccaccgcctgtccccagcatcgcctgctgcccctttctcatggctcttgggcagacactgggtgctttcgtccagagcaagtgtgagtggataatgggcagtctggcccgtgccttccctcactcgtgggctaggctctggggacccgtgaagccaaagtgtggccctcatgctcgtgggctctctgacagcaaacagcaaggccagctgcagcccagacgcgcacaaatgc

SEQ ID NO: 19771 - DNA, 141 bp, Homo sapiens
  MAP TO AC009731.6; EXPRESSED IN ADULT LIVER, SIGNAL = 2.6; EXPRESSED IN LUNG, SIGNAL = 0.7; EXPRESSED IN FETAL LIVER, SIGNAL = 2.3; SWISSPROT HIT: P11680, EVALUE 3.00e-01; NT HIT: AJ276505.2, EVALUE 4.80e-01; EST_HUMAN HIT: BG323576.1, EVALUE 1.80e-01
cccacgaagcccgacctgttctctccctggctgactttgaagccgtggttgtagcagagtgggtaggttctgatgatgggtagagaaggcagaggccagagcgaggcagccaaggccaggaacgccaggagccaccagaag

SEQ ID NO: 19772 - DNA, 189 bp, Homo sapiens
  MAP TO AL031033.5; EXPRESSED IN ADULT LIVER, SIGNAL = 1.3; EXPRESSED IN HELA, SIGNAL = 2.2; EXPRESSED IN FETAL LIVER, SIGNAL = 1.6; EST_HUMAN HIT: BG714105.1, EVALUE 1.00e-102; SWISSPROT HIT: P33643, EVALUE 1.10e+00; NT HIT: gi15317709, EVALUE 4.00e-98
ctgaacccgtagcaggtgtcagggtcggccagctcgggaaagcggtaccgcagctgcttctgcagggtcagagtctcccgccacgccttgctgtcaatgcgaacgtcccagtgcttgttgaccaccaggaagtcgcggctccggtacacgatggacaggttctccacgctgcctggctccatggccggc

SEQ ID NO: 19773 - DNA, 457 bp, Homo sapiens
  MAP TO AC008456.4; EXPRESSED IN PLACENTA, SIGNAL = 0.52; EXPRESSED IN ADULT LIVER, SIGNAL = 0.68; EXPRESSED IN BRAIN, SIGNAL = 0.55; EXPRESSED IN BONE MARROW, SIGNAL = 0.84; NT HIT: gi13376748, EVALUE 0.00e+00; EST_HUMAN HIT: BE018556.1, EVALUE 1.00e-109; SWISSPROT HIT: O54827, EVALUE 3.00e-33
gtgctgatccccatctctttgtatgtctccattgagctggtgaagctcgggcaagtgttcttcttgagcaatgaccttgacctgtatgatgaagagaccgatttatccattcaatgtcgagccctcaacatcgcagaggacttgggccagatccagtacatcttctccgataagacggggaccctgacagagaacaagatggtgttccgacgttgcaccatcatgggcagcgagtattctcaccaagaaaatggtatagaagctcccaagggctccatccctctttctaaaaggaaataccctgctctcctaagaaacgaggagataaaagacattctcctggctctcttagaggctgtgtggcatttccacaagttgcttcctgtatccctgtggtcttccttgtcacagatcagggctgttccaattacttgtaaactttcatttgtttacaaag

SEQ ID NO: 19774 - DNA, 103 bp, Homo sapiens
  MAP TO AC010422.6; EXPRESSED IN BONE MARROW, SIGNAL = 2.5; EXPRESSED IN ADULT LIVER, SIGNAL = 1.5; EXPRESSED IN LUNG, SIGNAL =   2; EXPRESSED IN FETAL LIVER, SIGNAL = 2.1; EXPRESSED IN HELA, SIGNAL = 1.2; NT HIT: gi14759667, EVALUE 2.00e-51; EST_HUMAN HIT: BE349032.1, EVALUE 4.00e-51; SWISSPROT HIT: O00754, EVALUE 6.00e-13
gacctgttctccaccttcaccatcacccgcctgcaggagaccacgctggtggccaaccagctccgcgaggcagcctccaggctcaagtggacaacaaacacag

SEQ ID NO: 19775 - DNA, 223 bp, Homo sapiens
  MAP TO AC010451.5; EXPRESSED IN ADULT LIVER, SIGNAL = 0.69; EXPRESSED IN LUNG, SIGNAL = 0.59; EXPRESSED IN FETAL LIVER, SIGNAL = 0.38; SWISSPROT HIT: Q02747, EVALUE 2.40e+00; NT HIT: AJ414145.1, EVALUE 3.10e+00; EST_HUMAN HIT: BI062525.1, EVALUE 1.20e+00
gcttgatgtgctactggatgtgaaaaatagagtgcagaatataaaatatgtgctgtttgcctttctgaaacttgcattctggtggaaaaggcgggttgaaacacaggtactcaacgacagtatcacaaatgtggtggacaagcagtacagggcactgtgggagcatttgcaggagatccccctgctggggctgctgggggaacatgagggattttgctgttgt

SEQ ID NO: 19776 - DNA, 204 bp, Homo sapiens
  MAP TO AC010499.4; EXPRESSED IN ADULT LIVER, SIGNAL = 0.81; SWISSPROT HIT: P23811, EVALUE 8.40e-01; EST_HUMAN HIT: AA460479.1, EVALUE 1.10e+00
tcttagaaagtatgtacagataatgggtgcagtttcttcttccctgtaggagggttgcaggaagagctcctcccataggctctcacagccagttgttttttcacaggtccaagaacacagcagctctgttccacagttgtcctgcttggggagtggactgagggctgatggcattctgaaggcgttttttctaggattggacat

SEQ ID NO: 19777 - DNA, 143 bp, Homo sapiens
  MAP TO AL078581.11; EXPRESSED IN BRAIN, SIGNAL = 2.5; EXPRESSED IN FETAL LIVER, SIGNAL = 1.7; EXPRESSED IN BONE MARROW, SIGNAL = 1.3; EXPRESSED IN ADULT LIVER, SIGNAL = 1.8; EST_HUMAN HIT: BF978516.1, EVALUE 7.00e-75; SWISSPROT HIT: P24368, EVALUE 2.00e-05; NT HIT: AF317413.1, EVALUE 1.90e+00
ctgatatcctgatatggtacaaagtccttgtcaacaaaggtctcattaattttcttaattatgtccatgccttctgtcacctcaccaaacaccgtatggacaccatcaagataatctagattttctcctgtggtgataagaaa

SEQ ID NO: 19778 - DNA, 128 bp, Homo sapiens
  MAP TO AC008804.5; EXPRESSED IN PLACENTA, SIGNAL = 0.56; EXPRESSED IN ADULT LIVER, SIGNAL = 0.83; EST_HUMAN HIT: BF910600.1, EVALUE 4.00e-02; NT HIT: U81961.2, EVALUE 1.10e-01
gtgtcatctatgctgaatctccactgggcaggaaacacaatgaaatacaactgaaactgaatggaaagttaaccatgaaacgactggaggaatctcagtcagaactaggtctcgctttaccaagagag

SEQ ID NO: 19779 - DNA, 160 bp, Homo sapiens
  MAP TO AC007207.22; EXPRESSED IN BRAIN, SIGNAL = 0.43; EXPRESSED IN PLACENTA, SIGNAL = 0.6; EXPRESSED IN ADULT LIVER, SIGNAL = 0.71; SWISSPROT HIT: Q9UKQ2, EVALUE 1.50e+00
tccaccatttaaaggaagtattaagggaagagtctgagtatatccagtactcagaccaaggagtatgcccagaggacaggggacagatggcctctttccagtgtgctgttcgattttcccactgcctttcaggtctgcctagccctgaacgaaaggagaa

SEQ ID NO: 19780 - DNA, 297 bp, Homo sapiens
  MAP TO AL049740.2; EXPRESSED IN PLACENTA, SIGNAL = 2.7; EXPRESSED IN ADULT LIVER, SIGNAL = 2.7; EXPRESSED IN HEART, SIGNAL = 2.1; EST_HUMAN HIT: AI797731.1, EVALUE 1.60e+00; SWISSPROT HIT: P10266, EVALUE 4.00e-16; NT HIT: AJ276492.1, EVALUE 6.90e-02
acaaaattgtgcagttttataaagtctattctttcattcttcctgtgattactcatcacaagcctattccaggtggacaaacctattttactgatggctcttccaaaggtggtacagctgtttatggacccaagcatactcaaacaataatgacctctggggtttcagctcaatactcagagttgattgcagtcatacaggttttacagctcacagcttcagatgctatcaacattgtctgtgattcagcttatgttgtaaatgtagccagttgcatagaaactgctacaattaaaa

SEQ ID NO: 19781 - DNA, 100 bp, Homo sapiens
  MAP TO AF048727.1; EXPRESSED IN ADULT LIVER, SIGNAL = 0.78; EXPRESSED IN BRAIN, SIGNAL = 1.1; EXPRESSED IN FETAL LIVER, SIGNAL = 0.72; EST_HUMAN HIT: BI036012.1, EVALUE 1.20e-01; SWISSPROT HIT: P23491, EVALUE 9.30e-01; NT HIT: AF048727.1, EVALUE 1.00e-49
gggcacagagagaaagtggcatctgcaggccaggaggagggccctccccaggaacccgccatgctggctcgagatcgcatgccttccggcctccagaacg

SEQ ID NO: 19782 - DNA, 277 bp, Homo sapiens
  MAP TO AC068323.6; EXPRESSED IN BONE MARROW, SIGNAL = 0.47; EXPRESSED IN PLACENTA, SIGNAL = 0.58; EXPRESSED IN ADULT LIVER, SIGNAL = 0.63; NT HIT: gi14729797, EVALUE 1.00e-111; SWISSPROT HIT: Q01728, EVALUE 4.00e-05; EST_HUMAN HIT: AL135297.1, EVALUE 6.00e-03
ttcaggtgaactgatatttgaacctggtgagagagaagctacaatagcagtaaatatccttgatgatacagttccagaaaaagaagaatccttcaaagttcaacttaaaaatcccaaaggaggagcagagattggcattaatgattctgtaacaataaccattctgtctaatgatgatgcctatggaattgttgcatttgctcaggtaatgatactgaagaccccacacttgcaatgcaaaatgttttatttattgtatttgtgtattagctattat

SEQ ID NO: 19783 - DNA, 210 bp, Homo sapiens
  MAP TO AL078640.7; EXPRESSED IN BONE MARROW, SIGNAL = 5.4; EXPRESSED IN PLACENTA, SIGNAL = 3.8; EXPRESSED IN ADULT LIVER, SIGNAL = 4.6; EXPRESSED IN BRAIN, SIGNAL =   6; EXPRESSED IN FETAL LIVER, SIGNAL = 3.8; NT HIT: U50901.1, EVALUE 7.50e-01; SWISSPROT HIT: Q9TV36, EVALUE 5.60e-02; EST_HUMAN HIT: AA758668.1, EVALUE 1.00e-105
atcaccagtggtttaacagctgtgggcggaggagtatcaagcactcccatatcctcgggggaaatggaagctcatgctgcctctgcagagggtgaatggtcagcacagaagacagccacagatcaagaaaaactagttgtcaacaaggcccactcacttagaaacaatctaaataaaacccggaagatcagagcagattattttaacatt

SEQ ID NO: 19784 - DNA, 174 bp, Homo sapiens
  MAP TO AC008509.5; EXPRESSED IN ADULT LIVER, SIGNAL = 0.97; EXPRESSED IN BRAIN, SIGNAL = 0.8; EXPRESSED IN PLACENTA, SIGNAL = 1.2; EST_HUMAN HIT: AW418806.1, EVALUE 3.00e-93; NT HIT: gi7662117, EVALUE 2.00e-93; SWISSPROT HIT: Q05998, EVALUE 3.80e-01
gaagagagccccctgagtgtgtctagcccagagggtactggtacctggctgcattataccagtggtgtgggtactgggcgtcgaagacgcagatcaggggaacaaatcacttcttcccctgtctcccccaaatcattggctttcacatccagtatttttggctcatggcaacag

SEQ ID NO: 19785 - DNA, 143 bp, Homo sapiens
  MAP TO AC007165.3; EXPRESSED IN BONE MARROW, SIGNAL = 0.85; EXPRESSED IN ADULT LIVER, SIGNAL = 0.58; EXPRESSED IN BRAIN, SIGNAL = 0.53; SWISSPROT HIT: Q49619, EVALUE 5.90e+00; EST_HUMAN HIT: BF946533.1, EVALUE 7.10e-01; NT HIT: AB025019.1, EVALUE 1.90e+00
atgggttctagacctaaccatagaaatcgaggtgctcccactgacagcaggagtaagaatgtcctggagggcttgcggaacgaggatactgggccaccctgtggctctaatcagcagagggatgctgatgatactggactgag

SEQ ID NO: 19786 - DNA, 202 bp, Homo sapiens
  MAP TO AC005853.1; EXPRESSED IN BONE MARROW, SIGNAL = 0.55; EXPRESSED IN PLACENTA, SIGNAL = 0.45; EXPRESSED IN ADULT LIVER, SIGNAL = 0.59; SWISSPROT HIT: Q90334, EVALUE 2.00e-07
aaaagcaagccagggtcctcattgtgatcgcctggagcctgtcttttctgttctccattcccaccctgatcatatttgggaagaggacactgtccaacggtgaagtgcagtgctgggccctgtggcctgacgactcctactggaccccatacatgaccatcgtggccttcctggtgtacttcatccctctgacaatcatcag

SEQ ID NO: 19787 - DNA, 209 bp, Homo sapiens
  MAP TO AC009533.9; EXPRESSED IN PLACENTA, SIGNAL = 0.82; EXPRESSED IN ADULT LIVER, SIGNAL = 0.84; EXPRESSED IN BRAIN, SIGNAL = 0.71; NT HIT: U33834.1, EVALUE 1.00e-112; EST_HUMAN HIT: BF983100.1, EVALUE 1.00e-112; SWISSPROT HIT: P22516, EVALUE 5.00e-05
cttggctgcagggatggcaaggcggctcctgtaatagggacaggcccgggcctccttcccaagggccagcagctgctccatgtccttcacctctgccagggcctcatcccggagaaggcccatctgctcgtggttgtagaaggggcaggctgcctgcttctcctgcctcctcctctttggcttctcctcctcagctcctttcttcttct

SEQ ID NO: 19788 - DNA, 423 bp, Homo sapiens
  MAP TO AC008282.2; EXPRESSED IN HEART, SIGNAL =   7; EXPRESSED IN ADULT LIVER, SIGNAL = 5.1; EXPRESSED IN FETAL LIVER, SIGNAL = 6.2; EXPRESSED IN BRAIN, SIGNAL =   4; EXPRESSED IN HELA, SIGNAL = 3.4; EXPRESSED IN BONE MARROW, SIGNAL = 3.5; EXPRESSED IN PLACENTA, SIGNAL =   7; SWISSPROT HIT: P20730, EVALUE 2.00e-10
acaggcatcccgggcagccctgcgtgggcatctcccagtaggcatcccgagcacccatgtgggcatccccctgtaggcaccccgagcaccatgtgtaggcagtcccgtggaggcatcccgaacacccgcagacatcccgcataggcatcccaggaatccccaggtaggcatccccgcataaacatcctgagcaccccatgtaggcatccccgcataaacatcctgagcaccccgtgtaggcatccccgcataaacatcctgagcaccccgtgtaggcatccccgcataaacatcctgagcaccccgtgtaggcatccccgcataaacatcctgagcaccccgtgtaggcatccctgcatgggcattctgagcaccccatggaggtagcccgagcaccgtgcgtaggcagccccgcatgggcat

SEQ ID NO: 19789 - DNA, 174 bp, Homo sapiens
  MAP TO AC008953.4; EXPRESSED IN ADULT LIVER, SIGNAL = 1.6; EXPRESSED IN BRAIN, SIGNAL = 2.1; EXPRESSED IN FETAL LIVER, SIGNAL = 1.3; EXPRESSED IN BONE MARROW, SIGNAL = 1.4; EXPRESSED IN PLACENTA, SIGNAL = 2.1; NT HIT: AF223391.1, EVALUE 2.00e-37; EST_HUMAN HIT: AI678101.1, EVALUE 3.00e-31; SWISSPROT HIT: Q9ZCN6, EVALUE 1.90e+00
ctaggcctgcacagggtcagtgtcatcaatgccactgtcttccacctctgtatcctgtcccactggaaggtcttcagcagcaataacaagcatggagctgtcatctcccatgataacaatgccttcttctagaatacctcctgaaggacctggctgaggtggttttacagtgga

SEQ ID NO: 19790 - DNA, 330 bp, Homo sapiens
  MAP TO AC008527.4; EXPRESSED IN ADULT LIVER, SIGNAL =   1; EXPRESSED IN FETAL LIVER, SIGNAL = 0.56; SWISSPROT HIT: P37020, EVALUE 1.90e-02; NT HIT: U63630.3, EVALUE 1.00e-15; EST_HUMAN HIT: R46381.1, EVALUE 2.00e-18
tcacatctcttttgctgctttcaagtttttctctttgcctttgcttttgaaagtttgattgaaatgtgttgtggtgtagacccctgagttcttcttacttagagtttgctgggctttttggatgtttgtattcatgcatttcaccaaacttgggaggttttcattcattatttcatcaactattctctttgtccctttatccttgtcttctctgtgtgggactcccagagtatgtaagttggtatacttggtggtgtcccacagtattgggggaacccgcccccagtatttcaacgtaggttctttctgttttccgtaagtgtcggctgg

SEQ ID NO: 19791 - DNA, 137 bp, Homo sapiens
  MAP TO AC009509.7; EXPRESSED IN LUNG, SIGNAL = 1.6; EXPRESSED IN BONE MARROW, SIGNAL =   1; EXPRESSED IN PLACENTA, SIGNAL = 0.61; EXPRESSED IN ADULT LIVER, SIGNAL = 0.97; EST_HUMAN HIT: AI143870.1, EVALUE 6.80e-01; SWISSPROT HIT: O43278, EVALUE 3.40e+00; NT HIT: AL161507.2, EVALUE 4.60e-01
catccttccgaagacagcagctcctactgcacttctggccagtgctttcagaataatacttcaagaactgggctcccagcttctgagactcctccagattgattagaagacctgggaagcgacggatccagcagtct

SEQ ID NO: 19792 - DNA, 342 bp, Homo sapiens
  MAP TO AC008413.5; EXPRESSED IN HEART, SIGNAL =   5; EXPRESSED IN ADULT LIVER, SIGNAL = 2.8; EXPRESSED IN FETAL LIVER, SIGNAL = 2.3; EXPRESSED IN PLACENTA, SIGNAL = 2.8; EST_HUMAN HIT: BE048201.1, EVALUE 5.00e-50; SWISSPROT HIT: P47068, EVALUE 5.90e-02; NT HIT: gi15321314, EVALUE 1.00e-43
cccctcttttccaggaaccttgccacacccgcacctgcaccctgtccccgctggccctcccacagctgctgcagcaggcacagcacgcccttgctctgcgcttgcctcaccagctctctgcttgcttttctcactcgtgttttctctctgctttctctccaactgccagccgatcgggtcaggcaagtccatcctgtcctgagagccccaggcaccccttgacctctaaacagatccctcctccctttccaagcctgcctgggcaggtgtcctgtgacttgacagtggctcccccagtcccaaagccagcccccttcatctgtgacttagtctgttgtagtg

SEQ ID NO: 19793 - DNA, 237 bp, Homo sapiens
  MAP TO AC010345.4; EXPRESSED IN HEART, SIGNAL = 1.2; EXPRESSED IN ADULT LIVER, SIGNAL = 1.7; EXPRESSED IN LUNG, SIGNAL = 0.82; EXPRESSED IN FETAL LIVER, SIGNAL = 1.2; EXPRESSED IN PLACENTA, SIGNAL = 0.97; NT HIT: AJ277546.2, EVALUE 6.00e-05; EST_HUMAN HIT: AW000950.1, EVALUE 5.00e-06; SWISSPROT HIT: Q62108, EVALUE 9.70e-01
atgccccaggccatgctgatgctgctggttctgggactacaggttgagaaaggagggtctagggcaggtctcagagcgaggaccacccatcagcagcagccgcaccccctgggaacttgtaagaaatgcaaattttggggcctgaccccagatgtgctgaaactgcaactcaagggtgagggtctgcggtctgtgtttcagcaagctctccaggcgattctgatgtctgcgagcact

SEQ ID NO: 19794 - DNA, 117 bp, Homo sapiens
  MAP TO AL109910.27; EXPRESSED IN ADULT LIVER, SIGNAL =   4; EXPRESSED IN LUNG, SIGNAL = 3.5; EXPRESSED IN BONE MARROW, SIGNAL = 2.9; EXPRESSED IN BRAIN, SIGNAL = 3.2; NT HIT: gi16163979, EVALUE 6.00e+00; SWISSPROT HIT: Q9WVS8, EVALUE 2.40e-01
ggccagggccgcacgcaggcctgtgttgtccgcttcctgggacggtcccctgcgtccagcacactcacggccagggccgcacgcaggcctgtgttgtccgcttcctgggacggtccc

SEQ ID NO: 19795 - DNA, 161 bp, Homo sapiens
  MAP TO AC007570.23; EXPRESSED IN FETAL LIVER, SIGNAL = 0.57; EXPRESSED IN PLACENTA, SIGNAL = 0.53; EXPRESSED IN ADULT LIVER, SIGNAL = 0.73; SWISSPROT HIT: P08641, EVALUE 4.40e+00; NT HIT: AL163279.2, EVALUE 3.00e-18; EST_HUMAN HIT: BI015975.1, EVALUE 3.00e-59
tgaaaactgtaaaacagcctcaggcaggtgcttctggaggtatcccagaagaagggattcttacgggagatgacagttccatgcgtgttactgtccctgaagaccttctagtgggacaggatgtggaggacagtgatactgataatcctgaccctgtgtag

SEQ ID NO: 19796 - DNA, 150 bp, Homo sapiens
  MAP TO AC011387.4; EXPRESSED IN PLACENTA, SIGNAL = 1.6; EXPRESSED IN ADULT LIVER, SIGNAL = 1.3; EXPRESSED IN FETAL LIVER, SIGNAL = 1.1; EXPRESSED IN LUNG, SIGNAL = 1.6; EXPRESSED IN BRAIN, SIGNAL = 1.4; EST_HUMAN HIT: AI692187.1, EVALUE 5.00e-79; NT HIT: gi16160158, EVALUE 3.00e-79
tcagaggtgagaaatgtcggtacttgaagagttaggctgctttgcatctacccagcgtctagaaccaattccagcttcataactcagctgtgaacgaactcccttaggcatttggtagccacgtagccagtagttcaagactagaaaacc

SEQ ID NO: 19797 - DNA, 344 bp, Homo sapiens
  MAP TO AC007788.1; EXPRESSED IN PLACENTA, SIGNAL = 0.83; EXPRESSED IN ADULT LIVER, SIGNAL = 1.1; EXPRESSED IN BRAIN, SIGNAL = 0.92; NT HIT: gi16191829, EVALUE 1.00e-102; EST_HUMAN HIT: AU140604.1, EVALUE 1.00e-87; SWISSPROT HIT: P10267, EVALUE 2.00e-17
tttcctttcacactgatttacctactacacaaaattattcttattgggcttatgtgccttttcctccacttattcgacctctcacctggaatgatgctcctgcagtaatctgcactaacgatagtgtgtggctgcctggagctgcagaagaacattgccttgctcaaccaggagaagaaggcacagcatttaatgttaccattcattataaatacccacctctgtgcctcggacatgcacctggttgtatccatctagaaattcaagtgtgggttgcttgtcttctggagaaatcagctacagaggaactggacatttggtctctggcctctccctttatcctt

SEQ ID NO: 19798 - DNA, 212 bp, Homo sapiens
  MAP TO AC012467.9; EXPRESSED IN ADULT LIVER, SIGNAL = 0.65; NT HIT: AJ289880.1, EVALUE 2.00e-22; EST_HUMAN HIT: BE071924.1, EVALUE 2.00e-23; SWISSPROT HIT: P08656, EVALUE 4.20e-01
tcatctggacagttttctcctgcaggaatttattgtttcaggcttgatggctttcatggcttgctctgtcacaatgatggcatcttcagtgatgtaattcttccagacttccatgttgttctctctgttggtgttctcgtccatagtgttgacaatcctttccataaagtactgtgtgtaatgagccttgaaggtccttatggcctcccaat

SEQ ID NO: 19799 - DNA, 282 bp, Homo sapiens
  MAP TO AC005569.1; EXPRESSED IN BONE MARROW, SIGNAL = 5.2; EXPRESSED IN PLACENTA, SIGNAL = 2.3; EXPRESSED IN ADULT LIVER, SIGNAL = 1.2; EXPRESSED IN FETAL LIVER, SIGNAL = 4.8; NT HIT: gi16160192, EVALUE 1.00e-46; EST_HUMAN HIT: BE614807.1, EVALUE 1.00e-47; SWISSPROT HIT: P06748, EVALUE 3.00e-10
tcactggtacttttcttcagttttctcattatcaaaatcatcatcatcatcaaaatcatcatcatcatcattttcatcatcatcaaaatcgtcatgaccagcatcatcttcatcggcagcaagttttacttttttctgtggaaccatgctaccacctccaggggcagcctgcttcccagatatacttaagagtttcatatctttgtcttcgtcttctgactctgcatcttcctccacaggtacaaagtgctgtccattagcatgcactcgccctgaaccaca

SEQ ID NO: 19800 - DNA, 178 bp, Homo sapiens
  MAP TO AC007883.3; EXPRESSED IN LUNG, SIGNAL = 0.85; EXPRESSED IN HELA, SIGNAL = 1.3; EXPRESSED IN BRAIN, SIGNAL = 1.2; EXPRESSED IN PLACENTA, SIGNAL = 1.7; EXPRESSED IN HEART, SIGNAL =   4; EXPRESSED IN ADULT LIVER, SIGNAL = 1.3; NT HIT: gi14724041, EVALUE 8.00e-96; EST_HUMAN HIT: BE930569.1, EVALUE 1.00e-95; SWISSPROT HIT: Q02357, EVALUE 2.00e-06
tttgtatggcccatttgtgcagctgcatgaataggtaactgccaactgtcctcattacagtaaagatcaggatctgccccactggagagcaaaagctccacacattttgtgtgtccctcttgagcagcaatgaacaagggtgtagctttgtccaaggcttgacaattgacatttgcac

SEQ ID NO: 19801 - DNA, 146 bp, Homo sapiens
  MAP TO AL117191.4; EXPRESSED IN BONE MARROW, SIGNAL =  13; EXPRESSED IN ADULT LIVER, SIGNAL =  10; EXPRESSED IN HEART, SIGNAL =  10; EXPRESSED IN LUNG, SIGNAL = 7.4; EXPRESSED IN BRAIN, SIGNAL =  15; EXPRESSED IN FETAL LIVER, SIGNAL =  14; EXPRESSED IN PLACENTA, SIGNAL =  10; SWISSPROT HIT: P26973, EVALUE 7.70e+00; NT HIT: AF223391.1, EVALUE 5.00e-01; EST_HUMAN HIT: Z43011.1, EVALUE 8.00e-04
agcttctggcgattaccacaggacatctttgggggatcattattctgcctcgcatctttgggggaatcatctcttctataaccaagccactccccactcaactggaggaggcttttccacttgggctgcttctgtggcctccacat

SEQ ID NO: 19802 - DNA, 92 bp, Homo sapiens
  MAP TO AL109617.2; EXPRESSED IN ADULT LIVER, SIGNAL = 1.1; EXPRESSED IN HELA, SIGNAL = 1.2; EXPRESSED IN FETAL LIVER, SIGNAL = 1.1; EXPRESSED IN BONE MARROW, SIGNAL = 1.2; SWISSPROT HIT: P16804, EVALUE 6.20e+00; NT HIT: U58085.1, EVALUE 4.50e+00; EST_HUMAN HIT: H19318.1, EVALUE 1.70e+00
cagaatgtggccattagcagacccagaaatgtgggaaatggagagcatggaacgagagcaagatgaagtgcaaatggtgacatttgaagcag

SEQ ID NO: 19803 - DNA, 126 bp, Homo sapiens
  MAP TO AC008831.7; EXPRESSED IN FETAL LIVER, SIGNAL = 2.2; EXPRESSED IN PLACENTA, SIGNAL = 1.3; EXPRESSED IN ADULT LIVER, SIGNAL =   1; NT HIT: gi14729951, EVALUE 6.00e-65; EST_HUMAN HIT: BI032136.1, EVALUE 9.00e-65
cctggggttgaaggccaacatctgaggatcattaggatctaccacagaaggatatggctcgaaaatcacaacttttctaggagattccaacgcagacctacacatggatactagtagatctaccac

SEQ ID NO: 19804 - DNA, 439 bp, Homo sapiens
  MAP TO AC013248.5; EXPRESSED IN PLACENTA, SIGNAL =   9; EXPRESSED IN ADULT LIVER, SIGNAL =  15; EXPRESSED IN BRAIN, SIGNAL = 4.8; NT HIT: gi14771545, EVALUE 0.00e+00; EST_HUMAN HIT: BE906710.1, EVALUE 0.00e+00; SWISSPROT HIT: P25232, EVALUE 4.00e-68
ctacggtgcggccacagcggccagtggtcttggtgtgctggcctcggacacgaaggccccagaagtgactcagccctctatgggcccgaatattcttcagtcgctccaggtcttcacggagctcgttgtccagaccgttggccaggacctggttatattttccatcctttacatccttctgtctgttcaaaaaccagtcggggatcttgtactggcgtggattctgcataatggtgaccacacgttccacctcatcctcaatgagctctcccgccctcttggtgaggtcaatgtctgctttcctcaataccacatgagcatatcttcggcccacacccttaatggcagtgatggcaaaggctattttccaccgcccatcgatgttggtgttgagtactcgcaaaatatgctggaacttttcagggatcactagagacat

SEQ ID NO: 19805 - DNA, 159 bp, Homo sapiens
  MAP TO AL109764.2; EXPRESSED IN ADULT LIVER, SIGNAL =   5; EXPRESSED IN FETAL LIVER, SIGNAL = 5.8; EXPRESSED IN BONE MARROW, SIGNAL = 4.9; EXPRESSED IN PLACENTA, SIGNAL = 4.9; NT HIT: gi14743575, EVALUE 8.50e+00; SWISSPROT HIT: Q9ZDV6, EVALUE 9.90e+00
gtattgagaaagggtcaaactccagtgccttcaggcataaggctagcaaaacaattgtcatataataagaaacacttgtgttgcagctcagaaaatgataccctcaaatatgccgctttaaaactcaaactgagagcacctggaaagcagcaaatgcag

SEQ ID NO: 19806 - DNA, 261 bp, Homo sapiens
  MAP TO AL109797.18; EXPRESSED IN HELA, SIGNAL = 1.4; EXPRESSED IN BONE MARROW, SIGNAL = 1.6; EXPRESSED IN ADULT LIVER, SIGNAL = 1.2; SWISSPROT HIT: P70398, EVALUE 2.00e-40; NT HIT: gi11641424, EVALUE 0.00e+00; EST_HUMAN HIT: AW838632.1, EVALUE 1.00e-117
ggcaatggagatcttaaaagaaagtggacctgggcagtggaatggcttggagatgaacttgaaagaagaccatatactggcaatcctcagtacacttacaacaattggtctcccccagtgcaaagcaatgaaacgtccaatggttatttcttggagagatcacatagtgctaggatgacacttgcaaaagcttgtgaactctgtccagaggaggtaaaaaaagccaccagtgtgcagcagatagaaatggaagagagcaaa

SEQ ID NO: 19807 - DNA, 403 bp, Homo sapiens
  MAP TO AC009001.6; EXPRESSED IN HEART, SIGNAL = 1.4; EXPRESSED IN HELA, SIGNAL = 1.2; EXPRESSED IN FETAL LIVER, SIGNAL = 3.6; EXPRESSED IN ADULT LIVER, SIGNAL = 2.8; SWISSPROT HIT: P13686, EVALUE 3.00e-61; NT HIT: X67123.1, EVALUE 0.00e+00; EST_HUMAN HIT: BI820158.1, EVALUE 0.00e+00
tcagctgggatggggacccccctcacccagctcccaccccacccacagggccctcacctgcagattgtgatcgtggccgcacaggtaggcagtgaccccgtatgtggccagcagtggccgtagctgcttgaccaggcagtgggtaggcccgtgctcggctatggaccacacggggtagtggccagccaccagcacgtagtcctccctggccgccgccagctgtttcttgagccaggacagctgtgtgcgggccagcttcacgtctcggggcctctcaggctgctggctgaggaagtcatctgagttgccacatagtgtcactgtgtccagcataaaaatggccacagacacattggtctgtgggatcttgaagtgcaggcggtagaaagggctggggaagttc

SEQ ID NO: 19808 - DNA, 427 bp, Homo sapiens
  MAP TO AC010209.13; EXPRESSED IN ADULT LIVER, SIGNAL = 1.3; EXPRESSED IN HEART, SIGNAL = 1.2; EXPRESSED IN FETAL LIVER, SIGNAL = 1.5; SWISSPROT HIT: P26809, EVALUE 2.00e-33; NT HIT: AJ271736.1, EVALUE 0.00e+00; EST_HUMAN HIT: BF806341.1, EVALUE 2.00e-37
agtcctagggctggggccgacataagtttttcctttaacttacaaaaggcttgctgttgtagaggcccccattcacagggctcccagtcacccccctttgtaaccccgtacaaaggtttggctagcactgcaaagtttggaatccataatctgcaaaacctcacagctcctaggaattcccttacttgccttctggttttaggtgccggtaggctgcagatgacctgctttctttctgaccccaggctgtgctcccctttctgaatagtgaatcccaggtagcgtacctgctgtctgcagatctgagctttcttcttgtccaccaggtcccgaagcagggcatccatcccttttgcgcacccgactgccgtggagtgttccagcagaaggtcgtccacgtacaggagctagatgcatcctgggtctt

SEQ ID NO: 19809 - DNA, 234 bp, Homo sapiens
  MAP TO AC016628.5; EXPRESSED IN HEART, SIGNAL = 2.8; EXPRESSED IN LUNG, SIGNAL = 1.4; EXPRESSED IN HELA, SIGNAL =   2; EXPRESSED IN BONE MARROW, SIGNAL = 2.6; EXPRESSED IN ADULT LIVER, SIGNAL = 2.6; SWISSPROT HIT: P03360, EVALUE 3.40e-02; EST_HUMAN HIT: BI042164.1, EVALUE 1.00e-59
caagctccttcaagctgccagactcctgcagaaagctaccgtcattcattgcagggaccatcaaaccccagacaatcctattttggtgggaaatctagcagatagagaagccaaacaagtagccctacaacctgtacaaggccagtttctgtgcctgtcctcgttctctcctctttactctccagaagaaaaggaggactaccaagcccaaaaccttcaaaaacaaggaccatg

SEQ ID NO: 19810 - DNA, 149 bp, Homo sapiens
  MAP TO AC008527.4; EXPRESSED IN ADULT LIVER, SIGNAL =   1; EXPRESSED IN BRAIN, SIGNAL = 1.1; NT HIT: AE004738.1, EVALUE 2.00e+00; EST_HUMAN HIT: BG391997.1, EVALUE 3.00e+00; SWISSPROT HIT: P32905, EVALUE 1.20e+00
atgacccttctcagatctcagaggcacttcagattggcaagggactccttcatgaagaagctgactcaagcagaggtagcaacagaggcaaagaggagcatgctgaagctacaagatgggttgagaaatatagatctgcccaattataa

SEQ ID NO: 19811 - DNA, 107 bp, Homo sapiens
  MAP TO AC013646.3; EXPRESSED IN PLACENTA, SIGNAL = 1.4; EXPRESSED IN ADULT LIVER, SIGNAL = 1.6; EXPRESSED IN BRAIN, SIGNAL = 1.7; EXPRESSED IN LUNG, SIGNAL = 1.5; NT HIT: AL163283.2, EVALUE 6.00e-15; EST_HUMAN HIT: AL552262.1, EVALUE 1.00e-10; SWISSPROT HIT: Q9Y2M5, EVALUE 2.70e+00
tggggcttcaggagctgtaaacattcaccgctagatgctgccatggggtcggagcccacgtggcccatgagcccacgtggcccagtacctgccatctgcatgcttcc

SEQ ID NO: 19812 - DNA, 169 bp, Homo sapiens
  MAP TO AC008959.4; EXPRESSED IN PLACENTA, SIGNAL = 0.86; EXPRESSED IN HEART, SIGNAL = 0.98; EXPRESSED IN ADULT LIVER, SIGNAL = 1.1; SWISSPROT HIT: P34369, EVALUE 5.70e+00; NT HIT: AE007671.1, EVALUE 2.30e+00; EST_HUMAN HIT: AL599123.1, EVALUE 5.50e-02
tctccttttgctgtgaaagccacccttgttgattcctctctatcaaaccggctgccctgaacgtactgcaaagttctaccacgaaaagtggaaactgcagcaccaataggcttgctcttcaaattaccagctcggtgcttatgatgaaattgaagatctgtttctctac

SEQ ID NO: 19813 - DNA, 256 bp, Homo sapiens
  MAP TO AC008971.5; EXPRESSED IN PLACENTA, SIGNAL = 0.84; EXPRESSED IN ADULT LIVER, SIGNAL = 0.85; SWISSPROT HIT: Q9UKP4, EVALUE 5.00e-08; NT HIT: gi13569927, EVALUE 0.00e+00; EST_HUMAN HIT: AW629511.1, EVALUE 0.00e+00
cagtccatggcaggcactgagggctgccgtcccaactctggtgccctgctgtagaaccgtgccactgagatggcagaggggggcagaggaagccatcatcttaacatgggagaggttcccatatctcttctccatgatgtagctattggaaagaaatccttgattgaccgtcaagttaaaaaacaggtccttctcctcgtgagaaattctgtagtacacccagtcctctgagccatccaaatctctcttcctcctg

SEQ ID NO: 19814 - DNA, 326 bp, Homo sapiens
  MAP TO AC010163.7; EXPRESSED IN BRAIN, SIGNAL = 3.4; EXPRESSED IN PLACENTA, SIGNAL = 3.4; EXPRESSED IN HEART, SIGNAL =   2; EXPRESSED IN ADULT LIVER, SIGNAL = 3.5; SWISSPROT HIT: Q23027, EVALUE 3.10e+00; NT HIT: Z21677.1, EVALUE 3.00e-01; EST_HUMAN HIT: BG437045.1, EVALUE 1.80e+00
ctaggggtctctacgtgctacacgcgagccatccttcttgaaagcgtagctatttgggtcctgaaacatcttcacttttttctctgctagtttcatagcttgcacaacattttccagggagccatctgacataaatccataggttccaggtttgtttaccgcgagcggttttaggcagatagggcacgtctcgctaaaagcattccatagataagagagcttctgctggccaacatcattagagtgtttgccagaggctctgtccctggaaggattatgaggggatttgatggggtcatctttctgtcttgcctggggtgtctctc

SEQ ID NO: 19815 - DNA, 146 bp, Homo sapiens
  MAP TO AC018359.7; EXPRESSED IN LUNG, SIGNAL = 0.67; EXPRESSED IN PLACENTA, SIGNAL = 1.7; EXPRESSED IN ADULT LIVER, SIGNAL = 1.2; EST_HUMAN HIT: AI832623.1, EVALUE 2.90e+00; SWISSPROT HIT: O60241, EVALUE 4.50e+00; NT HIT: X52046.1, EVALUE 5.00e-01
tgagagtagtgggcaagatcctctactgcagactttgaggaacatatagtttgcctcacagaattttccaccagagagctgaccagaagttttaaatcatcagctcccatcccattacacatttgttgagggctgtcctgggtcat

SEQ ID NO: 19816 - DNA, 163 bp, Homo sapiens
  MAP TO AC022153.3; EXPRESSED IN ADULT LIVER, SIGNAL = 0.47; EXPRESSED IN HEART, SIGNAL = 0.93; EST_HUMAN HIT: BI754970.1, EVALUE 1.00e-86; SWISSPROT HIT: P34624, EVALUE 3.00e-14; NT HIT: AF413522.1, EVALUE 6.00e-04
ttccaggttctgtgccctttctttgttgagaagataaactggaaaatgcaagctattgtcctttgccaaggatcgaagatcaaaatagtacttggcataaacacttccagaaacttcgacgttatagtcaattagctgcaaaaactgtctttcaagctcattc

SEQ ID NO: 19817 - DNA, 385 bp, Homo sapiens
  MAP TO AC020951.4; EXPRESSED IN ADULT LIVER, SIGNAL = 4.8; EXPRESSED IN PLACENTA, SIGNAL = 3.3; EXPRESSED IN BRAIN, SIGNAL =   5; EXPRESSED IN LUNG, SIGNAL = 2.1; EXPRESSED IN BONE MARROW, SIGNAL = 3.8; NT HIT: AF042861.1, EVALUE 5.60e+00; EST_HUMAN HIT: AV725230.1, EVALUE 2.00e-93; SWISSPROT HIT: P10266, EVALUE 2.00e-21
atgcagcatatgagattaagtgtctatagttacatgaacatagctaagcttgccaaaggctgctatatgtgtaacatccatctgccaaatttcatttggagccaagccttgtggattgcatccttccacaggtataacaccagggacatgctgacaagtgggacaggcttgcgccatagttcgagcctggctgtgaggcaggtgaaacatacgagtaagggcgaggtgttttgaggcagtattgcctgagaagtttgagcttgttgaaatacagaacaaaccagtttatctgctctatcattacctagagatagtggtccagggagttgtatgtgagagcaaatatgagaaatatgtaaaggagcagcatgagagcgaacagctt

SEQ ID NO: 19818 - DNA, 145 bp, Homo sapiens
  MAP TO AC009320.7; EXPRESSED IN BRAIN, SIGNAL = 0.8; EXPRESSED IN PLACENTA, SIGNAL = 0.92; EXPRESSED IN HEART, SIGNAL = 0.98; EXPRESSED IN ADULT LIVER, SIGNAL = 0.77; EXPRESSED IN FETAL LIVER, SIGNAL = 0.78; NT HIT: gi13994290, EVALUE 4.00e-26; EST_HUMAN HIT: BF792441.1, EVALUE 5.00e-76; SWISSPROT HIT: O67178, EVALUE 9.00e-03
cgccctgcaggtggcacacaaagctgagatattgtcacctttgggagcactgtattacaacactggccgatacgaagaggctttgcagatttaccaggaagctgcagcacttcagccttctcagagggagctccgcttggcactg

SEQ ID NO: 19819 - DNA, 239 bp, Homo sapiens
  MAP TO AC004196.1; EXPRESSED IN BRAIN, SIGNAL = 2.9; EXPRESSED IN ADULT LIVER, SIGNAL = 2.8; EXPRESSED IN HEART, SIGNAL = 3.2; SWISSPROT HIT: P29362, EVALUE 2.00e-05
cacatagtccttggtggtcgctgggtctgcagtgacagagccctcggtggtccctgggtccacagtcacattgtcctcagtggtccctgggtctgcagtgacagagtcctcggtggtccctgggtctgcagtgatgtggtcctcagtggtccttccatctgcagttacatcattttctcttattcttgagtctttagggctggtctctgggtgcttagtggaaatgctttggcttagtc

SEQ ID NO: 19820 - DNA, 219 bp, Homo sapiens
  MAP TO AC004189.1; EXPRESSED IN ADULT LIVER, SIGNAL =   1; SWISSPROT HIT: P37954, EVALUE 9.10e-02; NT HIT: AF081786.1, EVALUE 7.80e-01; EST_HUMAN HIT: BF991563.1, EVALUE 5.00e-15
cttcagtgtgttggtgtctaattccttggccgtcctttccagatcaatgaccaggcttctgagctgtgttactgccctggagatgtcaaggattctggccgcttctgctggcatgtgctccagctggcccagccactgctgagggagggcacccagctgttccctggtttggtgctggctctccggcccagcctccagcctgtggttcccgtggtctac

SEQ ID NO: 19821 - DNA, 350 bp, Homo sapiens
  MAP TO AC008462.5; EXPRESSED IN BONE MARROW, SIGNAL = 5.8; EXPRESSED IN ADULT LIVER, SIGNAL =   6; EXPRESSED IN LUNG, SIGNAL = 8.4; EXPRESSED IN FETAL LIVER, SIGNAL =  13; SWISSPROT HIT: P52167, EVALUE 4.10e-01; NT HIT: AL163210.2, EVALUE 2.00e-85; EST_HUMAN HIT: BE871959.1, EVALUE 1.00e-97
ttgctgcagggatggggcccggatggagaacctctgctagggcagtgcagaagggaaatgtgggatcagagcccccacacagagtccctactggggcactgcctagtggagctgtgagaagagagccactatcctccagaccccagaatggtagatccactgacagcttgcaccgtgcacctggaaaagctgcagacactcaacaccagcccgtgaaagcagccaggagggggcctataccctgcaaagccacaggggcagagctgcccaaggcagtgggagcccacctcttgcatcagcatgacctagatatgagacctggagtcaaagaagatcatttggagctttaa

SEQ ID NO: 19822 - DNA, 279 bp, Homo sapiens
  MAP TO AC008620.5; EXPRESSED IN PLACENTA, SIGNAL = 0.61; EXPRESSED IN ADULT LIVER, SIGNAL = 0.55; EXPRESSED IN BRAIN, SIGNAL = 0.52; SWISSPROT HIT: O43869, EVALUE 5.00e-26; NT HIT: AF102535.1, EVALUE 2.00e-39; EST_HUMAN HIT: AL539244.1, EVALUE 6.00e-03
tcagtgctggctgccgatcctgcagcggtccagccccttcctcagtgcccccatcacctccctgttcctcaagctgtaaatgagggggttgagcatgggagtaaggaccgtgtagaagatagaggccaccttgtcatggctgggggcccggtagtgcctaggcctcaggtagatgaacatggctgccccatagaagagggtgacagctgtcaggtgggaggagcaggtggccagggcctttttccaggcctgagcagagtgcatttgcagcacagtccc

SEQ ID NO: 19823 - DNA, 96 bp, Homo sapiens
  MAP TO AC004201.1; EXPRESSED IN ADULT LIVER, SIGNAL = 1.6; EXPRESSED IN HEART, SIGNAL = 1.8; EXPRESSED IN FETAL LIVER, SIGNAL = 1.8; EXPRESSED IN BRAIN, SIGNAL = 1.4; SWISSPROT HIT: P47134, EVALUE 3.60e+00; NT HIT: AF404770.1, EVALUE 1.20e+00
cgcaagttgactgtgaagtcctcgagaacagaagcagcatctcactccttttcgtttcactctcccaccctccttgagcactacagggcctggttc

SEQ ID NO: 19824 - DNA, 150 bp, Homo sapiens
  MAP TO AC009533.9; EXPRESSED IN BONE MARROW, SIGNAL = 1.4; EXPRESSED IN PLACENTA, SIGNAL = 1.6; EXPRESSED IN ADULT LIVER, SIGNAL = 1.6; EXPRESSED IN FETAL LIVER, SIGNAL = 1.8; EXPRESSED IN BRAIN, SIGNAL = 1.3; EST_HUMAN HIT: BG830008.1, EVALUE 3.00e-74; SWISSPROT HIT: P54929, EVALUE 3.40e+00; NT HIT: gi14765667, EVALUE 3.00e-79
cttcttcctggcagccagacggcccagcaggccacccttctcccagtgggcatggacctggcgcaggtactcgtaggaggagaagaaacagaccacccctccagaaaccacaccgcacaggttacagaggatgcgacccacctcgtccat

SEQ ID NO: 19825 - DNA, 78 bp, Homo sapiens
  MAP TO AC008033.8; EXPRESSED IN ADULT LIVER, SIGNAL = 8.2; EXPRESSED IN FETAL LIVER, SIGNAL =  10; EXPRESSED IN BRAIN, SIGNAL = 7.7; EXPRESSED IN BONE MARROW, SIGNAL = 6.2; EXPRESSED IN PLACENTA, SIGNAL = 9.4; NT HIT: AL163282.2, EVALUE 2.00e-17; EST_HUMAN HIT: BF110324.1, EVALUE 5.00e-34
tttctcttgctgccgccgtgtaagaaggaccttttgcctcccaccatgattctaagtcctccccagccacgtggaact

SEQ ID NO: 19826 - DNA, 171 bp, Homo sapiens
  MAP TO AD000813.1; EXPRESSED IN LUNG, SIGNAL = 2.6; EXPRESSED IN PLACENTA, SIGNAL = 2.1; EXPRESSED IN ADULT LIVER, SIGNAL = 2.5; NT HIT: gi6754397, EVALUE 1.00e-05; EST_HUMAN HIT: BI460486.1, EVALUE 2.00e-91; SWISSPROT HIT: Q39190, EVALUE 8.00e-04
aatgggcataggcctgctgtgcgcatctgggatgtggaggagaagaatcaggtggcggagatgctaggccacaagtatggtgtggcgtgtgtggccttctcacccaatatgaagcacatcgtgtccatgggctaccaacatgacatggtgctcaacgtctgggactggaag

SEQ ID NO: 19827 - DNA, 160 bp, Homo sapiens
  MAP TO AC007570.23; EXPRESSED IN ADULT LIVER, SIGNAL = 0.73; EXPRESSED IN BRAIN, SIGNAL = 0.58; NT HIT: AF332198.1, EVALUE 2.20e+00; EST_HUMAN HIT: AI985152.1, EVALUE 8.00e-38; SWISSPROT HIT: Q9WTI7, EVALUE 2.00e-09
attttccaagatgccaggaggcctcagccagctcttgtccaggacagtctttggaaggtgataccggagattcaagatgtaattcttccgcacaaacacgataaattcctcgttgtcaggacagaggggtttgttgcgactgatgaatcctttaatgaac

SEQ ID NO: 19828 - DNA, 164 bp, Homo sapiens
  MAP TO AF198095.1; EXPRESSED IN ADULT LIVER, SIGNAL = 0.76; EXPRESSED IN FETAL LIVER, SIGNAL = 0.8; SWISSPROT HIT: Q01037, EVALUE 3.40e+00; NT HIT: AB023230.1, EVALUE 8.80e+00; EST_HUMAN HIT: BF946888.1, EVALUE 8.40e-01
agtaaatatgtcttcatggccaacctgaaatcgagccccatctgttccataaagatatatgggggctgaacttctatgttgtccatacagaataatataaatctgtgagctggtccctgcatctggcaagtcactggtgattataaaaactttccagttactac

SEQ ID NO: 19829 - DNA, 309 bp, Homo sapiens
  MAP TO AL008724.1; EXPRESSED IN ADULT LIVER, SIGNAL = 1.1; EXPRESSED IN LUNG, SIGNAL = 1.2; EXPRESSED IN HELA, SIGNAL = 0.46; EXPRESSED IN FETAL LIVER, SIGNAL = 1.2; EXPRESSED IN PLACENTA, SIGNAL = 0.83; SWISSPROT HIT: Q9RSH4, EVALUE 2.10e+00; EST_HUMAN HIT: AL524810.1, EVALUE 1.10e-01
agtcttggacttttggctttgatgtgcattctcactgaaaatgtggagaagggtctggcttggcagctgacagcggcagctctggagccggctagcggtgttatatcgccctcttgtggcctctggagcagtgcgtgggtgcttgcagccagaagcaggaggatgatccaggccttcccctccacctgggcagcgcaggtgacgggtgccaaaccctcccgagatgacggggtcactgaggctgacctgccacaattcggcatggcccaccggcctcgggtgctggcctccatcaccaccattagcagt

SEQ ID NO: 19830 - DNA, 76 bp, Homo sapiens
  MAP TO AC007013.1; EXPRESSED IN ADULT LIVER, SIGNAL = 7.2; EXPRESSED IN BRAIN, SIGNAL = 7.4; EXPRESSED IN PLACENTA, SIGNAL = 8.4; EST_HUMAN HIT: BG150083.1, EVALUE 5.10e+00
actcatcaatcaacccgagggttttacagaagtggcccacaaagaggcccccactcttgtgctgacctgctggttg

SEQ ID NO: 19831 - DNA, 508 bp, Homo sapiens
  MAP TO AC007788.1; EXPRESSED IN ADULT LIVER, SIGNAL =   1; EXPRESSED IN BRAIN, SIGNAL = 0.87; EXPRESSED IN HELA, SIGNAL = 0.91; EST_HUMAN HIT: AA618338.1, EVALUE 5.00e-42; SWISSPROT HIT: P31622, EVALUE 1.10e-01; NT HIT: L41825.1, EVALUE 3.00e-30
gccctcccccatccactacagcccctcaccctcctgtcattttggttcctcaaccagccactttgccatccactcaacctgcttgtctgtagccttcttcacacatggatgccagtcatcatcagtatacctctgcctcttttactccttcaatgtccctttctcacattctcaaactagtctgcatcagtatgtgggactcaatcttacctttttaaaagaatttaaggattcttgtactcagtatggtcctacttctcctaatgttaaaacagcattacaaactttgtgtggaggcaactttgcttcctttagactgggaccttttgacataagctcttctaaccccatctcagcctggcgggcagagaagggccatctccaggctcagctaaatcagactaatggcattctaattactcaggctcagctcacaggctctgatagtttctctgatacttatgcccaattaggctttgatgctcttaccagaaaacaagtaacaaag

SEQ ID NO: 19832 - DNA, 191 bp, Homo sapiens
  MAP TO AC010499.4; EXPRESSED IN ADULT LIVER, SIGNAL = 0.59; EXPRESSED IN BONE MARROW, SIGNAL = 0.87; EST_HUMAN HIT: AW297908.1, EVALUE 2.50e-01; SWISSPROT HIT: P56719, EVALUE 1.50e+00; NT HIT: gi15920163, EVALUE 4.30e-02
agtggattaattgatgctgatgtcttggaaaagcaggcactgaaaaactgtgctcaagcaatagaggaacatggaaccatgaataggggcagtaagcccaaggtcttaaaaatgatctccagggaaacctcaggaaatctgaatcatcaacttccactagtccatacggaagagactgagacacagaaaaa

SEQ ID NO: 19833 - DNA, 152 bp, Homo sapiens
  MAP TO AF172277.1; EXPRESSED IN PLACENTA, SIGNAL = 0.73; EXPRESSED IN ADULT LIVER, SIGNAL = 1.1; NT HIT: AF111168.2, EVALUE 6.00e-07; EST_HUMAN HIT: AV700426.1, EVALUE 4.90e-02; SWISSPROT HIT: P79021, EVALUE 7.60e+00
atgtgcctaaacataataaaaatatcgtatctgattctacggacattaaagtggaatggaaaaactgtgggctatggagtaacacagacgtggctttgaattatggttcttctatctacagccataccaccctgagcgtgcctgatcgtgtc

SEQ ID NO: 19834 - DNA, 247 bp, Homo sapiens
  MAP TO AC006138.1; EXPRESSED IN ADULT LIVER, SIGNAL = 1.2; SWISSPROT HIT: gi399154, EVALUE 5.50e-02; NT HIT: gi4506008, EVALUE 0.00e+00; EST_HUMAN HIT: BE867330.1, EVALUE 0.00e+00
taaatgtgaataagatcaaggactttggtgaggcggctaagcgagagatactgtcagaccgacatgcatttgagacagcgcggcgtctgagccatgataacatggaggagaaggtgccctgggtgtgcccccggcccctggttctgccctcacctcttgtcacccctggaagcaatagtcaggagcgatatatccaggctgagcgggagaagggaatccttcaggagctcttcctgaacaaggagag

SEQ ID NO: 19835 - DNA, 195 bp, Homo sapiens
  MAP TO AC025447.3; EXPRESSED IN ADULT LIVER, SIGNAL = 5.5; EXPRESSED IN BRAIN, SIGNAL = 5.4; EXPRESSED IN LUNG, SIGNAL = 2.8; SWISSPROT HIT: P72655, EVALUE 3.70e-01; NT HIT: AF091863.1, EVALUE 6.00e-66; EST_HUMAN HIT: BF381135.1, EVALUE 1.00e-100
cattcagaaggcaggtgttgagaaaaagtagcagagtgaaaacggttgcagatgccacattttccttcatgttggctgccttctcttgctgcaggaaatgtatcagaagttcactggaagagaaggtagcaggtaacttttgtgaaatggcagtctggtcaggcacatccaccactttattctgggtatttgcaa

SEQ ID NO: 19836 - DNA, 100 bp, Homo sapiens
  MAP TO AC004712.1; EXPRESSED IN HELA, SIGNAL = 0.52; EXPRESSED IN ADULT LIVER, SIGNAL = 0.48; EST_HUMAN HIT: H52869.1, EVALUE 8.00e-43; NT HIT: AF020503.1, EVALUE 2.00e-21
atgttctggatggaagatcaaaccagccacatttccttaagtcaaagcctaatccagaacaagatcctaactctcttcaattctatgaaggctgagagag

SEQ ID NO: 19837 - DNA, 220 bp, Homo sapiens
  MAP TO AC006162.1; EXPRESSED IN ADULT LIVER, SIGNAL = 0.59; EXPRESSED IN HELA, SIGNAL = 0.66; EST_HUMAN HIT: BE737432.1, EVALUE 7.40e-02; SWISSPROT HIT: P32094, EVALUE 4.60e-01; NT HIT: Y09085.1, EVALUE 2.00e-01
ttactgggaggtagatagccccaggaaggaatccagtcaggcctgggcaccaggccaggagtggataaagctagaaagagacaccacagaagagaagatgtttgaacagctgaagccaatcgaacctgtacagaagacgctcccatgggtgggcgaggtagctgccaccctgcaggaagccatgaagagagattgctggagggaggcacgggtgaagaag

SEQ ID NO: 19838 - DNA, 381 bp, Homo sapiens
  MAP TO AC020914.6; EXPRESSED IN ADULT LIVER, SIGNAL = 0.57; NT HIT: AE008683.1, EVALUE 1.00e-03; EST_HUMAN HIT: AL568689.1, EVALUE 2.00e-03
atgctagtggtaacaaccaccaccaccccagttcagaaaaccaaaaatgtctctagacactatgaagatcacatgggaggcaactttgcctggttgagagtcagtggagtagatgttagaaagtgcagtgatgcttgggaggatgatgacgttaatgatggagataatggtaccaatggtgatggtggtgattatagtgggaatggcaatgatgatgtagattaatagtggaaatggcattattgtgatggtgatgatggtgatgatagtaatagtggtggtggtgatagtggtgatgatgatgatgacaaagatgatggtagtgttgctagtgatggtgacattggtagtgatgatgacaatggtgatgatgatggccat

SEQ ID NO: 19839 - DNA, 157 bp, Homo sapiens
  MAP TO AC040171.3; EXPRESSED IN PLACENTA, SIGNAL =   1; EXPRESSED IN ADULT LIVER, SIGNAL = 1.1; NT HIT: AF242431.1, EVALUE 1.40e-01; EST_HUMAN HIT: AW868655.1, EVALUE 8.00e-01; SWISSPROT HIT: Q58242, EVALUE 4.40e+00
tcaaagaattttcacattatgacatttcctcttcaaagcaatcctatccttatgaacgatactattgccatttttttcagatgatggaatgggttcattatagggccttaggaaaattcctaaattattctgtgtttcagtgatttctctgtccccc

SEQ ID NO: 19840 - DNA, 122 bp, Homo sapiens
  MAP TO AC026693.3; EXPRESSED IN PLACENTA, SIGNAL = 0.99; EXPRESSED IN ADULT LIVER, SIGNAL = 0.92; SWISSPROT HIT: Q9XBA7, EVALUE 6.00e+00; NT HIT: X83373.1, EVALUE 1.60e+00; EST_HUMAN HIT: BI114289.1, EVALUE 5.90e-01
agcttgttgacgatgagccccatgctggtgcttccaaagataaggaatgtgaccaggcaaagttgcctggaatattgtctatgcgcgtcgctgaaaaattggatctgggtgaagatccaata

SEQ ID NO: 19841 - DNA, 194 bp, Homo sapiens
  MAP TO AL117187.3; EXPRESSED IN BONE MARROW, SIGNAL = 2.6; EXPRESSED IN ADULT LIVER, SIGNAL = 2.1; EXPRESSED IN HEART, SIGNAL = 2.1; EXPRESSED IN PLACENTA, SIGNAL = 2.5; EXPRESSED IN LUNG, SIGNAL = 1.3; EXPRESSED IN BRAIN, SIGNAL = 3.1; SWISSPROT HIT: Q15149, EVALUE 9.00e-09; NT HIT: gi14748155, EVALUE 1.00e-105; EST_HUMAN HIT: BE250329.1, EVALUE 1.00e-105
gtatggcgtggcggtgcaggactttgcgggcagttggaggagtgggctggctttcctggcggtgatcaaggccattgaccccagcctggtggacatgaaacaggccctggaaaattccacacgagaaaatctagagaaggctttcagcatcgcacaggatgccctgcacatccccaggctcctggagccagaag

SEQ ID NO: 19842 - DNA, 264 bp, Homo sapiens
  MAP TO AC020927.4; EXPRESSED IN ADULT LIVER, SIGNAL = 0.98; EXPRESSED IN PLACENTA, SIGNAL = 0.98; SWISSPROT HIT: P08122, EVALUE 3.60e+00
atgacctcccttcacttcgttctggatgtaggagttacccgcatgagcagcatcactacccagctgagttcaatctgctttgaaggttgcctttgccctcattccatcatttccctggtgtgccaggccgaaagggtcacctggggtgtgtgtgaagcacagaggtgcccaggcatctctctggagatgctgattcaggagtctgcagctggcatctggaatctctatgttgagcaagtgctccacgtggttcttgtgacctga

SEQ ID NO: 19843 - DNA, 181 bp, Homo sapiens
  MAP TO AC008625.4; EXPRESSED IN HELA, SIGNAL = 0.48; EXPRESSED IN PLACENTA, SIGNAL = 0.63; EXPRESSED IN ADULT LIVER, SIGNAL = 0.68; EXPRESSED IN LUNG, SIGNAL = 0.5; EXPRESSED IN FETAL LIVER, SIGNAL = 0.48; EST_HUMAN HIT: BG752343.1, EVALUE 3.70e+00; SWISSPROT HIT: P13648, EVALUE 9.70e+00; NT HIT: AF217281.1, EVALUE 9.90e+00
gacgcagagcatctgggagagcaccccatggagcagcccaagagggaagaagaggaggagcagcagaagggaagcagggagggggccaccaaccagatgagtcagcagcatcaccagcattggttctctggctgctggggtgctgctaaccttgcagaggcttggactggctctgggacct

SEQ ID NO: 19844 - DNA, 323 bp, Homo sapiens
  MAP TO AC011452.5; EXPRESSED IN BONE MARROW, SIGNAL =   3; EXPRESSED IN ADULT LIVER, SIGNAL =   3; EXPRESSED IN BRAIN, SIGNAL = 1.8; EXPRESSED IN PLACENTA, SIGNAL = 3.7; EST_HUMAN HIT: BG751504.1, EVALUE 0.00e+00; SWISSPROT HIT: Q14157, EVALUE 2.40e-02; NT HIT: gi11424606, EVALUE 0.00e+00
gctccgggagcagacccccaacccccaaaagcagccctcagaagaccaggaagagccctcaggtgaccaggggtagccctcagaagaccagctgtagccctcagaagaccaggcagagccctcagacgctgaagcggagccgagtgaccacctcacttgaagctttgcccacagggacagtgctgacagacaagagtgggcgacagtggaagctgaagtccttccagaccagggacaaccagggcattctctatgaaggtacactctgtccatgggcggccagggactgggtcgtctcagcaccaggacagtgggaggggacc

SEQ ID NO: 19845 - DNA, 187 bp, Homo sapiens
  MAP TO AC004490.1; EXPRESSED IN ADULT LIVER, SIGNAL = 1.4; EXPRESSED IN PLACENTA, SIGNAL =   3; NT HIT: gi11119425, EVALUE 1.00e-05; EST_HUMAN HIT: BG390562.1, EVALUE 1.00e-06; SWISSPROT HIT: P16818, EVALUE 3.80e-01
tgagcgtggcgtcctcaaggtgcatccgcgatgtggcctgggttggagcctggctcctgttctcattggggtcctgcttccaggtgtgcgcggcctcgctgtgctgtgttgatctttcatctgctgatggacgcttggctgcttccaccttttggctgtgatgagttgtgttggcttttggaggcat

SEQ ID NO: 19846 - DNA, 99 bp, Homo sapiens
  MAP TO AC004858.2; EXPRESSED IN ADULT LIVER, SIGNAL = 0.72; EXPRESSED IN PLACENTA, SIGNAL = 0.7; EST_HUMAN HIT: AW850564.1, EVALUE 8.00e-49; SWISSPROT HIT: P79802, EVALUE 5.00e-12; NT HIT: gi13649050, EVALUE 6.00e-49
aggagtaaatgagagctggaaaaagcgtttcatttctctcctgagctgtttcaaccagcatacgaagtggacctttcggacacaaaacagccactaaat

SEQ ID NO: 19847 - DNA, 338 bp, Homo sapiens
  MAP TO AC020945.6; EXPRESSED IN ADULT LIVER, SIGNAL = 3.7; EXPRESSED IN BRAIN, SIGNAL = 3.4; EXPRESSED IN BONE MARROW, SIGNAL = 4.7; EXPRESSED IN PLACENTA, SIGNAL =   4; EST_HUMAN HIT: BG774939.1, EVALUE 0.00e+00; SWISSPROT HIT: P10569, EVALUE 9.00e-05
gggtcctgctgggtgttcgggctgtgcccagtctcggctacactgaggaccctgagctgccgggcctgttccacccagtgctgggcacgccctgccaaccaccatccctgccagaggagggctccccgggagctgtctacctgctgtccaagcagggcaagagttggcactatcagctgtgggactacgaccaggtccgggagagcaacctgcagctgacggacttctcgccctcacgggccactgacggccgggtgtacgtggtgcccgtgggtggggtacgggctggcctctgtggccaggccctgctcctcacaccacaggactgcagccattag

SEQ ID NO: 19848 - DNA, 108 bp, Homo sapiens
  MAP TO AC025445.3; EXPRESSED IN BONE MARROW, SIGNAL = 2.6; EXPRESSED IN PLACENTA, SIGNAL =   2; EXPRESSED IN ADULT LIVER, SIGNAL = 1.9; EXPRESSED IN BRAIN, SIGNAL = 2.1; NT HIT: U55885.1, EVALUE 3.00e-29; EST_HUMAN HIT: AW303317.1, EVALUE 1.00e-29
atgatcacaaggtcccacagtaggctgtctgcaagcttggagcaaggagagccagtccgagtttcaaaactgaagaacttgggagtccgatgtttgagggcaggaagc

SEQ ID NO: 19849 - DNA, 333 bp, Homo sapiens
  MAP TO AL117259.3; EXPRESSED IN BONE MARROW, SIGNAL =  15; EXPRESSED IN ADULT LIVER, SIGNAL =  14; EXPRESSED IN HEART, SIGNAL =  12; EXPRESSED IN LUNG, SIGNAL = 8.5; EXPRESSED IN BRAIN, SIGNAL =  16; EXPRESSED IN PLACENTA, SIGNAL =  14; SWISSPROT HIT: P08547, EVALUE 1.00e-12; NT HIT: X87344.1, EVALUE 2.00e-05; EST_HUMAN HIT: AW576808.1, EVALUE 8.00e-09
atgaatccaccaagaaatagcaaacctaagtgtgtatacaacaaactgagttgcaaaatatgtgatgcaaaaactgatgagactgaaaagaaaaacagacaaaaatacacaggtgcagctggagatttcagaacccatctctcaacaactgacagaactacacagggaatcagcaaagatatagaagaactcaagaataccatcaaccaagatttagtagacatttatagaacactctatccaacagcagaatacacattccattcaagtgcccgaagaatatatatcaagacagaccacaaaacaaacctcaacaaatttttgaaaatttaa

SEQ ID NO: 19850 - DNA, 262 bp, Homo sapiens
  MAP TO AC000123.1; EXPRESSED IN ADULT LIVER, SIGNAL = 0.89; EXPRESSED IN BRAIN, SIGNAL = 1.1; EXPRESSED IN FETAL LIVER, SIGNAL = 0.81; EST_HUMAN HIT: BE378684.1, EVALUE 0.00e+00; SWISSPROT HIT: P30640, EVALUE 7.80e+00; NT HIT: AJ223385.1, EVALUE 9.50e-01
ttcccagatggatggagagaagactgacaatgattatttttgctggggtgatcaactgactcatctgaatcattcctttctgtactcattttcacacaaatgttttgatttgtcagttgtgtatctgtcaggtctgtagtgtcactgctgactgctgaaatcctacatttacccatggacttttcaatcacaacctcccagtgccatggccatccttctaaggattcagatgttgctaccattttcaaaataacttcacact

SEQ ID NO: 19851 - DNA, 179 bp, Homo sapiens
  MAP TO AC008772.5; EXPRESSED IN ADULT LIVER, SIGNAL = 1.1; EXPRESSED IN BRAIN, SIGNAL =   1; EXPRESSED IN FETAL LIVER, SIGNAL = 1.2; EXPRESSED IN BONE MARROW, SIGNAL = 1.1; EST_HUMAN HIT: AV745174.1, EVALUE 7.00e-94; SWISSPROT HIT: Q09295, EVALUE 8.00e-04; NT HIT: gi9910563, EVALUE 1.00e-91
ttcagtggcctgtctccaaacataactccattaaaagcaagggcccttggtacagaattttggtctgcaaattccacaaaagcaaaccgagttggctgagtctcatcacctgccatccgcacaaacttcacttctccaacttgtttaaaaaattcaagtagttgatcagctgtcgttgt

SEQ ID NO: 19852 - DNA, 124 bp, Homo sapiens
  MAP TO AC026888.4; EXPRESSED IN ADULT LIVER, SIGNAL = 0.74; EXPRESSED IN PLACENTA, SIGNAL = 0.69; EST_HUMAN HIT: BG385780.1, EVALUE 2.40e+00; SWISSPROT HIT: O30167, EVALUE 4.60e+00; NT HIT: AF050215.1, EVALUE 1.00e-01
tactaatcaatttctcataatcatcagtgcttttcatctgtgagcggattatttggtcaaacatggagacaatggcacagccgtgagtagagcccaggtgtttttctccgatttctccacagaa

SEQ ID NO: 19853 - DNA, 132 bp, Homo sapiens
  MAP TO AL118556.2; EXPRESSED IN ADULT LIVER, SIGNAL = 7.5; EXPRESSED IN HEART, SIGNAL = 7.6; EXPRESSED IN FETAL LIVER, SIGNAL = 7.8; EXPRESSED IN BRAIN, SIGNAL = 7.9; EXPRESSED IN BONE MARROW, SIGNAL = 7.7; EST_HUMAN HIT: AI866570.1, EVALUE 2.00e-68; SWISSPROT HIT: Q13043, EVALUE 5.00e-07; NT HIT: gi14746897, EVALUE 2.00e-68
ctcattgggtggagatcaaacataggtggctgaagttctccaagttcaattgctgttattcctactgcccagatatcacagagttggttgtagccaccattcttctctactgctgcaacttctggggccatc

SEQ ID NO: 19854 - DNA, 449 bp, Homo sapiens
  MAP TO AC021092.1; EXPRESSED IN BONE MARROW, SIGNAL = 1.3; EXPRESSED IN PLACENTA, SIGNAL = 0.9; EXPRESSED IN ADULT LIVER, SIGNAL = 0.88; EST_HUMAN HIT: BF876105.1, EVALUE 0.00e+00; SWISSPROT HIT: Q9UK10, EVALUE 1.00e-91; NT HIT: gi7019592, EVALUE 0.00e+00
agtccacagtggagaaaaaccattcaaatgtgaagagtgtgggaaaagatttactcagaattcacaactttattctcatcgcagagtccacactggagtaaagccatacaaatgtgaagagtgtgggaagggcttcaacagtaagtttaatcttgacatgcaccagagggtccacaccggagagagaccttataattgtaaagaatgtgggaagagctttagccgggcctcaagtattttgaatcataagagactccatggtgatgaaaagccattcaaatgtgaagagtgtgggaagagatttactgagaattcacagcttcattcccatcagagggttcacactggggaaaagccatacaaatgtgagaagtgtggaaagagcttcagatgggcctcaactcatctaacccatcagagactccacagtagagaaaaactacttcaat

SEQ ID NO: 19855 - DNA, 228 bp, Homo sapiens
  MAP TO AC006479.2; EXPRESSED IN BONE MARROW, SIGNAL = 0.78; EXPRESSED IN PLACENTA, SIGNAL = 2.2; EXPRESSED IN HEART, SIGNAL =   4; EXPRESSED IN ADULT LIVER, SIGNAL = 8.2; EXPRESSED IN FETAL LIVER, SIGNAL = 5.8; NT HIT: gi14745427, EVALUE 1.00e-125; EST_HUMAN HIT: AW869448.1, EVALUE 1.00e-125; SWISSPROT HIT: P24055, EVALUE 7.60e+00
ggctatatatccagcctgctcaccctggcaggctttgctacagctatggctgctgttgtcctctgcgtgaatagcttcatctggcaaactgaaccctttttatacatcgacactgtgtgtgatcgctcagaccctgtcttccctaccactgggtacagatggatgcggcgaagtcaagagaaccaatggcagaaggaggagtgtagagcttacatgcagatgctgagg

SEQ ID NO: 19856 - DNA, 108 bp, Homo sapiens
  MAP TO AC007920.18; EXPRESSED IN BONE MARROW, SIGNAL = 2.5; EXPRESSED IN ADULT LIVER, SIGNAL = 3.9; EXPRESSED IN PLACENTA, SIGNAL = 4.4; EXPRESSED IN LUNG, SIGNAL = 1.2; EXPRESSED IN FETAL LIVER, SIGNAL = 7.6; EXPRESSED IN BRAIN, SIGNAL = 3.6; EST_HUMAN HIT: AU123311.1, EVALUE 5.10e-01; NT HIT: gi9635035, EVALUE 3.50e-01
catcattttctcgagccttctgcctacccttgtcaggcttcaggaatgcagacaggcaaagaagaactgctgtatatccaaacctattcagcccctccttgtctagac

SEQ ID NO: 19857 - DNA, 322 bp, Homo sapiens
  MAP TO AC010526.6; EXPRESSED IN ADULT LIVER, SIGNAL = 0.63; EXPRESSED IN BRAIN, SIGNAL = 0.69; EXPRESSED IN FETAL LIVER, SIGNAL = 0.61; EXPRESSED IN BONE MARROW, SIGNAL = 0.9; EST_HUMAN HIT: AW753590.1, EVALUE 0.00e+00; SWISSPROT HIT: Q28559, EVALUE 1.30e+00; NT HIT: gi16162622, EVALUE 7.60e-02
ttatttttctctgttcaaatttagccacacgttgaagttttctgtgtcatttttggaaataggtatgacaatctgtaagcggcacagagagagagaaccgcagcctccatgggaacgaggaagtgggaacgggatgagagtttggaatcgatctccgtggaaggtctgaattgcaaggcgggtttccctggggacaatctcaaccataaaaaagttctgctcacatgactgatggcttttcaataacaagtatatggcggtcttgaatgtgcacaggttgacagttttcccgggagcttctacatgcacgagctggcagagt

SEQ ID NO: 19858 - DNA, 135 bp, Homo sapiens
  MAP TO AL121592.14; EXPRESSED IN LUNG, SIGNAL =   4; EXPRESSED IN FETAL LIVER, SIGNAL = 8.1; EXPRESSED IN PLACENTA, SIGNAL =   9; EXPRESSED IN ADULT LIVER, SIGNAL = 6.4; EXPRESSED IN HEART, SIGNAL = 8.1; EST_HUMAN HIT: AW894237.1, EVALUE 1.00e-33; NT HIT: AF003530.2, EVALUE 7.00e-31
gatgcagacctggatagaggatgagatggatgaactgacagaagtaggcttcagaagatgggtaatagcaaactctgctgagctaaaggagcatgttctaatccaatgtaaagaagctaagaaccttgataaaag

SEQ ID NO: 19859 - DNA, 233 bp, Homo sapiens
  MAP TO AF235097.1; EXPRESSED IN PLACENTA, SIGNAL = 1.3; EXPRESSED IN ADULT LIVER, SIGNAL = 0.97; SWISSPROT HIT: O60840, EVALUE 1.00e-25; EST_HUMAN HIT: BI559809.1, EVALUE 1.20e+00; NT HIT: AJ006216.1, EVALUE 1.00e-128
atctaaggcatgcagggaatgggccagattggagttgcctacgatggcccgcccggccctcttcagccatagaaccaaggttgtcatcggcggaggggtcctccatgtccagctcttcggcttgagtgatccagtccaggtagccccgcaggtcttcctccatctgctgcttctcccgctgcttctggaagtccccgcgagctttcgctttctctctctccttggagaactcc

SEQ ID NO: 19860 - DNA, 83 bp, Homo sapiens
  MAP TO AC006275.1; EXPRESSED IN PLACENTA, SIGNAL = 2.6; EXPRESSED IN ADULT LIVER, SIGNAL = 1.5; NT HIT: U94345.1, EVALUE 6.40e-02
atgttctcgagatttcactcagtgtcctatggtgtcactggtcctggtcgcagacacagactcacctgtgtgcaggaggtcag

SEQ ID NO: 19861 - DNA, 164 bp, Homo sapiens
  MAP TO AC008050.4; EXPRESSED IN HEART, SIGNAL =  30; EXPRESSED IN ADULT LIVER, SIGNAL = 3.2; EXPRESSED IN LUNG, SIGNAL = 1.1; EXPRESSED IN BRAIN, SIGNAL =   3; EXPRESSED IN FETAL LIVER, SIGNAL = 3.5; NT HIT: M22886.1, EVALUE 2.00e-87; SWISSPROT HIT: P00008, EVALUE 8.00e-23; EST_HUMAN HIT: BG505618.1, EVALUE 3.00e-62
atgccagtaagaacaaaggcatcacgtggggagaggataccctgatggagtatttggagactcccaagaagtacatccctggaacaaaagtgatctttgccggcattaagaagaagacagaaagggcagacttgatagcttatctcaaaaaagctactattgag

SEQ ID NO: 19862 - DNA, 77 bp, Homo sapiens
  MAP TO AL050316.15; EXPRESSED IN ADULT LIVER, SIGNAL = 0.98; EXPRESSED IN HEART, SIGNAL = 1.3; EXPRESSED IN HELA, SIGNAL = 0.79; EXPRESSED IN FETAL LIVER, SIGNAL =   1; NT HIT: AB052158.1, EVALUE 2.30e-01; EST_HUMAN HIT: BF918016.1, EVALUE 3.30e-01
agaagcaaatgacttacttgaagtcatccagctcatcagaaagaaccccaaccctcccaaggtatttgaccttgcag

SEQ ID NO: 19863 - DNA, 113 bp, Homo sapiens
  MAP TO AC067967.2; EXPRESSED IN PLACENTA, SIGNAL = 0.49; EXPRESSED IN ADULT LIVER, SIGNAL = 0.67; EXPRESSED IN BONE MARROW, SIGNAL = 0.93; EST_HUMAN HIT: BI601571.1, EVALUE 4.00e-57; NT HIT: gi14739516, EVALUE 3.00e-57; SWISSPROT HIT: O28190, EVALUE 6.00e+00
cgcaagcatccactttgggaggaagcactctccacgtagtgtttcagagcgagctggaattcttccaggtcctcttctatcacagacatctgccgctgcacaagcatgatgtg

SEQ ID NO: 19864 - DNA, 413 bp, Homo sapiens
  MAP TO AC010327.5; EXPRESSED IN HEART, SIGNAL = 1.4; EXPRESSED IN LUNG, SIGNAL =   1; EXPRESSED IN FETAL LIVER, SIGNAL = 1.7; EXPRESSED IN BRAIN, SIGNAL = 1.2; EXPRESSED IN PLACENTA, SIGNAL = 1.8; EXPRESSED IN ADULT LIVER, SIGNAL = 1.2; EST_HUMAN HIT: BG422023.1, EVALUE 1.00e-130; NT HIT: gi14762597, EVALUE 1.00e-31; SWISSPROT HIT: P81122, EVALUE 7.80e+00
atggaggcagtgagcctgcgggcagtcccggggcggggccgggctcagcatgaggcagagggctgggacttggggagaggctgtgcccaaggtgggcactcagcccctgtggtcagtgcctcgtccagtggggactccctggggcgtctgacgcggcgctggttgtgtctatgcctgcagggcgccatgttttggaagtttgacctgcacacaagctcgcacctggacacgctgctggagcgggaggacctgagcctgcccgagctgctggacgaggaagacgtgctgcaggagtgcaaggtcgtcaaccgcaagctgctggacttcctgctgcagccaccccacctgcaagcaatggtggcctgggtcacccaggagccgccagatagcggtgaggagcggctgcgctacaa

SEQ ID NO: 19865 - DNA, 222 bp, Homo sapiens
  MAP TO AC005932.1; EXPRESSED IN HELA, SIGNAL = 0.6; EXPRESSED IN PLACENTA, SIGNAL = 0.57; EXPRESSED IN ADULT LIVER, SIGNAL = 0.58
ggacctcatgtctggtagacaagggaacgaggaaatgacttctgacaggattttgcaaaagaaagaaaaccaggcaaagcaccaggtcaagactgcagtggttgctgaaggctactttgtggaggtggtgattcagggcaatagcacgcccaaaggccctgaggcagggatgtgttcagccccttgggacagcattgaggaggcggctgtgactgaagcaaa

SEQ ID NO: 19866 - DNA, 279 bp, Homo sapiens
  MAP TO AC008999.5; EXPRESSED IN ADULT LIVER, SIGNAL =  38; EXPRESSED IN HEART, SIGNAL =  94; EXPRESSED IN FETAL LIVER, SIGNAL =  36; EXPRESSED IN LUNG, SIGNAL =  17; EXPRESSED IN PLACENTA, SIGNAL =  30; SWISSPROT HIT: P06731, EVALUE 6.00e-50; EST_HUMAN HIT: AW376508.1, EVALUE 0.00e+00; NT HIT: gi13630115, EVALUE 0.00e+00
cagagccacccaaacccttcatcaccagcaacaactccaaccccgtggaggatgaggatgctgtagccttaacctgtgaacctgagattcagaacacaacctacctgtggtgggtaaataatcagagcctcccggtcagtcccaggctgcagctgtccaatgacaacaggaccctcactctactcagtgtcacaaggaatgatgtaggaccctatgagtgtggaatccagaacaaattaagtgttgaccacagcgacccagtcatcctgaatgtcctct

SEQ ID NO: 19867 - DNA, 227 bp, Homo sapiens
  MAP TO AC009318.11; EXPRESSED IN ADULT LIVER, SIGNAL = 0.59; EXPRESSED IN LUNG, SIGNAL = 1.1; SWISSPROT HIT: Q08891, EVALUE 9.00e-09; EST_HUMAN HIT: BG545550.1, EVALUE 1.00e-125; NT HIT: gi14764170, EVALUE 1.00e-125
gaacctctttcaggagctataaaagaaagggaggaatcatgtccacaattgcagctttctatggcggcaagtccattctcatcacgggggccacaggctttctgggcaaagtgctgatggagaagctgtttcgcaccagcccagacctgaaagtcatttacatccttgtgaggcccaaggctggccagacactgcagcagagggttttccagatcctagacagtaag

SEQ ID NO: 19868 - DNA, 127 bp, Homo sapiens
  MAP TO AC012152.12; EXPRESSED IN HEART, SIGNAL = 1.3; EXPRESSED IN ADULT LIVER, SIGNAL = 1.2; EXPRESSED IN BRAIN, SIGNAL = 1.1; EXPRESSED IN FETAL LIVER, SIGNAL = 1.4; EXPRESSED IN LUNG, SIGNAL = 0.66; EXPRESSED IN PLACENTA, SIGNAL = 1.3; NT HIT: AF094611.1, EVALUE 4.20e-01; SWISSPROT HIT: P47816, EVALUE 6.00e+00; EST_HUMAN HIT: BG399702.1, EVALUE 1.60e-01
ctatttcttgacctctgccctccacccctctgcatggcaaaagtcagcatcttttcttctctcttaaacaaagaaacgtcataaatatcataccaattttcaggatagatggttttaggccaaagat

SEQ ID NO: 19869 - DNA, 259 bp, Homo sapiens
  MAP TO AC000356.1; EXPRESSED IN BRAIN, SIGNAL = 1.1; EXPRESSED IN PLACENTA, SIGNAL = 1.1; EXPRESSED IN ADULT LIVER, SIGNAL =   1; NT HIT: AF418272.1, EVALUE 1.00e-73; SWISSPROT HIT: P11260, EVALUE 7.00e-05; EST_HUMAN HIT: BE218911.1, EVALUE 1.00e-81
ggaaggaccagagaaaggtgaagcccaatgccaggaaatccaaaaaataatgcaagaactgaagggaaaattattcaaggaagtagatagcttaaagaaaaagcaatcaaaaattcaggaaactttagacacacttttagaaatgtggaatgctctggaaagtctcagcaatataattgagcaagtagaagaaagaaactcagagctcaaagacaaggtcttcaaattaacccaatccaaaaaagacaaagaaaaagaa

SEQ ID NO: 19870 - DNA, 133 bp, Homo sapiens
  MAP TO AC009509.7; EXPRESSED IN LUNG, SIGNAL = 0.81; EXPRESSED IN ADULT LIVER, SIGNAL = 0.56; EST_HUMAN HIT: BG191096.1, EVALUE 4.00e-64; NT HIT: gi10946847, EVALUE 4.50e-01; SWISSPROT HIT: P54036, EVALUE 5.90e+00
ccttggaaggtgcgtcttcccaggaggttgtgtcctcacagggggtgtcctcacaggggaaatagcccacagagaggatcaggttggaattggatttggagctgtcgtcctctatgtcgctgttagaggatga

SEQ ID NO: 19871 - DNA, 158 bp, Homo sapiens
  MAP TO AC000361.1; EXPRESSED IN PLACENTA, SIGNAL = 0.41; EXPRESSED IN ADULT LIVER, SIGNAL = 0.35; EST_HUMAN HIT: BG191396.1, EVALUE 8.00e-01; NT HIT: AL163281.2, EVALUE 5.40e-01; SWISSPROT HIT: P11323, EVALUE 9.90e+00
gtcagtctggccactatgtgaagaatggactggaagggaacaagaatggagcacatttagaaggccattgcaatcacccagatgagaagtgcagtgatctggacagaagcagagacagggtagatgaaggtgaacagtttcaagtcaacagggactga

SEQ ID NO: 19872 - DNA, 162 bp, Homo sapiens
  MAP TO AC008886.4; EXPRESSED IN BONE MARROW, SIGNAL = 0.46; EXPRESSED IN PLACENTA, SIGNAL = 0.41; EXPRESSED IN ADULT LIVER, SIGNAL = 0.41; EXPRESSED IN LUNG, SIGNAL = 0.9; SWISSPROT HIT: P75371, EVALUE 1.50e+00; EST_HUMAN HIT: AW270150.1, EVALUE 4.00e-86; NT HIT: J00153.1, EVALUE 1.40e-01
tagggatcctctggaaacagaacagagggaagaagataccttccctgaagcccagatgttccagaagcctgcgcctcattcacaaagtcaccccaaaaatgccctagagtttggagttttgaagaagcgggaagaaggcctgagtaagggcctgggaaccaa

SEQ ID NO: 19873 - DNA, 165 bp, Homo sapiens
  MAP TO AF201337.1; EXPRESSED IN FETAL LIVER, SIGNAL = 0.78; EXPRESSED IN ADULT LIVER, SIGNAL = 0.51; SWISSPROT HIT: P28683, EVALUE 7.50e+00; NT HIT: L10641.1, EVALUE 8.90e+00
aaaaagttcaaagtcatgtactcagagtactttcaacagtattgtgcaagtgtcgagttgactaaatgcacatatttccatctgatgtcaaacatgctgccaaaccttaattttacaatgagaatacagtttgccaaacagaaaatcagagcaccacagctcctc

SEQ ID NO: 19874 - DNA, 120 bp, Homo sapiens
  MAP TO AB014085.1; EXPRESSED IN ADULT LIVER, SIGNAL = 0.55; NT HIT: AJ231080.1, EVALUE 3.90e-01; EST_HUMAN HIT: BG577180.1, EVALUE 1.50e-01
acatgttcagtcacatgcaatcataacacactcaagacaaacttagccaaagatcagattaagtgtgcaagagtcgagctcagtcatcccaaattaaacttactggaggagccatggaag

SEQ ID NO: 19875 - DNA, 178 bp, Homo sapiens
  MAP TO AC009567.8; EXPRESSED IN LUNG, SIGNAL = 0.53; EXPRESSED IN ADULT LIVER, SIGNAL = 0.52; NT HIT: AL445565.1, EVALUE 4.00e-05; SWISSPROT HIT: P55908, EVALUE 7.40e+00; EST_HUMAN HIT: T78087.1, EVALUE 5.90e-02
taaagagaaagccaatgcagctacatttttacacattaaatttttcagtgagaaattcaccaacacggattgtactttaaaaaacataaaatttatttttgaaattatgtatgcacagacatgggtgaataagatcactattttcactgaggcagagcatctgcttgtagtgacataa

SEQ ID NO: 19876 - DNA, 164 bp, Homo sapiens
  MAP TO AC012467.9; EXPRESSED IN ADULT LIVER, SIGNAL = 0.41; EST_HUMAN HIT: AW296057.1, EVALUE 6.00e-05; NT HIT: Z26290.1, EVALUE 4.00e-85; SWISSPROT HIT: Q99244, EVALUE 4.00e-06
ctgcatgccaatgaccgcatagatgaagaacagcatggctatgaggagggccacatacgggagcgcctgggagagaaaaggcacttggctcagcaccagccggctgtccccgtgacggcccgccacagcctgagaagacccatgagtggccacatgcttccttt

SEQ ID NO: 19877 - DNA, 89 bp, Homo sapiens
  MAP TO AC000125.1; EXPRESSED IN ADULT LIVER, SIGNAL = 0.45; EST_HUMAN HIT: BG182465.1, EVALUE 5.00e-13; NT HIT: AL163201.2, EVALUE 1.00e-06
ctttccactggggatccaagcaacccagtcgaggagaaactttgtttctcccaagccctggagctaacttggggagagacttggagact

SEQ ID NO: 19878 - DNA, 203 bp, Homo sapiens
  MAP TO AF222684.1; EXPRESSED IN FETAL LIVER, SIGNAL = 0.49; EXPRESSED IN PLACENTA, SIGNAL = 0.58; EXPRESSED IN ADULT LIVER, SIGNAL = 0.81; SWISSPROT HIT: Q14957, EVALUE 1.90e+00; EST_HUMAN HIT: AA643733.1, EVALUE 1.10e+00; NT HIT: AL163208.2, EVALUE 1.00e-106
gcttgaatatggtcacatttccagatgcccttttctcggttggactgtcaggtcctggaaggcagggacttttgacaaatctgggagcagctaaagaggcagtgtcagtagaggcggcatttgaggcgctgacccatgacaggaggagcacgggctacagccgaggacacactgctagcagccataacggtggcaagtgttga

SEQ ID NO: 19879 - DNA, 136 bp, Homo sapiens
  MAP TO AC010209.13; EXPRESSED IN HEART, SIGNAL = 6.4; EXPRESSED IN ADULT LIVER, SIGNAL = 3.4; EXPRESSED IN FETAL LIVER, SIGNAL = 3.3; EXPRESSED IN BRAIN, SIGNAL = 3.5; EXPRESSED IN PLACENTA, SIGNAL = 3.5; NT HIT: AL163246.2, EVALUE 2.00e-40; EST_HUMAN HIT: BI022322.1, EVALUE 1.00e-42
ctttattcccattccctgcaagttcctcatctccatctgagaccacatcagcctggacttcattgtccatatcactatcagcaatttgatcaaagccattcaacaagtctctaggaagttccaaactttcccacat

SEQ ID NO: 19880 - DNA, 279 bp, Homo sapiens
  MAP TO AL121886.22; EXPRESSED IN PLACENTA, SIGNAL = 0.93; EXPRESSED IN ADULT LIVER, SIGNAL = 1.1; EXPRESSED IN LUNG, SIGNAL = 1.3; EXPRESSED IN BONE MARROW, SIGNAL = 1.1; EXPRESSED IN BRAIN, SIGNAL = 0.91; EST_HUMAN HIT: BG773132.1, EVALUE 0.00e+00; NT HIT: gi13386117, EVALUE 3.00e-59; SWISSPROT HIT: P13007, EVALUE 2.00e-12
ctgctgggtgtcatcgttctgctctgaactaggaggactgactttcagagggttctcggtgtcctcttcttccacagcgctcctgttgacacaaacagcctcatgttcctccagatttttgatggggaccacgtggcaggcgttgtatttgcaggtggccatctttttggctttcttggggttctttctcctgcacgatgccaggtggtactggaatctgctgagtgggattcggtggtgaggatcataagggcaaatttcaaaggcttctggctccat

SEQ ID NO: 19881 - DNA, 141 bp, Homo sapiens
  MAP TO AC000369.1; EXPRESSED IN ADULT LIVER, SIGNAL = 0.76; EXPRESSED IN BRAIN, SIGNAL = 0.84; EXPRESSED IN PLACENTA, SIGNAL = 0.84; EST_HUMAN HIT: BG196090.1, EVALUE 1.00e-73; NT HIT: gi14753097, EVALUE 7.00e-74; SWISSPROT HIT: O00222, EVALUE 5.00e-20
tgttggtttcaagactctcacagagttcacttttcacctcgccatttggtctgtcatttcctttttggatcagtttgctttgcatggtggcagctgtcaccacagccttgaagctcctcttgcgtttttgaacattctgtt

SEQ ID NO: 19882 - DNA, 186 bp, Homo sapiens
  MAP TO AC016943.7; EXPRESSED IN ADULT LIVER, SIGNAL = 0.76; EXPRESSED IN LUNG, SIGNAL = 0.51; EXPRESSED IN PLACENTA, SIGNAL = 0.81; SWISSPROT HIT: P40587, EVALUE 5.60e+00
cactgaaattgaaggatggagaatttaaagaaaaaaaaaaagtacaccaatactttatccctgattttagtcagtttattaccactgataagaaaagcctgagattagaaaacttgcaagaaattagtaccctggagctgaagaagaaatcactcatcatcagttcagtgttggaagtgaaaagaa

SEQ ID NO: 19883 - DNA, 194 bp, Homo sapiens
  MAP TO AC000032.7; EXPRESSED IN ADULT LIVER, SIGNAL = 0.62; EXPRESSED IN FETAL LIVER, SIGNAL = 1.9; SWISSPROT HIT: Q03661, EVALUE 6.40e-01; EST_HUMAN HIT: BG400956.1, EVALUE 5.00e-21; NT HIT: L41825.1, EVALUE 2.00e-28
ctgggtcgataagaattatcgtaatgccaattggagtcccgtaaaggaggatcggcatcaaaaagaggaaaaaggttcaaaggggatttatcatggggttcagaatcacagatactggcagtccagacatgacaatagccaatttcgaaagttctgggtgttctgggctcagaatggggaatatcatacaaggc

SEQ ID NO: 19884 - DNA, 226 bp, Homo sapiens
  MAP TO AC013602.2; EXPRESSED IN ADULT LIVER, SIGNAL = 0.36; NT HIT: AB037848.1, EVALUE 1.00e-124; SWISSPROT HIT: P39060, EVALUE 2.20e-01; EST_HUMAN HIT: AL532730.1, EVALUE 1.00e-123
cattctgagggaggatgaacagctcctctgtgacctgcctcttgaggcgactgtcattcgggggttgggggctggcaggtgcagtgggctcctccgtagacctcagtgaatagtctgcatagttgatgacctctggagccgtcacagctggcctgggtccatagatgtctgggaacttgaggagggcacggggctgaacaggttccgtggactttttaacattgaa

SEQ ID NO: 19885 - DNA, 148 bp, Homo sapiens
  MAP TO AC000388.1; EXPRESSED IN FETAL LIVER, SIGNAL = 0.56; EXPRESSED IN HELA, SIGNAL = 0.43; EXPRESSED IN ADULT LIVER, SIGNAL = 0.74; NT HIT: gi16162096, EVALUE 5.00e-78; SWISSPROT HIT: P05111, EVALUE 1.20e+00; EST_HUMAN HIT: AI566543.1, EVALUE 8.00e-78
gggacggttactacctggccgtgggcggggccgtggcccagcacaactggtcccacatcaccaccgtgctgcaggaccagaagtcccagtgccagctcatcgacagctccgaggacctgggtatgatcagtatccagggcccagccag

SEQ ID NO: 19886 - DNA, 378 bp, Homo sapiens
  MAP TO AC016955.12; EXPRESSED IN ADULT LIVER, SIGNAL = 1.3; EXPRESSED IN BRAIN, SIGNAL = 0.69; EXPRESSED IN HELA, SIGNAL = 1.4; EXPRESSED IN PLACENTA, SIGNAL = 1.4; NT HIT: AF223391.1, EVALUE 3.00e-91; SWISSPROT HIT: P11260, EVALUE 4.00e-05; EST_HUMAN HIT: AI872137.1, EVALUE 1.00e-111
cttgtcttcgagctctgaatttctttcttctacttgtttaattgtattactgagactttgcagatcattttgcatttctctaagtgtgtccattgtatcctgaagttttgattgttttttatttatgctatctatttcattgaatatttctcccttcacttcttgtattcttttttggatttccttgcattgggcttcacctttctgtagtgcctccctgattagcttaataactaacattctgaattctttttcaggtaaatcagagatttcttcttggtttggatccattgctggtgaactagggtgattttttggtggtgttaaagagtcttgttttgtcatatcaccagagttggtttcctggtttcttctcat

SEQ ID NO: 19887 - DNA, 179 bp, Homo sapiens
  MAP TO AC009087.4; EXPRESSED IN PLACENTA, SIGNAL = 1.1; EXPRESSED IN HEART, SIGNAL = 1.2; EXPRESSED IN ADULT LIVER, SIGNAL = 1.1; EXPRESSED IN FETAL LIVER, SIGNAL = 0.84; EXPRESSED IN BRAIN, SIGNAL = 0.89; EST_HUMAN HIT: BF765440.1, EVALUE 2.00e-91; NT HIT: gi14779295, EVALUE 7.00e-84; SWISSPROT HIT: Q92620, EVALUE 1.00e-27
atcctgctcatccaccactctaccttccgcatggccttagcatggatgaaatgatcgttacaccagatggtggagtaattattgttcttccactgcaggtaaacattcaggtaggtcaaatgatcgctctcaggaacagcgaacttctcccggatttgatcactctcctcctctcgacc

SEQ ID NO: 19888 - DNA, 181 bp, Homo sapiens
  MAP TO AC004035.1; EXPRESSED IN ADULT LIVER, SIGNAL = 1.1; EXPRESSED IN LUNG, SIGNAL = 0.78; EXPRESSED IN HELA, SIGNAL = 1.1; EXPRESSED IN BRAIN, SIGNAL = 1.1; EXPRESSED IN BONE MARROW, SIGNAL = 0.73; EXPRESSED IN PLACENTA, SIGNAL = 0.92; EST_HUMAN HIT: AI065101.1, EVALUE 7.00e-20; NT HIT: AB010973.1, EVALUE 1.00e-33; SWISSPROT HIT: O78694, EVALUE 1.00e-14
aagagggcaaatgaacctgtggcatattcgatgttaaagcctgagactgactctgattctccttctgttagttcaaaaggggctcggtttgtttctgctagtgtggagataaatcatattatggctaggggttatgatggtagaagcagtcagaggaattcttgcgttgtgataaatgcat

SEQ ID NO: 19889 - DNA, 219 bp, Homo sapiens
  MAP TO AL096870.3; EXPRESSED IN FETAL LIVER, SIGNAL = 1.2; EXPRESSED IN BONE MARROW, SIGNAL = 1.3; EXPRESSED IN BRAIN, SIGNAL = 1.1; EXPRESSED IN PLACENTA, SIGNAL =   1; EXPRESSED IN ADULT LIVER, SIGNAL =   1; SWISSPROT HIT: Q05512, EVALUE 4.00e-10; EST_HUMAN HIT: BI827247.1, EVALUE 1.00e-120; NT HIT: M24529.1, EVALUE 2.00e-01
tcaccggtgcacgatgctcttgctgtgcaggtaggcaatgcccagggtcagctgggagaaccacttgccagcaaggggctcagagcaggccccgtagcgctggatccattcaaggacatcaccaccctgagccagttccagaatgatgtatactcgagatgtgctctcaatggcccgatagaagttgatgaggtacttgtgccgcaagactttcattac

SEQ ID NO: 19890 - DNA, 369 bp, Homo sapiens
  MAP TO AC010280.5; EXPRESSED IN ADULT LIVER, SIGNAL = 3.7; EXPRESSED IN FETAL LIVER, SIGNAL = 3.2; EXPRESSED IN BRAIN, SIGNAL = 3.8; EXPRESSED IN PLACENTA, SIGNAL = 3.9; EXPRESSED IN HEART, SIGNAL = 5.5; SWISSPROT HIT: Q9UYB5, EVALUE 8.60e+00; EST_HUMAN HIT: BI044922.1, EVALUE 1.00e-123; NT HIT: AL163282.2, EVALUE 1.00e-113
ctttaacagcaccccagtcacctcttgaatgctttgctgcttagaaatttcttctgcctgataccctaaatcatctctctcaagttgaaagttccacaagtctctaggacagggggaaaatgtcaccagtctctttgctaaaacataacaagagccatctttgctccagttcccaacaagttcctcatctccaactgagaccacctcagcctggaccatattgtccatatcattatcaacattttcgtcaaagccattcaacaagtctctaggaagttccaaactttcccacattttcttgtcttcttttgagccctccaaactgttccaacctttgcctgttacccagttccaaagttgcttccacat

SEQ ID NO: 19891 - DNA, 164 bp, Homo sapiens
  MAP TO AC012083.6; EXPRESSED IN HEART, SIGNAL = 1.4; EXPRESSED IN ADULT LIVER, SIGNAL = 1.5; EXPRESSED IN LUNG, SIGNAL = 0.68; EXPRESSED IN FETAL LIVER, SIGNAL = 1.7; EXPRESSED IN PLACENTA, SIGNAL = 1.5; NT HIT: gi16168496, EVALUE 1.40e-01; SWISSPROT HIT: Q9YB58, EVALUE 2.60e+00; EST_HUMAN HIT: BG218565.1, EVALUE 2.10e-01
ccttgttcttttccatatctcttactgctgtgtatccttcactggtgtctcttcttcctcctatggtgaaatgtgctacctcagccttttccacacaggagttaaggcctccatagtagacctggcttcccagacctagaagactgggaccgtcttctctccat

SEQ ID NO: 19892 - DNA, 199 bp, Homo sapiens
  MAP TO AC008974.6; EXPRESSED IN BRAIN, SIGNAL = 2.6; EXPRESSED IN PLACENTA, SIGNAL = 0.7; EXPRESSED IN ADULT LIVER, SIGNAL = 0.99; NT HIT: gi15302254, EVALUE 1.00e-108; SWISSPROT HIT: P15381, EVALUE 6.40e-01; EST_HUMAN HIT: BE222941.1, EVALUE 1.00e-102
atccccagcctgagtcacagtgtgctgtcacagaccagcttcagggccgagtacaaggccagtggcggcccctccgtcttccaaaagcccgtccgcttccaggtggacatcagctcctctgagggtccagagccctccccgcgacgggacggcagcggaggtggtggcatctactccgtcaccttcactctcatctcgg

SEQ ID NO: 19893 - DNA, 124 bp, Homo sapiens
  MAP TO AC008983.6; EXPRESSED IN PLACENTA, SIGNAL = 0.8; EXPRESSED IN ADULT LIVER, SIGNAL = 0.72; EXPRESSED IN BRAIN, SIGNAL = 0.57; NT HIT: gi13236592, EVALUE 3.00e-11; SWISSPROT HIT: Q13360, EVALUE 4.00e-05; EST_HUMAN HIT: AW157012.1, EVALUE 1.00e-63
ccctggaggccagggtcctgcactggtcaagcatcctgtatttgcacaggctcctccgtgcgctgtccagcaatgcccactcctggatgaactccacggccacatcctcaaaggtgacggattc

SEQ ID NO: 19894 - DNA, 127 bp, Homo sapiens
  MAP TO AC010320.7; EXPRESSED IN BRAIN, SIGNAL = 0.86; EXPRESSED IN HELA, SIGNAL = 0.89; EXPRESSED IN PLACENTA, SIGNAL = 1.2; EXPRESSED IN HEART, SIGNAL = 1.4; EXPRESSED IN ADULT LIVER, SIGNAL = 0.85; NT HIT: gi15301350, EVALUE 3.00e-45; SWISSPROT HIT: O75346, EVALUE 2.00e-12; EST_HUMAN HIT: BI117191.1, EVALUE 2.00e-65
ggacctttgacattcagggatgtagccatagaattctctcaggaggagtggaaatccctggaccctgtgcagaaagctttgtactgggatgtgatgttggagaactacaggaacctggtcttcctgg

SEQ ID NO: 19895 - DNA, 202 bp, Homo sapiens
  MAP TO AL121768.2; EXPRESSED IN ADULT LIVER, SIGNAL = 0.97; EXPRESSED IN FETAL LIVER, SIGNAL = 0.75; EXPRESSED IN BONE MARROW, SIGNAL = 1.2; NT HIT: L12446.1, EVALUE 7.10e-01; SWISSPROT HIT: P32479, EVALUE 1.90e-02
ccccatcttcttcagaatcaatgtcggattcttcactatcacaaggccttttttctcgatagccttccatctcatttgtccacaccattaaagacatatctgtaccgcctagggtaaccaacatgctgtcatcataagtccagcgaacatttgtgacatgtgtactatgggccacatacctcttaaactttccaaatttccc

SEQ ID NO: 19896 - DNA, 105 bp, Homo sapiens
  MAP TO AC020923.4; EXPRESSED IN ADULT LIVER, SIGNAL = 2.2; EXPRESSED IN BRAIN, SIGNAL = 2.2; EST_HUMAN HIT: BG031915.1, EVALUE 2.00e-52; NT HIT: AF327443.1, EVALUE 2.00e-52; SWISSPROT HIT: P08855, EVALUE 7.00e-05
cagagtgacaaagacctcgatgatgccttggataaactctctgacagtctaggacaaaggcagcctgacccagatgagaacaaaccaatggaagataaagtaaag

SEQ ID NO: 19897 - DNA, 114 bp, Homo sapiens
  MAP TO AC000354.1; EXPRESSED IN ADULT LIVER, SIGNAL = 0.36; EXPRESSED IN BRAIN, SIGNAL = 0.51; SWISSPROT HIT: P08548, EVALUE 9.10e-01; EST_HUMAN HIT: BF590310.1, EVALUE 3.00e-15; NT HIT: AL163279.2, EVALUE 3.00e-14
atgaaactagaaatcagtaacaggaagaatcttggaaaattcactaatatgtggaaattaaataacatgctcctaaacaaccaatgggtcaaagaagaaagcaaaaggaaaact

SEQ ID NO: 19898 - DNA, 183 bp, Homo sapiens
  MAP TO AC010646.4; EXPRESSED IN PLACENTA, SIGNAL = 0.7; EXPRESSED IN ADULT LIVER, SIGNAL = 1.5; EST_HUMAN HIT: AA743934.1, EVALUE 1.00e-98; NT HIT: gi8923935, EVALUE 9.00e-99
ttatttgagtttaggcatgattcgaatgaagaggatcatgctaatgaagatgaagcagacgataatgagcatggcccagagcagccagttgactgacttctgcgtgtgctgctccagacgctctgactccgtcttcagtttctccaggttctggtccgccattttcagtgagtgtgacagggt

SEQ ID NO: 19899 - DNA, 261 bp, Homo sapiens
  MAP TO AL121784.2; EXPRESSED IN LUNG, SIGNAL = 2.5; EXPRESSED IN FETAL LIVER, SIGNAL = 1.3; EXPRESSED IN BONE MARROW, SIGNAL = 1.3; EXPRESSED IN ADULT LIVER, SIGNAL = 0.99; SWISSPROT HIT: P08738, EVALUE 5.20e-01; EST_HUMAN HIT: BG678667.1, EVALUE 0.00e+00; NT HIT: gi16191242, EVALUE 0.00e+00
cttgctcaacagcatcttcaacaatcttctggtgcaagttccaggctctctggtcaacgattatggcgacctccttctccaaggcctgcaggaaggcaaccagagcaacagctcctggtgggccatctgtctcttctggaggctcatgattgaaatgtgtggggaacccagtggtgatgagcactgagcgggcatgggacagcgagagagaggccttcagcagctcatctttacagagcaggtgcccaatcccccggttcc

SEQ ID NO: 19900 - DNA, 88 bp, Homo sapiens
  MAP TO AC009429.3; EXPRESSED IN ADULT LIVER, SIGNAL = 0.97; EXPRESSED IN FETAL LIVER, SIGNAL = 0.67; EXPRESSED IN BRAIN, SIGNAL = 1.2; EXPRESSED IN PLACENTA, SIGNAL = 0.87; EST_HUMAN HIT: AI033264.1, EVALUE 1.60e+00
ctattataatcttgtgcacaacagctgaaccatctgtgtttgagtcattcttatatttggggtccaactcatatagcaatttgttcat

SEQ ID NO: 19901 - DNA, 170 bp, Homo sapiens
  MAP TO AC010205.5; EXPRESSED IN PLACENTA, SIGNAL = 0.79; EXPRESSED IN ADULT LIVER, SIGNAL =   1; EXPRESSED IN FETAL LIVER, SIGNAL = 0.77; NT HIT: AJ238617.1, EVALUE 1.00e-11; SWISSPROT HIT: Q9UX89, EVALUE 1.90e+00; EST_HUMAN HIT: AI796839.1, EVALUE 2.00e-14
tgggtagaagccagggatcctgccaaacatcctatagtgcacaggacagcccctacaacaaagaatcatccagcccaaaatgtcgatagtgctgaagttgagaaatccggaattagaaggggcaagaatggctgcagggcagttagtctacaggactggcctgggactag

SEQ ID NO: 19902 - DNA, 132 bp, Homo sapiens
  MAP TO AC010206.8; EXPRESSED IN PLACENTA, SIGNAL = 1.1; EXPRESSED IN HEART, SIGNAL = 1.1; EXPRESSED IN ADULT LIVER, SIGNAL = 0.87; NT HIT: Y16467.1, EVALUE 4.40e-01
gtctccttttggaccttggagacaacattgaaggtatggctcaaagaccagccagccagcaagacattatggaactcaagtcccgtaccacagttgcttgctacgtgaggctgggttacctcttgaggctac

SEQ ID NO: 19903 - DNA, 158 bp, Homo sapiens
  MAP TO AL109839.11; EXPRESSED IN PLACENTA, SIGNAL = 1.1; EXPRESSED IN ADULT LIVER, SIGNAL = 0.66; EXPRESSED IN FETAL LIVER, SIGNAL =   1; EXPRESSED IN BONE MARROW, SIGNAL = 1.1; SWISSPROT HIT: Q13043, EVALUE 2.00e-26; NT HIT: U18297.1, EVALUE 6.00e-84; EST_HUMAN HIT: BF744787.1, EVALUE 2.00e-81
aaactcgtagtctccatcctgtggtattttccaatctgaagaatttttcagtggaccaggtacactcttgccaaagctgttgatctggttttccttttctttttgttcaaaatattcaagaaaggatggtttcgcaggctgcatggtctcatcccttc

SEQ ID NO: 19904 - DNA, 265 bp, Homo sapiens
  MAP TO AL109800.25; EXPRESSED IN ADULT LIVER, SIGNAL = 2.1; EXPRESSED IN BRAIN, SIGNAL = 2.1; EXPRESSED IN PLACENTA, SIGNAL = 2.5; EXPRESSED IN HEART, SIGNAL = 6.1; SWISSPROT HIT: P13831, EVALUE 1.60e+00; NT HIT: AL163210.2, EVALUE 4.00e-40; EST_HUMAN HIT: BG957173.1, EVALUE 5.00e-65
atgtggaagaaacttcggaactgtgtaacaggcagaggttggaactgcttgcagggctcgaaagacgacaggaaaataagggaaggtttggaacttcctagagacgtggagggctcagaagacaggaatatgttgggaagttcggaacttcttagagacttgttgaatggctttgaccaaaatgttaatagtgatatggataataaagtccaggctgaggtggtctcagatggagatgaggaacttgtttggaactggagcaaag

SEQ ID NO: 19905 - DNA, 142 bp, Homo sapiens
  MAP TO AF196968.1; EXPRESSED IN ADULT LIVER, SIGNAL = 1.4; EXPRESSED IN PLACENTA, SIGNAL = 1.7; EXPRESSED IN BRAIN, SIGNAL = 1.4; EXPRESSED IN LUNG, SIGNAL = 0.63; EST_HUMAN HIT: AV742677.1, EVALUE 7.10e-01; SWISSPROT HIT: P35654, EVALUE 5.90e+00; NT HIT: gi14749893, EVALUE 7.50e+00
atgggtcttggggacagagccaacaccagtgaaacagagctggtgttcatgtttctgcagcagcgtgaacgccaggactcccatctgggacacaccagcgtgtgtaccaaaaggacagctgtcatcatggcctctttcccag

SEQ ID NO: 19906 - DNA, 224 bp, Homo sapiens
  MAP TO AC021085.2; EXPRESSED IN BONE MARROW, SIGNAL =  33; EXPRESSED IN PLACENTA, SIGNAL =  33; EXPRESSED IN ADULT LIVER, SIGNAL =  33; EXPRESSED IN BRAIN, SIGNAL =  28; EST_HUMAN HIT: AI963666.1, EVALUE 7.50e-02; SWISSPROT HIT: Q07008, EVALUE 5.60e+00; NT HIT: AB056433.1, EVALUE 3.20e+00
catcagcctccctatcctattgcttttcatttgctgaattgtgttcccatatggcagcatgtcataattagagttttgaaggtgaggcttctgctcaccctccatcacactgatcaccttgctgcagccacctgtgttcttgcacactagtgcagaggagacctcttgctgctgggtaaatgctgcagagcagatgcaggcccactgagtgttccgtgtggtct

SEQ ID NO: 19907 - DNA, 155 bp, Homo sapiens
  MAP TO AL121594.3; EXPRESSED IN PLACENTA, SIGNAL = 0.57; EXPRESSED IN ADULT LIVER, SIGNAL = 0.73; EXPRESSED IN FETAL LIVER, SIGNAL = 0.86; SWISSPROT HIT: P20009, EVALUE 6.70e-01; EST_HUMAN HIT: BG485050.1, EVALUE 2.00e-60
ctcccgcaccaggcacacaagcacctcccggaagttgcagcgactgcttccggggtaccagccgcgtttcttccgctcttgcatgccgaactcacggctctggagccagttcgagcactgagctctgaggccccgccccctaagggggtggtgga

SEQ ID NO: 19908 - DNA, 136 bp, Homo sapiens
  MAP TO AC004779.1; EXPRESSED IN PLACENTA, SIGNAL = 0.51; EXPRESSED IN ADULT LIVER, SIGNAL = 0.48; EXPRESSED IN HELA, SIGNAL = 0.45; NT HIT: D78508.1, EVALUE 2.90e-02; SWISSPROT HIT: Q9SZW4, EVALUE 7.80e+00; EST_HUMAN HIT: BE502667.1, EVALUE 2.70e+00
ccgacattggggagctgctcagccagggtgctgctcatctgggggcatggatgttgcaaacagcactcccgaaggtcatgcagcacctcagagtgatgaatgtcactgccactgatgacaaacaagttgccgaagc

SEQ ID NO: 19909 - DNA, 172 bp, Homo sapiens
  MAP TO AC008953.4; EXPRESSED IN ADULT LIVER, SIGNAL = 1.3; EXPRESSED IN FETAL LIVER, SIGNAL = 1.2; EXPRESSED IN BRAIN, SIGNAL = 1.6; SWISSPROT HIT: Q92973, EVALUE 9.00e-28; NT HIT: gi4504906, EVALUE 3.00e-92; EST_HUMAN HIT: AU142986.1, EVALUE 4.00e-92
tggtttgtttaaatgatgtcctactgaatctgctaatgttcctatggcatcgtaaagaatgagcaggttcttatgctggtatttactaaatgcaaagaccagggtatcaagtatataagcaaggtaaggaacaagttctgtacaagcctcctcttctagggtagcaaaggca

SEQ ID NO: 19910 - DNA, 159 bp, Homo sapiens
  MAP TO AF198097.1; EXPRESSED IN ADULT LIVER, SIGNAL = 0.73; SWISSPROT HIT: P12982, EVALUE 2.00e+00; NT HIT: AB012708.1, EVALUE 1.40e-01; EST_HUMAN HIT: BF513571.1, EVALUE 2.00e-84
gtgccatggataacagaggctttcagcaggggagttttagtagcttccagaacagctccagtgatgaagacctgatggacattccagcaaccgctatggatttctccatgagagatgatgttcctcccttagaccgagaagtaggaggtatcattattg

SEQ ID NO: 19911 - DNA, 376 bp, Homo sapiens
  MAP TO AC000127.1; EXPRESSED IN BRAIN, SIGNAL = 0.45; EXPRESSED IN PLACENTA, SIGNAL = 0.45; EXPRESSED IN ADULT LIVER, SIGNAL = 0.61; EXPRESSED IN FETAL LIVER, SIGNAL = 0.41; EST_HUMAN HIT: AL040832.1, EVALUE 0.00e+00; SWISSPROT HIT: P26632, EVALUE 1.00e-02; NT HIT: AL163282.2, EVALUE 5.50e+00
atttgttccctttaattcattctgtggagaatgggtaatggaagggggtgaagattctacagaatctgctggttcaactttaacttttatttctgaactgttggcagtattattagggcctttttctcttttagagtttgttccagaaagagttatcttgtggacaatttgcatatgtcttttaagcattatttgtgaactatatttcctcttgcaaaggaggcatttgcatgcagttaaattgtattcagcctttgaagaagacttttgttttcgagtcttaaaagattttttaggagaaatagaatccaggaacaaaggttgcccaggctttgttgctatatcaggagtaattgaatccctccttagtcctcta

SEQ ID NO: 19912 - DNA, 125 bp, Homo sapiens
  MAP TO AC008970.4; EXPRESSED IN ADULT LIVER, SIGNAL = 0.8; EXPRESSED IN BRAIN, SIGNAL = 0.76; EST_HUMAN HIT: BI547196.1, EVALUE 9.50e+00
ctgtggctcattgccttgtgccaaaaatgaattgggcactttaagcaggccacctgcaattggataattgcagcaaagacaatgcccagacttcaggccattgtttagctggcaatgatcatacc

SEQ ID NO: 19913 - DNA, 103 bp, Homo sapiens
  MAP TO AF129108.1; EXPRESSED IN ADULT LIVER, SIGNAL = 2.8; EXPRESSED IN BRAIN, SIGNAL = 2.5; EXPRESSED IN BONE MARROW, SIGNAL = 3.9; EXPRESSED IN PLACENTA, SIGNAL = 1.9; NT HIT: AL163267.2, EVALUE 2.00e-51; EST_HUMAN HIT: BE908909.1, EVALUE 1.90e+00; SWISSPROT HIT: P33834, EVALUE 4.70e+00
gtgtgcctgaccgaggggtctcagaacgtggacaccagtgctgaaatgggaaagtccggggcagatcaggccaccccaacaggccgagaagaaataggaggag

SEQ ID NO: 19914 - DNA, 221 bp, Homo sapiens
  MAP TO AC010328.4; EXPRESSED IN PLACENTA, SIGNAL = 0.9; EXPRESSED IN ADULT LIVER, SIGNAL = 0.92; EXPRESSED IN FETAL LIVER, SIGNAL = 0.68; EXPRESSED IN BRAIN, SIGNAL =   1; SWISSPROT HIT: Q07343, EVALUE 7.10e+00; EST_HUMAN HIT: AI279289.1, EVALUE 1.90e-02
ggagatcctgctgagttgcttcagcctcactggtaaatgttgcctcctaaacccgaaaaatagagatgccatgggagccagaagaggaaagcataggcccccccactccgcggaggccccgcccccttccttcttccctcccgacgccgtcgctcgcgggacccgcccaggattccgctctgcgcttagtttcctgcagacccggaaacagatcgcgcgga

SEQ ID NO: 19915 - DNA, 240 bp, Homo sapiens
  MAP TO AF260011.1; EXPRESSED IN BONE MARROW, SIGNAL = 1.1; EXPRESSED IN PLACENTA, SIGNAL = 0.97; EXPRESSED IN ADULT LIVER, SIGNAL = 1.1; EXPRESSED IN LUNG, SIGNAL =   1; EXPRESSED IN HELA, SIGNAL = 1.1; EST_HUMAN HIT: BF758791.1, EVALUE 1.00e-117; SWISSPROT HIT: O94822, EVALUE 9.00e-34; NT HIT: AL163248.2, EVALUE 0.00e+00
ctggcaaatgtgttttttctttgctctgagcacataactgaaagagagttaataataaatcttcagatgatggcattagcaagcatcctttcgctgagctgaaatagttataggccacatcacagataaaagacactgatgagtcactgctttcagcttctgataatttctttgttttgaataaagtttcatgaagtctaacaatgattctttcaacatatacgtctccaatcaagtaat

SEQ ID NO: 19916 - DNA, 108 bp, Homo sapiens
  MAP TO AC000390.1; EXPRESSED IN ADULT LIVER, SIGNAL = 1.3; EXPRESSED IN FETAL LIVER, SIGNAL = 0.6; EXPRESSED IN PLACENTA, SIGNAL = 2.2; EST_HUMAN HIT: BF971469.1, EVALUE 2.00e-28; SWISSPROT HIT: P14350, EVALUE 4.10e-01; NT HIT: AL163284.2, EVALUE 3.00e-29
tcaatccagctgcctcaggatgatggggaacatgacaagaccagtgaattccatcaggatgagcccactgtcacacttctttagccataaagtgagtgccttggtcat

SEQ ID NO: 19917 - DNA, 363 bp, Homo sapiens
  MAP TO AC005601.1; EXPRESSED IN PLACENTA, SIGNAL = 0.9; EXPRESSED IN ADULT LIVER, SIGNAL = 1.7; EST_HUMAN HIT: AL543509.1, EVALUE 0.00e+00; SWISSPROT HIT: P14148, EVALUE 2.00e-30; NT HIT: gi14781591, EVALUE 0.00e+00
aatctaaaaatgctgcatatagtggaaccttatgtgacctggggatttccaaatctgaagtctgtccgagaactcattttgaaacgtggacaagccaaggtcaagaataagaccatccctctgacagacaacacagtgattgaggagcacctggggaagtttggcttcatttgcttggaagacctcattcatgaaattgccttcccagggaagcatttccaggagatctcatggttcttgcgccctttccacctctcagtggcccatcatgctaccaaaaatagagtgggcttcctcaaggagatgggcacacctggctatcggggtgaacgcatcaatcagctcatccgtcagctgaactag

SEQ ID NO: 19918 - DNA, 114 bp, Homo sapiens
  MAP TO AC006005.1; EXPRESSED IN ADULT LIVER, SIGNAL = 0.69; EXPRESSED IN BRAIN, SIGNAL = 0.53; SWISSPROT HIT: P33294, EVALUE 4.60e+00; NT HIT: AF332560.1, EVALUE 1.50e+00; EST_HUMAN HIT: AW298116.1, EVALUE 5.50e-01
cagtggaatgttatcgaagtgttgtacaaaattcatgaccagtgtctctttatcgcagaatggaatacagacgtgatgtctggggctccaggatccatcttggaccatgactag

SEQ ID NO: 19919 - DNA, 178 bp, Homo sapiens
  MAP TO AC010393.4; EXPRESSED IN BONE MARROW, SIGNAL = 0.83; EXPRESSED IN ADULT LIVER, SIGNAL = 0.82; SWISSPROT HIT: P24785, EVALUE 1.90e+00; NT HIT: AL163302.2, EVALUE 9.70e+00; EST_HUMAN HIT: AV731676.1, EVALUE 3.00e-65
acgagcaactcaggatcacacacaggaggactcacccaaagcaggggaaggcggactccaggcttccagcttttgccccatcatgattcagggtcctaactggagagaaatgttccatgggacagccctggtgatcattttggatctgctgaccactgtgcccacctacaagtcccaa

SEQ ID NO: 19920 - DNA, 135 bp, Homo sapiens
  MAP TO AC008716.6; EXPRESSED IN BRAIN, SIGNAL = 0.48; EXPRESSED IN BONE MARROW, SIGNAL = 0.5; EXPRESSED IN ADULT LIVER, SIGNAL = 0.34; SWISSPROT HIT: Q28046, EVALUE 4.50e+00; NT HIT: gi15922990, EVALUE 4.50e-01; EST_HUMAN HIT: BI043559.1, EVALUE 4.30e-02
tacctgtattctggaatgctgaaaacagggacaaaataaagtccccagtgaccaatccaaaagaagtgaagttgtataaactgtctagcaaagaattcaaaataagtgttttaatgaagcttgctgcctacaacg

SEQ ID NO: 19921 - DNA, 119 bp, Homo sapiens
  MAP TO AC011525.4; EXPRESSED IN HEART, SIGNAL = 0.92; EXPRESSED IN ADULT LIVER, SIGNAL = 0.95; EXPRESSED IN BRAIN, SIGNAL = 1.1; EXPRESSED IN BONE MARROW, SIGNAL = 0.53; SWISSPROT HIT: P01267, EVALUE 2.70e+00; NT HIT: L02053.1, EVALUE 6.00e-03; EST_HUMAN HIT: AI185396.1, EVALUE 2.30e+00
atgaagagagaattgaatgaattaaaaagcagagccataaatcgcaccggttttattggcaccatgataaacatgcccgaggcctcgcagggagtggggtctaggatattctcaatacc

SEQ ID NO: 19922 - DNA, 217 bp, Homo sapiens
  MAP TO AF165141.1; EXPRESSED IN BONE MARROW, SIGNAL = 0.66; EXPRESSED IN PLACENTA, SIGNAL = 1.4; EXPRESSED IN HEART, SIGNAL = 2.3; EXPRESSED IN ADULT LIVER, SIGNAL = 1.3; EXPRESSED IN HELA, SIGNAL =   2; SWISSPROT HIT: P97697, EVALUE 2.00e-24; NT HIT: Y11365.1, EVALUE 1.00e-119; EST_HUMAN HIT: H90874.1, EVALUE 3.00e-81
gatccggagtgttggaacagcagctgttaatatgtgccttgtggcaactggcggagcagatgcatattatgaaatgggaattcactgctgggatgttgcaggagctggcattattgttactgaagctggtggcgtgctaatggatgttacaggtaaaattatggagagtgaagcagatctccacacatctgttggacttttgtccatatgtagaatt

SEQ ID NO: 19923 - DNA, 150 bp, Homo sapiens
  MAP TO AC005582.1; EXPRESSED IN ADULT LIVER, SIGNAL = 1.2; EXPRESSED IN HEART, SIGNAL = 1.2; SWISSPROT HIT: Q62245, EVALUE 2.60e+00; NT HIT: U67125.1, EVALUE 5.10e-01
atgcccacgactgcaatagcttggagaaatgccacagtggaggaggtacggggagagtgaagaactgcctggagcaggaagcctgtcaaagagcagcagagatggaggagaaaatatttggactatgtttgatgtcaacgaccaacgcag

SEQ ID NO: 19924 - DNA, 143 bp, Homo sapiens
  MAP TO AL022069.1; EXPRESSED IN BRAIN, SIGNAL = 0.94; EXPRESSED IN PLACENTA, SIGNAL = 0.76; EXPRESSED IN ADULT LIVER, SIGNAL = 0.65; EST_HUMAN HIT: BE857569.1, EVALUE 7.00e-75; SWISSPROT HIT: Q15349, EVALUE 2.00e-23; NT HIT: L07598.1, EVALUE 5.00e-75
atttcggcctgagtaaggaggccattgaccacgacaagagagcgtactccttctgcgggacgatcgagtacatggcgcccgaggtggtgaaccggcgaggacacacgcagagtgccgactggtggtccttcggcgtgctcatg

SEQ ID NO: 19925 - DNA, 270 bp, Homo sapiens
  MAP TO AC008795.5; EXPRESSED IN ADULT LIVER, SIGNAL =   1; EST_HUMAN HIT: AL533415.1, EVALUE 0.00e+00; SWISSPROT HIT: P14736, EVALUE 3.30e-01; NT HIT: gi11416983, EVALUE 0.00e+00
catcggcgtgtcataagatccatcacagctgcaaaatacagagagaaacagcaagtgaaagatgtgcaaaaactgagaaagaaagagccgaagactcttcttccacatgatcccactgcagatgtttttgtaacaccagctgaggagaaaccaatagaaatacagtgggtaaaaccagagccaaaagttgatttgaaagcaagaaagaaacggatttacaaaaggcaaagaaaaatgaaacagaggatggacagtgggaaaacaaaataa

SEQ ID NO: 19926 - DNA, 501 bp, Homo sapiens
  MAP TO AC005605.1; EXPRESSED IN PLACENTA, SIGNAL = 0.47; EXPRESSED IN ADULT LIVER, SIGNAL = 0.41; EST_HUMAN HIT: BG218617.1, EVALUE 3.00e-03; SWISSPROT HIT: O95013, EVALUE 2.00e-39
gtaactgcagaggctatttcctggaatgaatcaacgagtgaaacgaataactctatggtgactgaattcatttttctgggtctctctgattctcagggactccagaccttcctatttatgttgttttttgtattctatggaggaatcgtgtttggaaaccttcttattgtcataacagtggtatctgactcccaccttcactctcccatgtacttcctgctagccaacctctcactcattgatctgtctctgtcttcagtcacagcccccaagatgattactgactttttcagccagcgcaaagtcatctctttcaagggctgccttgttcagatatttctccttcacttctttggtgggagtgagatggtgatcctcatagccatgggctttgacagatatatagcaatatgcaaacccctacactacactacaattatgtgtggcaacgcatgtgtcggcattatggctgtcgcatggggaattggctttctccattcg

SEQ ID NO: 19927 - DNA, 210 bp, Homo sapiens
  MAP TO AC006541.1; EXPRESSED IN PLACENTA, SIGNAL = 0.59; EXPRESSED IN ADULT LIVER, SIGNAL = 0.84; EXPRESSED IN HELA, SIGNAL = 0.52; EXPRESSED IN BONE MARROW, SIGNAL = 0.88; SWISSPROT HIT: Q10685, EVALUE 5.50e+00; NT HIT: gi14731021, EVALUE 1.90e-01; EST_HUMAN HIT: AW062700.1, EVALUE 2.80e-01
aggggaggggtgttcatggagtcctggaatcggctgagcacatcggccattgaattccagtgcctactgggggagacggtgcggcccggctgggcccagctgcgcccagctgctggtggcttctgggctgctcctccctgggccaccgagggacaggagacccatggagaatgcaccacccctgcctgggtcttaggccctggggtgtag

SEQ ID NO: 19928 - DNA, 475 bp, Homo sapiens
  MAP TO AC064878.7; EXPRESSED IN PLACENTA, SIGNAL = 8.1; EXPRESSED IN ADULT LIVER, SIGNAL = 4.4; NT HIT: AL163227.2, EVALUE 1.00e-47; SWISSPROT HIT: Q16825, EVALUE 9.70e-02; EST_HUMAN HIT: BI828263.1, EVALUE 1.00e-60
aggctcaacaccacatggaagctgccaaggcttggggcttgcaccctctgaagccatggcctgaaatgtatcttgaccccttttagccatggttggaacagctgagatgctggttaccaaatcccaaggctgcgcacagcaggggggatctgaacccagccctggaaaccatttttccctcctaggcctccaggcctgtgatgggaggggctgctgtgaaggtctctggcatgccctggagacattttcctcattttcttggtgaataacattctgctcattgttacttaagcaaatttctgcagctggcttgaatttctccccagaaaatgggttttccttttctactgcatcatcagcctgcaaatttttcaaccttttatactctgcttcctcttgaatgctttgccacttagaaatttcttctgccaggtaccctagatcatctctctcacattcaaagttccacagatct

SEQ ID NO: 19929 - DNA, 253 bp, Homo sapiens
  MAP TO AL109767.3; EXPRESSED IN PLACENTA, SIGNAL = 5.2; EXPRESSED IN HEART, SIGNAL = 9.2; EXPRESSED IN ADULT LIVER, SIGNAL = 9.6; NT HIT: AF107890.1, EVALUE 2.30e-01; SWISSPROT HIT: O69203, EVALUE 8.30e-01
ggagtgtgtctcagaccccatctccatggaacacctgggcagccgacaccctctccagagtagtggccgtggctgcctggggatggggaggggccgtgttatgcagatgacttttaatgaagtcccttttgaggagcagtttgaccagctgggattcccagtgcacagcccttggtctctccttatgggtgtcacaggaaaatttaaacccaggcccaacaagctggacaaagtctccacaggacaggagact

SEQ ID NO: 19930 - DNA, 179 bp, Homo sapiens
  MAP TO AC006117.1; EXPRESSED IN BONE MARROW, SIGNAL = 1.5; EXPRESSED IN PLACENTA, SIGNAL = 1.1; EXPRESSED IN HEART, SIGNAL = 1.3; EXPRESSED IN ADULT LIVER, SIGNAL = 0.76; EST_HUMAN HIT: AA313029.1, EVALUE 2.00e-88; SWISSPROT HIT: P50552, EVALUE 4.00e-13; NT HIT: X98534.2, EVALUE 5.00e-94
agctcaatgtgacccctggaataggaggcggggaagcaggtcctctctctaatctcattgctgtcccaaaccacaccaactcccccaggatgaagtcgtcttcttcggtgaccacttccgagacccaaccctgcacgcccagctccagtgattactcggacctacagagggtgaaacag

SEQ ID NO: 19931 - DNA, 198 bp, Homo sapiens
  MAP TO AC009757.8; EXPRESSED IN ADULT LIVER, SIGNAL = 0.39; SWISSPROT HIT: P54772, EVALUE 1.90e+00; NT HIT: AL163279.2, EVALUE 4.50e-02
ctaatcatttccttgatgatataagcaagaagctacaaccagagaatgcactgatgccctatattccattttcccatgtggaaggatgcaccgattgagagtaaagtagatcaacacagatgtggggggagggggcatcatttcactgttgagggagcctgaacaaaagtctttaacagttttacggtccccatagac

SEQ ID NO: 19932 - DNA, 163 bp, Homo sapiens
  MAP TO AL035361.2; EXPRESSED IN PLACENTA, SIGNAL = 0.92; EXPRESSED IN ADULT LIVER, SIGNAL = 1.1; EXPRESSED IN LUNG, SIGNAL = 0.61; SWISSPROT HIT: P57266, EVALUE 1.00e-08; NT HIT: gi13632538, EVALUE 1.00e-78; EST_HUMAN HIT: BI762975.1, EVALUE 2.00e-78
acccagaccctgttacctcatcaatggcagactcttcaatccgccggggggcgtcagaagacaacaagccatgagttgccatcacaaagatcttatatgcacctctttccttcagggtctctgctgcagcaagaaagctgtcaacatcatcaatgatgtcatc

SEQ ID NO: 19933 - DNA, 189 bp, Homo sapiens
  MAP TO AF172277.1; EXPRESSED IN BONE MARROW, SIGNAL = 1.3; EXPRESSED IN PLACENTA, SIGNAL = 1.1; EXPRESSED IN ADULT LIVER, SIGNAL =   1; SWISSPROT HIT: Q01635, EVALUE 6.00e-21; NT HIT: AP001519.1, EVALUE 1.70e-01
acttttcggcctgctgcaatgttagttgaacgttccacagactatggacacaactggaaagtgttcaaatattttgcaaaagactgtgccacttcctttcctaacatcacatctggccaggcccagggagtgggagacattgtttgtgactccaaatactcggatattgaaccctcaacaggtggagag

SEQ ID NO: 19934 - DNA, 279 bp, Homo sapiens
  MAP TO AL109753.9; EXPRESSED IN BRAIN, SIGNAL = 1.1; EXPRESSED IN BONE MARROW, SIGNAL = 0.69; EXPRESSED IN PLACENTA, SIGNAL = 1.1; EXPRESSED IN ADULT LIVER, SIGNAL = 1.2; NT HIT: U97103.1, EVALUE 0.00e+00; SWISSPROT HIT: P46100, EVALUE 3.00e-23; EST_HUMAN HIT: BF698387.1, EVALUE 0.00e+00
tcacattgatttcccttgggaaggtcctggatttttgcttctcattgggggtggtgcacgctgtaatggtggtggctgcataccaccagccactggctgatacattcctctcatatcaatctgctggtagttagaaggattcatgatcaaatttgggggctttggcatcatgaggtgacccagtgttgcttgttgataagtcatttgttgctgttgctgctgattgtactgctgctggagccttctgttcataagtattcgctgaacacagctgattaa

SEQ ID NO: 19935 - DNA, 128 bp, Homo sapiens
  MAP TO AC010169.7; EXPRESSED IN ADULT LIVER, SIGNAL = 0.35; EST_HUMAN HIT: BI828233.1, EVALUE 6.30e-01; NT HIT: L26406.1, EVALUE 6.60e+00; SWISSPROT HIT: O14345, EVALUE 2.70e+00
aaaaagtctttgccaatttgataacgagttccagggcaaaggctggaatagaagccttagtaaccctactgtgctttgtcaatgtctggggctgtctgggaagagcattgacaggcccagtcatagac

SEQ ID NO: 19936 - DNA, 239 bp, Homo sapiens
  MAP TO AC010316.5; EXPRESSED IN BONE MARROW, SIGNAL = 2.9; EXPRESSED IN HEART, SIGNAL = 1.9; EXPRESSED IN ADULT LIVER, SIGNAL = 2.5; EXPRESSED IN LUNG, SIGNAL = 1.9; EXPRESSED IN BRAIN, SIGNAL =   2; EXPRESSED IN FETAL LIVER, SIGNAL = 1.7; EST_HUMAN HIT: AW589300.1, EVALUE 6.00e-92; NT HIT: gi15296472, EVALUE 4.00e-92; SWISSPROT HIT: P54731, EVALUE 8.70e+00
ggaagaaagaaaccagacccaagtgctgagacaacagcaggatgaggcctacctggcctctctcagagctgaccaggagaaagaaagaaagaaacgggaggagcgggagcgtaagcggcggaaggaggaggaggtgcaacagcaaaagttggcagaggagagacggcggcaggtaatggacgtgtggctttactccctgtggttcccaaactgccgagactttgccatcttggtcttaa

SEQ ID NO: 19937 - DNA, 149 bp, Homo sapiens
  MAP TO AC008648.4; EXPRESSED IN PLACENTA, SIGNAL = 0.75; EXPRESSED IN ADULT LIVER, SIGNAL = 0.75; EXPRESSED IN HELA, SIGNAL = 0.54; NT HIT: gi14732953, EVALUE 1.00e-78; EST_HUMAN HIT: BF890745.1, EVALUE 2.00e-78
gtcagaacaaaatctgcttcatcccaggcatggtaggacctatattagagatgacacttatccctgaggctgagctccggaaagccaccataccaatcttcttcgacatgatgctgtgtgaatatcaaagaagtggggatttcaaaaag

SEQ ID NO: 19938 - DNA, 108 bp, Homo sapiens
  MAP TO AC011387.4; EXPRESSED IN LUNG, SIGNAL = 0.69; EXPRESSED IN ADULT LIVER, SIGNAL = 0.68; NT HIT: gi14760313, EVALUE 4.00e-04; EST_HUMAN HIT: BF819330.1, EVALUE 1.00e-04
atgctggagaggcccacatggaaaggaactgagggaaccctccagccatcaggaaatgaggagctaaagctggcagcctaccaggaactgaatcccaccaacaaccat

SEQ ID NO: 19939 - DNA, 141 bp, Homo sapiens
  MAP TO AC008150.8; EXPRESSED IN PLACENTA, SIGNAL = 8.4; EXPRESSED IN ADULT LIVER, SIGNAL = 5.3; EST_HUMAN HIT: BF802716.1, EVALUE 7.00e-04; SWISSPROT HIT: P27772, EVALUE 3.40e+00; NT HIT: U15422.1, EVALUE 3.10e-02
ggtggccagtagaggccttattgagaaggtgacatttgacaaaagactggagggaagtgaggggaccagccatgcaaacacctcagggaggagctttccaggcagaaggaccagcagtgcaaatgccctcgggaaaaccat

SEQ ID NO: 19940 - DNA, 242 bp, Homo sapiens
  MAP TO AC008727.5; EXPRESSED IN BRAIN, SIGNAL = 0.63; EXPRESSED IN ADULT LIVER, SIGNAL = 0.78; EXPRESSED IN FETAL LIVER, SIGNAL = 0.81; EXPRESSED IN PLACENTA, SIGNAL = 0.58; SWISSPROT HIT: P26016, EVALUE 2.30e+00; NT HIT: AE000955.1, EVALUE 8.70e-01
atgatcagtgcctgttcaccaagcttccagttgcaacacctgaagatggttccttccttcattcgggaaacacggggtcctcaaatctacacctgactgggggcagcctacagccctataggagaatgaaagagcttggtttcagagctcttcagacttggaccagcatggatggctccacgttccataacaggcatgccaagggtgtttggatgacgctcaaggccagtgattcctgcctg

SEQ ID NO: 19941 - DNA, 127 bp, Homo sapiens
  MAP TO AC000372.1; EXPRESSED IN ADULT LIVER, SIGNAL = 0.54; EXPRESSED IN HELA, SIGNAL = 0.51; EXPRESSED IN PLACENTA, SIGNAL = 0.44; SWISSPROT HIT: P06219, EVALUE 4.60e+00; NT HIT: AF052455.1, EVALUE 4.20e-01; EST_HUMAN HIT: BI916722.1, EVALUE 2.50e+00
atttcatgcagccacgtttgaccagcgacatgagcaagcctgtgatggtccctccggaaaaggattgtgctttcctagtgacaacttcaggctctgaatgggcatgtgcaggaaggggacaaaagag

SEQ ID NO: 19942 - DNA, 242 bp, Homo sapiens
  MAP TO AC025754.2; EXPRESSED IN ADULT LIVER, SIGNAL = 2.7; EXPRESSED IN PLACENTA, SIGNAL = 2.3; EXPRESSED IN BONE MARROW, SIGNAL = 1.5; EST_HUMAN HIT: AW510937.1, EVALUE 5.00e-03; SWISSPROT HIT: Q28203, EVALUE 1.00e+00; NT HIT: AJ404852.1, EVALUE 4.00e-03
tcacatagtttcttgggcttcctcataaaatggcagctggattccaagaaggagtgttccacaaggatgcaccccagtgtgcaagtgcttatcaatctctgctacatcatgcttgccaacatcccatggacaaaaattagtcacatggccaaggccagggtccacatgggaagggctgtacacaggcatgaatgctgggaagcgtggttcactggggacacaaaagtcacagcccaccatag

SEQ ID NO: 19943 - DNA, 187 bp, Homo sapiens
  MAP TO AL121768.2; EXPRESSED IN BONE MARROW, SIGNAL = 0.42; EXPRESSED IN PLACENTA, SIGNAL =   1; EXPRESSED IN ADULT LIVER, SIGNAL = 1.1; SWISSPROT HIT: P49846, EVALUE 1.70e-01; NT HIT: X13678.1, EVALUE 6.60e-01
ctggcctgttgccacgtagtctttcaaaggatgaatagttaggcagagaatatcatcatcatgacccagataaaaacgctgtgtgttttgctgtcgattataaatgacacccactgctgccacatggtacacaatttcaccaatttgagtataaaacagattacttcgacagtcataacctctgtaa

SEQ ID NO: 19944 - DNA, 87 bp, Homo sapiens
  MAP TO AC010389.6; EXPRESSED IN BONE MARROW, SIGNAL = 0.47; EXPRESSED IN PLACENTA, SIGNAL = 0.53; EXPRESSED IN ADULT LIVER, SIGNAL = 0.58; EXPRESSED IN LUNG, SIGNAL = 0.84; NT HIT: AF209773.1, EVALUE 1.10e+00; EST_HUMAN HIT: BG385835.1, EVALUE 2.50e-02
ctctgaacactgaccataggttctcaagctgcaccccatgcttctgtgcacctggaagatgagcccttcccccatctccagcagcat

SEQ ID NO: 19945 - DNA, 145 bp, Homo sapiens
  MAP TO AC000127.1; EXPRESSED IN PLACENTA, SIGNAL = 0.68; EXPRESSED IN ADULT LIVER, SIGNAL =   1; EXPRESSED IN BRAIN, SIGNAL = 0.95; EST_HUMAN HIT: BE250202.1, EVALUE 7.30e-01; SWISSPROT HIT: P06958, EVALUE 5.90e+00
atgtctaatgaacacctgcccaatgtcagctatacttcagctctcatttgcactattcaaacttataaagttgaagagcaacctacgcctgttgtttctcctctcccaccacacttaggaatggaaggcatctttaggaaggaag

SEQ ID NO: 19946 - DNA, 206 bp, Homo sapiens
  MAP TO AL096870.3; EXPRESSED IN PLACENTA, SIGNAL = 0.51; EXPRESSED IN ADULT LIVER, SIGNAL = 1.5; EXPRESSED IN LUNG, SIGNAL = 1.5; EXPRESSED IN FETAL LIVER, SIGNAL = 0.72; SWISSPROT HIT: Q9SDT1, EVALUE 1.30e-01; NT HIT: gi16162596, EVALUE 1.00e-76; EST_HUMAN HIT: R18988.1, EVALUE 1.00e-112
tgtgacaagctggctgctgactgtgcccacgagctgcggcgccatggggtcagctgtgtgtctctgtggccggggattgtgcagacagaactgctgaaggagcatatggcaaaggaggaggtcctgcaggatcctgtgttgaagcaggttggcaaggggagggcgaaggaagcagagaacaggggagtcggcctctgcatcctcaa

SEQ ID NO: 19947 - DNA, 279 bp, Homo sapiens
  MAP TO AC004826.3; EXPRESSED IN ADULT LIVER, SIGNAL = 0.42; SWISSPROT HIT: Q63532, EVALUE 4.60e-01; NT HIT: gi14781171, EVALUE 0.00e+00; EST_HUMAN HIT: AL046422.1, EVALUE 0.00e+00
ctcagagagaaagtggaggaggttctggtggctggctttccttgccgcttcctgagattcctcactgcctccatccccaacaagcagttcactaggttctctctccgggctgctttcctctagttcctcagcctctggatcctcagtttccctccagttgcccacatcaagatccagactggagtcccatgagctgaagagggacctgcagtcattgctcaactcagagtcattgggatgatcttgttcagaatccagccaaacccactcgtgtcccat

SEQ ID NO: 19948 - DNA, 312 bp, Homo sapiens
  MAP TO AC008821.4; EXPRESSED IN BONE MARROW, SIGNAL = 0.95; EXPRESSED IN PLACENTA, SIGNAL = 0.48; EXPRESSED IN ADULT LIVER, SIGNAL = 1.1; EST_HUMAN HIT: AA877216.1, EVALUE 5.00e-19; SWISSPROT HIT: Q02916, EVALUE 2.50e-01; NT HIT: AF414080.1, EVALUE 2.90e-01
ctcctctgtagccaggagcccacagttggctatttcggccgtgtgtccagagtctggaatccctcgtccccttgggcttgcactgtggccagttagcttgcccatcctcagcctcggcaccctccttgtttgtcccctcccttcccggtgcaccctccaaaggtgcacccctcttctctgaggtcagccccactgcctggccctctgtcccctcctccagtgctgttggtgactttgctccatcaagcatcgtctttctctctctctgtctctctctctcatattctcccccctcaactagttgcttcctct

SEQ ID NO: 19949 - DNA, 79 bp, Homo sapiens
  MAP TO AC003966.1; EXPRESSED IN PLACENTA, SIGNAL = 1.5; EXPRESSED IN ADULT LIVER, SIGNAL = 0.51; EST_HUMAN HIT: BF738387.1, EVALUE 9.00e-05; NT HIT: AL163201.2, EVALUE 4.00e-03
tttgttttttttcaagattcttttggctaatcagggtcccttgcagtcccttatgaatctgaagatcagcttttccttc

SEQ ID NO: 19950 - DNA, 170 bp, Homo sapiens
  MAP TO AC010485.4; EXPRESSED IN ADULT LIVER, SIGNAL = 1.2; EXPRESSED IN LUNG, SIGNAL = 2.2; NT HIT: AF224263.1, EVALUE 1.50e-01; SWISSPROT HIT: Q04561, EVALUE 3.30e+00
ctctatcacacccattgtcatacacatgttgagagcagggcttggctgtgtcaggtgcccgggatctgactttctccctgtgaccgtgagggttttatgtcctgctggtcctgatgtcctctgcaccgtcatgtctgggcctgtgaaggtggcaagattttcaaagtcat

SEQ ID NO: 19951 - DNA, 122 bp, Homo sapiens
  MAP TO AC025457.3; EXPRESSED IN BONE MARROW, SIGNAL = 1.9; EXPRESSED IN ADULT LIVER, SIGNAL = 1.6; EXPRESSED IN BRAIN, SIGNAL = 1.4; NT HIT: AF030879.1, EVALUE 4.00e-01; EST_HUMAN HIT: BG036715.1, EVALUE 5.90e-01
cacactaggttaatttccatatgtagcatcttgatgatcaggataagagagtattccagactaatgggcctcctgtttgtagagtttcctgaagttcctagctcaccttcctcttgctccat

SEQ ID NO: 19952 - DNA, 185 bp, Homo sapiens
  MAP TO AC010219.4; EXPRESSED IN BRAIN, SIGNAL = 1.6; EXPRESSED IN BONE MARROW, SIGNAL = 1.3; EXPRESSED IN HEART, SIGNAL = 1.2; EXPRESSED IN ADULT LIVER, SIGNAL = 1.6; EST_HUMAN HIT: BI818614.1, EVALUE 2.40e-01; SWISSPROT HIT: P15095, EVALUE 5.60e+00; NT HIT: gi9506650, EVALUE 2.60e+00
tggctgagcagttagcatcttgggtggaatcaatatcctacctctttctggcatcagtggttatgagcacacagcttcagagtccagcagatctgggtgtgaatccacttaataagtgcatgaccttgagaaatgaccttccacctcgagtctcagtttcctggcctgtgacagagaagaagtaa

SEQ ID NO: 19953 - DNA, 106 bp, Homo sapiens
  MAP TO AC004037.1; EXPRESSED IN ADULT LIVER, SIGNAL = 3.1; EXPRESSED IN LUNG, SIGNAL = 1.5; EXPRESSED IN PLACENTA, SIGNAL = 3.7; NT HIT: AF153350.1, EVALUE 6.00e-03; SWISSPROT HIT: Q9UKP4, EVALUE 2.00e-06; EST_HUMAN HIT: AW149619.1, EVALUE 1.30e-01
ttgtgacccatttcatgagcaattgtaaaagcaagattcaagccattgtcttcagcaataatacattttctcttttcactacacattccactcaagtaagctatac

SEQ ID NO: 19954 - DNA, 390 bp, Homo sapiens
  MAP TO AC025761.3; EXPRESSED IN ADULT LIVER, SIGNAL =   2; EXPRESSED IN BRAIN, SIGNAL = 1.8; EXPRESSED IN BONE MARROW, SIGNAL =   2; NT HIT: gi14724561, EVALUE 0.00e+00; SWISSPROT HIT: Q11122, EVALUE 7.00e-23; EST_HUMAN HIT: BI913571.1, EVALUE 0.00e+00
ttgttcatggtggacaatggagcagatgactggagaatagccatgacttatgagcgtattttcttcatctgcttggaaatactggtgtgtgctattcatcccatacctgggaattatacattcacatggacggcccggcttgccttctcctatgccccatccacaaccaccgctgatgtggatattattttatctataccaatgttcttaagactctatctgattgccagagtcatgcttttacatagcaaacttttcactgatgcctcctctagaagcattggagcacttaataagataaacttcaatacacgttttgttatgaagactttaatgactatatgcccaggaactgtactcttggtttttagtatctcattatggataatt

SEQ ID NO: 19955 - DNA, 213 bp, Homo sapiens
  MAP TO AL121674.12; EXPRESSED IN FETAL LIVER, SIGNAL = 0.88; EXPRESSED IN BRAIN, SIGNAL = 0.57; EXPRESSED IN BONE MARROW, SIGNAL = 0.71; EXPRESSED IN PLACENTA, SIGNAL = 0.71; EXPRESSED IN ADULT LIVER, SIGNAL = 0.64; EST_HUMAN HIT: AA599664.1, EVALUE 2.80e-01; SWISSPROT HIT: Q9WUQ1, EVALUE 4.20e-01
ttcctgcccctgaatcccatgcttgggattgtggtatggagtgcaaagcagagctgtgataacatgccagtcctgagctaaagcgaatcctgtgtaaagatgttttcgcaactcaccacttggtaaccaatcctgaggttgtgatctggggctgggacaagggccagcagtcacagaattgcgttgagcacactgagaagatactgcacagat

SEQ ID NO: 19956 - DNA, 357 bp, Homo sapiens
  MAP TO AC010271.5; EXPRESSED IN BONE MARROW, SIGNAL = 1.7; EXPRESSED IN HEART, SIGNAL = 1.4; EXPRESSED IN ADULT LIVER, SIGNAL = 2.1; NT HIT: AF208292.1, EVALUE 1.30e+00; EST_HUMAN HIT: BG772881.1, EVALUE 4.00e-26; SWISSPROT HIT: Q9QZR5, EVALUE 4.00e-35
gtgattgacttcggatccgccagcattttcagcgaggtgcgctacgtgaaggagccatacatccagtcgcgcttctaccgggcccctgagatcctgctggggctgcccttctgcgagaaggtggacgtgtggtccctgggctgcgtcatggctgagctgcacctgggctggcctctctaccccggcaacaacgagtacgaccaggtgcgctacatctgcgaaacccagggcctgcccaagccacacctgttgcacgccgcctgcaaggcccaccacttcttcaagcgcaacccccaccctgacgctgccaacccctggcagctcaagtcctcggctgactacctggccgagacgaag

SEQ ID NO: 19957 - DNA, 99 bp, Homo sapiens
  MAP TO AC026432.2; EXPRESSED IN ADULT LIVER, SIGNAL = 1.2; EXPRESSED IN BRAIN, SIGNAL = 1.2; EXPRESSED IN HELA, SIGNAL = 0.96; EXPRESSED IN BONE MARROW, SIGNAL = 1.5; NT HIT: AF234969.1, EVALUE 3.10e-01; EST_HUMAN HIT: BG986454.1, EVALUE 7.20e+00; SWISSPROT HIT: O18531, EVALUE 6.10e+00
aggtacgggtggatgcaaagatgggtgtaatgagtgaacgacgcctcttccttccaaagtcatgtccatagtctcatcaccagaatccatgactgtgac

SEQ ID NO: 19958 - DNA, 168 bp, Homo sapiens
  MAP TO AL121825.19; EXPRESSED IN PLACENTA, SIGNAL = 0.97; EXPRESSED IN ADULT LIVER, SIGNAL = 0.91; SWISSPROT HIT: P02895, EVALUE 4.40e+00; NT HIT: M60675.1, EVALUE 2.00e-10; EST_HUMAN HIT: BF832515.1, EVALUE 2.00e-04
atgttttatgtgagcatcaaggtaaccacaaagcaaatacctatagcagatacacaaaagataaaggaaccaaagcatactatagaaaatcatcaaatcagcaaggaagacaaaaaaggaacgaaaggtttacacaacagtcagaaaacaattgacaaaatggcaata

SEQ ID NO: 19959 - DNA, 147 bp, Homo sapiens
  MAP TO AC010485.4; EXPRESSED IN PLACENTA, SIGNAL = 0.72; EXPRESSED IN ADULT LIVER, SIGNAL = 0.81; SWISSPROT HIT: P54320, EVALUE 1.30e-01
actggggggtgctcacccggcccctcagctgggggctgggctgagacactgccccccaccccgggtgctggtgcgtcagtttccgcacctacgccttgggctgctggccgagtctctgacttggctgttgcaatgcgcagcgggtga

SEQ ID NO: 19960 - DNA, 214 bp, Homo sapiens
  MAP TO AC003972.1; EXPRESSED IN BONE MARROW, SIGNAL = 2.6; EXPRESSED IN PLACENTA, SIGNAL = 3.1; EXPRESSED IN HEART, SIGNAL = 1.6; EXPRESSED IN ADULT LIVER, SIGNAL = 3.8; EXPRESSED IN HELA, SIGNAL = 3.3; EST_HUMAN HIT: AU139428.1, EVALUE 1.00e-117; SWISSPROT HIT: Q09820, EVALUE 1.00e-24; NT HIT: U59323.1, EVALUE 1.00e-117
ctgatccttgtaggcgaccactgccagctgggcccagtggtgatgtgcaagaaggcggccaaggccgggctgtcacagtcgctcttcgagcgcctggtggtgctgggcatccggcccatccgcctgcaggtccagtaccggatgcaccctgcactcagcgccttcccatccaacatcttctacgagggctccctccagaatggtgtcactgcag

SEQ ID NO: 19961 - DNA, 247 bp, Homo sapiens
  MAP TO AC010327.5; EXPRESSED IN BONE MARROW, SIGNAL = 2.2; EXPRESSED IN ADULT LIVER, SIGNAL = 2.3; EXPRESSED IN FETAL LIVER, SIGNAL = 2.4; EXPRESSED IN BRAIN, SIGNAL = 1.9; SWISSPROT HIT: P10388, EVALUE 1.40e-02; EST_HUMAN HIT: BG685106.1, EVALUE 1.00e-129; NT HIT: AF066062.1, EVALUE 5.70e-02
cgcccagatgtctgcaggtggctgagccccttcatcctctcctgctgcgtgtacttctgcctctggattcccgaggaccagctgtcctggttcgctgccctggtcaagtgcctgcccgtcctctgcctggctgggttcctgtgggtcatgtccccaagcgggggctacacccagctcctccagggagcccttgtgtgctcggctgtgggggacgcttgcctcatctggccggcagccttcgtccctg

SEQ ID NO: 19962 - DNA, 179 bp, Homo sapiens
  MAP TO AC016552.5; EXPRESSED IN FETAL LIVER, SIGNAL = 2.1; EXPRESSED IN BRAIN, SIGNAL = 1.4; EXPRESSED IN PLACENTA, SIGNAL = 1.3; EXPRESSED IN HEART, SIGNAL = 3.3; EXPRESSED IN ADULT LIVER, SIGNAL = 3.1; NT HIT: AF213884.1, EVALUE 1.00e-05; SWISSPROT HIT: Q06174, EVALUE 9.70e+00; EST_HUMAN HIT: AI955863.1, EVALUE 1.00e-06
ttaatgtaagtgagtaggaggcatactgtttccatgttctatgggtcggtgcacgacaactccagatgattgttgttgtctggtacacatatggaccctttgttcccacacgttacttttcaagatgtaggggccgttggaaaactctcctttgccctctgaaggtttgctgaaagtag

SEQ ID NO: 19963 - DNA, 295 bp, Homo sapiens
  MAP TO AC012000.3; EXPRESSED IN PLACENTA, SIGNAL = 1.2; EXPRESSED IN HEART, SIGNAL = 1.3; EXPRESSED IN ADULT LIVER, SIGNAL = 1.6; EXPRESSED IN BRAIN, SIGNAL = 1.2; NT HIT: AF288742.1, EVALUE 2.00e-26; SWISSPROT HIT: Q43130, EVALUE 4.50e+00; EST_HUMAN HIT: BF820241.1, EVALUE 3.00e-63
caaaaaggtgcaaagtgaagcagcaagtgctaatgtagaagcagaagcaagttatcaggaagatctagctaagatcattgatgaaggtggctacactggaaaaccaattcttaatgtagacgaaacagccttatattggaagaagatgccatctaggacttccatagctaaagaggagaagtcaatgcctggctctaaagctttaaaagataggctgactctttcattaggggccgatgcagctggtgactttaagttgaagtcagtgcccattcaccattccaaaaaatcctag

SEQ ID NO: 19964 - DNA, 217 bp, Homo sapiens
  MAP TO AC004177.2; EXPRESSED IN ADULT LIVER, SIGNAL = 0.59; EXPRESSED IN HELA, SIGNAL = 0.87; NT HIT: AP003005.2, EVALUE 2.00e-01; SWISSPROT HIT: P01229, EVALUE 5.00e+00
gagcctgtactgcctgaagaactgttcacccatccggatctaccacattgtccgctttgtggccatcagcttcctcgtttggggcctgcccttagttgtccttgtgtacctgccaggaaaagaatacctgacctttgcctttgaccttctgttgctgctgtccatggtagtcagtatggctcaaccagccatctacttcttggctggctacctttga

SEQ ID NO: 19965 - DNA, 190 bp, Homo sapiens
  MAP TO AC016594.5; EXPRESSED IN PLACENTA, SIGNAL = 0.86; EXPRESSED IN ADULT LIVER, SIGNAL = 0.92; SWISSPROT HIT: P20093, EVALUE 6.50e-01; NT HIT: gi14781338, EVALUE 1.00e-103; EST_HUMAN HIT: H81478.1, EVALUE 1.00e-103
ctggctgcttagacagtgatgggggttctatggtacagaagaaaacaggttctggaatctccactccagccaataaaagtctctctgcttcattgttttgtctgtgcttcttttctccctcccgttcggctctacgagctgcagctaatgcactggacttggatgagacaatggtgtctccagtggcagt

SEQ ID NO: 19966 - DNA, 334 bp, Homo sapiens
  MAP TO AJ239328.2; EXPRESSED IN ADULT LIVER, SIGNAL = 1.1; EXPRESSED IN BRAIN, SIGNAL = 1.2; EXPRESSED IN LUNG, SIGNAL = 0.72; EXPRESSED IN PLACENTA, SIGNAL = 0.88; SWISSPROT HIT: O15499, EVALUE 7.30e-02; NT HIT: AL163303.2, EVALUE 0.00e+00; EST_HUMAN HIT: AA853953.1, EVALUE 8.00e-06
ctgtaggatgtggcaaggggccaggatgtcactccctggcactgcgtaaggctccagctcccctgctggcactggtgaagcaagcagccattttggggctgccctagaatggccgcggcgactctctgcctctggaggtggactgcaggcacctctccgagcgagcttgggagccccagctgacaaccagccaacacctgaagcgctcactcctgcagctgcaaggaaatgaattctgccaacaacctgggtgggcccagaagtgggttctgccccagtccagcctctgcacgggaatgtgaccaccggctccccgatggcagcctgggagacc

SEQ ID NO: 19967 - DNA, 146 bp, Homo sapiens
  MAP TO AL031843.2; EXPRESSED IN BONE MARROW, SIGNAL = 4.7; EXPRESSED IN PLACENTA, SIGNAL = 1.8; EXPRESSED IN ADULT LIVER, SIGNAL = 1.9; EXPRESSED IN BRAIN, SIGNAL =   3; EXPRESSED IN LUNG, SIGNAL =   2; NT HIT: AF326988.1, EVALUE 1.30e-01; EST_HUMAN HIT: BF811142.1, EVALUE 1.90e-01; SWISSPROT HIT: O33021, EVALUE 5.90e+00
agaacagtgtggtcaacgtaaaggtaaccttgggtaggggcagccatgctctcaggagggaacaccatgccacagatgcaactggctgggacatggccctggttggggtggccactgcaggcctccttgaggaggaaatggctgag

SEQ ID NO: 19968 - DNA, 140 bp, Homo sapiens
  MAP TO AC010615.5; EXPRESSED IN ADULT LIVER, SIGNAL = 0.68; EXPRESSED IN PLACENTA, SIGNAL = 0.39; EXPRESSED IN FETAL LIVER, SIGNAL = 0.36; NT HIT: AL163247.2, EVALUE 2.00e-03; SWISSPROT HIT: Q91875, EVALUE 4.50e+00; EST_HUMAN HIT: BE076211.1, EVALUE 2.00e-04
gacaagagtcccagctgaggtcccagccaaaagccagcatcaactgccagaacgtgcctgagtcctcagatcactgcccccacttagttaatgccagccctcacgtctccctgtctgaggccctggacagtgtggaataa

SEQ ID NO: 19969 - DNA, 106 bp, Homo sapiens
  MAP TO AC006980.3; EXPRESSED IN PLACENTA, SIGNAL = 8.3; EXPRESSED IN ADULT LIVER, SIGNAL =  12; EXPRESSED IN BRAIN, SIGNAL = 6.1; NT HIT: AB016104.1, EVALUE 3.40e-01; SWISSPROT HIT: P54659, EVALUE 4.70e+00
ttggaatagtccaggaaggtggactttcagataaggtgacatatgagaggagagccaccagggaagggaggaattcctatggagatgtggagaaggagctttctag

SEQ ID NO: 19970 - DNA, 236 bp, Homo sapiens
  MAP TO AC010205.5; EXPRESSED IN ADULT LIVER, SIGNAL =   1; EXPRESSED IN BRAIN, SIGNAL = 0.92; EXPRESSED IN BONE MARROW, SIGNAL = 0.8; EST_HUMAN HIT: BE695853.1, EVALUE 1.00e-127; SWISSPROT HIT: P50502, EVALUE 8.00e-11; NT HIT: gi14748655, EVALUE 4.00e-43
agccaacacaagttatgaaattaaactagacacaccccttcttcgaggttacgccaagccagtgcctgggcctgaaactggcctgcagcccctcagcttcgcccactgccttccgaccctggaccttcgcaaagtgaacgagcttcgggacttcgtgaaaatgtataagcaggatccgagcattctgcataccaaggaaatgtgctttctgagggagcaggtggagagcatggggg

SEQ ID NO: 19971 - DNA, 112 bp, Homo sapiens
  MAP TO AC009024.6; EXPRESSED IN ADULT LIVER, SIGNAL = 0.87; EXPRESSED IN BRAIN, SIGNAL = 0.97; NT HIT: U80604.1, EVALUE 2.30e-02; EST_HUMAN HIT: BG995362.1, EVALUE 2.10e+00
tgttaagcaagaaaatagagatgatttcaacagataatgaattattgtcagcctactctcctccagctgtgcaagacgccatagactctgtcttcatgcacctcacagctag

SEQ ID NO: 19972 - DNA, 111 bp, Homo sapiens
  MAP TO AC008648.4; EXPRESSED IN ADULT LIVER, SIGNAL = 0.64; NT HIT: AF360855.1, EVALUE 1.40e+00
atgcttctgggtgtcctcatggagcctcaggaacaatctgcatgcctcactgatgcttttgccgtcagttttgggttttttagacctgggacgcttgacactgaccacaag

SEQ ID NO: 19973 - DNA, 148 bp, Homo sapiens
  MAP TO AC008699.4; EXPRESSED IN PLACENTA, SIGNAL = 0.68; EXPRESSED IN ADULT LIVER, SIGNAL = 0.93; NT HIT: gi14740352, EVALUE 5.00e-01; EST_HUMAN HIT: AA722164.1, EVALUE 1.90e-01; SWISSPROT HIT: P15882, EVALUE 5.90e+00
ctgggccaaattccagccccgtagctctggggctggaaggcctgcatgatctgcccaggctgttaccgcctgcagagatttgcaaagactctttcctatggctgttaagtcatttgcacaaagtcctctgtgagtttcataagtcagt

SEQ ID NO: 19974 - DNA, 536 bp, Homo sapiens
  MAP TO AC000361.1; EXPRESSED IN ADULT LIVER, SIGNAL = 0.44; NT HIT: AL445064.1, EVALUE 1.30e-01
atgctttctttctgccacttagagtgtcaacttcaacttaagtgtggccttcctgtgaaggaaagtcagttgacgagtagcaagaaccgcttcatacttcaggcacatccaacatgggaggggagaaaggaaagagaaggagagagagagagagagaaagagagagagaagaagaagaagaggaagaagaaggagaagaggaagaagaagaagaaagaagaagaagaagaagaagaagaagaagaagaagaagaagaagaagaagaagaagaagaagaagaaagaaagaaggagaagaaggagaagaaggagaaggagaaggaagaaggagaagaaggagaaggagaaggaagaaggaagaaggaagaaggagaaggagaaggagaaggagaagaagaagaagaagaagaagaagaagaagaagaagaagaagaagaagaagaagaagaagaagaagaagaagaagaagaagaaaagagagagagagagagagagagaatgaacatgaaccaaagaagaaagaggaagagtcattc

SEQ ID NO: 19975 - DNA, 78 bp, Homo sapiens
  MAP TO AC010327.5; EXPRESSED IN ADULT LIVER, SIGNAL = 2.6; EXPRESSED IN FETAL LIVER, SIGNAL = 2.7; NT HIT: AF149773.1, EVALUE 5.00e-27; EST_HUMAN HIT: BF952213.1, EVALUE 1.00e-31; SWISSPROT HIT: P10272, EVALUE 4.00e-03
cttatcagcataagcgttgtcctgagcaatgggatctgatgccttttgatggcccttgcagtgaatgactccagcttc

SEQ ID NO: 19976 - DNA, 80 bp, Homo sapiens
  MAP TO AC000367.1; EXPRESSED IN ADULT LIVER, SIGNAL = 0.35; NT HIT: AF050157.1, EVALUE 2.40e-01
cttcccaattagactgtaagccccatgaggacaataaccatttttgttttgctcacgaacatgtccttgacatctaatag

SEQ ID NO: 19977 - DNA, 115 bp, Homo sapiens
  MAP TO AL031709.10; EXPRESSED IN PLACENTA, SIGNAL = 1.9; EXPRESSED IN ADULT LIVER, SIGNAL = 1.7; SWISSPROT HIT: P14314, EVALUE 8.00e-02; NT HIT: gi14776618, EVALUE 2.00e-58; EST_HUMAN HIT: BF337228.1, EVALUE 3.00e-58
gtggagctggcgtgtggaaaaagcaaccggctggcccatgtgtccgagccgagcacctgcgtctacgcgctgacgttcgagacccccctcgtctgccacccccacgccttgctag

SEQ ID NO: 19978 - DNA, 83 bp, Homo sapiens
  MAP TO AC008859.4; EXPRESSED IN ADULT LIVER, SIGNAL = 0.66; EXPRESSED IN FETAL LIVER, SIGNAL = 0.65; NT HIT: AJ242538.1, EVALUE 2.50e-01; EST_HUMAN HIT: AL046423.1, EVALUE 3.70e-01
gctatacctgcaaatccaaaagggatgacatcaatggctgccttagcaggacagagggcttggcgatctcagaagacaccatc

SEQ ID NO: 19979 - DNA, 135 bp, Homo sapiens
  MAP TO AC011248.8; EXPRESSED IN ADULT LIVER, SIGNAL = 0.48; NT HIT: AF364606.1, EVALUE 9.00e-18; EST_HUMAN HIT: AI050027.1, EVALUE 2.00e-10; SWISSPROT HIT: P23207, EVALUE 5.90e+00
aagggcagggggtccttccaggtcccccaagagtacagggatgcctgagtctgcagccaccgcttgggcagctacagctgcaccagggggaaggggtcctgcctgctctgtggagccggaggcccgagcctgcag

SEQ ID NO: 19980 - DNA, 128 bp, Homo sapiens
  MAP TO AC002325.1; EXPRESSED IN BRAIN, SIGNAL = 3.5; EXPRESSED IN PLACENTA, SIGNAL = 4.7; EXPRESSED IN ADULT LIVER, SIGNAL =   3; NT HIT: AF099864.1, EVALUE 4.30e-01; EST_HUMAN HIT: BI161159.1, EVALUE 6.30e-01
atcatggcactgctacaacgctgcggcaggttcatccacagatggagcactggcagctgtgtcctctgtctgctgttagtattatcgccatggccaccaaaagccgtcagtggcaccagcaccaggaa

SEQ ID NO: 19981 - DNA, 85 bp, Homo sapiens
  MAP TO AL008640.1; EXPRESSED IN PLACENTA, SIGNAL = 2.2; EXPRESSED IN ADULT LIVER, SIGNAL =   2; EST_HUMAN HIT: AA502215.1, EVALUE 5.00e-22
tctcccgggagggcagccctccagtcaaccctaacggaaaccagagcgaaagcgagactagagatgctttatgcatcagcctcat

SEQ ID NO: 19982 - DNA, 159 bp, Homo sapiens
  MAP TO AC002450.1; EXPRESSED IN BRAIN, SIGNAL = 0.52; EXPRESSED IN ADULT LIVER, SIGNAL = 0.65; NT HIT: Y17571.1, EVALUE 2.00e-84; SWISSPROT HIT: Q9UJS0, EVALUE 4.00e-25; EST_HUMAN HIT: AI989992.1, EVALUE 2.00e-84
ctgttggagccactgctgtgtatcctatcgatcttgtaaaaactcgaatgcagaaccaacgatcaactggctcttttgtgggagaactcatgtataaaaacagctttgactgttttaagaaagtgctacgctatgaaggcttctttggactgtatagag

SEQ ID NO: 19983 - DNA, 360 bp, Homo sapiens
  MAP TO AC010524.5; EXPRESSED IN ADULT LIVER, SIGNAL = 0.85; EXPRESSED IN LUNG, SIGNAL = 0.62; EXPRESSED IN BRAIN, SIGNAL =   1; NT HIT: AY056173.1, EVALUE 3.40e-01; SWISSPROT HIT: O57521, EVALUE 1.80e-01; EST_HUMAN HIT: BG422493.1, EVALUE 2.00e+00
atggaagatatcctggaaggataccaagccagtgaaagctcagatgaaaatgccccatggctttggaaggccaatgaatgtgccaaggaaaaaggtgccatggaggatcctctggaagacctcgccaatgaaatttcagattaggacaccccactggatttgaaggccaaagaacgtgccaaggaaaaagttcccatggaggataccctggtggaagaccttggaaacgaaagctcagataaggatgcctcactggacttgaaggttgacaaacgcatgaaagaaaaagttcccacagaggataccctggtgaaagaccttgccaatgaaagctcagatgaggacgctctactggattga

SEQ ID NO: 19984 - DNA, 304 bp, Homo sapiens
  MAP TO AC010407.4; EXPRESSED IN FETAL LIVER, SIGNAL = 0.44; EXPRESSED IN ADULT LIVER, SIGNAL = 0.64; EST_HUMAN HIT: BF841049.1, EVALUE 1.00e-32; SWISSPROT HIT: P52734, EVALUE 1.20e+00; NT HIT: AF217490.1, EVALUE 3.00e-32
tgtcaacagcctggacaccagccggggtcaagatcccactgacagggacaggaagcagggaaattctgggcagaagagggcgggtccctggagagggccccaccctcaagcctggaaccatggcccaaagcaagaacttacatccctgtttccctgctccaatgttgccttttccaaaaccacccatggcctgccccacccccgatcttgtgcccataagaacccaggatcatccagcagggagcaggagaagcagctggacatcagagactacaattggacgtcagagaaaagcgttttgact

SEQ ID NO: 19985 - DNA, 156 bp, Homo sapiens
  MAP TO AB022537.1; EXPRESSED IN HEART, SIGNAL = 0.92; EXPRESSED IN ADULT LIVER, SIGNAL = 0.71; EXPRESSED IN BRAIN, SIGNAL = 0.62; SWISSPROT HIT: Q08274, EVALUE 5.10e-01; NT HIT: gi15303540, EVALUE 9.00e-83; EST_HUMAN HIT: BG697896.1, EVALUE 1.00e-82
tatccatttgaggccctcttccgcagccagcactacgccctcctagacaattcctgccgcgaataccttttcatctgtgaattttttgttgtgtctggcccagctgcacacgacctgttccatgctgtcatgggccgtacactcagcatgaccctg

SEQ ID NO: 19986 - DNA, 178 bp, Homo sapiens
  MAP TO AC010511.6; EXPRESSED IN HEART, SIGNAL = 1.3; EXPRESSED IN FETAL LIVER, SIGNAL = 0.84; EXPRESSED IN ADULT LIVER, SIGNAL = 1.5; SWISSPROT HIT: P11274, EVALUE 5.00e-03; NT HIT: gi11038638, EVALUE 1.00e-17; EST_HUMAN HIT: BG913994.1, EVALUE 2.00e-17
catggcgaggttgtgcagaggcatcttgtcaccatctccttttctgccgcccttctcaggcggtccagagggaagaggaaggtcaccaggttggcctccaggagaaacagcggcaggttgagtatgcagctgtcctttgcaaggtggtctgtctgaaagagcaatgccctcggttaag

SEQ ID NO: 19987 - DNA, 224 bp, Homo sapiens
  MAP TO AC000388.1; EXPRESSED IN BRAIN, SIGNAL = 1.2; EXPRESSED IN BONE MARROW, SIGNAL = 1.2; EXPRESSED IN ADULT LIVER, SIGNAL = 2.6; EXPRESSED IN PLACENTA, SIGNAL = 1.3; SWISSPROT HIT: P80146, EVALUE 3.70e+00; NT HIT: gi16162096, EVALUE 8.00e-75; EST_HUMAN HIT: BE019111.1, EVALUE 3.00e-72
gcgcttccatcactcgctcacggaccacccccgctggatccgagagcgaagccatgagtcctacgccaagaactactccgtcgtcttcccccacgatgagccgctggccgggcgcaacatgaggagagacccgctgcatgaggtaacgcccctacagctcctgctggggactggcagcgagggtctgggacgtcctcagggcagcggagtgacagaaatgcaag

SEQ ID NO: 19988 - DNA, 197 bp, Homo sapiens
  MAP TO AL121896.10; EXPRESSED IN LUNG, SIGNAL =   1; EXPRESSED IN HELA, SIGNAL = 0.82; EXPRESSED IN PLACENTA, SIGNAL = 0.67; EXPRESSED IN ADULT LIVER, SIGNAL = 0.71; NT HIT: gi13470324, EVALUE 4.50e-02; SWISSPROT HIT: O43246, EVALUE 2.90e-01; EST_HUMAN HIT: BE867043.1, EVALUE 1.00e+00
aagtggatgacatacaacttttgggcatgtggaagaggtaagaatgctacttgcaggcttgaaatgaccagaacttctgagaatgaccttaagcataaccaggaaggactatggcatggcagagagagggccatgctgggtgacacacacaccctggcgtggagggaagaggaaatggagcagaagcaggctctccg

SEQ ID NO: 19989 - DNA, 145 bp, Homo sapiens
  MAP TO AC008901.4; EXPRESSED IN BONE MARROW, SIGNAL = 0.61; EXPRESSED IN ADULT LIVER, SIGNAL = 0.85; EXPRESSED IN PLACENTA, SIGNAL = 0.63; SWISSPROT HIT: P04726, EVALUE 1.20e+00; NT HIT: AF134230.1, EVALUE 8.00e-03; EST_HUMAN HIT: AV649054.1, EVALUE 4.70e-02
ctaatacacgaatgtttgaaatcctttcatcaacttgctcatcaacatgtccttcatttccaactttctgagctacaaccatccttctgggctggagtttctcagcctcaacagtgctgccattttgagctggataattctttgt

SEQ ID NO: 19990 - DNA, 174 bp, Homo sapiens
  MAP TO AC008010.10; EXPRESSED IN PLACENTA, SIGNAL = 0.69; EXPRESSED IN ADULT LIVER, SIGNAL = 1.8; EXPRESSED IN LUNG, SIGNAL = 3.4; SWISSPROT HIT: P01023, EVALUE 8.00e-12; EST_HUMAN HIT: AU135516.1, EVALUE 4.00e-03
cattagataagagaaagaaagccttagattgaacttcctctgtcagttgctcagtagatttcagatagtccagaacataagtatcagatgctagtagggcagcattctgctctccacctccatagggcatttggagaacaaccagattctgcatggcaagtcctagaatatccc

SEQ ID NO: 19991 - DNA, 224 bp, Homo sapiens
  MAP TO AC011248.8; EXPRESSED IN ADULT LIVER, SIGNAL = 0.44; EST_HUMAN HIT: BF948088.1, EVALUE 1.20e+00; NT HIT: gi4502122, EVALUE 1.00e-123; SWISSPROT HIT: O14727, EVALUE 3.00e-37
ctttgtaggcaccttaacgtccttctgaaggatggaaagatctgtgtaataatctttgatgtcttctctgagcatttcaacacttatagacatggcttcatctagagcctcataatcataagacgaagatttccttattctcttaaactgcttattctgaagctgtttgaggtagtactcccagcgattgggaaaatcacgtaaaagtgcaccaattaaagata

SEQ ID NO: 19992 - DNA, 311 bp, Homo sapiens
  MAP TO AL078614.2; EXPRESSED IN ADULT LIVER, SIGNAL = 0.85; EXPRESSED IN BONE MARROW, SIGNAL = 0.56; SWISSPROT HIT: Q02386, EVALUE 1.00e-10; NT HIT: AL163204.2, EVALUE 1.00e-102; EST_HUMAN HIT: BF695190.1, EVALUE 9.00e-21
aaataagtcagtccatgctgtccagatgcagttctgttctgtagagatgaagaataagaatcaccaaagtggaaaaacctctgtcctgctccaaattctggtccacacaggagtagtactactggagagaaaagccatacatgtcccaaatgaaggaaagcctttacgttatcagtcatttcttatgagacatatgaaacttcacactggagagaaaccttatgaatgtaacaaaagtgagaaaggctttagatattccctacaccttaataaacatttaagaaagaacattctggagaagccctatggat

SEQ ID NO: 19993 - DNA, 108 bp, Homo sapiens
  MAP TO AC000371.1; EXPRESSED IN ADULT LIVER, SIGNAL = 0.55; EXPRESSED IN BONE MARROW, SIGNAL = 0.59; NT HIT: Z99110.1, EVALUE 3.50e-01; EST_HUMAN HIT: AI276534.1, EVALUE 3.30e-02
atgttgacattcaaaaggacaacttgttacagcagcagcaggaaagcatttcagagtttagctatcacttctgagaaaaagattatgacacaaatgctcaagaaaaag

SEQ ID NO: 19994 - DNA, 204 bp, Homo sapiens
  MAP TO AC010389.6; EXPRESSED IN ADULT LIVER, SIGNAL = 0.63; SWISSPROT HIT: Q58764, EVALUE 8.40e-01; NT HIT: gi12383069, EVALUE 1.00e-111; EST_HUMAN HIT: BG195876.1, EVALUE 1.00e-111
ctggaaatgtccagatccttgaacagaaaataccaagtaaactatgctgctttcccaaaaggctcgatttagcttccgttcattactaggagttgtagaccagatacccttctgttgagaaatttcaaggtttctcaaattgctactcttcattatgaagtatcgaacaggcatgtttggtcttggcgaaggagattttgagcc

SEQ ID NO: 19995 - DNA, 252 bp, Homo sapiens
  MAP TO AC002105.1; EXPRESSED IN LUNG, SIGNAL = 1.1; EXPRESSED IN PLACENTA, SIGNAL = 0.65; EXPRESSED IN ADULT LIVER, SIGNAL = 0.68; SWISSPROT HIT: P46218, EVALUE 6.80e+00; NT HIT: AF064633.1, EVALUE 9.10e-01; EST_HUMAN HIT: AL523682.1, EVALUE 1.00e-127
atgagtggccgtgtccccctggcagagaaggccttgtctgaaggctacgcccgcctccggtacagggacacctccttgctcatctggcagcagcaacagcagaagttggagtcggtgccacctgggacgtacctgagcaggagccgaagcatgtggtactcacagtatggaaatgaggccatcttggtccgagacaaaaacaagctcgaggtctctagggacacagggcagtccaagttttgcacaattatg

SEQ ID NO: 19996 - DNA, 213 bp, Homo sapiens
  MAP TO AC010521.4; EXPRESSED IN FETAL LIVER, SIGNAL = 2.5; EXPRESSED IN BRAIN, SIGNAL = 4.1; EXPRESSED IN LUNG, SIGNAL = 2.8; EXPRESSED IN BONE MARROW, SIGNAL = 4.7; EXPRESSED IN ADULT LIVER, SIGNAL = 3.7; SWISSPROT HIT: P13382, EVALUE 2.30e+00; EST_HUMAN HIT: BI825804.1, EVALUE 7.10e-02
atgctgtcaggaggcttcgaggccatgcccggtatgctgcccacctccttgagaccccttcctgacactttccagccggtgctacagccgcagcacgtgccaccactgaatacctttcagcagccggtgcaggcttcagacggcaggcgtgcccgacagccgtggcctcagcagctctttcgtggcaaccaggacagtcagggcagtgatgaa

SEQ ID NO: 19997 - DNA, 126 bp, Homo sapiens
  MAP TO AC008536.5; EXPRESSED IN ADULT LIVER, SIGNAL = 0.94; EXPRESSED IN FETAL LIVER, SIGNAL = 0.46; EST_HUMAN HIT: BI197071.1, EVALUE 1.60e-01; NT HIT: AF270512.2, EVALUE 1.10e-01; SWISSPROT HIT: Q14031, EVALUE 4.60e+00
agctgccagctgctgccacagttttgccaactatcctctgccttgtagtcgtgcctctgctgctcacccagccctggcttctcttgatatctgctttggggaagcaaaatgctgccccagaacatg

SEQ ID NO: 19998 - DNA, 148 bp, Homo sapiens
  MAP TO AC010186.6; EXPRESSED IN BONE MARROW, SIGNAL = 1.3; EXPRESSED IN PLACENTA, SIGNAL = 0.83; EXPRESSED IN ADULT LIVER, SIGNAL = 1.5; EXPRESSED IN LUNG, SIGNAL = 1.8; EST_HUMAN HIT: BE738988.1, EVALUE 3.00e-68; SWISSPROT HIT: Q05049, EVALUE 7.70e+00; NT HIT: D88815.1, EVALUE 5.00e-01
gatttcctatgttgttattaaatgtattcccctgatcaaggtcactggcctagaaaacaaagattctgtgttttaccaagataattcccagtgcttcatggtgtctttattaggctttgactgcttagggaaactgagccttaaaagg

SEQ ID NO: 19999 - DNA, 322 bp, Homo sapiens
  MAP TO AC010526.6; EXPRESSED IN LUNG, SIGNAL = 0.96; EXPRESSED IN BRAIN, SIGNAL = 1.6; EXPRESSED IN BONE MARROW, SIGNAL = 1.6; EXPRESSED IN HEART, SIGNAL = 1.7; EXPRESSED IN ADULT LIVER, SIGNAL = 1.9; EXPRESSED IN FETAL LIVER, SIGNAL = 1.9; SWISSPROT HIT: P06213, EVALUE 3.00e-69; NT HIT: gi16175467, EVALUE 0.00e+00; EST_HUMAN HIT: BF873688.1, EVALUE 1.00e-104
ttgctggaattcatcgtgtacccggagggacactcagggatgcacttgttgttgtgaatgacgtactggtggcagccctgcctccgcgagttcttgcatttgtggtgcaggtcctggcagaagctgaagttcacacagcgccagtcctggaagtggtagtacgggggcgggcaggtctccacacacctgccgtccaggtagaagttgcggcaggccacgcacttggtggggtcgtcgggctgagaacagttgcccaggcactcgctgtggcaacagaggccttcggcggtgcagccgtgtgacttacagatggtcgggcaaa

SEQ ID NO: 20000 - DNA, 390 bp, Homo sapiens
  MAP TO AC008554.6; EXPRESSED IN FETAL LIVER, SIGNAL = 1.4; EXPRESSED IN ADULT LIVER, SIGNAL = 0.49; SWISSPROT HIT: P35789, EVALUE 1.00e-52; NT HIT: gi14767612, EVALUE 5.00e-99; EST_HUMAN HIT: AA587596.1, EVALUE 0.00e+00
ggtttctctccagtatgaatcttctcatgtttactaagggttgaggatgaaataaaggctttgccacatttatcacacttgtatggtttctctccagtatgagttttgttatgtgaagaaagggttgcaggatgtttaaaagctttgccacattctttacatttgtagggttgctctccagtatgagttatcttatgaatagcaagctgtgagggccagttaaaggctttgccacactcttcacatttgtaggatttctctccagtatggattatcttatgttcagtaagcgtagaggaatacttaaagccattgccacattcttcacatttgtagggtttctctccagtatgagttatcttatctgtagtaaaggttgaggaccatctg

SEQ ID NO: 20001 - DNA, 156 bp, Homo sapiens
  MAP TO AC000367.1; EXPRESSED IN BONE MARROW, SIGNAL = 0.48; EXPRESSED IN ADULT LIVER, SIGNAL = 0.46; SWISSPROT HIT: O88871, EVALUE 8.80e-01; NT HIT: AF005392.1, EVALUE 1.40e-01; EST_HUMAN HIT: R10039.1, EVALUE 1.00e-36
atgaagaagaaatatcctgacctctttctcttcctgccctccaatatcctgctagagccttccataggccccacccaagataaacacagagagcagagagtcccagtcatgcaaatgacaagggtcagcttcgcagagcacagggaagacatggaa

SEQ ID NO: 20002 - DNA, 107 bp, Homo sapiens
  MAP TO AC004198.1; EXPRESSED IN ADULT LIVER, SIGNAL = 1.5; EST_HUMAN HIT: AV646979.1, EVALUE 1.30e-01; NT HIT: AB009667.1, EVALUE 8.70e-02
gcatctaaatgacaacttctatgtgcatcatttagagatgagaagaggaaatatctctcctgctttctggttcctgtggctgcttctctttggacttctgggaccca

SEQ ID NO: 20003 - DNA, 188 bp, Homo sapiens
  MAP TO AC008537.4; EXPRESSED IN ADULT LIVER, SIGNAL = 1.2; EXPRESSED IN FETAL LIVER, SIGNAL = 0.91; NT HIT: gi14277708, EVALUE 1.00e-102; EST_HUMAN HIT: BG743095.1, EVALUE 2.00e-05; SWISSPROT HIT: P24903, EVALUE 1.00e-26
cttgggtatcaggaagccgtgaaaggccgtgtccctagtgatgcggtgcggcaagttcatggggatgatgtctgcaaagcgctgcacctcgtggatcaccatgtctgtgtaaggcatggccgcgcggtccttcagcgctggcagccgcacgtgtcccaccacaaggttgatctcctcctgcacgtggg

SEQ ID NO: 20004 - DNA, 296 bp, Homo sapiens
  MAP TO AL096870.3; EXPRESSED IN HEART, SIGNAL = 1.4; EXPRESSED IN ADULT LIVER, SIGNAL = 0.95; SWISSPROT HIT: P26770, EVALUE 5.00e-24; NT HIT: gi9506372, EVALUE 4.00e-22; EST_HUMAN HIT: AV684972.1, EVALUE 1.00e-93
ccccacagccaacaggcctgatctcttctgtgccagagattgagttcctgggtcctagtggggggtggagggagaaggaggaagtgtctgtggtctttactgtcagcccttatgtgccccaggcagaggaggaggatgagaagggcactgcaggaggcttgctgtcctcgcttgagggcctcaagatgcgtccatcactgctgatgacccgttacctggagtcctggggcgcagccaagccttttgcccacctgagccacggagacagccctgtgtccacctccacccctctcccg

SEQ ID NO: 20005 - DNA, 146 bp, Homo sapiens
  MAP TO AC006969.2; EXPRESSED IN ADULT LIVER, SIGNAL = 0.43; EXPRESSED IN BONE MARROW, SIGNAL = 0.72; SWISSPROT HIT: P41250, EVALUE 2.00e-23; NT HIT: U09587.1, EVALUE 8.00e-77; EST_HUMAN HIT: BE389086.1, EVALUE 1.00e-76
cttgataactatggacagcaagaacttgcggatctttttgtgaactataatgtaaaatctcccattactggaaatgatctatcccctccagtgtcttttaacttaatgttcaagactttcattgggcctggaggaaacatgcctgg

SEQ ID NO: 20006 - DNA, 80 bp, Homo sapiens
  MAP TO AC000109.1; EXPRESSED IN BONE MARROW, SIGNAL = 0.52; EXPRESSED IN ADULT LIVER, SIGNAL = 0.64; NT HIT: AJ298105.1, EVALUE 6.00e-05; EST_HUMAN HIT: AI085895.1, EVALUE 1.00e-10
atgccttctcgaatccctcctgaagacctgcctgaggctgctttacagttcactttttttaaaagggcaaaaggagtacc

SEQ ID NO: 20007 - DNA, 205 bp, Homo sapiens
  MAP TO AC004212.1; EXPRESSED IN PLACENTA, SIGNAL = 0.64; EXPRESSED IN ADULT LIVER, SIGNAL = 0.76; EXPRESSED IN LUNG, SIGNAL = 0.45; SWISSPROT HIT: Q03350, EVALUE 8.40e-01; NT HIT: AL163249.2, EVALUE 3.00e-43; EST_HUMAN HIT: AL532400.1, EVALUE 3.00e-78
atgcctgagcctcccacccactcaaagggctcctgtgcggcccgagcctccccgacgagcaccaccccctgctccacgacgcccagtcccatcgaccacccaagggctgaggagtgcaagcacacggcacaggactggcaggcagctccacctgcagccccagtgtggggtccactaggtgaagccagctgggctcctgagtctg

SEQ ID NO: 20008 - DNA, 177 bp, Homo sapiens
  MAP TO AC000357.1; EXPRESSED IN ADULT LIVER, SIGNAL = 0.49; EXPRESSED IN BRAIN, SIGNAL = 0.39; SWISSPROT HIT: P23201, EVALUE 2.50e+00; EST_HUMAN HIT: AL120528.1, EVALUE 9.10e-01
cctccatagtggtaagatgacttccatgtctccagctttctccttcacattcaaatctaacatgaagaatggatttatttctccaaaagtgttccaaaaaaagcgccatagcttattcttactagcttgggtgacttgactctgggcatagtcctgttttagaaccaaccattggtg

SEQ ID NO: 20009 - DNA, 283 bp, Homo sapiens
  MAP TO AC000083.1; EXPRESSED IN ADULT LIVER, SIGNAL = 0.49; EXPRESSED IN FETAL LIVER, SIGNAL = 0.45; EXPRESSED IN BRAIN, SIGNAL = 0.4; EXPRESSED IN PLACENTA, SIGNAL = 0.9; EST_HUMAN HIT: BF306996.1, EVALUE 0.00e+00; SWISSPROT HIT: P35085, EVALUE 3.30e-01; NT HIT: gi14777123, EVALUE 0.00e+00
aaacacgaccctcctctgagtagcatcccttgtctgcattataagaaaatgaaggacaacgaggaacgggagcaaagcagtgacctcacccctagtggggatgtgtcccccgtcaagcccctgagccgatctgcagagctggagtttcccctggatgagcctgactctatgggtgctgacccggggcccccggacgagaaagacccactaggggctgaggcagcccctggggccctggggcaggtgaaggccaaagtcgaggtgtgcaaagatgaatccgttg

SEQ ID NO: 20010 - DNA, 91 bp, Homo sapiens
  MAP TO AC053467.1; EXPRESSED IN LUNG, SIGNAL = 0.6; EXPRESSED IN ADULT LIVER, SIGNAL = 0.64; SWISSPROT HIT: P50122, EVALUE 6.20e+00; NT HIT: AF220267.1, EVALUE 3.00e-44; EST_HUMAN HIT: AA551654.1, EVALUE 4.00e-44
gcgtgtgactgacgctgtccgacgaaggcggccacggacggacgccagcacacgaagtcacgtgcaagtgcctttgattcgttccttcttt

SEQ ID NO: 20011 - DNA, 107 bp, Homo sapiens
  MAP TO AF119709.1; EXPRESSED IN ADULT LIVER, SIGNAL = 0.94; EXPRESSED IN LUNG, SIGNAL = 0.73; NT HIT: AY054252.1, EVALUE 5.40e+00; EST_HUMAN HIT: BF061632.1, EVALUE 2.00e+00
ccagtcctaccacggccttgttcagttcctaattgtggaattccttcaatgtagtgatattgtctgaacatcatgctctcctggaatgctacacctttgacatccat

SEQ ID NO: 20012 - DNA, 356 bp, Homo sapiens
  MAP TO AC067967.2; EXPRESSED IN ADULT LIVER, SIGNAL =  13; NT HIT: gi4885590, EVALUE 0.00e+00; EST_HUMAN HIT: BG429148.1, EVALUE 0.00e+00; SWISSPROT HIT: P49908, EVALUE 5.00e-36
ggagccaactctgaatctgtgggcaatttacagagtaattgatttatacatctctttcgacagagcttcttttgtaaatcttgtaaatcttcacttgctggcatatctcggttctctgggtgaccctgcctatgctgacccttgtgcttatggtggtgatgaaggcctggaggagcaggatgagtaggagcatttggtgctcctggttgctgattctctgaaagctcactgctgccaaggtgctgatgtccatgattgtgatgatgctcatgatggtaatgaggcgatggagtttcaactgttttatccacagtagccaaagatacacgtttacaaaagtcttcatctttgagagt

SEQ ID NO: 20013 - DNA, 308 bp, Homo sapiens
  MAP TO AC008964.4; EXPRESSED IN ADULT LIVER, SIGNAL = 0.66; EXPRESSED IN FETAL LIVER, SIGNAL = 0.57; NT HIT: AL163303.2, EVALUE 6.00e-27; EST_HUMAN HIT: AL521707.1, EVALUE 1.00e-62; SWISSPROT HIT: O67149, EVALUE 4.80e+00
ttatccattaaagcttttttcatgagattgcaacaattcagttgcatcttcaggctccccctctaattctagttctcttgctatttcttccacatctgcaatgactccctccactgacaccttgaacgcctcaaagtcatccatgagtattggaataaacttcttccaaattcctggtagtgttgagattttgatttcttcccatgaatcaggaatgttcttaatggcatctggaacgataaatcctttccagaaggttttcagtttgctttgcccagatccatcagaggaatcactgtctatggtgg

SEQ ID NO: 20014 - DNA, 117 bp, Homo sapiens
  MAP TO AC035144.2; EXPRESSED IN HELA, SIGNAL = 1.2; EXPRESSED IN PLACENTA, SIGNAL = 1.1; EXPRESSED IN BONE MARROW, SIGNAL =   1; EXPRESSED IN ADULT LIVER, SIGNAL = 0.75; SWISSPROT HIT: Q9Y2D0, EVALUE 6.00e+00; NT HIT: AB062169.1, EVALUE 3.80e-01; EST_HUMAN HIT: BG390926.1, EVALUE 1.40e-01
atgcatgtcttcttggtggagggggagaaagagcttcagatggtggaggggaacaaggagcttcaacctcatttaaaaagacgacttcactggaataacccaaagaataaaaggaaa

SEQ ID NO: 20015 - DNA, 130 bp, Homo sapiens
  MAP TO AC026745.3; EXPRESSED IN ADULT LIVER, SIGNAL = 0.53; EXPRESSED IN PLACENTA, SIGNAL = 0.75; EXPRESSED IN HEART, SIGNAL = 1.1; EXPRESSED IN FETAL LIVER, SIGNAL =   1; SWISSPROT HIT: Q00657, EVALUE 3.50e+00; NT HIT: gi7706602, EVALUE 6.80e+00
atgcagccacccagcacagctccgcggctggacatggcaatgaacaccgagtctgcgtcaatcgtggtgttgcggtgggagtcggaggcaggatccacaaagctgcagaaacaccagcccgcccagttcc

SEQ ID NO: 20016 - DNA, 417 bp, Homo sapiens
  MAP TO AL117337.25; EXPRESSED IN ADULT LIVER, SIGNAL = 0.98; EXPRESSED IN PLACENTA, SIGNAL = 1.1; SWISSPROT HIT: P03360, EVALUE 4.00e-21; EST_HUMAN HIT: AW237002.1, EVALUE 1.00e-115; NT HIT: Z70664.1, EVALUE 0.00e+00
ctgagcacaagccatacaccagagagctgcttggttagttaagtcctgaaggtgggggatgttgaaatggctccttagaagctgggccagttttattcctcccaaatgggtggcagaatgcagatgattgattaaagtttccccaggggcttggggcataaagattctggaatcaggaagaatccaccaaccttcctgatatttactggcccaaagatctgaagcttgtttttcttcctctggggagtattgtgggtggtctggtaggtcaggttgcggaaaggacacagtgggcagcagggtcaaaggcgtgactgggagccaagctgcctctcgagctgcagagcctgctttttggttaccacaggcaatagccatgccttctgtttgatgacatttgcagtgaattacagccac

SEQ ID NO: 20017 - DNA, 287 bp, Homo sapiens
  MAP TO AF245226.1; EXPRESSED IN LUNG, SIGNAL = 0.69; EXPRESSED IN ADULT LIVER, SIGNAL = 1.8; SWISSPROT HIT: Q9YBK6, EVALUE 1.70e-01; EST_HUMAN HIT: BE000066.1, EVALUE 3.00e-14; NT HIT: AL163208.2, EVALUE 1.00e-12
tcatttggaggacataagacaccctggccatttgagttgctggagttcttgtgttggttctttctcatgtctacgtgtgggtatttctttgactgctgggttgcctctaattaaagtggtcaggcagaggaagagtggttgtgttggagtcccaggctcagcagccctgctcagtgagaagtgaggaccaggacctatgtggagcacagtctggccacttttccatgaggtgggtgctttgtgctgggagtccagatcagcccctggtccccatggctctctggaac

SEQ ID NO: 20018 - DNA, 329 bp, Homo sapiens
  MAP TO AL117382.28; EXPRESSED IN BRAIN, SIGNAL =  14; EXPRESSED IN LUNG, SIGNAL = 8.2; EXPRESSED IN BONE MARROW, SIGNAL =  13; EXPRESSED IN ADULT LIVER, SIGNAL =  14; EXPRESSED IN PLACENTA, SIGNAL =  17; SWISSPROT HIT: P09762, EVALUE 1.10e+00; EST_HUMAN HIT: AI224115.1, EVALUE 0.00e+00
ttatttcttgtaactatcttgcttcaaattcaaactacagctctggggaggaagtcctggggaaaaggctttcggataccaaaacccgtatgtcccgtaccagctcagcaaaccaaacaaggtgccaaacaccttctgggacaagttgtggaaataaacagctgtgcacagaaacatcaacacccagatgaaagtcagaatgcccagggccacaaccagggtggtgatggcggtgtggaggcagtggcttcggtccgtcttcacctcatgcagcacagacatctcttctacaatcatgagggcgcagaaggtcagcaggaaggagtgac

SEQ ID NO: 20019 - DNA, 296 bp, Homo sapiens
  MAP TO AC010515.5; EXPRESSED IN FETAL LIVER, SIGNAL = 1.2; EXPRESSED IN BRAIN, SIGNAL = 1.5; EXPRESSED IN BONE MARROW, SIGNAL = 1.7; EXPRESSED IN HEART, SIGNAL = 1.7; EXPRESSED IN ADULT LIVER, SIGNAL = 1.5; NT HIT: M26510.1, EVALUE 7.00e-05; EST_HUMAN HIT: BF868591.1, EVALUE 1.00e-102; SWISSPROT HIT: Q27991, EVALUE 4.00e-16
cctcttctcgtggttggggacaatgcaccggacaaaactggggttggtgttgctgagtgtggccatgaggcggctcagggactccttgtagagctgtcccactgtccggaacataccccgacgggggcggccacctggtgggccgtcgcccaggctgctcacctgttccagccccacgatgccctccactgtcagatggagatgcagagagagagagaaggaggtcagggtcagttttagggacctgggccaaaggtcaagggtcttatcatttatcacaactggcactttacata

SEQ ID NO: 20020 - DNA, 104 bp, Homo sapiens
  MAP TO AL080242.11; EXPRESSED IN BONE MARROW, SIGNAL = 2.2; EXPRESSED IN PLACENTA, SIGNAL = 1.7; EXPRESSED IN ADULT LIVER, SIGNAL = 3.6; EXPRESSED IN BRAIN, SIGNAL = 2.2; EXPRESSED IN LUNG, SIGNAL = 1.3; EST_HUMAN HIT: BG913893.1, EVALUE 9.00e-52
cgcgtggtatgctctgacttagttgggctctaccaggacaccgtactgctgcaaagtgctcagtgggtgaggtgggagagggagaagctgtcgaatacccttcg

SEQ ID NO: 20021 - DNA, 132 bp, Homo sapiens
  MAP TO AC010348.4; EXPRESSED IN ADULT LIVER, SIGNAL = 0.9; EXPRESSED IN LUNG, SIGNAL = 1.3; EXPRESSED IN FETAL LIVER, SIGNAL = 0.54; NT HIT: AL163278.2, EVALUE 5.00e-07; EST_HUMAN HIT: BI462459.1, EVALUE 4.00e-05
ttaggcttcttctgccctcagactgagacttagaacgccagctgtcttgggtctccagctcacagacagcaggttgtggatcttttcagcttccataatcatgagagccaatgccttataagaaatctctct

SEQ ID NO: 20022 - DNA, 88 bp, Homo sapiens
  MAP TO AC005176.1; EXPRESSED IN ADULT LIVER, SIGNAL = 0.41; EXPRESSED IN LUNG, SIGNAL = 0.6; SWISSPROT HIT: P97400, EVALUE 3.00e-03; NT HIT: AE004783.1, EVALUE 1.10e+00; EST_HUMAN HIT: BG572046.1, EVALUE 3.00e-42
ccatgtgtgtggggcctggaagtgtgaggggagatgccacaatgtgttcttcaaggacggcaaacaatttgatctgagcatcttggtg

SEQ ID NO: 20023 - DNA, 339 bp, Homo sapiens
  MAP TO AL096870.3; EXPRESSED IN ADULT LIVER, SIGNAL = 0.66; EXPRESSED IN LUNG, SIGNAL = 3.7; SWISSPROT HIT: P26770, EVALUE 2.00e-38; NT HIT: gi9506372, EVALUE 6.00e-46; EST_HUMAN HIT: AW505244.1, EVALUE 7.00e-28
gaacaccttctcttgtccatccttcctgcctacctggcccgagagatgaaggcagagatcatggcacggctgcaggcaggacaggggtcacggccagagagcactaacaatttccacagcctctatgtcaagaggcaccagggagtcaggtatgaggaagaatggctggaggggaggggcctgtgggctaagaccctggccctgctgacacagtctgccctatgcagcgtgctgtatgctgacatcgtgggcttcacgcggctggccagcgagtgttcccctaaggagctggtgctcatgctcaatgagctctttggcaagttcgaccagattgccaag

SEQ ID NO: 20024 - DNA, 182 bp, Homo sapiens
  MAP TO AC004207.1; EXPRESSED IN PLACENTA, SIGNAL = 2.1; EXPRESSED IN ADULT LIVER, SIGNAL = 1.5; EXPRESSED IN FETAL LIVER, SIGNAL = 3.2; SWISSPROT HIT: P20721, EVALUE 8.50e-01; NT HIT: gi15301471, EVALUE 5.00e-17; EST_HUMAN HIT: AW964385.1, EVALUE 1.00e-24
tcagcttcctgtgtggttttcttgatcagtccccatgttatgggggttgatgtcagcatgactctggtcagtcgtcgttccatcttcgcattcagattcaactggctcatggattgtactgggggaaccaggtccagggttgggatccatgggtccctccagtctcccattccaagatgcac

SEQ ID NO: 20025 - DNA, 182 bp, Homo sapiens
  MAP TO AC008747.4; EXPRESSED IN HEART, SIGNAL = 2.2; EXPRESSED IN ADULT LIVER, SIGNAL = 1.1; EXPRESSED IN BRAIN, SIGNAL = 0.95; NT HIT: gi14766724, EVALUE 3.00e-98; EST_HUMAN HIT: AW265702.1, EVALUE 5.00e-98; SWISSPROT HIT: P24068, EVALUE 3.30e+00
tcaatctaatgctatgacatcatcaagctcttccttctgttctatacgtgacctctttgcactgagattctctttctcatctaatttcctcttgcggcttctctcttcttcactgacgtcggcattatttgaagaatcttcttcatctgaatcaactatgagaacgtcatcttgctcttgag

SEQ ID NO: 20026 - DNA, 160 bp, Homo sapiens
  MAP TO AF072711.1; EXPRESSED IN ADULT LIVER, SIGNAL = 3.5; EXPRESSED IN LUNG, SIGNAL =   5; EXPRESSED IN HELA, SIGNAL =  11; EXPRESSED IN BONE MARROW, SIGNAL = 7.8; EXPRESSED IN PLACENTA, SIGNAL = 3.6; NT HIT: AE007080.1, EVALUE 2.20e+00; EST_HUMAN HIT: BI115309.1, EVALUE 3.20e+00; SWISSPROT HIT: Q99814, EVALUE 5.80e+00
tccggttttgctggcgctttgatgagcaagattggctttagcctcagtgatgatcggtcagtgaactgtgttgtgcggttccagcaagctattgctagggccttggaggggcaaacagggtatgcacatacaattttgtactggcagtttgtacagtacc

SEQ ID NO: 20027 - DNA, 228 bp, Homo sapiens
  MAP TO AC040171.3; EXPRESSED IN HELA, SIGNAL = 4.3; EXPRESSED IN ADULT LIVER, SIGNAL = 2.5; EXPRESSED IN LUNG, SIGNAL =   4; NT HIT: D10083.1, EVALUE 1.00e-101; EST_HUMAN HIT: AW300499.1, EVALUE 3.00e-78; SWISSPROT HIT: P03357, EVALUE 7.00e-13
ttccaccaggcctaatcgccactcaccagcaaaggcaggctatgctatagtatcttccacatctatccttgaggctaccgctctgccccactccactacctctcagcaagccgaactagttgccttaactcaagccctcactcttgcaaaaggactacgtgtcaatatctatactgattctaaatatgcctttcatattctgcaccaccctgcggtcatatgggctga

SEQ ID NO: 20028 - DNA, 324 bp, Homo sapiens
  MAP TO AC004189.1; EXPRESSED IN ADULT LIVER, SIGNAL = 0.66; EXPRESSED IN BRAIN, SIGNAL = 0.58; NT HIT: AF075031.1, EVALUE 0.00e+00; EST_HUMAN HIT: R73074.1, EVALUE 1.00e-123; SWISSPROT HIT: P21169, EVALUE 1.40e+00
gaggtaggtgcccatcttgtacataagagaactgagacatgtggaggccgagcagctggtctcaaatcagctgatagtaagtcgcagagccagcatttgaagtcttgtggtttggctcccgagtctgtgctcatgaccattatgcagtggtatgttgtatgcccaggacctaccggtaagaagtgggctcgaagtccaaagaagcgtgaagactggatattcctgcggcctctcagcagcatgggtcatggacacctgttccaatacatcgtggctgcacatgcatctctgattctctctgtgtctgctcttcttgccaactaa

SEQ ID NO: 20029 - DNA, 167 bp, Homo sapiens
  MAP TO AF107256.1; EXPRESSED IN ADULT LIVER, SIGNAL = 1.2; EXPRESSED IN LUNG, SIGNAL = 1.7; EXPRESSED IN HELA, SIGNAL = 1.9; SWISSPROT HIT: O08644, EVALUE 2.00e-04; NT HIT: gi14743786, EVALUE 8.00e-22; EST_HUMAN HIT: BI913359.1, EVALUE 1.00e-21
gaagcggcgtgggactggctacacggagcagctgcagcaatacagcagcccaggtggggatgaggagaggaaatgggtggggctggggaacacatgggtggggcacatggcaggcaaggctggatccccccaagattgggggagctccttggcacaaccttctggag

SEQ ID NO: 20030 - DNA, 322 bp, Homo sapiens
  MAP TO AC011544.5; EXPRESSED IN PLACENTA, SIGNAL = 3.7; EXPRESSED IN ADULT LIVER, SIGNAL = 3.7; EXPRESSED IN HELA, SIGNAL = 5.2; EXPRESSED IN BRAIN, SIGNAL = 3.5; SWISSPROT HIT: P26583, EVALUE 2.00e-28; NT HIT: X62534.1, EVALUE 2.00e-91; EST_HUMAN HIT: BF374857.1, EVALUE 1.00e-124
ttattcttcatcttcaccctcttcctcctcatcttcatcttctttctcctcctcctcctcctcatcttctggtttgttcttctttgagcccttctttcctgcttcacttttgcccttagcacgatatgcagcaatacccttttcatatctctcctgtagcttaactgctttctgctcatatggttgtttatctttggctgactgcccagaccacatttcacccagtttctttgcagtttccacgacaaataggcctgggtgtccacttttgatctttgggcgatgttcagagcaaaacaggaagaaggcagatggtggcctt

SEQ ID NO: 20031 - DNA, 192 bp, Homo sapiens
  MAP TO AC009533.9; EXPRESSED IN ADULT LIVER, SIGNAL = 0.68; SWISSPROT HIT: P21414, EVALUE 2.00e-20; NT HIT: M32788.1, EVALUE 4.00e-64; EST_HUMAN HIT: BI004180.1, EVALUE 1.00e-43
ggtaacgacgaacgtattaaaattcacactgacagcaggtatgcttttgctactgtgcatgtacatggagccatctaccaagagcatgggctactcatctcagcaggaaaggctatcaagaacaaagaagaaattttggccctgcttgaagctgtttggctccctcaacagctggctgtaattcactgcaaa

SEQ ID NO: 20032 - DNA, 204 bp, Homo sapiens; identical to SEQ ID NO: 18946
  MAP TO AC002097.1; EXPRESSED IN ADULT LIVER, SIGNAL = 0.68; EXPRESSED IN BRAIN, SIGNAL = 0.53; EST_HUMAN HIT: C06313.1, EVALUE 1.00e-111; SWISSPROT HIT: P19835, EVALUE 2.00e-33; NT HIT: M54994.1, EVALUE 1.00e-111

SEQ ID NO: 20033 - DNA, 500 bp, Homo sapiens
  MAP TO AC004202.1; EXPRESSED IN FETAL LIVER, SIGNAL = 0.37; EXPRESSED IN BONE MARROW, SIGNAL = 0.63; EXPRESSED IN ADULT LIVER, SIGNAL = 0.47; NT HIT: gi14761229, EVALUE 0.00e+00; EST_HUMAN HIT: BI765211.1, EVALUE 0.00e+00; SWISSPROT HIT: P19474, EVALUE 3.00e-27
aaacagtatccacagtggactccggggctcctacagacttggcacagcttcctacagtcttgaaacagccctgttgttctgtcatggccagtgggcagtttgtgaacaaactgcaagaggaagtgatctgccccatctgcctggacattctgcagaaacctgtcaccatcgactgtgggcacaatttctgcctcaaatgcatcactcagattggggaaacatcatgtggatttttcaaatgtcccctctgcaaaacttccgtaaggaagaacgcaatcaggttcaactcgctgttgcggaatctggtggagaaaatccaagctctacaagcctctgaggtgcagtccaaaaggaaagaggctacatgcccgaggcaccaggagatgttccactatttctgcgaggatgatgggaagttcctctgttttgtgtgtcgtgaatccaaggaccacaaatcccataatgtcagcttgatcgaagaagctgcccagaattatcag

SEQ ID NO: 20034 - DNA, 260 bp, Homo sapiens
  MAP TO AC008639.6; EXPRESSED IN PLACENTA, SIGNAL = 0.69; EXPRESSED IN ADULT LIVER, SIGNAL = 0.65; NT HIT: gi13937343, EVALUE 2.00e-11; SWISSPROT HIT: Q23256, EVALUE 9.00e-01; EST_HUMAN HIT: AA077473.1, EVALUE 7.00e-15
gaacaatatcacaggggtggtgtacacctcctgcgaatttggggcaaatgtcatcctctccacctttggatattagagacaatatcacaggaggggtctacgccccctgcaatattgggagtgatatcatcctctcccccccggatatcaggaacaatatcacagaagggatgtgcacccactgtgatattttgagtaatgtcatcctctacccgctggctattaagaacaatacaggtggtgtaagctttccgcgacat

SEQ ID NO: 20035 - DNA, 163 bp, Homo sapiens
  MAP TO AC008964.4; EXPRESSED IN ADULT LIVER, SIGNAL = 0.53; EXPRESSED IN BONE MARROW, SIGNAL = 1.1; NT HIT: AF198052.1, EVALUE 7.00e-87; SWISSPROT HIT: O15117, EVALUE 8.00e-19; EST_HUMAN HIT: BE539455.1, EVALUE 1.00e-86
tatgatggtgaaattagagtcctatattcaactaaagttacaacttccataacttctaaaaagtggggaaccagagatctacaggtaaaacctggtgaatctctagaagttatacaaaccacagatgacacaaaagttctctgcagaaatgaagaagggaaat

SEQ ID NO: 20036 - DNA, 285 bp, Homo sapiens
  MAP TO AC011452.5; EXPRESSED IN ADULT LIVER, SIGNAL = 1.2; EXPRESSED IN FETAL LIVER, SIGNAL = 2.1; EXPRESSED IN BRAIN, SIGNAL = 1.7; NT HIT: gi15303485, EVALUE 0.00e+00; SWISSPROT HIT: P20138, EVALUE 1.00e-18; EST_HUMAN HIT: AI880327.1, EVALUE 1.00e-93
aggccacacggagtcggacggtcctctgtgcgctcacaccctttctggagaagtccacatggcaggtgaggtcggtgtcgtggtcctgggggctgggcgtgaagctgagcactgagaagtgggaggtgcttggtctggttcttctaggggagagggcagcccccgtccaggagaaagaaggggctggacatttcttgaaagcccagttaaacacacagatgaccgtcaccggctgcccgggctccagggtctcggggatgtagacatcaggcttctgagtcaggg

SEQ ID NO: 20037 - DNA, 174 bp, Homo sapiens
  MAP TO AL096870.3; EXPRESSED IN ADULT LIVER, SIGNAL =   1; SWISSPROT HIT: Q9Z244, EVALUE 4.00e-19; NT HIT: gi14750822, EVALUE 2.00e-81; EST_HUMAN HIT: BI762009.1, EVALUE 2.00e-81
catgatggtgtgctgggggaagcgcttccgtacatcttttacaaattcaacaaagtgttcagagtagccatttgccacatccaggcatatatacttcatctgggcgatagcttccaggatctgttttagctgctcaaagtcagaagagcctgtgcctgagctggcagccagatg

SEQ ID NO: 20038 - DNA, 93 bp, Homo sapiens
  MAP TO AC009990.8; EXPRESSED IN ADULT LIVER, SIGNAL = 0.44; EST_HUMAN HIT: BE166454.1, EVALUE 1.10e-01
tgttcaaggtaccatcttggaaccagagtctgaagtcttcaccagataccaacctgctggagctctgatcttgaacttaccagctccagaact

SEQ ID NO: 20039 - DNA, 232 bp, Homo sapiens
  MAP TO AC009087.4; EXPRESSED IN HEART, SIGNAL = 0.97; EXPRESSED IN ADULT LIVER, SIGNAL = 1.2; SWISSPROT HIT: Q92620, EVALUE 1.00e-30; EST_HUMAN HIT: BI258489.1, EVALUE 1.00e-101; NT HIT: gi11432414, EVALUE 1.00e-101
tggtcaacaccccatgcgcagagagaccaaaccacacagccctcacctcccggagcagcccaaagagcacgtcagtgttgagggagcgctcgtgggcctcgtccatgatgatggcactgtagtgatccaggtcggcttcccggagggactctcggagcaggatcccgtcagtcatgtatttgatcaaggtgttctctgaagtgcagtcttcaaagcggatggcatagcccac

SEQ ID NO: 20040 - DNA, 76 bp, Homo sapiens
  MAP TO AC004791.1; EXPRESSED IN BRAIN, SIGNAL = 0.49; EXPRESSED IN ADULT LIVER, SIGNAL = 0.42; NT HIT: AJ131634.1, EVALUE 9.00e-01; SWISSPROT HIT: O13269, EVALUE 4.20e-01; EST_HUMAN HIT: BF805337.1, EVALUE 3.00e-35
aaatggacaacagtacacgcatatggggccagttccacatatttggcaaccagaccagcatccaggacaacacaaa

SEQ ID NO: 20041 - DNA, 232 bp, Homo sapiens
  MAP TO AC010379.4; EXPRESSED IN ADULT LIVER, SIGNAL = 0.9; EXPRESSED IN PLACENTA, SIGNAL = 0.54; NT HIT: AF120492.1, EVALUE 2.10e-01; SWISSPROT HIT: P01874, EVALUE 2.70e+00; EST_HUMAN HIT: BI031032.1, EVALUE 7.80e-02
cattgtcaataatccaccagactgtgtgcccagggatgctggggaagcagaggtggctcctgacccttccctagccagcctccagttgcagaccccagagctgcctggccttatcagctgccacaattctattcaggtcagcaatgaggcgaggctttttgaacttctaatctgccagtggagagattttcgcaagagggtaattgctgcaaagagcatgcaagggagggag

SEQ ID NO: 20042 - DNA, 559 bp, Homo sapiens
  MAP TO AC002096.1; EXPRESSED IN HELA, SIGNAL = 1.1; EXPRESSED IN BONE MARROW, SIGNAL = 0.39; EXPRESSED IN BRAIN, SIGNAL = 1.1; EXPRESSED IN ADULT LIVER, SIGNAL = 0.44; SWISSPROT HIT: Q92574, EVALUE 1.00e-106; EST_HUMAN HIT: AU133424.1, EVALUE 0.00e+00; NT HIT: gi16161012, EVALUE 0.00e+00
ttgttcagctccttgctgtgcgcgtctgctccctgctgtatcagtctgtccagcacttccattggggaggtagagggcacaccatcttcctctgtgtttccttttgctttctttaacagctcctcagtcttcctgatgacaaaatgatgggctgtctttggcaatgccacctcaaaaagatgatcatacgggggaggctgcccgcttccaaagcccactctcgtcggaggtggaattttacaaggactgggagtgaagatactggtctccaaagaagtctggcattccctgtctcccgcagggctttcatcagcactgccgcagggcaggtctatgggagtaaaggcttgctttggtgtgtcaggcccaagcttgtccagggaggagtgtaaaggctcagggttcacgctggcgccctgagaactggaggctgccgagtgggtcttccgctgagaacctgggagactgtctcggtaaaagggagagtcaaagcctcctcgaggaaccacaggctctgcctctgctgtggtgatctcagaaagttctctagatattgcag

SEQ ID NO: 20043 - DNA, 175 bp, Homo sapiens
  MAP TO AC008727.5; EXPRESSED IN PLACENTA, SIGNAL = 0.76; EXPRESSED IN ADULT LIVER, SIGNAL = 0.8; EST_HUMAN HIT: BF346446.1, EVALUE 7.00e-94; SWISSPROT HIT: O61608, EVALUE 4.00e-04; NT HIT: gi14729757, EVALUE 5.00e-94
aaaagagctcagacatttccttaagcatgggatcttaactcatctaaaggtttccttctcaagagatgctcctgttggggaggaggaagccccagcaaagtatgtgcaagacaacatccagcttcatggccagcaggtggcgagaatcctcctccaggagaacggccatatttat

SEQ ID NO: 20044 - DNA, 110 bp, Homo sapiens
  MAP TO AC008979.6; EXPRESSED IN ADULT LIVER, SIGNAL = 0.87; NT HIT: M80312.1, EVALUE 1.00e-13; EST_HUMAN HIT: U65438.1, EVALUE 1.00e-11
ccctcaaatggctcggaaatatccatctgcagattgtacaagcaggctgtttgcaaagtgctcaatcaaaggaaagtttcaattctgtgagatgaatgcaggcatcacat

SEQ ID NO: 20045 - DNA, 224 bp, Homo sapiens
  MAP TO AC003956.1; EXPRESSED IN BRAIN, SIGNAL = 0.55; EXPRESSED IN ADULT LIVER, SIGNAL = 0.51; NT HIT: gi9626821, EVALUE 3.20e+00; SWISSPROT HIT: Q9UGF6, EVALUE 3.00e-08; EST_HUMAN HIT: BE067352.1, EVALUE 7.50e-02
cagcgtgtatagcaggtctccgagagggacagcaccaccaggaagtggtacatgggagtgtggcgggacctatccgcatgggtgatggtgatgatggtgacgttgccaccgagggtgaccaggtaggtaaggaagaacagggtgaagagtgtgttcctcaggtgtgggaggttggagaatcccatcatcaggaattctgtcaccagacaggtcccattttcctg

SEQ ID NO: 20046 - DNA, 94 bp, Homo sapiens
  MAP TO AC007793.1; EXPRESSED IN ADULT LIVER, SIGNAL = 2.3; EXPRESSED IN FETAL LIVER, SIGNAL = 3.6; NT HIT: gi4508026, EVALUE 4.00e-16; SWISSPROT HIT: P79690, EVALUE 3.60e+00; EST_HUMAN HIT: AU126866.1, EVALUE 3.00e-05
atgtgtgattgtgacacacatctctgctcaaaacctgaggaatttgactctcctgcctgggcctggcacacagatgggattgggacatattgtt

SEQ ID NO: 20047 - DNA, 305 bp, Homo sapiens
  MAP TO AC008795.5; EXPRESSED IN ADULT LIVER, SIGNAL = 1.6; EXPRESSED IN FETAL LIVER, SIGNAL = 0.85; NT HIT: AF007560.1, EVALUE 1.10e+00; SWISSPROT HIT: P53863, EVALUE 2.00e-14; EST_HUMAN HIT: BF978217.1, EVALUE 2.00e-71
gtagtccatcctttctacgcttattggcagagtttctgcactcaaaagaattttgcatggaaggaagaatatgatacacgacaggcttcaaaccgctgggaaaaacgagccatggaaaaagaaaacaaaaagattcgggacaaagcaaggaaagagaagaatgagcttgtccgtcagctggtagctttcattcgtaaaagagataaaagagtgcaggcgcatcgaaaacttgtggaagaacagaatgcagagaaggcgaggaaagccgaagagatgaggcggcagcagaagctaaagcaggccaa

SEQ ID NO: 20048 - DNA, 126 bp, Homo sapiens
  MAP TO AC008821.4; EXPRESSED IN ADULT LIVER, SIGNAL = 0.79; EXPRESSED IN FETAL LIVER, SIGNAL = 0.51; EXPRESSED IN BONE MARROW, SIGNAL = 0.4; SWISSPROT HIT: P17927, EVALUE 7.80e+00; EST_HUMAN HIT: R94527.1, EVALUE 1.00e-60
atggagctgcccagggggtattcccattggagaattggaacaaaaggattttcaaaaagcaactccaaaggacattttattgggtttaattatacctggaaccttagtcgtaagaagaaagaaaag

SEQ ID NO: 20049 - DNA, 162 bp, Homo sapiens
  MAP TO AC011358.5; EXPRESSED IN PLACENTA, SIGNAL = 0.76; EXPRESSED IN ADULT LIVER, SIGNAL = 0.59; EST_HUMAN HIT: BF175442.1, EVALUE 8.20e-01; NT HIT: AF291712.1, EVALUE 9.00e-03; SWISSPROT HIT: O00555, EVALUE 2.60e+00
gactgctgtggagactgccttgggcttggttcaggggatagaccagttccaggtgcagcggacaccattccccagggcatctgcaggttctctcgatgatcactcttttgtcagggaccagcgcatacctcacaaggtccagacgggcctcatgaccaccag

SEQ ID NO: 20050 - DNA, 154 bp, Homo sapiens
  MAP TO AC000370.1; EXPRESSED IN BRAIN, SIGNAL = 0.68; EXPRESSED IN ADULT LIVER, SIGNAL = 0.87; SWISSPROT HIT: P07984, EVALUE 2.00e+00; EST_HUMAN HIT: BG430992.1, EVALUE 1.00e-11; NT HIT: AB026898.1, EVALUE 6.00e-10
ggaacagggaggcctgaggaaagggagagaaatgggggaaccggaggttgatggagcagttggaatgcacattaatcagttaagttggtcatcctatgggtatggtttcatggctgcccaaaacaattacagtagtaacatcaaagatcattga

SEQ ID NO: 20051 - DNA, 170 bp, Homo sapiens
  MAP TO AC009007.4; EXPRESSED IN FETAL LIVER, SIGNAL = 1.8; EXPRESSED IN PLACENTA, SIGNAL = 1.8; EXPRESSED IN ADULT LIVER, SIGNAL = 1.9; SWISSPROT HIT: P52272, EVALUE 2.00e-27; EST_HUMAN HIT: AW369796.1, EVALUE 7.00e-91; NT HIT: gi14767896, EVALUE 5.00e-91
ctttttctttaaccaggtctttaagtgactgccatttcacatcaaaaggtatgtttgtaatgaaggctctgtatcttttagttggattggcatatggctcaaagcgattgcctcctctttttatgtttttctccttcctcttctcattctgagcaggtcgttctccttca

SEQ ID NO: 20052 - DNA, 363 bp, Homo sapiens
  MAP TO AC002084.1; EXPRESSED IN BONE MARROW, SIGNAL = 0.78; EXPRESSED IN ADULT LIVER, SIGNAL = 0.74; EXPRESSED IN BRAIN, SIGNAL = 0.73; SWISSPROT HIT: P26809, EVALUE 2.20e+00; EST_HUMAN HIT: BG001353.1, EVALUE 4.00e-91; NT HIT: AL163247.2, EVALUE 2.00e-89
ctggagtggagtcagtagagacattccttctaaggtgaaggataagttgctgcatttggcccctcctacaaccaagaaagaggcacagcgcctaatgggcctatttgatttggaggcaatacattcctcagttggatgtgttactttggcccatttatcgagtgacccaaaaggctgccagttttgagtggtgtccagaacaggagaaggctctgcaacaggtacaggctgctgtgcaagctgctctgccacttgggccatatgacccaggagatccaatggtgcctgaggtatcaggagaagatacggattgtatttggagcctttggcaggctcccacaggtgaatcacagcagaggcctc

SEQ ID NO: 20053 - DNA, 109 bp, Homo sapiens
  MAP TO AC010238.4; EXPRESSED IN ADULT LIVER, SIGNAL =   1; EXPRESSED IN BRAIN, SIGNAL = 1.1; EXPRESSED IN PLACENTA, SIGNAL =   1; NT HIT: AE001230.1, EVALUE 3.50e-01; SWISSPROT HIT: P12624, EVALUE 3.50e+00
ttagtcaacagaggccattcccgggaccacaggcagctggctgcaggcattgcgcaggcgccgtgcctgctgggagtgtcttttcggacacagagcatgggcttcgtgg

SEQ ID NO: 20054 - DNA, 239 bp, Homo sapiens
  MAP TO AC008705.4; EXPRESSED IN FETAL LIVER, SIGNAL = 0.5; EXPRESSED IN ADULT LIVER, SIGNAL = 0.88; NT HIT: gi7657414, EVALUE 5.00e-70; EST_HUMAN HIT: BG772372.1, EVALUE 3.20e-01; SWISSPROT HIT: O67623, EVALUE 5.80e-01
ctatgaaatacgccagcaaaatagccaagaggagggccgcggcaatggcggagagggcagcacatttccagctgcagtatttggagggcttcttcagcttgaaagccttcctggagaaagtattcctgggcagcaggcggggcgggggcgtgtaaaccgttcctgaggtcaaagggtatcccggggaagagctgctgaacaagggtgtgctccccgaggaggtcttgaagaggaagtgc

SEQ ID NO: 20055 - DNA, 282 bp, Homo sapiens
  MAP TO AC002097.1; EXPRESSED IN ADULT LIVER, SIGNAL = 0.68; EXPRESSED IN BRAIN, SIGNAL = 0.75; NT HIT: M94579.1, EVALUE 0.00e+00; EST_HUMAN HIT: BI763761.1, EVALUE 1.00e-108; SWISSPROT HIT: P19835, EVALUE 4.00e-34
gcacctgctgcacagggacaggggaccggctggagacagggccaggcggggcgtctggggtcaccagccgctcccccatctcagtctcccgggacctgcccgttatgatctggatctatggaggcgccttcctcatggggtccggccatggggccaacttcctcaacaactacctgtatgacggcgaggagatcgccacacgcggaaacgtcatcgtggtcaccttcaactaccgtgtcggcccccttgggttcctcagcactggggacgccaatctgccag

SEQ ID NO: 20056 - DNA, 232 bp, Homo sapiens
  MAP TO AC009087.4; EXPRESSED IN BRAIN, SIGNAL =   1; EXPRESSED IN PLACENTA, SIGNAL = 1.1; EXPRESSED IN ADULT LIVER, SIGNAL = 1.1; EXPRESSED IN FETAL LIVER, SIGNAL = 0.96; NT HIT: U82964.1, EVALUE 8.30e-01; EST_HUMAN HIT: BI909905.1, EVALUE 1.20e+00; SWISSPROT HIT: Q9UKP5, EVALUE 4.60e+00
atcatgctctggagaaatgttagcttggaaacccatcccaccagcctcaacatgagcacacatcagcttacaatcacagtgaacgtcacttccttggagaaatccttgatagtgagcatagatcctgacagtccccttttaatgacactctacctggggttccagtatcagcctaactgcactcacttccacctgaacatcacccttccaaaggataaggtgtggcaaaaag

SEQ ID NO: 20057 - DNA, 199 bp, Homo sapiens
  MAP TO AC012313.5; EXPRESSED IN ADULT LIVER, SIGNAL =   5; EXPRESSED IN FETAL LIVER, SIGNAL = 1.1; NT HIT: gi13325056, EVALUE 1.00e-108; SWISSPROT HIT: O35488, EVALUE 8.00e-16; EST_HUMAN HIT: AV648081.1, EVALUE 1.00e-108
gggagccggggctgctgctgaccaaggtggtaagccagcaacccttcgtgggctaccgcggcccccgagagctgtcggaacggaagctggtgcgcaacgtgcggcaatcgggcgacgtttactacaacaccggggacgtactggccatggaccgcgaaggcttcctctacttccgcgaccgcctcggggacaccttccg

SEQ ID NO: 20058 - DNA, 218 bp, Homo sapiens
  MAP TO AC008390.6; EXPRESSED IN ADULT LIVER, SIGNAL = 0.91; EXPRESSED IN FETAL LIVER, SIGNAL = 1.7; SWISSPROT HIT: Q52665, EVALUE 1.20e-01; EST_HUMAN HIT: AA502123.1, EVALUE 1.10e+00; NT HIT: AL163282.2, EVALUE 7.80e-01
ctagaactcttgtgtaatttctctgagtttttcataattaaatgccttataggtgtttttgtccatgcctttgaggacaggtactctgtggtctctttgcctgatgccattgtctccctgttggtaagtccaatctgggtctctatgggggactgcatcattggccactggattttgtataggggcttgattatggagttcatctgcgtgtgtttcag

SEQ ID NO: 20059 - DNA, 133 bp, Homo sapiens
  MAP TO AC009990.8; EXPRESSED IN ADULT LIVER, SIGNAL = 0.36; EXPRESSED IN LUNG, SIGNAL = 0.5; EST_HUMAN HIT: AA632787.1, EVALUE 1.70e-01; NT HIT: K02610.1, EVALUE 1.10e-01
atctgttattttgaaagtctgttcctggttctcctaaagtgtttccactttccacagattcttcctctgttttacttctgaactcaaaacaaatgatcaggcttctgcttctctttggaattccagcagtgtt

SEQ ID NO: 20060 - DNA, 145 bp, Homo sapiens
  MAP TO AC008974.6; EXPRESSED IN LUNG, SIGNAL = 1.5; EXPRESSED IN BRAIN, SIGNAL =   2; EXPRESSED IN BONE MARROW, SIGNAL = 0.85; EXPRESSED IN ADULT LIVER, SIGNAL = 0.74; SWISSPROT HIT: P34244, EVALUE 1.00e-11; EST_HUMAN HIT: BI669059.1, EVALUE 1.00e-73; NT HIT: gi15302254, EVALUE 8.00e-74
tcaccagatggagtagctgtggcagaagtccagcgcagacacaatctggcggaagaactttcgggcctccttgggcgtcagtctccccttctttaccaggtagtcgaatagctcaccccccgagacgtgctccagaaccaggtac

SEQ ID NO: 20061 - DNA, 144 bp, Homo sapiens
  MAP TO AC008993.3; EXPRESSED IN PLACENTA, SIGNAL = 0.9; EXPRESSED IN ADULT LIVER, SIGNAL = 0.77; EXPRESSED IN HELA, SIGNAL = 0.66; EXPRESSED IN BRAIN, SIGNAL = 0.57; NT HIT: AF410903.1, EVALUE 1.90e+00; EST_HUMAN HIT: H89956.1, EVALUE 2.00e-75; SWISSPROT HIT: P43362, EVALUE 1.50e+00
aggcaccaagctgcttgtggtcttgtctattcccactccctgcctgactgaacattttctccacctcctgatcatcagcagcagaaactggctgctcttcctcctgggtagacagccagactgtatttcccagctgcccctgca

SEQ ID NO: 20062 - DNA, 212 bp, Homo sapiens
  MAP TO AC010504.6; EXPRESSED IN ADULT LIVER, SIGNAL = 2.1; EXPRESSED IN BONE MARROW, SIGNAL = 1.8; SWISSPROT HIT: O15063, EVALUE 1.00e-22; NT HIT: gi7662075, EVALUE 2.00e-72; EST_HUMAN HIT: BE542269.1, EVALUE 3.00e-72
ccttcccagggaaggccttgaagcccttgggtgctgccttgtgtgctggtgggggtgggggctggggtggggtctgcacataggagaaggcagcggcactgcagtcgttggttgcggcccacactggggactgcagcatctgcatggtgtcgttccactggctgccagggctggtgactgcatagagtggtgcgctggggctgggcagcgtg

SEQ ID NO: 20063 - DNA, 126 bp, Homo sapiens
  MAP TO AC002181.1; EXPRESSED IN BRAIN, SIGNAL = 0.91; EXPRESSED IN ADULT LIVER, SIGNAL = 0.79; SWISSPROT HIT: O51740, EVALUE 2.00e+00; EST_HUMAN HIT: AW440864.1, EVALUE 1.00e-08; NT HIT: AL163278.2, EVALUE 4.00e-04
ttagaaatcaaaaacatagtaatagaagtaaaggattcccttgatgaggtcatcagtaggctgaacatagccaaggaaaaaatcagtgagcttgatgataaggcaatagaaacttctcaaactgaa

SEQ ID NO: 20064 - DNA, 137 bp, Homo sapiens
  MAP TO AC004790.1; EXPRESSED IN FETAL LIVER, SIGNAL = 0.5; EXPRESSED IN ADULT LIVER, SIGNAL = 0.67; EXPRESSED IN HEART, SIGNAL = 1.2; EST_HUMAN HIT: AA082877.1, EVALUE 3.00e-49; SWISSPROT HIT: P25315, EVALUE 4.50e+00
atggctgaggggcctggtcagtgggaacctggacattgtggcctggtcagccgaggcctggtctggtcagtggggacctggaccttgtggcttggtcaacaggggccttgtcagtgggacctggacattgtggcctg

SEQ ID NO: 20065 - DNA, 160 bp, Homo sapiens
  MAP TO AC010641.5; EXPRESSED IN BONE MARROW, SIGNAL = 1.1; EXPRESSED IN ADULT LIVER, SIGNAL = 1.2; EXPRESSED IN BRAIN, SIGNAL = 1.2; NT HIT: gi15309002, EVALUE 4.00e-85; EST_HUMAN HIT: BE792048.1, EVALUE 3.00e-80; SWISSPROT HIT: P14282, EVALUE 5.10e-01
tggccaagtgaaggaggcggttatggtctgacacatgtggcttgggttttggcacggggtcccactcttccaagagggtggctggggccttcggctttgacaactggaggatccgcgagctggggactgccatttgggctgccctggatacctgggacac

SEQ ID NO: 20066 - DNA, 121 bp, Homo sapiens
  MAP TO AC035150.1; EXPRESSED IN LUNG, SIGNAL = 3.5; EXPRESSED IN PLACENTA, SIGNAL = 3.2; EXPRESSED IN BONE MARROW, SIGNAL = 2.6; EXPRESSED IN ADULT LIVER, SIGNAL = 2.7; EXPRESSED IN HEART, SIGNAL = 3.3; EST_HUMAN HIT: AI911465.1, EVALUE 8.00e-62; SWISSPROT HIT: P11369, EVALUE 8.00e-02; NT HIT: AJ004799.1, EVALUE 1.00e-10
atgtacaaacggccaataaacaaaggaaaaaatgctcaacaccatgagtcatcagagaaattcaaatcaaaaccacaatacccacttcacactcatgaggatgacaataataaaaagaaag

SEQ ID NO: 20067 - DNA, 168 bp, Homo sapiens
  MAP TO AF222685.1; EXPRESSED IN ADULT LIVER, SIGNAL = 1.3; EXPRESSED IN HEART, SIGNAL = 1.3; EXPRESSED IN BONE MARROW, SIGNAL = 1.1; NT HIT: AL163208.2, EVALUE 7.00e-90; EST_HUMAN HIT: BG420605.1, EVALUE 5.50e-02; SWISSPROT HIT: P48794, EVALUE 6.60e-01
ccaccccaaaagttatacacccttcctgaatatgctgcatatgattctgcctccttgtgtctgcatttgccgtccctgcagtcaatatcctacagttcttcacaaactagttcagacatccatgaatccctcactgatttatcttacagtcagtcttctgatgtgtag

SEQ ID NO: 20068 - DNA, 155 bp, Homo sapiens
  MAP TO AC005262.1; EXPRESSED IN BONE MARROW, SIGNAL = 0.87; EXPRESSED IN ADULT LIVER, SIGNAL = 0.78; EXPRESSED IN LUNG, SIGNAL = 2.1; NT HIT: Y17293.1, EVALUE 5.30e-01; SWISSPROT HIT: Q07307, EVALUE 5.10e-01
aacccccgccgccatccctgcatgcacccggtcttctgtgcctgcactttggacttgagattgacacggggttcaaggacgaaggtcaggggctcccgtgtctgccgccttggctgcttggagcaagtctggaagtgatgcggcccttcccgcat

SEQ ID NO: 20069 - DNA, 114 bp, Homo sapiens
  MAP TO AC004449.1; EXPRESSED IN BRAIN, SIGNAL = 0.48; EXPRESSED IN PLACENTA, SIGNAL = 0.78; EXPRESSED IN ADULT LIVER, SIGNAL = 0.63; NT HIT: gi14762748, EVALUE 8.00e-58; EST_HUMAN HIT: BE396708.1, EVALUE 1.00e-57; SWISSPROT HIT: O00411, EVALUE 8.00e-17
cttgaccttggagtccaggcgatagggctggatgacggggacgcccaggggtgtgacccactccaccacagagcccatgtgggagatgaggcgggcactctcggtcagccagtg

SEQ ID NO: 20070 - DNA, 122 bp, Homo sapiens
  MAP TO AC000046.5; EXPRESSED IN FETAL LIVER, SIGNAL = 0.35; EXPRESSED IN ADULT LIVER, SIGNAL = 0.46; SWISSPROT HIT: P43471, EVALUE 4.60e-02; NT HIT: AF190273.1, EVALUE 1.00e-01; EST_HUMAN HIT: BG674729.1, EVALUE 5.90e-01
gagtcttcttggactcaaaccatctgaaaggcaagcctggtggagtccacttgctggacagccggaagcagctccttttgcttttggtgggaagctcagacttcctgacaaggtccatgtga

SEQ ID NO: 20071 - DNA, 230 bp, Homo sapiens
  MAP TO AC010202.6; EXPRESSED IN PLACENTA, SIGNAL = 0.55; EXPRESSED IN ADULT LIVER, SIGNAL = 0.75; EXPRESSED IN HELA, SIGNAL = 0.47; EST_HUMAN HIT: N58672.1, EVALUE 3.10e-01; SWISSPROT HIT: Q9ULD4, EVALUE 1.20e+00
ttaatcttcatgccagtcctgggaggtactcttatatatcctttttacatatgaggacctgaatcttagaaggttgagtcctttgccaaatgaaagcttaacagtaaagaaacagtagaatccagactgtctggttccaaaacttgtgcttttagccacttcacatattgcttctgtcattggtatgacagatgtcacaggcagatcatactcaaattctgtaatatgtt

SEQ ID NO: 20072 - DNA, 327 bp, Homo sapiens
  MAP TO AC004818.1; EXPRESSED IN BRAIN, SIGNAL = 0.6; EXPRESSED IN ADULT LIVER, SIGNAL = 0.51; SWISSPROT HIT: P75095, EVALUE 1.20e-01
tcatttatcctgctctttcctggactctctcccacttatctctttgcggcatggagttatccatggctgaacacagtgtccttgatcagagcatgactgttccctcacgtcctctctcctaactctcctcagtcctttctctccatccctcctttccaaagtcctcctgttagtgaagcgcgttttagacatcgctttcttctcagctctgcccccagacaagactctgggccaaatcttatctaagcacttctcgtgggtgtctccgtatttgtctacaaacttggcaaacttcttcaggccagagtgacatatggtggtgcactc

SEQ ID NO: 20073 - DNA, 264 bp, Homo sapiens
  MAP TO AL096853.12; EXPRESSED IN ADULT LIVER, SIGNAL = 0.42; EXPRESSED IN FETAL LIVER, SIGNAL = 0.43; NT HIT: AL603645.1, EVALUE 2.40e-01; EST_HUMAN HIT: T83481.1, EVALUE 3.60e-01; SWISSPROT HIT: P32862, EVALUE 8.10e-02
cactgtggtttcatgatttacgcctggggccgtcagtgggttgggtttgtcctttctcctttgctccgcagcactgctgcctgcggactggccgcactggattcccctttccctgcggaagggcacttgcgttgtctccaggtttcgctgttccacttgtggaggggcctttctccacacgggcaggtgctgcttcggggcattttctgaagaatagaacttccagatttcgggtgggaacatcttgaattcgctttcattttc

SEQ ID NO: 20074 - DNA, 348 bp, Homo sapiens
  MAP TO AC016572.4; EXPRESSED IN ADULT LIVER, SIGNAL = 0.39; SWISSPROT HIT: Q63345, EVALUE 1.00e-27; EST_HUMAN HIT: AU098650.1, EVALUE 3.00e-05; NT HIT: gi13376270, EVALUE 0.00e+00
ctgacacctgtagctcccagatggccttctggtagtaagactgggaactaatcctgcacccatagaggccagcatccaacacagtaatgttttccagcctcagagagatgcgcccctccgcaatagaatccttcaccagttttgtcctgccttgatactgtggcatctgcataaatggctggtccttcccgtccctgtagaggtggaccacgctagagaactggcccctgaagaaccgcacttccatggcctctgcattggttttaggagacaggaaacaggagaatgctgcgtcctcccccaccaaggcctggacaggcttgtctggcccaaacacctgccactgcc

SEQ ID NO: 20075 - DNA, 196 bp, Homo sapiens
  MAP TO AC009024.6; EXPRESSED IN ADULT LIVER, SIGNAL = 0.78; EXPRESSED IN PLACENTA, SIGNAL = 0.61; SWISSPROT HIT: P33656, EVALUE 7.30e+00; EST_HUMAN HIT: AI858724.1, EVALUE 4.00e+00
acttgccagcatttacaaagctggtaagtggcaagagccaggacttaaaccagttccatcgtattcaaatgttcaagctcttaactgttatgctaaaagaaagggagaaaatgatggagctcaaatttgggaacatacccatggttaccaggattcttagggaaagacctaaagattttaaattcatcatccaatc

SEQ ID NO: 20076 - DNA, 163 bp, Homo sapiens
  MAP TO AJ239328.2; EXPRESSED IN ADULT LIVER, SIGNAL = 0.58; EXPRESSED IN FETAL LIVER, SIGNAL = 0.72; SWISSPROT HIT: P57722, EVALUE 1.00e-23; EST_HUMAN HIT: AJ003477.1, EVALUE 6.00e-82; NT HIT: AL163303.2, EVALUE 7.00e-87
gctgcataattggacgccaagggaccaaaatcaatgaaattcgacagatgtctggagctcagatcaaaatcgccaacgccacggaagggtcctcagagcgtcagatcaccatcacggggaccccggccaacatcagccttgcccagtatctcatcaacgccag

SEQ ID NO: 20077 - DNA, 143 bp, Homo sapiens
  MAP TO AC005222.1; EXPRESSED IN ADULT LIVER, SIGNAL = 0.41; SWISSPROT HIT: P57737, EVALUE 5.00e-22; EST_HUMAN HIT: BG767631.1, EVALUE 7.00e-75; NT HIT: gi13648926, EVALUE 5.00e-75
ctggtcttggtggccctgcagcttcagccgatcagctccagcctgaaggtcccagatgcgaacagtgaggtcataggaggacgaggccagcacattggctgccagtgggtggaagcgcagggagcagatcttctccgtgtggc

SEQ ID NO: 20078 - DNA, 207 bp, Homo sapiens
  MAP TO AC009123.6; EXPRESSED IN ADULT LIVER, SIGNAL = 0.66; EXPRESSED IN HELA, SIGNAL = 2.1; EXPRESSED IN FETAL LIVER, SIGNAL =   1; NT HIT: AF169631.1, EVALUE 1.00e-113; SWISSPROT HIT: P49749, EVALUE 7.30e-02; EST_HUMAN HIT: AL545137.1, EVALUE 1.00e-113
gcccacgcagcgaggggggcccctcttctgtgtgcgtctggaaggtcgctgcccagggaggaaatgcctttaaccggcgtggggccgggcagctgcaggaggcagatcatccgggctctgtgcctcttgctacttctcctccacgccggctctgccaagaatatctggaaacgggcattgcctgcgaggctggccgagaaatcccgt

SEQ ID NO: 20079 - DNA, 408 bp, Homo sapiens
  MAP TO AC003956.1; EXPRESSED IN ADULT LIVER, SIGNAL = 0.59; EXPRESSED IN BRAIN, SIGNAL = 0.55; NT HIT: gi14719415, EVALUE 0.00e+00; SWISSPROT HIT: P47046, EVALUE 1.00e+01; EST_HUMAN HIT: BE876589.1, EVALUE 0.00e+00
tcagatccccgcctgccccgacaatctccagatgtcgcgccttacttgcgacccaaacgacagccacctctgcacctgccgctggcagaccccgaagtggtgactcggccccgcggtcgaggaggccccgaaagccccccgagcaaccgctacgccggcgactggagcgtttgcgggcgggacttcctgccctgtgggcgggatttcctgtccgggccagactacgaccacgtgacgggcagtgacagcgaggacgaggacgaggaggtcggcgagccgagggtcaccggtgacttcgaagacgacttcgatgcgcccttcaacccgcacctgaatctcaaagacttcgacgccctcatcctggatctggagagagagctctccaagcaaatcaacgtgtgcctctga

SEQ ID NO: 20080 - DNA, 147 bp, Homo sapiens
  MAP TO AC010504.6; EXPRESSED IN PLACENTA, SIGNAL = 0.88; EXPRESSED IN ADULT LIVER, SIGNAL = 3.6; NT HIT: AF187554.1, EVALUE 2.00e-77; SWISSPROT HIT: P06744, EVALUE 1.00e-22; EST_HUMAN HIT: BG251571.1, EVALUE 3.00e-77
cttggaggcaatgatgaacagggaggactcggggttcagctgggccagggttttggcaatgtgagttccatcaatgttggagacataccagacgcggggacctcctgaagagtatggcttaagggcttcagtcaccatgaggggtcc

SEQ ID NO: 20081 - DNA, 135 bp, Homo sapiens
  MAP TO AF263284.2; EXPRESSED IN BONE MARROW, SIGNAL = 1.1; EXPRESSED IN ADULT LIVER, SIGNAL = 0.85; EXPRESSED IN HELA, SIGNAL = 3.7; SWISSPROT HIT: O00754, EVALUE 3.50e+00; NT HIT: gi16157449, EVALUE 4.50e-01
tatgaagaatttgagaagttgcatcagactgctggcaaggcactcagacagaaacacatgtcaggggggaaagggaagatacaagccgagacaggccaggcggcgctgtggaaggaacagccacttgagcaccag

SEQ ID NO: 20082 - DNA, 222 bp, Homo sapiens
  MAP TO AC010423.5; EXPRESSED IN ADULT LIVER, SIGNAL = 1.9; EXPRESSED IN BRAIN, SIGNAL = 1.7; NT HIT: AF224669.1, EVALUE 5.10e-02; SWISSPROT HIT: P35016, EVALUE 9.70e+00
atgacaaatgtcacgatagcagctgtggcatggtttaataacaaccccagagaggtggtcggggaaagcttctctgaggaagtgtcacttcagctgagccctgccaagcctcggcaccaaaaatactccccaaagaacatgaaagaggagaaatgtccagagagttcgataaacctgtgctttgataaatgctcttgtgtcttatctccccaatatcttaag

SEQ ID NO: 20083 - DNA, 78 bp, Homo sapiens
  MAP TO AC008772.5; EXPRESSED IN ADULT LIVER, SIGNAL = 0.47; NT HIT: gi9910311, EVALUE 2.30e-01; EST_HUMAN HIT: R32417.1, EVALUE 3.40e-01
ataatgaacatgccattgacttgtgaagaaactgaggatagacagcagatggaatttttggcaaacattaggcaagcg

SEQ ID NO: 20084 - DNA, 254 bp, Homo sapiens
  MAP TO AL118558.2; EXPRESSED IN BRAIN, SIGNAL = 9.4; EXPRESSED IN ADULT LIVER, SIGNAL = 7.1; SWISSPROT HIT: P38650, EVALUE 2.00e-40; NT HIT: gi15300984, EVALUE 0.00e+00; EST_HUMAN HIT: AW504087.1, EVALUE 0.00e+00
gggaatttcagctccgtttgcgtcagctggaaaaatctctactacaagctctgaacgaggtgaaagggcgcattttggatgacgacacgatcataaccactctggagaacctgaagagagaggctgcagaggtcaccaggaaagttgaggagacggacattgtcatgcaggaggtggagaccgtgtcccagcagtacctcccgctctccaccgcctgcagcagcatctacttcaccatggagtccctcaagcag

SEQ ID NO: 20085 - DNA, 153 bp, Homo sapiens
  MAP TO AC000069.2; EXPRESSED IN BRAIN, SIGNAL = 0.46; EXPRESSED IN ADULT LIVER, SIGNAL = 0.48; SWISSPROT HIT: P20128, EVALUE 5.10e-01; EST_HUMAN HIT: BF874471.1, EVALUE 3.10e+00; NT HIT: gi9790068, EVALUE 1.30e-01
agacatgtgcagctggcacaggacatccatccactggtgataatgatagaacacgtcatattgcacgatagtaggaaaaacaggacagatgggaagggtgcggatgaccagcgccgtagcaatctgaagcatcgagcctgccagtccacataa

SEQ ID NO: 20086 - DNA, 349 bp, Homo sapiens
  MAP TO AC000077.2; EXPRESSED IN ADULT LIVER, SIGNAL = 0.45; EXPRESSED IN BRAIN, SIGNAL = 0.45; NT HIT: X52192.1, EVALUE 3.30e-01; SWISSPROT HIT: P39381, EVALUE 3.50e+00; EST_HUMAN HIT: BF343256.1, EVALUE 1.90e+00
ctaaaccaaattctcaattataacacgggaacgtttccctttagcctgcgaagatccagtgtctcggttatggtgtttctggttccccggccacttggaagacacctggagctctgtgatcttggtggggacctcaatgtcagccgggacctcaatgtcagcagaccctgtgtccccagtgtggctgggctttgctagacctgtggagcaatagctagtcaggcttgtggccccaatccagccagcatcacacactgtccagcctccctctgacatcagcataggtctaatgtcagcataggccctctgccgcagggctgtgcccaaggacactctcctgctctgggtc

SEQ ID NO: 20087 - DNA, 178 bp, Homo sapiens
  MAP TO AC002322.1; EXPRESSED IN ADULT LIVER, SIGNAL = 0.71; SWISSPROT HIT: O35348, EVALUE 1.50e+00
gcagacatcactcaccaatcaaagctctcctatccctgaagcccagcgcagggttcttaacacagggctctactcctccatcagtcctgggactcagacagaacccacctgccctgccaggagagctgagcccggggcagcgaaggagaggaaaggctttggagttgggcaaacccag

SEQ ID NO: 20088 - DNA, 174 bp, Homo sapiens
  MAP TO AC004090.24; EXPRESSED IN ADULT LIVER, SIGNAL = 0.83; EXPRESSED IN FETAL LIVER, SIGNAL = 1.1; SWISSPROT HIT: P39584, EVALUE 1.90e+00; NT HIT: X76482.1, EVALUE 2.40e+00; EST_HUMAN HIT: BG390969.1, EVALUE 2.30e-01
ttaggtaagccttttgacaaggtgctgtttgctgatgcatcctgtggtggtccggccctctctgcagggcactggatgtggtctttgggcaaagtcagctgcaggaagggcactgcccaccaccatggcacctttgatccctggccccagtgccagaggctctggccacacaaa

SEQ ID NO: 20089 - DNA, 203 bp, Homo sapiens
  MAP TO AC004144.1; EXPRESSED IN ADULT LIVER, SIGNAL = 0.69; EST_HUMAN HIT: AL041673.1, EVALUE 9.00e-26; SWISSPROT HIT: O94236, EVALUE 2.20e-01; NT HIT: AB042324.1, EVALUE 7.20e-01
accctgctgaaggtcgtgtacgtggagaatgacatccagcacctgcaggacatgtcacacttcccagaccgggggagcgagaatgggacacccatggacgtgaaagccggggtgcgggtcatgcaggtcagtcctgacggccagcatttggcttcaggcgaccgaagtggaaatctgaggcaagtgggccctggcagtgtcca

SEQ ID NO: 20090 - DNA, 160 bp, Homo sapiens
  MAP TO AC005581.1; EXPRESSED IN BONE MARROW, SIGNAL = 0.75; EXPRESSED IN ADULT LIVER, SIGNAL = 0.45; EST_HUMAN HIT: BI768176.1, EVALUE 6.00e-85; SWISSPROT HIT: Q9JL04, EVALUE 2.00e-02; NT HIT: gi14763168, EVALUE 4.00e-85
gagggtggggaccggggcgccccagggctggccctggcacgggtgcgggcgcccagcgacaccaccaacggaacaagttccagcaaaggcaccagccacagcaaagggcagcggagttcctcttccacctaccaccgccagcgcaggcatagcgatttct

SEQ ID NO: 20091 - DNA, 516 bp, Homo sapiens
  MAP TO AL079302.4; EXPRESSED IN FETAL LIVER, SIGNAL =   3; EXPRESSED IN ADULT LIVER, SIGNAL =   2; EXPRESSED IN HELA, SIGNAL =   5; EST_HUMAN HIT: BG023813.1, EVALUE 0.00e+00; SWISSPROT HIT: P38112, EVALUE 6.00e-20; NT HIT: gi14748376, EVALUE 0.00e+00
tcttccagacgggcaaactgctccaggtttctgagcctctgcttctggtgcatacaggcatgcagggtcaagggcatgatatcaaggactttgaggagcccagagaggcgtttgatgcaggagatactgttggcaaacactaagctgcggcctggatactgcatcaggaagtagtacaagtagaagtctttctcatcagtctcacaatggatcttggtctctgttagcgtctccaccgtggcctcattccttgtgaggtcaatgaccttgggcttgcccctcatgccaattttctgcataaggaggtcaagtttggctgttttatccattttcttggtgtgcttcttatgaaggattcgagcaggagcctgatgcaccagggtgagtgtggcagaaaaaacaagcgtttgtctctttgggttgtattgggagtcattgagcatctctagcagctgtgagagctcagcaaaatggcctttctcaaccatccggtcagcctcatccactaccaggcac

SEQ ID NO: 20092 - DNA, 437 bp, Homo sapiens
  MAP TO AC016626.4; EXPRESSED IN PLACENTA, SIGNAL = 1.3; EXPRESSED IN ADULT LIVER, SIGNAL = 0.36; NT HIT: gi13540538, EVALUE 7.00e-03; EST_HUMAN HIT: AW962764.1, EVALUE 1.00e-02; SWISSPROT HIT: O95013, EVALUE 3.00e-58
tcagatagtggaggggcttaatagggccacataactgtcaaaggccatggctatgagcagcaccatctccacaccaccaatgacgtggatgaagaagatttgagcgatgcagcctccaaaggagatgactttgcgctttctgaacaggtcataaatcatcttgggagaagtgacagagcaggctcctaagtcaatgaaggagagactgaccagtagaaagtacatgggggagtgtaagtgagggtcagtggtcacagaaaacacaatgaggatgtttccagtaatgcttgccacatagagcacagaggaaaacactaggaggaggagctggatctcccatgaatgagtgagtcccagaaacaaaaactcagataccactgagtgattctctccatccattggtccagccaactgggctgtggctaaaattatgagaa

SEQ ID NO: 20093 - DNA, 261 bp, Homo sapiens
  MAP TO AC018844.2; EXPRESSED IN ADULT LIVER, SIGNAL = 0.68; SWISSPROT HIT: O84480, EVALUE 6.00e+00; EST_HUMAN HIT: BF987488.1, EVALUE 6.00e-03
ccctctggtgtccttagtcttgcccttcactgtgaggaacagagagcatgacttcacggcttcaatatcaacaaatgcggagacaggcaatttctgcctttgcttcaagagctgtgtctctgtgatgctcctggccatctcatcatgcccacaggatggctgccacagtaccatcaacaagtccacacaaaatcttgcacttttcatcacccagaaaaatttccttttatgtcgctgtggttcttctggctctttacttcc

SEQ ID NO: 20094 - DNA, 165 bp, Homo sapiens
  MAP TO AC010169.7; EXPRESSED IN BONE MARROW, SIGNAL = 0.51; EXPRESSED IN ADULT LIVER, SIGNAL = 0.47; SWISSPROT HIT: Q29040, EVALUE 6.60e-01
gcctcatggccccagctggacactctccctgcctggctggttttgattgagccaacaagggcaggggccctgccagcatatgtggcctatgcagatgttctgcatccagaccttgggaacaggagggtaactccagcctcaagtcatggccaccatggcttccag

SEQ ID NO: 20095 - DNA, 240 bp, Homo sapiens
  MAP TO AL118558.2; EXPRESSED IN ADULT LIVER, SIGNAL = 1.3; SWISSPROT HIT: Q14204, EVALUE 2.00e-42; EST_HUMAN HIT: BI061179.1, EVALUE 1.00e-99; NT HIT: U53530.1, EVALUE 1.00e-130
ctctaccgcaatggccagcgcttactggaaaagcaaaggttccagttcccaccttcctggctttatattgacaacatcgagggagagtggggagccttcaatgacatcatgcggcgaaaggactctgccattcagcagcaggtggcaaacctgcaaatgaagattgtccaggaggatcgggccgtggaaagccgcaccaccgacctgctgactgactgggagaagaccaagcctgtgacg

SEQ ID NO: 20096 - DNA, 82 bp, Homo sapiens
  MAP TO AC004177.2; EXPRESSED IN PLACENTA, SIGNAL = 0.66; EXPRESSED IN ADULT LIVER, SIGNAL = 0.53; NT HIT: gi16183832, EVALUE 9.90e-01; EST_HUMAN HIT: BF576799.1, EVALUE 3.60e-01
tgtggaatctcaagctgactgatgaccttgtagatgtaaacatcttcatctcctgtgtccactggtgccctggatcagcaac

SEQ ID NO: 20097 - DNA, 82 bp, Homo sapiens
  MAP TO AC008985.5; EXPRESSED IN ADULT LIVER, SIGNAL = 0.57; NT HIT: AF257706.1, EVALUE 2.50e-01; EST_HUMAN HIT: BI831997.1, EVALUE 4.00e-16
cttctcggatccatgcaagaagtcattgagggcctgtgggtcactggaagagaagaggaagagacgctgaggaggtaaggag

SEQ ID NO: 20098 - DNA, 261 bp, Homo sapiens
  MAP TO AC004095.1; EXPRESSED IN ADULT LIVER, SIGNAL = 0.71; EXPRESSED IN PLACENTA, SIGNAL = 0.94; NT HIT: AL161505.2, EVALUE 3.70e+00; SWISSPROT HIT: Q29131, EVALUE 4.30e+00
gtcaaaacaaagcaaaataaaaaccatgctaaaaaaaataggaaggggaagaagaagaagaaggaggaggaggaggaggggaaggggaagaagaggaagaaggaggaggaggaggaggaggaggcgaatgcctctaggaccagggcctggctgttgtccaacaccaattttttggggggaatattaagggataaagccctgaatcacagctgtcttggaagaagctcaagtgtgcacattgactgccccacttcttcatat

SEQ ID NO: 20099 - DNA, 282 bp, Homo sapiens
  MAP TO AC007191.1; EXPRESSED IN ADULT LIVER, SIGNAL = 0.62; EXPRESSED IN LUNG, SIGNAL = 1.5; NT HIT: gi8923091, EVALUE 0.00e+00; SWISSPROT HIT: Q28120, EVALUE 3.00e-16; EST_HUMAN HIT: BG763451.1, EVALUE 0.00e+00
ttcctggaggccacgctgcggtccctgacagcaggttggcacgtggagctggatcccttcacagcctcaacacccctggggccagtggactttggcaatgtggtggccacactggacccaagggctgcccgtcacctcacccttgcctgccattatgactcgaagctcttcccacccggatcgaccccctttgtaggggccacggattcggctgtgccctgtgccctgctgctggagctggcccaagcacttgacctggagctgagcagggccaaaaaacag

SEQ ID NO: 20100 - DNA, 379 bp, Homo sapiens
  MAP TO AC008727.5; EXPRESSED IN ADULT LIVER, SIGNAL = 0.45; NT HIT: gi14729757, EVALUE 0.00e+00; SWISSPROT HIT: Q9UPW0, EVALUE 1.80e+00; EST_HUMAN HIT: AU132586.1, EVALUE 0.00e+00
tttagaacttgtggttgagccgtggattgctggactctggccagccctcagaaagcattttaggtcaagcagaggacaagaggagataagtggcgcactcccggtggcatcacctgcatcctcgaggacagaccttgtgaagtcagagctgctacacattgaatctcaagtcgagcttctgagattcgatgattcaggaagaaaggattctgaggttttgaagcaaaatgcagtgaacagcaaccaatccaatgttgtaattgaagactttgagtcctcacttacccgttcggtacccccactctcacaagcctctctgaatattcctggtttacccccagaatatttacaggtacatctgcaggagtctcttggccag

SEQ ID NO: 20101 - DNA, 115 bp, Homo sapiens
  MAP TO AC008985.5; EXPRESSED IN ADULT LIVER, SIGNAL = 0.85; EST_HUMAN HIT: BF953903.1, EVALUE 3.00e-58; NT HIT: gi14766183, EVALUE 1.50e+00
gacaccccccatcgtggacaggatccccgtgcagtgtggtcaaggacatagcagggtcttcactaacgatgcggacatcttggtcacaggcaccatggaaaagcacatttctcaa

SEQ ID NO: 20102 - DNA, 95 bp, Homo sapiens
  MAP TO AC004182.1; EXPRESSED IN ADULT LIVER, SIGNAL = 0.61; EST_HUMAN HIT: BF771989.1, EVALUE 2.80e-02; NT HIT: AF055066.1, EVALUE 3.00e-07
tcagggctgtgcgtgatctgcaaaggaagcgcatcgaccaccaggtggcgctgctgcgctgcttctgctcccaggaggtggatgcccaggacgag

SEQ ID NO: 20103 - DNA, 219 bp, Homo sapiens
  MAP TO AC011533.5; EXPRESSED IN ADULT LIVER, SIGNAL = 1.2; EST_HUMAN HIT: BF770804.1, EVALUE 1.00e-104; NT HIT: AF198490.1, EVALUE 7.00e-97; SWISSPROT HIT: P26809, EVALUE 1.00e-03
ctatagcaggcgagtgataacaggctttaatccttttaaagcatgctgtgggatgggatattggcgttgagcggggtaagggtgattaggttttaatgggatggtaatgggcatgtgatcagttgccagggaaggagtagagatgtcccatacttgtggcttaaggtggggggatacgagaggaagacgtgaaggaagctttgggctggggagaagggc

SEQ ID NO: 20104 - DNA, 87 bp, Homo sapiens
  MAP TO AL023495.1; EXPRESSED IN PLACENTA, SIGNAL = 0.91; EXPRESSED IN ADULT LIVER, SIGNAL = 0.92; EST_HUMAN HIT: AA040775.1, EVALUE 3.90e-01; NT HIT: AF035537.1, EVALUE 4.20e+00
tcatatgggaagatcaaaagcacagcaggatattcctgtgactctggcattggtcagcaatacttcaacctccacatccaaatatga

SEQ ID NO: 20105 - DNA, 228 bp, Homo sapiens
  MAP TO AC011536.5; EXPRESSED IN PLACENTA, SIGNAL =   1; EXPRESSED IN ADULT LIVER, SIGNAL = 0.5; EST_HUMAN HIT: BF760150.1, EVALUE 1.00e-93; SWISSPROT HIT: O88799, EVALUE 9.00e-16; NT HIT: gi4503680, EVALUE 1.00e-109
ggctctgatcggcaccccctccttgcagccatggaatgccctcagaacagtcactacgagctctgtgcggacacctgctccctgggctgctcggctctcagtgcccctctgcagtgcccagatgggtgtgctgagggctgccagtgtgactccggcttcctctacaacggccaagcctgcgtgcccatccagcaatgtggctgctaccacaatggtgtctactatgag

SEQ ID NO: 20106 - DNA, 143 bp, Homo sapiens
  MAP TO AC008989.6; EXPRESSED IN ADULT LIVER, SIGNAL = 0.54; SWISSPROT HIT: Q64398, EVALUE 2.00e+00; NT HIT: M83230.1, EVALUE 1.90e+00
aatggcttcctccttcctgactgcccatggggtctttgcagtcccctgggccatctctaagtggtctcctgtctttactgatgcccctggctccttcagcacgtcccccaggcactgcatggcctccaccggtgcccaggaca

SEQ ID NO: 20107 - DNA, 171 bp, Homo sapiens
  MAP TO AC016778.2; EXPRESSED IN ADULT LIVER, SIGNAL = 0.37; EXPRESSED IN LUNG, SIGNAL = 0.47; SWISSPROT HIT: P05422, EVALUE 5.70e+00; NT HIT: AE006134.1, EVALUE 5.90e-01; EST_HUMAN HIT: AL600771.1, EVALUE 8.80e-01
tttattgtgccagcgtttctccctaaaacgctcagaatgaagaattcttgctacttcttttttgcttcctgaatcaaagccaaatttctcagagtgcttttcgggtcctttccctctcgcaaactgatctttacttctagtggaatccctgctgccatcagtactttggac

SEQ ID NO: 20108 - DNA, 175 bp, Homo sapiens
  MAP TO AC004264.1; EXPRESSED IN ADULT LIVER, SIGNAL = 0.69; SWISSPROT HIT: P76279, EVALUE 2.50e+00
gccaacctctgccctcctggagggcaaccccagcgtcagctgcggtgcctgctcctcttccgctccgggaaccagagtgtacctggcttttggtgtctgccacctcccacccacagcttcccagcagctgaggtggaggaaaccctcttcccccagctggggcagggagacacaa

SEQ ID NO: 20109 - DNA, 264 bp, Homo sapiens
  MAP TO AC002359.1; EXPRESSED IN ADULT LIVER, SIGNAL = 1.3; EST_HUMAN HIT: BG425118.1, EVALUE 1.00e-107; NT HIT: gi14764618, EVALUE 7.00e-14; SWISSPROT HIT: Q15149, EVALUE 3.60e-02
ctagcagagagatggcttttaaagtcacaatggcttttaacaggagataagtcaactcacagctggcgtacgagcggctgtcatcctcacacattttgtgcagctgctggtattcctcctgggccagctcgaaccgctgctgcttaatctggtagatttctttcttggcattgagagcctcctgagctacaattaaatattccttcaacatgcgctcttgctctcgcctccactgttctcttggatcctcaatctgggtaagtt

SEQ ID NO: 20110 - DNA, 281 bp, Homo sapiens
  MAP TO AC021689.3; EXPRESSED IN PLACENTA, SIGNAL = 1.4; EXPRESSED IN ADULT LIVER, SIGNAL = 1.8; EXPRESSED IN LUNG, SIGNAL = 1.8; EST_HUMAN HIT: AW474440.1, EVALUE 0.00e+00; NT HIT: gi16160879, EVALUE 0.00e+00; SWISSPROT HIT: P32456, EVALUE 3.00e-40
ctccaattctttctggaaactttggtctacatccttgaaagagtttttcatgaagacttcaatggcctccctctcactggtcctgtgcaggtccagcagctcctggagggtttccatgggcagctgcactttctggcccatttgctggtcatagtgggcaatggccttttgcactgcagctgagttctctctctgagccaaggccaggactgcattctctatgcaaggcagatccccactgctgatggcattgacataggtcagcaccaggttctttagac

SEQ ID NO: 20111 - DNA, 148 bp, Homo sapiens
  MAP TO AC010516.4; EXPRESSED IN ADULT LIVER, SIGNAL = 0.85; SWISSPROT HIT: Q09477, EVALUE 1.50e+00; EST_HUMAN HIT: AI636771.1, EVALUE 2.00e-23; NT HIT: M80312.1, EVALUE 6.00e-16
gcctaaaacagctcagaaatatccctttgcagattctacaagaagactgtttcgaatctgctccatcaaaagaagggctcaactctttgagatgaatgcaggcatcacaaagaagtttctcagaatgcttccatctggttttatgtga

SEQ ID NO: 20112 - DNA, 93 bp, Homo sapiens
  MAP TO AC005574.1; EXPRESSED IN ADULT LIVER, SIGNAL = 0.37; NT HIT: AE006394.1, EVALUE 7.30e-02; EST_HUMAN HIT: BE907584.1, EVALUE 2.70e-02
gttattgttaaaatgacattgcggaattgtatgcttagaaggaattggctttttaaaataccatttaacagttatgctatccaatgtaaatat

SEQ ID NO: 20113 - DNA, 152 bp, Homo sapiens
  MAP TO AC000076.2; EXPRESSED IN ADULT LIVER, SIGNAL = 0.43; EST_HUMAN HIT: AI870670.1, EVALUE 1.00e-64; SWISSPROT HIT: Q93847, EVALUE 1.70e-01; NT HIT: gi14777047, EVALUE 7.00e-65
ctggctcctgcaccttggagacccacctgaggagctggcgcccctggggcagcgtctgcagccaggtcacacactggccgccgtggccatccagggtggtaaccgctctccgcgtctgcaggctccagatgtgtaccaggccactctgagac

SEQ ID NO: 20114 - DNA, 213 bp, Homo sapiens
  MAP TO AC002469.7; EXPRESSED IN ADULT LIVER, SIGNAL =  49; EXPRESSED IN HELA, SIGNAL = 2.7; SWISSPROT HIT: P05062, EVALUE 5.00e-32; NT HIT: gi4557306, EVALUE 1.00e-112; EST_HUMAN HIT: AL532528.1, EVALUE 1.00e-111
cttgattcccaccacgatccccttttccttgaggatgtttctgaacagctttccctggctgtccttctggtagagggtctcgtggaaaaggatcacacccccgatgctctggttgatggaactgtccacagagaagaggatttctcggaactgccggcggttctcttcagtgttttccaccttgatcctctgcaggcgggttccccatggtac

SEQ ID NO: 20115 - DNA, 105 bp, Homo sapiens
  MAP TO AC016965.10; EXPRESSED IN PLACENTA, SIGNAL = 0.94; EXPRESSED IN ADULT LIVER, SIGNAL = 0.88; NT HIT: AF326781.1, EVALUE 1.30e+00; EST_HUMAN HIT: AI820516.1, EVALUE 2.00e-52
gacctctttccaaatggagtggtctctctcctgcagcatgatcagacttctttaagtgatggcaccaggctccaagacagtgaagtcagccatcttaaagtctaa

SEQ ID NO: 20116 - DNA, 114 bp, Homo sapiens
  MAP TO AC013646.3; EXPRESSED IN ADULT LIVER, SIGNAL = 0.53; EST_HUMAN HIT: BE151448.1, EVALUE 2.20e+00; SWISSPROT HIT: Q24432, EVALUE 6.00e+00; NT HIT: AB051807.1, EVALUE 1.50e+00
ggaatcaacacagcaccaataaaagaagagaagagaagagacaccaacagaaagagaactgaaacccaagtaccaaccaagaagccagcagacgtcttggtacccctggtcctt

SEQ ID NO: 20117 - DNA, 86 bp, Homo sapiens
  MAP TO AC004184.1; EXPRESSED IN ADULT LIVER, SIGNAL = 0.75; NT HIT: AB031007.1, EVALUE 2.00e-39
ctgcctgcagttgtgggtaaggttaatagagggtggtgttccagggtcagaacagaagggcagccagcaagagcactgcttggtat

SEQ ID NO: 20118 - DNA, 266 bp, Homo sapiens
  MAP TO AC004144.1; EXPRESSED IN ADULT LIVER, SIGNAL =   1; EST_HUMAN HIT: AL041037.1, EVALUE 4.00e-56; SWISSPROT HIT: P43035, EVALUE 1.70e-02
gtccatgtggacccctcaggcaccttcctggccaccagctgctctgacaaaagcatctcagtgattgacttttactcgggcgagtgcattgccaagatgtttggccattcaggtgggtgtgcctctctgcttgggatgcctccccacccgcccacaccctctgactccgaaggcaagtgcagcctctctgctttgtttgcagaaattattaccagcatgaagttcacctatgactgtcatcacttgatcacagtatctggagacag

SEQ ID NO: 20119 - DNA, 197 bp, Homo sapiens
  MAP TO AB015355.1; EXPRESSED IN ADULT LIVER, SIGNAL = 1.1; EXPRESSED IN FETAL LIVER, SIGNAL = 6.1; NT HIT: AF064477.1, EVALUE 1.00e-107; EST_HUMAN HIT: BI459113.1, EVALUE 3.00e-78; SWISSPROT HIT: P49281, EVALUE 1.00e-23
acagtgtttctggagatcatggggagtctgccagtcttggtaacatcaaccctgcctatagtaatccctctctttcacagtcccctggggactcagaggagtacttcgccacttactttaatgagaagatctccattcctgaggaggaggttagtatcaggtccttggaggagaacactattgtctggggaaaacct

SEQ ID NO: 20120 - DNA, 123 bp, Homo sapiens
  MAP TO AC010643.5; EXPRESSED IN ADULT LIVER, SIGNAL = 0.44; EST_HUMAN HIT: AV709372.1, EVALUE 1.50e-01
aaacaggaagtggcaactgctgatctctccaaccctctgtgtggggtgtggcagtgggaggaagtcatccatgagaccagtgaggaaactgagtttccatctgaagccccagctgggggacag

SEQ ID NO: 20121 - DNA, 100 bp, Homo sapiens
  MAP TO AC004495.1; EXPRESSED IN PLACENTA, SIGNAL = 0.91; EXPRESSED IN ADULT LIVER, SIGNAL = 0.61; NT HIT: L44140.1, EVALUE 1.30e+00
gggctgcgtggcatggtggtgctttggcgtgttcattcatttgggtccttccgctgcatccctggtatgttgcaggggatgcagagaatgttccaggaag

SEQ ID NO: 20122 - DNA, 172 bp, Homo sapiens
  MAP TO AC024568.2; EXPRESSED IN ADULT LIVER, SIGNAL = 0.34; EST_HUMAN HIT: BE245407.1, EVALUE 4.00e-92; NT HIT: gi15295132, EVALUE 3.00e-92
ctttttcctttggcttttgagttcctcttggctgttcttttgttttctaggcctgactcccgtccactctcactgtcctgctcactggaggagtcctcactgctgtcctcattgctgtctccttcctccccactttcgccttgttctccactttcacttccagattcactct

SEQ ID NO: 20123 - DNA, 150 bp, Homo sapiens
  MAP TO AC002107.1; EXPRESSED IN PLACENTA, SIGNAL = 6.8; EXPRESSED IN ADULT LIVER, SIGNAL =  15; EST_HUMAN HIT: BE254419.1, EVALUE 5.00e-79; SWISSPROT HIT: P12970, EVALUE 5.00e-23; NT HIT: gi14760511, EVALUE 3.00e-79
gacaggacatccagcccaaaagagacctcacccgctttgtgaaatggccccgctatatcaggttgcagcggcagagagccatcctctataagcggctgaaagtgcctcctgcgattaaccagttcacccaggccctggaccgccaaacag

SEQ ID NO: 20124 - DNA, 259 bp, Homo sapiens
  MAP TO AF004877.1; EXPRESSED IN ADULT LIVER, SIGNAL = 0.56; NT HIT: X55525.1, EVALUE 0.00e+00; EST_HUMAN HIT: BG938635.1, EVALUE 0.00e+00; SWISSPROT HIT: P08123, EVALUE 5.00e-36
ggcccccctggtccccctggccctcctggacctccaggtgtaagcggtggtggttatgactttggttacgatggagacttctacagggctgaccagcctcgctcagcaccttctctcagacccaaggactatgaagttgatgctactctgaagtctctcaacaaccagattgagacccttcttactcctgaaggctctagaaagaacccagctcgcacatgccgtgacttgagactcagccacccagagtggagcagtg

SEQ ID NO: 20125 - DNA, 138 bp, Homo sapiens
  MAP TO AC007795.1; EXPRESSED IN ADULT LIVER, SIGNAL = 1.9; EST_HUMAN HIT: BI825899.1, EVALUE 2.70e+00
ctaagccctcataggagcagcttcagtcatggagggcaccatgctcaggttgtccacagctcccaggtcatcagcaaccgtctgtgactctgtgcaaagctgaagggtgacgatccttccaagacagtcaccagaaca

SEQ ID NO: 20126 - DNA, 177 bp, Homo sapiens
  MAP TO AC010615.5; EXPRESSED IN ADULT LIVER, SIGNAL = 0.37; NT HIT: gi14775147, EVALUE 9.60e+00; SWISSPROT HIT: Q47162, EVALUE 8.60e-01
attgtgacagtcgttatcatagtcccaagtgaggtttggggatgcggcaatgcgggtctctgactggccatccttaaggaaagggtgcctctcctccaggctgccttggctatctcgccagaaatgacagcacagggttccccaggctttggacgcagtgcagccaatgctggacct

SEQ ID NO: 20127 - DNA, 341 bp, Homo sapiens
  MAP TO AC000094.3; EXPRESSED IN ADULT LIVER, SIGNAL = 1.1; EXPRESSED IN PLACENTA, SIGNAL = 3.7; SWISSPROT HIT: P05783, EVALUE 1.00e-31; NT HIT: gi14757538, EVALUE 6.00e-52; EST_HUMAN HIT: BG468695.1, EVALUE 4.00e-54
tttcctccccagacagcatgagtttcaccactcactccactaccttctctactaactaccagtccctgggatccgtccagccgcccagctacagtacccggttgatcagcagtccagccggcatctatgcagatgtaagggatttgggctcccagatctctgtgtcctgctccaccagtttccagggtggcttggggtccagggccctggccactgggatggccaggggtctggcaggaatagggggcatctagaatgagaaggagaccatgcaaagcctgaacgaccacctggcctcctacctggacagagtgaggagcctggagactgagaattagagg

SEQ ID NO: 20128 - DNA, 90 bp, Homo sapiens
  MAP TO AC004184.1; EXPRESSED IN ADULT LIVER, SIGNAL = 0.47; NT HIT: AB031005.1, EVALUE 1.00e-43; EST_HUMAN HIT: AA740679.1, EVALUE 6.00e-34
ttgctgactctgtggactttgacttcatcattaaacatcttacaacgatgtaatttgctttgactgtaagtatagaacaggacactgttc

SEQ ID NO: 20129 - DNA, 271 bp, Homo sapiens
  MAP TO AC004523.1; EXPRESSED IN ADULT LIVER, SIGNAL = 1.7; SWISSPROT HIT: P78329, EVALUE 4.00e-36; NT HIT: gi14767694, EVALUE 0.00e+00; EST_HUMAN HIT: AI761193.1, EVALUE 1.00e-123
gaggcccagtgaatatattgccaccatcttggagctcagtgcccttgtagagaaaagaagccagcatatcctccagcacatggactttctgtattacctctcccatgacgggcggcgcttccacagggcctgccgcctggtgcatgacttcacagacgctgtcatccgggagcggcgtcgcaccctccccactcagggtattgatgattttttcaaagacaaagccaagtccaagactttggatttcattgatgtgcttctgctgagcaag

SEQ ID NO: 20130 - DNA, 176 bp, Homo sapiens
  MAP TO AL109753.9; EXPRESSED IN ADULT LIVER, SIGNAL = 0.59; NT HIT: L34363.1, EVALUE 1.00e-94; EST_HUMAN HIT: BE301393.1, EVALUE 2.00e-94; SWISSPROT HIT: P46100, EVALUE 5.00e-29
ctgaacacatccagctaacatctcatagagaatgtgagcacgttttttcatcactctgacatctaccatggtagaatctgcacactgaccattttgaattggatttataaatctattcctgaactccttaatggatccaagtaaattttccttgataaaattaaccatacaatgat

SEQ ID NO: 20131 - DNA, 123 bp, Homo sapiens
  MAP TO AC008488.6; EXPRESSED IN ADULT LIVER, SIGNAL = 0.81; NT HIT: gi13644797, EVALUE 4.10e-01; EST_HUMAN HIT: BF242242.1, EVALUE 1.50e-01
attgttccagggcatggggagagagtggggaactgattctgtgcaatctcctcctcctttcacatatccctgtatctctctcctcccagttcttgctaaatcagtcagcaaaggtgggagagg

SEQ ID NO: 20132 - DNA, 246 bp, Homo sapiens
  MAP TO AC000372.1; EXPRESSED IN ADULT LIVER, SIGNAL = 0.42; SWISSPROT HIT: Q02610, EVALUE 5.40e+00; NT HIT: gi15296371, EVALUE 1.00e-05; EST_HUMAN HIT: BG201049.1, EVALUE 6.00e-06
attatccttggctgcaaggatcaataacaagggtggtaccagtttgaggttgggcagggagttctgggcagatgtgattacacagaagtattttttatgtaaggttgtgatgacctttatacaaggtaatgatttttgcagagtcttctgtgacgttttggttttcaagcatttgtgcatgaagaccctctcttcatggccttccctggctctgtttgtcagggtttgtaacacaagtaactccat

SEQ ID NO: 20133 - DNA, 189 bp, Homo sapiens
  MAP TO AC003050.1; EXPRESSED IN ADULT LIVER, SIGNAL = 0.6; EST_HUMAN HIT: W23062.1, EVALUE 3.00e-19; SWISSPROT HIT: P39059, EVALUE 3.80e-01; NT HIT: AL163210.2, EVALUE 3.00e-12
tcagaggtcttcatggcagcccctcccatcagaggcccagaggcccagggtcccatgctgtgtacagtctagggacttggggccctgtgtcccagctgctgcaaccatgactaaaaggggccaaggtacagcttgggccatggcttcaaaggatgcaagccccaagccagcttccacgtggtgttgagc

SEQ ID NO: 20134 - DNA, 216 bp, Homo sapiens
  MAP TO AC005621.1; EXPRESSED IN ADULT LIVER, SIGNAL = 0.59; NT HIT: AF170173.1, EVALUE 3.00e+00; SWISSPROT HIT: P25621, EVALUE 4.00e+00
aatgagagcgtggactgtgatgcctggcgagataacttccctgcctactacttttcaaagaaactgacctacctatacatccccaaaagaatatatgaatatgaaaactccactaaaaatatccaggcattcaagtcaacagccaaaaaaaaggcagggggaatagtgacagaatacaaagatagaacgtgtccacttaaaaacaatgtctaccat

SEQ ID NO: 20135 - DNA, 122 bp, Homo sapiens
  MAP TO AC020996.4; EXPRESSED IN LUNG, SIGNAL = 0.5; EXPRESSED IN ADULT LIVER, SIGNAL = 0.56; NT HIT: gi11466954, EVALUE 6.30e+00; SWISSPROT HIT: P20828, EVALUE 7.90e+00
cgtccactgaactctctgcattcactggaaaggagatatttttcacagcagagccttaatgaaatccaaaacaagatgagtctcaaccaaggcaaccaaggagacctgattacaggggacct

SEQ ID NO: 20136 - DNA, 419 bp, Homo sapiens
  MAP TO AL139150.1; EXPRESSED IN PLACENTA, SIGNAL = 0.59; EXPRESSED IN ADULT LIVER, SIGNAL = 0.6; EXPRESSED IN LUNG, SIGNAL = 0.7; EST_HUMAN HIT: BG207736.1, EVALUE 0.00e+00; SWISSPROT HIT: Q92633, EVALUE 8.00e-42; NT HIT: gi14723839, EVALUE 0.00e+00
ctaagacagtcatcaccgtcttcattagcttcatgggtgtcctccggcggctgatggacccacttgtatgcggagacaagacgttggttttcctcttgacgtacacgtagatccgcaggtacaccacaaccatgatgaggaaggccatgaggttggacactgtccagaaaacaaggtaactcctgctgtaaatgggggccagggaagagcaggcagagatgttgcagaggcaattccagcccagtgtggggaccgcccccataaaaatggcgatggcccagacaagcaaaatgagcagtgtcaccctctttttggtcaggttgctatggacccgcatcctcatgattgacatgtgcctctccacggcgataaccagcaagttggtgagggaagcagtcaagctactgtccagaagcccc

SEQ ID NO: 20137 - DNA, 179 bp, Homo sapiens
  MAP TO AC016709.4; EXPRESSED IN PLACENTA, SIGNAL = 0.35; EXPRESSED IN ADULT LIVER, SIGNAL = 0.33; EST_HUMAN HIT: AL521707.1, EVALUE 4.00e-12; SWISSPROT HIT: P40020, EVALUE 8.60e-01; NT HIT: AL163303.2, EVALUE 2.00e-13
tcaaagcatctttgccagggtagattccatctcagaaaactttcttttctcattcataagaagcaacttttcatccattgaagttttatcatgcaattgtagcaattcattcatagcttctggctctacttctaattctatttctcctcctacttccacatcttcatttacttctccca

SEQ ID NO: 20138 - DNA, 113 bp, Homo sapiens
  MAP TO AC021619.3; EXPRESSED IN PLACENTA, SIGNAL = 0.31; EXPRESSED IN LUNG, SIGNAL = 0.48; EXPRESSED IN ADULT LIVER, SIGNAL = 0.31
ctgtaggcttctatgcatctcctcgtagctgggtctttgaagttgtgaagtcaggtttagcccctgggcatttgtgatgacatccattgacatgtggctggtcactcctggcc

SEQ ID NO: 20139 - DNA, 97 bp, Homo sapiens
  MAP TO AC016714.2; EXPRESSED IN PLACENTA, SIGNAL = 0.54; EXPRESSED IN LUNG, SIGNAL = 0.52; EXPRESSED IN ADULT LIVER, SIGNAL = 0.57; NT HIT: AL163252.2, EVALUE 4.80e+00; EST_HUMAN HIT: AI014966.1, EVALUE 8.00e-06; SWISSPROT HIT: P53694, EVALUE 4.70e+00
gtcttaatgatacggacagggagggcagagaaatactgggtagatgagggcagttcacgggagggctccaccctcgagtctggaactgtggcccaaa

SEQ ID NO: 20140 - DNA, 225 bp, Homo sapiens
  MAP TO AL138889.2; EXPRESSED IN PLACENTA, SIGNAL = 0.51; EXPRESSED IN ADULT LIVER, SIGNAL = 0.37; SWISSPROT HIT: P18090, EVALUE 2.40e-01; EST_HUMAN HIT: BF128407.1, EVALUE 3.00e-01
ctgtgtagccctcgttcattgggcagttggtttggatgacttggctgccctgtaccacgaggcgaggtggcccagggagagaagagggatgaggcgcagagggagtgggaggcccgtctgactgtcatgggcataaaggtgacgggggaggaaacccagagaaacttacagaacaacagtgaagggctggcagaggaagatggcccagtatcgggggagggggag

SEQ ID NO: 20141 - DNA, 226 bp, Homo sapiens
  MAP TO CHR22_96.0; EXPRESSED IN PLACENTA, SIGNAL = 0.49; EXPRESSED IN LUNG, SIGNAL = 0.46; EXPRESSED IN ADULT LIVER, SIGNAL = 0.52; EST_HUMAN HIT: H23545.1, EVALUE 3.00e-01; SWISSPROT HIT: P51865, EVALUE 3.30e+00
agcgggtttgcaggagacgtcatccgaatggataaatgtccgtcggagctggggatcatcctcccagagtttcagcagctcagagaaggccagcaactcaccgagccatgccacagcgtgcaagcacagcggcccggccctcctgcattctgtcatgcactgcgtgtcatcttattaaaggatccaacgcaggctcataaaatacttaatgaaaacatgccaccag

SEQ ID NO: 20142 - DNA, 317 bp, Homo sapiens
  MAP TO CHR22_83.0; EXPRESSED IN ADULT LIVER, SIGNAL = 0.49; EST_HUMAN HIT: BG683263.1, EVALUE 0.00e+00; SWISSPROT HIT: P15302, EVALUE 2.00e-11; NT HIT: gi14778744, EVALUE 0.00e+00
gcaccgggagcctggccgctgcagtggagacagcctcgggacgccaggccctggtggtgggcaagcccagcccctacatgttcgagtgcatcacggagaacttcagcatcgaccccgcacgcacgcttatggtgggtgaccgcctggagaccgacatcctctttggccaccgctgcggcatgaccactgtgctcacgctcacaggagtctcccgcctagaagaggcccaggcctacctagcggccggccagcacgacctcgtgccccattactatgtggagagcatcgcagacttgacagaggggttggaggactga

SEQ ID NO: 20143 - DNA, 164 bp, Homo sapiens
  MAP TO AC013689.4; EXPRESSED IN PLACENTA, SIGNAL = 0.6; EXPRESSED IN LUNG, SIGNAL = 0.58; EXPRESSED IN ADULT LIVER, SIGNAL = 0.75; SWISSPROT HIT: P15848, EVALUE 6.00e-27; NT HIT: J05225.1, EVALUE 2.00e-87; EST_HUMAN HIT: AI879990.1, EVALUE 6.00e-85
ctgatggttttccacacgtcgaagccatccagaggctttgtgccattggtgtgtcccctggccagcttcacgagtgttggcagccagtcagagatgtggatgagctcccggttcttcacgcccttctgcttcagcaaggggcttgccacaaagcccacccctcg

SEQ ID NO: 20144 - DNA, 325 bp, Homo sapiens
  MAP TO AL136105.2; EXPRESSED IN ADULT LIVER, SIGNAL = 0.6; EXPRESSED IN PLACENTA, SIGNAL = 0.46; EXPRESSED IN LUNG, SIGNAL = 0.46; EST_HUMAN HIT: BE141737.1, EVALUE 0.00e+00; SWISSPROT HIT: P22366, EVALUE 3.10e-02; NT HIT: X15277.1, EVALUE 5.00e-12
agatcagcaaggacaactcctgcaaagaaaactgtacttgttcctcctgcttgctccgggcccccaccataagtgacttgctcaatgatcaggacttactagacgtgatcaggataaagctggatccgtgtcacccaacggtgaaaaactggaggaattttgcaagcaaatgggggatgtcctatgacgaattgtgcttcctggagcagaggccacagagccccaccttggagttcttgctccggaacagtcagaggacggtgggccagctgatggagctctgcaggctctaccacagggccgacgtggagaaggttctgcgcag

SEQ ID NO: 20145 - DNA, 175 bp, Homo sapiens
  MAP TO CHR21_48.0; EXPRESSED IN ADULT LIVER, SIGNAL = 0.3; NT HIT: AL163252.2, EVALUE 5.00e-94; EST_HUMAN HIT: AI733911.1, EVALUE 2.00e-04; SWISSPROT HIT: Q07851, EVALUE 9.80e+00
cgggctggaggttagaattctgagatccaggtgtccgcagggttagttccttctgaaggttgtgagggaagaagctgttccaggcctctttctctagcctacagatgacgatcttctccctatgtgtctccacatcaccttttctctgtacctgtctatgtccaaatttcctcat

SEQ ID NO: 20146 - DNA, 366 bp, Homo sapiens
  MAP TO AC020698.2; EXPRESSED IN LUNG, SIGNAL =  13; EXPRESSED IN ADULT LIVER, SIGNAL =   6; SWISSPROT HIT: P07900, EVALUE 2.00e-58; NT HIT: X15183.1, EVALUE 0.00e+00; EST_HUMAN HIT: BG421056.1, EVALUE 0.00e+00
atggagagaatcatgaaagctcaagccctaagagacaactcaacaacaggttacatggcagcaaagaaacacctggagataaaccccgaccattcctttattgacaccttaaggcaaaaggcagagactgataagaatgacaagtctgtgaaggatctggtcatcttgctttatgaaactgcgctcctgtcttctgacttcgggctggaaggtccccagacacatgctaacaggatctacaggatgaacaaacttggtctgggtactgatgaagatgaccctactgctgatgataccagtgcagctgtaactgaagaaatgccacccctcgaaggagatgacgacacatcacgcatggaaaagtag

SEQ ID NO: 20147 - DNA, 284 bp, Homo sapiens
  MAP TO AC022247.2; EXPRESSED IN PLACENTA, SIGNAL = 0.45; EXPRESSED IN ADULT LIVER, SIGNAL = 0.46; SWISSPROT HIT: P14263, EVALUE 2.10e-01; NT HIT: gi14786322, EVALUE 2.60e-01; EST_HUMAN HIT: BG539428.1, EVALUE 3.00e-05
ctcagtccgggcttcaacgtcacacgcagttgcggtgacagcgagagcagctttgctctgcacgactgtgtttgcagaacgcagtgggctgatgatggcatgcatgatgtcgtgattctgtatgttcaggcgcaggggctcctgcatggccatgtttgttaatactgtagcagcgttggcaatggctccatctcgtttactagacaggaggtttattaatggatcaataccatcagcttcagcagcagcgctgagtaaatgaaagagaaatgaatgtgattcat

SEQ ID NO: 20148 - DNA, 131 bp, Homo sapiens
  MAP TO AC025745.1; EXPRESSED IN PLACENTA, SIGNAL = 0.41; EXPRESSED IN ADULT LIVER, SIGNAL = 0.5; NT HIT: D38072.1, EVALUE 1.10e-01
ttgaaaatcactactgaaatattctgcctttctctcttcttcagcttgaggaactctagtttctgaaacttgtctgtcatgctcctattaatctcctcctccaggagtacaatgtggtgatcagctgtcat

SEQ ID NO: 20149 - DNA, 93 bp, Homo sapiens
  MAP TO AL078585.18; EXPRESSED IN PLACENTA, SIGNAL = 0.55; EXPRESSED IN ADULT LIVER, SIGNAL = 0.59; NT HIT: gi15828471, EVALUE 4.50e+00
aagttaaaaatatttaatcactatggaatttccatacctaaaaccatgctaaaagatttaaagaaaaaaaatgaaaaatccatattaagctaa

SEQ ID NO: 20150 - DNA, 197 bp, Homo sapiens
  MAP TO CHR22_227.0; EXPRESSED IN ADULT LIVER, SIGNAL = 5.4; NT HIT: gi14779305, EVALUE 1.00e-104; SWISSPROT HIT: Q9Y3A4, EVALUE 2.00e-19; EST_HUMAN HIT: BI772059.1, EVALUE 1.00e-103
gctccatcttgctctctcgatgctgccaggcgtagttgagcagctcttttcggctgcgcttccgtctctccctctccagcacccgcaagctggctgcctcagtccgggggagcacaggccgccggccccggcgggtcaccttcacccagccctcctcgtcagggaccccctcctcctccttggccttagcttcttcc

SEQ ID NO: 20151 - DNA, 164 bp, Homo sapiens
  MAP TO AC018432.4; EXPRESSED IN PLACENTA, SIGNAL = 0.43; EXPRESSED IN LUNG, SIGNAL = 0.61; EXPRESSED IN ADULT LIVER, SIGNAL = 0.47; NT HIT: gi13487903, EVALUE 1.00e-05; EST_HUMAN HIT: BI860683.1, EVALUE 2.00e-20; SWISSPROT HIT: P36035, EVALUE 1.50e+00
cacgaggcatcaaaccataccatagcgtggctaggacccaacccggtaccagaaatgaagaaaatgaccctgtggaacccatagccctggatgatgcagcttcttcagacgacacaaaccccagacattacctgggagatgctgaagaaaactcagaaggctga

SEQ ID NO: 20152 - DNA, 499 bp, Homo sapiens
  MAP TO AL133543.2; EXPRESSED IN PLACENTA, SIGNAL = 0.68; EXPRESSED IN LUNG, SIGNAL = 0.77; EXPRESSED IN ADULT LIVER, SIGNAL = 2.2; EST_HUMAN HIT: AL559837.1, EVALUE 0.00e+00; SWISSPROT HIT: O75874, EVALUE 7.00e-79; NT HIT: gi14729949, EVALUE 0.00e+00
tcagctacaaaggccaatccttagagccatttggaaggaactgtgtgcaaaatcttcgattgacttatcttgattatacatccctatggcaacaccaccaccctcttccaagttatgtaccaggtatgtcaccttttgggttctgtcacttagtgtgtaggttatctctacttttccaggcccaggaacaacaaaatcagctgctctgtattgatccccataagcaatgcgacctacgatgatggattttacccatccactcacaagctgggggatatttttgcagataatggcttctctgaggaccgtgccaaccagaatattttggatggtgccatttggcgatttccacatttgtttcaacttgaactcctcaacccttttctcatcagcagtgatagtggcacacttgacaccaacgttatacttctttatagcttctgcagcatccttggtgacctggtcgttggtggcatcacagtactctatgcctaaatca

SEQ ID NO: 20153 - DNA, 177 bp, Homo sapiens
  MAP TO CHR22_127.0; EXPRESSED IN ADULT LIVER, SIGNAL = 0.49; SWISSPROT HIT: Q01955, EVALUE 7.40e+00; EST_HUMAN HIT: BE158562.1, EVALUE 9.10e-01
gactgtagtgaagacgtcaaggggatccgtttaaccagtgcctctcagctgggagggatagcgaatgtgatagatggcacaatcaagattcagaatgggttcagctgcctgcagtgccagccgggaaccaatcaaatgaatgagctaataggaacaaatggcaagtcctacgttcag

SEQ ID NO: 20154 - DNA, 188 bp, Homo sapiens
  MAP TO AL035633.18; EXPRESSED IN PLACENTA, SIGNAL = 0.43; EXPRESSED IN ADULT LIVER, SIGNAL = 0.39; SWISSPROT HIT: Q90374, EVALUE 5.60e+00; NT HIT: D30745.1, EVALUE 2.60e+00; EST_HUMAN HIT: AI499138.1, EVALUE 2.50e-01
taggcattcgattgagcatggacattgtaactatgaaattgaccaaatcctgacatttctgtagattctccagcagaattctgcaagtaaaatagtaaagaaaagcagatagagtagccttaaggatgggtggcgtattagataatgcattcaaatatgttggtgaagacacagaagaaattgaccat

SEQ ID NO: 20155 - DNA, 344 bp, Homo sapiens
  MAP TO CHR22_179.0; EXPRESSED IN LUNG, SIGNAL = 2.1; EXPRESSED IN ADULT LIVER, SIGNAL = 1.2; SWISSPROT HIT: P05214, EVALUE 1.00e-31; NT HIT: gi15317879, EVALUE 0.00e+00; EST_HUMAN HIT: AL134889.1, EVALUE 1.00e-124
cagatctgtgcatgggactgcagggcttcctcatcttccacagctttgggggcggcactggctctgggttcgtgtctctgctcatgaagcggctctcggtggactacgggaagaagtccaagctggagtttgccatttgcccagccccccaggtctccatggccatgacggagccctacaactccatcctgaccacctacacgaccctggaacattctgactgtgccttcatagtcgacagcaaagccacctatgacatgtcagcacaacctggacatcgagtgtcccatgtacaccaacctcagtcgtctgggcagatcgtgtcctccatcacggcctccctg

SEQ ID NO: 20156 - DNA, 169 bp, Homo sapiens
  MAP TO AC015896.4; EXPRESSED IN ADULT LIVER, SIGNAL = 0.28; EST_HUMAN HIT: AA287444.1, EVALUE 1.00e-70; SWISSPROT HIT: Q9SGG3, EVALUE 5.70e+00
tgtcggaaatttccagtaggtctataaggatacagacatagagaacagccatgaaaaagtgaggaatcaccccaatgtgggctctttttctttctttaggctctgttgctgtccaatagagagcatctaatatgtcttgtccaaaagatgaaaacagacgatcagctac

SEQ ID NO: 20157 - DNA, 139 bp, Homo sapiens
  MAP TO AL133492.1; EXPRESSED IN PLACENTA, SIGNAL = 0.64; EXPRESSED IN ADULT LIVER, SIGNAL = 0.79; NT HIT: AL163303.2, EVALUE 4.00e-60; SWISSPROT HIT: Q9D4V0, EVALUE 1.50e+00; EST_HUMAN HIT: AJ003523.1, EVALUE 8.00e-10
aggttattcggaccctgagctggatgtgaaagtagcaggaggcagagccatcagcttcatgcaatgtgtgcacaccagttctgggtcccccccagccttgtggggtgctgaaagggggcttggtggcctctggtcccat

SEQ ID NO: 20158 - DNA, 92 bp, Homo sapiens
  MAP TO AL139152.1; EXPRESSED IN LUNG, SIGNAL = 0.67; EXPRESSED IN ADULT LIVER, SIGNAL = 0.61; EST_HUMAN HIT: AU127230.1, EVALUE 4.00e-35; NT HIT: gi16159759, EVALUE 8.00e-45
ctgactttctctttctttgttagccatgagttcaagttccactttggcattactcagttctttgtccagccctacaactgtgtccaagtctc

SEQ ID NO: 20159 - DNA, 171 bp, Homo sapiens
  MAP TO CHR22_87.0; EXPRESSED IN PLACENTA, SIGNAL = 0.31; EXPRESSED IN ADULT LIVER, SIGNAL = 0.32; SWISSPROT HIT: Q05544, EVALUE 2.50e+00; EST_HUMAN HIT: BI829099.1, EVALUE 4.00e-18; NT HIT: AF118655.1, EVALUE 1.50e-01
ctgactttgcctttctccaatcaagatgggtgccttggggatgaggctccctgctctcccttctccccttctcccagctacaagctgtctccctctggttccacactacccaacgtcagccttggagcaatcggcacagggctcaacccccaaaacttcgctgctagacaa

SEQ ID NO: 20160 - DNA, 180 bp, Homo sapiens
  MAP TO CHR22_81.0; EXPRESSED IN PLACENTA, SIGNAL = 0.38; EXPRESSED IN ADULT LIVER, SIGNAL = 0.32; NT HIT: gi14779148, EVALUE 5.00e-97; SWISSPROT HIT: P46060, EVALUE 5.00e-29; EST_HUMAN HIT: BE793169.1, EVALUE 8.00e-97
cttgccgccgccaatgcccatgccacagttgttgagcttgagttcctgcagggtgaagcaggctgagctcttgagcagggcctcgaagccttgcacaccgtcgggcccgaatgcgttgtcgcttaagtccagctccaccagctgagccccagctgtgatgagtccttcccctagtgagat

SEQ ID NO: 20161 - DNA, 186 bp, Homo sapiens
  MAP TO AC018735.5; EXPRESSED IN ADULT LIVER, SIGNAL = 0.32; EST_HUMAN HIT: BF675717.1, EVALUE 9.60e-01; NT HIT: U46217.1, EVALUE 6.50e-01
gagtacttatcatggtcctcaggaacattattctgtgccctcttggacccaaagacattacattttgttattactgagtctgcttgattcctcctcctcttatttttcctcctccttttccttatcttcttctccacctcctcctcttcatcttctttcttcttcccacccttcactacccccatc

SEQ ID NO: 20162 - DNA, 123 bp, Homo sapiens
  MAP TO AC023115.3; EXPRESSED IN PLACENTA, SIGNAL = 0.45; EXPRESSED IN ADULT LIVER, SIGNAL = 0.46; EST_HUMAN HIT: BG198987.1, EVALUE 6.00e-01; NT HIT: AE006229.1, EVALUE 1.00e-01
ctccgagtggttctcagtagcattatctcaactgggagatataaaatcattgtaactttacattcttccattttgtctgatatgcctaaacttagcaactcaggggagtcatgttcttgccag

SEQ ID NO: 20163 - DNA, 160 bp, Homo sapiens
  MAP TO AC022247.2; EXPRESSED IN ADULT LIVER, SIGNAL = 0.35; EST_HUMAN HIT: AA070275.1, EVALUE 5.20e-02; SWISSPROT HIT: Q62095, EVALUE 2.00e+00
cctgattattgaaaaaatctttgctgcctgaattctcacacattgctgaaatagcttgggaagcagcaattttagttccatcattttcagaacccaaaagggctacaaggcacttttcaacctcttgttcatgaaaaagttttctattttcagctttcat

SEQ ID NO: 20164 - DNA, 131 bp, Homo sapiens
  MAP TO AC013697.3; EXPRESSED IN ADULT LIVER, SIGNAL = 0.41; NT HIT: M57614.1, EVALUE 4.40e-01; EST_HUMAN HIT: BG746175.1, EVALUE 6.50e-01
gggtttgaggggatgggaaatcaaagaggaaaatgttgatgggagaaagaaagtggaaaaaattgggaacgtgagttactgccaaagccctcaaaatcttatgtatggtgaaaaaggggttgaagatgatg

SEQ ID NO: 20165 - DNA, 110 bp, Homo sapiens
  MAP TO AC012544.3; EXPRESSED IN PLACENTA, SIGNAL = 0.42; EXPRESSED IN LUNG, SIGNAL = 0.45; EXPRESSED IN ADULT LIVER, SIGNAL = 0.32; NT HIT: AL161543.2, EVALUE 5.60e+00; EST_HUMAN HIT: H84391.1, EVALUE 2.10e+00
ctacacgctgatttcctccattttcctcttatctaccagttcatacatgattgttttcacagtcaccagcaacattaatttttgttgttgtggaaataaatttttgtcaa

SEQ ID NO: 20166 - DNA, 231 bp, Homo sapiens
  MAP TO AC015943.3; EXPRESSED IN LUNG, SIGNAL = 0.66; EXPRESSED IN ADULT LIVER, SIGNAL = 0.63; NT HIT: AY058741.1, EVALUE 8.30e-01; SWISSPROT HIT: P75354, EVALUE 4.70e-02
aacatctgactttgccatagacaccagcaccagacccaccccagtgaagcttaggaccaagccagcctccatagacccaggttccaggcctgccccagtgccaaatagtttcctagttccaatctccaggcccacttctgtgtcttcagaacccaggcctaccattgcaaactcaagctctaggccactccactgccaaaccagctcctgtgccccaggatccaggcccat

SEQ ID NO: 20167 - DNA, 115 bp, Homo sapiens
  MAP TO AC013371.4; EXPRESSED IN PLACENTA, SIGNAL = 0.41; EXPRESSED IN ADULT LIVER, SIGNAL = 0.34; EST_HUMAN HIT: AW851034.1, EVALUE 1.40e-01; SWISSPROT HIT: P21959, EVALUE 2.10e+00
gttctctggggagaaagcaaaagacacctggggagatgctgtcaacagagaggaagtcaaagttcatgcagacctggcctcaataaacacagccaaaaccagagctgtagagcag

SEQ ID NO: 20168 - DNA, 210 bp, Homo sapiens
  MAP TO CHR22_108.0; EXPRESSED IN PLACENTA, SIGNAL = 0.44; EXPRESSED IN ADULT LIVER, SIGNAL = 0.56; EXPRESSED IN LUNG, SIGNAL = 0.46; SWISSPROT HIT: P32226, EVALUE 4.20e+00; NT HIT: U64032.1, EVALUE 1.90e-01; EST_HUMAN HIT: AI024855.1, EVALUE 1.00e-105
ttgggcgaccagagccaagaggttgtttgtctgttttagacactctcgtcgctgtgtttcttctttatcttttaagggctcgagactcaggaaaaccaactcaacgtgcataatttggcaattatttcttgtgttcatcctcacggccgtggctgcatacagatattggaatttgcataaaacaatcttgctaccagtcccacggcttcc

SEQ ID NO: 20169 - DNA, 190 bp, Homo sapiens
  MAP TO AL136231.3; EXPRESSED IN ADULT LIVER, SIGNAL = 0.58; SWISSPROT HIT: P43005, EVALUE 2.00e-29; NT HIT: U08989.1, EVALUE 1.00e-103; EST_HUMAN HIT: AU133146.1, EVALUE 1.00e-103
ctgatggtgatgatctgcccaatgcccaagtccaggtcattcaactgtgcaataaacaccgctgccactgcttcatagagcgcagtcccatccatgttgattgttgcaccaacgggtaacacgaatcgagtgatcctcttgtccacctggttattttcttcagcacagcggaaggtgacaggcagtgttg

SEQ ID NO: 20170 - DNA, 117 bp, Homo sapiens
  MAP TO AL136312.1; EXPRESSED IN LUNG, SIGNAL = 0.45; EXPRESSED IN ADULT LIVER, SIGNAL = 0.51; EST_HUMAN HIT: BG980250.1, EVALUE 2.00e-03; SWISSPROT HIT: Q03824, EVALUE 4.60e+00; NT HIT: D26535.1, EVALUE 9.70e-02
caaaggaggtcagaaaagccttccctgaagaagtgagcactaggctggatctaagacaagctgaaattaccatagtgagaaagaaagggaaaatatttctagatgaggacacagcag

SEQ ID NO: 20171 - DNA, 165 bp, Homo sapiens
  MAP TO AJ239319.2; EXPRESSED IN ADULT LIVER, SIGNAL = 0.36; SWISSPROT HIT: P29402, EVALUE 3.40e+00; EST_HUMAN HIT: BG571860.1, EVALUE 3.00e-37; NT HIT: AY054498.1, EVALUE 5.70e-01
cacatgataagtgtgttactctcatccctcaggagtatctttactatcagcctaaaagggatgctaagcttgcaaacttgacctttatttctactattaccactaatcttactgaggtctctaatgaagctacacaagtgcctgatcttcctatatgccgtccga

SEQ ID NO: 20172 - DNA, 150 bp, Homo sapiens
  MAP TO CHR21_25.0; EXPRESSED IN PLACENTA, SIGNAL =   2; EXPRESSED IN ADULT LIVER, SIGNAL = 6.9; SWISSPROT HIT: P51521, EVALUE 8.80e-01; NT HIT: AL163227.2, EVALUE 3.00e-79
aggctgcaatccaggcattggtcgtggctttagtctcatcagaggctctgctgggatcagagtcaccttcaagctctctctggttgttggcaggatcaatcttcctggatttgtaggactgtgattcccatttccttgacggccatagcc

SEQ ID NO: 20173 - DNA, 93 bp, Homo sapiens
  MAP TO AC011977.3; EXPRESSED IN PLACENTA, SIGNAL = 0.32; EXPRESSED IN ADULT LIVER, SIGNAL = 0.37; NT HIT: AF003528.1, EVALUE 9.00e-17; EST_HUMAN HIT: BE159541.1, EVALUE 3.00e-17
cagcaatggatccaaaccaagatgtaaactctgaattgccagaaaaagaattcagaaggtctattaaaccaaccatggaggcaccagagaaag

SEQ ID NO: 20174 - DNA, 99 bp, Homo sapiens
  MAP TO AL137844.2; EXPRESSED IN ADULT LIVER, SIGNAL = 0.33; NT HIT: AL161588.2, EVALUE 7.90e-02; EST_HUMAN HIT: BI463932.1, EVALUE 1.80e+00; SWISSPROT HIT: P09291, EVALUE 4.70e+00
tgagctctggaggccaagtcttgtgctatgcaggctgcagatattattttactggcaacttccaacatcccattgaggctgatgttgttatcccttttt

SEQ ID NO: 20175 - DNA, 239 bp, Homo sapiens
  MAP TO AC018691.5; EXPRESSED IN ADULT LIVER, SIGNAL = 0.31; NT HIT: L15190.1, EVALUE 5.50e-02; SWISSPROT HIT: Q9ZJJ1, EVALUE 1.70e+00
attggaagctccacaaacaccctgagtgccctgaaaactgcttttgctgataaagaaacacaggcaatctaccttctgaccgatgggagacctgatcaggtacttaccagagctgggaacaaagagggcctcactgatgctctgaaagcaaatgctggaaatgggtctgggggaccttttcagctgccaccaaaaatctgtggacatatacttccttggcttagggactcagatctgag

SEQ ID NO: 20176 - DNA, 126 bp, Homo sapiens
  MAP TO AC011981.3; EXPRESSED IN PLACENTA, SIGNAL = 0.57; EXPRESSED IN ADULT LIVER, SIGNAL = 0.43; NT HIT: AF016539.1, EVALUE 6.50e+00; EST_HUMAN HIT: AV731270.1, EVALUE 2.40e+00
atgagaattgggataaaagctaaagaaaaaaaggcttttataaccaggtttgcagtcaagagaacaaagagggatgaggctcagtttatggcagatgatgtcatgatgaaaagaaaaagtaattgg

SEQ ID NO: 20177 - DNA, 124 bp, Homo sapiens
  MAP TO AL136099.2; EXPRESSED IN LUNG, SIGNAL = 0.48; EXPRESSED IN ADULT LIVER, SIGNAL = 0.38; EST_HUMAN HIT: BF304974.1, EVALUE 2.40e+00; SWISSPROT HIT: O15151, EVALUE 9.10e-01
ccgcacaacgcggcatttcatctacctgcacaatgtcatggttttttcccggctccagaacctcggggtctgtcactgatcctggagaggcagcactggagtcggtgtctttagccacgagaag

SEQ ID NO: 20178 - DNA, 978 bp, Homo sapiens
  MAP TO AC000403.1; EXPRESSED IN ADULT LIVER, SIGNAL =  12; EXPRESSED IN PLACENTA, SIGNAL =  12; EXPRESSED IN BRAIN, SIGNAL =  12; EXPRESSED IN HELA, SIGNAL =  15; EXPRESSED IN HEART, SIGNAL =  13; EXPRESSED IN LUNG, SIGNAL = 7.7; EXPRESSED IN BONE MARROW, SIGNAL = 8.1; EXPRESSED IN FETAL LIVER, SIGNAL = 6.3; SWISSPROT HIT: Q14681, EVALUE 2.00e-04; EST_HUMAN HIT: BG387727.1, EVALUE 8.00e-64; NT HIT: gi16163086, EVALUE 0.00e+00
gtactcggtgtagctggtccagatcttgtcctcgctctggtcggtgctgctggcaaaggcgcaggtgcccgtggagctgcacgccaccatgtggaagcccgactcggacagcttgtcgaaggcctgctccaggaagttgaacttgaggtaatagcgcgaggtgtagcgctccgggggacggtcggggtcccggctttcgttcagggtgtccccaaacacctccttggccagcgacgtctttccgcaaacggtgatgcgcgccactcgccggaacttggcgtccgcctgcgcgtcccgcccgatggtgtaggagccgcggtagccgatggtgatgtagcccgagcgccggctgccgtccagcgactgggacggcgtgagcagcgggcccgccgcgcccccggacggactgcggctagccagctccagcgtgggcgacggcgccccggcagaggcgccctcctgctgttcgggctccgagtagccaagcggcagcagctcgtcacccagcgagccctccttgtgcaccccgcgccgcgagggcggcggccccgggccgggctgctggggcgccccgaggcggcgcacgagctctggcagctcgaagtactcggcctcgcgctgcagccggctgcgctcggggaagtagtcgggcagcacgagctgcaagtcccgcaggtaatccaggatgtagcggaagaggaagccgtcccggtccagaaagaagcggcctttgctgtcccgggccagctcctgcggctgctgctgcgtgaacatgcgccagagcagcgagtcgggcaccgacaccaccgtgcagcgccgggtcacgtacacctggccccccacgttcagctccacgatgtcggggaagagcggtggctccgcggaggacgacgaggagccactgccgcccccgccgccgcccccgttgggtaatccacgtgtgctgtccgccagagccatgacagagaggtggccggg

SEQ ID NO: 20179 - DNA, 1018 bp, Homo sapiens
  MAP TO AL133448.4; EXPRESSED IN ADULT LIVER, SIGNAL = 1.5; EXPRESSED IN PLACENTA, SIGNAL = 1.6; EXPRESSED IN BRAIN, SIGNAL = 1.2; EXPRESSED IN HELA, SIGNAL = 0.89; EXPRESSED IN LUNG, SIGNAL = 2.3; EXPRESSED IN HEART, SIGNAL = 2.7; EXPRESSED IN BONE MARROW, SIGNAL = 2.1; SWISSPROT HIT: P98158, EVALUE 3.00e-15; EST_HUMAN HIT: BG829780.1, EVALUE 0.00e+00; NT HIT: gi12667805, EVALUE 0.00e+00
attggctgatgtgcctgcaggaagagtttcagtgcctgaaccaccgctgtgtatctgctgtccagcgctgtgatggggttgatgcctgtggcgatggctctgatgaagcaggttgcagctcagaccccttccctggcctgaccccaagacccgtcccctccctgccttgcaatgtcaccttggaggacttctatggggtcttctcctctcctggatatacacacctagcctcagtctcccacccccagtcctgccattggctgctggacccccatgatggccggcggctggccgtgcgcttcacagccctggacttgggctttggagatgcagtgcatgtgtatgacggccctgggccccctgagagctcccgactactgcgtagtctcacccacttcagcaatggcaaggctgtcactgtggagacactgtctggccaggctgttgtgtcctaccacacagttgcttggagcaatggtcgtggcttcaatgccacctaccatgtgcggggctattgcttgccttgggacagaccctgtggcttaggctctggcctgggagctggcgaaggcctaggtgagcgctgctacagtgaggcacagcgctgtgacggctcatgggactgtgctgacggcacagatgaggaggactgcccaggctgcccacctggacacttcccctgtggggctgctggcacctctggtgccacagcctgctacctgcctgctgaccgctgcaactaccagactttctgtgctgatggagcagatgagagacgctgtcggcattgccagcctggcaatttccgatgccgggacgagaagtgcgtgtatgagacgtgggtgtgcgatgggcagccagactgtgcggacggcagtgatgagtgggactgctcctatgttctgccccgcaaggtcattacagctgcagtcattggcagcctagtgtgcggcctgctcctggtcatcgccctgggctgcacctgcaagctctatgccattcgcacccaggagtacag

SEQ ID NO: 20180 - DNA, 842 bp, Homo sapiens
  MAP TO AF168787.1; EXPRESSED IN ADULT LIVER, SIGNAL = 1.4; EXPRESSED IN BRAIN, SIGNAL = 1.2; EXPRESSED IN HELA, SIGNAL = 1.8; EXPRESSED IN BONE MARROW, SIGNAL = 1.3; EXPRESSED IN LUNG, SIGNAL = 1.3; EXPRESSED IN FETAL LIVER, SIGNAL = 1.4; SWISSPROT HIT: Q00709, EVALUE 2.00e-01; EST_HUMAN HIT: BI562569.1, EVALUE 0.00e+00; NT HIT: gi14774354, EVALUE 0.00e+00
accgcgacgcgctgaacaaaccaagccgccagttttccgtcccgtcccggccccggccctggcgaggtgcgcatgcgcagggccgggagctaggaccccgcggcaggcgggcgcgtccgcgtcgcacggaagtctcgcgatgtttgcgtttgaacctcttggcgggtgccggccatggcggcttcgctcccgggacctgggagccggcttttccgcacatatggggctgcggacggcaggagacagcggcggccgggccgggaagccgcgcagtggttcccgccgcaggaccggaggcgtttcttcaacagcagcggcagcagcgacgccagcatcggcgacccctcgcagtccgacgatcctgacgatcccgacgaccccgacttccccggcagcccggtgaggcggcggcggaggtgtcccggcggccgagtgcccaaggaccggcccagcctgaccgtgaccccaaagcgctggaagctgcgagctcgcccaagcctaaccgtgaccccaagacgcctggggctgcgagctcggcccccgcagaagtgcagcacaccctgcggcccgctccgacttccgcccttccccagccgcgactccggccgcctcagcccggacctcagcgtgtgcggccagcccagggacggcgacgagctgggcatcagtgcctccctgttcagctctctggcctcgccctgccccgggtccccaacgccaagggacagtgtcatctcgatcggcacctccgcctgtctggttgcagcctcagccgtcccgagcgacctccacctcccagaagtctccctggaccgagcatctctcccctgctcccaggagga

SEQ ID NO: 20181 - DNA, 870 bp, Homo sapiens
  MAP TO AC002395.1; EXPRESSED IN ADULT LIVER, SIGNAL = 3.4; EXPRESSED IN PLACENTA, SIGNAL =   5; EXPRESSED IN BRAIN, SIGNAL = 2.7; EXPRESSED IN HELA, SIGNAL = 2.8; EXPRESSED IN LUNG, SIGNAL = 3.7; EXPRESSED IN HEART, SIGNAL = 3.3; EXPRESSED IN BONE MARROW, SIGNAL =   3; SWISSPROT HIT: Q9UQQ2, EVALUE 2.00e-88; EST_HUMAN HIT: BE674786.1, EVALUE 0.00e+00; NT HIT: gi14767623, EVALUE 0.00e+00
atcacacctccccagcccgcgctctccccagggtgaaggcgaagggcgcagtgcagtgcgcaaccccgcgggcagggcttacttaccttgggtgggtcgaagagctccagcacgcggtcggggccatcggggcccggggcccggcgcagcgccagcctcccgcgctgccagcgtgccccgctgtccatggaggcctcgtcggccaggctgtagcgcagcaccgcctccttcagcgcctcgggtggcggctcccgggccaggctccagggcaggaacttcttggccaggccaggccgggcgggggtctcagcagcctctccgggggtcccgggggcggcagcggtgtgggccgctggcagctccccggccgagcggcggcggaagatgtggcggaggctgcggcgaaagtgctggaaggagcagggcccgggcggccgcggcggggccagctcctcagagctgcgggccttgggcaggccaggggcggcggggccggggcctggctccggggacgcctcggccttggctgggggcccacggcctgtgtcccggtagtcgcggcccggcgcccgtccgtcgcgcacctcgcggcagaagtagcgctggaagaggtcggtgaactgcagcgacaccagctcggcgcgcagcggcgcgtgctgcggatgctcccgggcgaacagccagtactggcgggccagctcccgggccgccgctacggcgtgcaactcacagaactcgctccagccccgcggggccgccgccggggaggctgagggcgcggaagagggcgaggagggctgcagggcaggcccgttcatggcggagacccaggtggtgcggccgggctgaaagacacgtgggtgggggggc

SEQ ID NO: 20182 - DNA, 668 bp, Homo sapiens
  MAP TO AL031658.11; EXPRESSED IN HELA, SIGNAL = 1.6; EXPRESSED IN ADULT LIVER, SIGNAL = 2.2; EXPRESSED IN PLACENTA, SIGNAL = 2.4; EXPRESSED IN BRAIN, SIGNAL = 2.5; EXPRESSED IN LUNG, SIGNAL = 2.2; EXPRESSED IN BONE MARROW, SIGNAL = 2.4; EXPRESSED IN FETAL LIVER, SIGNAL = 1.8; EST_HUMAN HIT: BI002251.1, EVALUE 2.00e-45; SWISSPROT HIT: P80544, EVALUE 8.00e-07
aaagacacagacagacagaccaccaagtggacctagcatccaagacacagacagaccaccgaacagatccagtatccaaagcacagacagacagaccaccaagcagacccagcatccaagacacagacagaccaccaagtggacccagcatccaagacacagacagacagactaccaagcagacccagcatccaagacacagacagacaggcagactaccaagcagacccagcatccaagacacagacagacagacagacagacagacagactaccaagcagacccagcatccaaaacacagacagaccaccaagcggacccagcatccagacacagacagacagacagacagacagactaccaagcagacccagcatccaaaacacagacagaccaccaagcggacccagcatccagacacagacagacagacagacagacagactaccaagcagacccagcatccaagacacagacagacagacagacagactaccaagcagacccagcatccaagacacagacagacagaccaccaagcagaccaagcatccaagacacagacagaccaccaaacagatccagcatccaaggcacagacagacagacagacagaccaccaagcacacccagcatccaagacacagacagacagacagaccactaa

SEQ ID NO: 20183 - DNA, 464 bp, Homo sapiens
  MAP TO U66059.1; EXPRESSED IN FETAL LIVER, SIGNAL = 1.6; EXPRESSED IN LUNG, SIGNAL = 1.4; EXPRESSED IN HEART, SIGNAL = 1.7; EXPRESSED IN HELA, SIGNAL = 0.64; EXPRESSED IN ADULT LIVER, SIGNAL = 1.6; EXPRESSED IN BRAIN, SIGNAL = 1.4; SWISSPROT HIT: P04213, EVALUE 1.00e-07; NT HIT: AF009663.1, EVALUE 0.00e+00; EST_HUMAN HIT: BI824046.1, EVALUE 0.00e+00
tcattactcagttggtgctggtatcactgaccaaggagaagtccccaatggctacaatgtctccagatcaaccacagaggatttcccgctcaggctgctgtcggctgctccctcccagacatctgtgtacttctgtgccagcagttactccacagcgctacaaggccgtctcctctctgcacataaaggcagggaggttctgccctcctcccccacccaagactcagggatgccctgggcagagatctctgcgccaggaaccttggaacccacagtggccccaagtggcctggacagtatgagccttgctctgtgccaggtgcctctgcaggcatctcagccaggcctggactggtcccaggtcctcagatgtctcctttgttgctttctctggtctatccttggagctttccttttggggtggggccagggctttcccagctcctacttttctactcattatc

SEQ ID NO: 20184 - DNA, 1048 bp, Homo sapiens
  MAP TO AC004493.1; EXPRESSED IN LUNG, SIGNAL = 6.2; EXPRESSED IN FETAL LIVER, SIGNAL = 2.6; EXPRESSED IN ADULT LIVER, SIGNAL = 3.3; EXPRESSED IN PLACENTA, SIGNAL = 6.5; EXPRESSED IN HELA, SIGNAL = 6.8; EST_HUMAN HIT: BF829500.1, EVALUE 0.00e+00; SWISSPROT HIT: P50809, EVALUE 4.00e-03; NT HIT: gi14777924, EVALUE 0.00e+00
accgagacctccctctcctggctggtgttctggagcgtgagcgaccactgcgtctagctggggttctagagcgtgagcggccacgtctggctggggttctggagcgtgagcggccacgtctagctggggttctagagcgtgacctgccacttctcctggctggtgatctactacgagacctgcgtcgtactggtgatcgggtcctagatctgcgcctagcaggtgttctagaccgagacctgcccctccgggctggtgttctagaccgagacctacgcctggtgggagttctggatcgtgatctccgcctggcaggtgttctagagcgggacctgccccggcgggctggtgttctagaacgagatctacccctagtggctggggatctagagtgggacctccctcgccttgctgacctagacctgcctcttctctgggtatttctgctcctagaccagcctggtcgctgaggagacctagagcggccacgtcgctgggggcttctagatcttccccacctctgtgcagacctggacctacgccactggggagatcgggatcgagaatgacctctcttggtaggggttcgagaccgagatcgccctctcttagcggtggcagggctacgggacctccccatcctacgggagggggtatgagaatgtgatttatcccgttttgctcggccatgtgagcgattcttagatgtgggagaagaagaaatctctcggtgggaccctggagctggagcaggtttaggactttctggggaagagctggcatgccgagaaactttggtaggttgaggggatggtgggctgctctctgaggaagaagactggggaagtttctcgggagacttaggtggtgaacggtcccgagttggagaggcctcagatggggggttcactggctcctggcttaagggggtggttgcaaggggttgtggggagccgccatgtcgctcagcaaggagcggagtgggagcaggtggttctgggcctgtgctgctcctttccggagaggggctaggtcgagttgcagattt

SEQ ID NO: 20185 - DNA, 703 bp, Homo sapiens
  MAP TO AP000534.1; EXPRESSED IN LUNG, SIGNAL = 4.5; EXPRESSED IN HEART, SIGNAL =   4; EXPRESSED IN BONE MARROW, SIGNAL = 5.3; EXPRESSED IN FETAL LIVER, SIGNAL = 3.2; EXPRESSED IN PLACENTA, SIGNAL = 3.4; EXPRESSED IN ADULT LIVER, SIGNAL = 5.4; EXPRESSED IN BRAIN, SIGNAL = 5.1; EXPRESSED IN HELA, SIGNAL = 4.5; SWISSPROT HIT: O95221, EVALUE 2.00e-47; NT HIT: U53679.1, EVALUE 3.00e-03
ccaacatagctttcaggacaagagtataggatccaataataaagaggaagttaccaaaaataactaatgagcttagagtgtagcaaaacagttggattcttggggcagaaacacaatccaatgcaaatcgtggccctgggtcacacacaacatggtcaataatgtttgggccacagaagggcatctgagagatgagaacaatggggatcaggaaccacagaaatccacaaacccagcacagtatgaccagtttggcatagagatgcccagtcatgatattaggatagagcaagggacggcagatagcaaggtactgatcaaaggccatcacagtcaaaagcaagcattctgatgtacccaaagagaagaagaaataaaactggagaaaacatccagcaaaggagatgttttttttctctgaaaggaagttgaccaacatcttgggaactgtagaagagacataccatatctctaaaaaggagaaatttcccaggaacatgtacatgggagtgtgaagtcgccggtcacaccacaggacaaaagcaatggctccattccctgttatagtcagtgcatatgttgtagtaaagagtgagaagaggaagatctgaattgtccactcacaagagaaaccttggagtataaattcatttacaaaagcaaagctggaatttggctcagagacattcattaggccagtgac

SEQ ID NO: 20186 - DNA, 693 bp, Homo sapiens
  MAP TO AL121889.3; EXPRESSED IN PLACENTA, SIGNAL = 2.8; EXPRESSED IN ADULT LIVER, SIGNAL = 3.2; EXPRESSED IN HELA, SIGNAL = 7.4; EXPRESSED IN LUNG, SIGNAL = 2.9; EST_HUMAN HIT: BI859716.1, EVALUE 0.00e+00; SWISSPROT HIT: P40381, EVALUE 3.60e-01; NT HIT: gi14770824, EVALUE 0.00e+00
cagtaacttggtaattctgtctggccaagtggttgaacactttgatctggagttccgaatcctgtatgcccagtccaagcccatcagccccaaactcctgtctcacttccagagcagcaacaagtttgatcacctcaccaaccgaaaaccacagtccaaggagctcaccctgggcaacctgctgcggatgcggctggctaggctgtcaagtactcccaggaaggcggacctggacccagagatgcccgcagagggcaaggcagagcgcaagccccatgactgtgagtcctctactgttagtgaggaagactacttcagcagccacagggacgagctccagagcagaaaggccattgacgctgccactcaaacagagccaggagaggagatgccagggctgagtgtgagtgaggtgggaacacaaaccagcatcaccacagcatgtgctggtacccagactgcagtcatcaccaggatagcaagctctcaaaccacgatttggtccagatcgaccactactcagactgacatggatgagaacattctctttcctcgaggaactcaatctacagaagggtcaccagtctcaaaaatgtctgtatcgagatcttccagtttgaagtcttcctcctctgtgtcttcccaaggctctgtggcaagctccactggttctcccgcttccatcagaaccac

SEQ ID NO: 20187 - DNA, 802 bp, Homo sapiens
  MAP TO AC025745.1; EXPRESSED IN ADULT LIVER, SIGNAL = 1.9; EXPRESSED IN BONE MARROW, SIGNAL = 1.6; EXPRESSED IN FETAL LIVER, SIGNAL = 1.7; EXPRESSED IN LUNG, SIGNAL = 1.4; EXPRESSED IN HELA, SIGNAL = 3.3; EXPRESSED IN BRAIN, SIGNAL = 1.5; EST_HUMAN HIT: AU140160.1, EVALUE 1.00e-58; SWISSPROT HIT: P31792, EVALUE 2.00e-51; NT HIT: gi9635487, EVALUE 3.00e-09
agtccctcctgctcctttccatcagtccaaacccgacccctctccccagtacccacttcccacctcactcattaacccagtggtgtgggacaccacacccccatccctagctgctcaccatgaccccatcataatccaagacccctccaagtttcccaacgtaccccaataccccatctctctcacccaccaaaaaggcctacaacccattataaacaagctctgctcatgcagtcttcttagaccaactcactctccatataacacccccatccttcctgttaaaaagtcagatggctcttaccgactagtccaagacctctgggctatcaatcaggcagtccttcccattcgcccagtagttcccaatccttatacactcctctcccttattccctccaataccaccaactacaccgccattgacctaaaggatgccttcttcactattcccctgtaccctgactcccaaaacctcttttctttcacctggactgatcctgagacccttcaatcgcaacaactcacatggactgttctccctcagggcttcagggacagccctcacttcttcagacaagctctagcccaagacctcacctccttggaccttgcccccagtggtctccttcaatacatagatgatctccttctttgcagcccctccctagaagatgctcaaactcacactattagccttctaaactttcttgctagcaaaggatatagggtctccctctccaaatcacaactatccaccccaacagtaacacacgtgggagtccaactctccctcggggca

SEQ ID NO: 20188 - DNA, 468 bp, Homo sapiens
  MAP TO AC004841.2; EXPRESSED IN PLACENTA, SIGNAL =   6; EXPRESSED IN ADULT LIVER, SIGNAL = 4.9; EXPRESSED IN HELA, SIGNAL =  22; EXPRESSED IN LUNG, SIGNAL = 8.5; EXPRESSED IN HEART, SIGNAL = 6.4; NT HIT: gi16177082, EVALUE 0.00e+00; EST_HUMAN HIT: AW249645.1, EVALUE 0.00e+00; SWISSPROT HIT: P49241, EVALUE 2.00e-86
gtggttcatatccatcagctcgttcaactttagcacctgtctcgtccccagtggcttttccagaactactgccttcaccatgaagctccatgagctttcccaattcaaacttgggcttcttcagcatttttacttttctaacgaagacatcatggagaggataaatagactggcaagccttttctatgtcttttccaatgctgtctggaatcaatttattgaccacttctttcaagtcatttgtctgcacctctcgggtcatgatttcgatcatcttcttccggatttggcggacctgttggtgctgagcataagaggtcttccgtatctgattgttgcgttttttagtaaaaccaacacagaacagacgaagcaagtaaccatcggtagtcttgacatcaacgtgagcttcaatcattgtctgccattttttgaccatggaacacattttgtcacgggtaagatcca

SEQ ID NO: 20189 - DNA, 454 bp, Homo sapiens
  MAP TO AC007981.31; EXPRESSED IN LUNG, SIGNAL = 1.1; EXPRESSED IN FETAL LIVER, SIGNAL = 1.5; EXPRESSED IN ADULT LIVER, SIGNAL = 1.2; EXPRESSED IN HELA, SIGNAL = 1.2; SWISSPROT HIT: Q04503, EVALUE 2.00e-03; NT HIT: gi14756466, EVALUE 2.70e-02; EST_HUMAN HIT: BI829297.1, EVALUE 0.00e+00
atgaggatgctgtatatgacatcgctaatgacacccacaaggcatgctaacgaggacgctgtagacgacattgcttataaggacaccgtacaagacatcactagcgaggacgctgtatacgacatcgctaatgaggacgttgtatatgacatcgctaatgaggatgctttacaagacatagcgaatgaggttgctgtatatgacatcgctaatgaggacattgtatatgacatcgctaatgaggacgctctatacgacatcactaatgaggacgctgtatacaacatcgctaatgaggacgctgtatatggcatcgctaatgaggatgctgtatacgaattcgctaataagcacgctgtatatgacattgctaatgaggacactgtacaagacatctgtaaaaaagaagatgctgccaatgtaagacacttttctttgtcttgaacagaaatgt

SEQ ID NO: 20190 - DNA, 477 bp, Homo sapiens
  MAP TO AP001731.1; EXPRESSED IN ADULT LIVER, SIGNAL = 1.5; EXPRESSED IN BONE MARROW, SIGNAL = 1.1; EXPRESSED IN HEART, SIGNAL =   2; EXPRESSED IN HELA, SIGNAL =   1; SWISSPROT HIT: P37512, EVALUE 2.00e-03; NT HIT: gi14773269, EVALUE 0.00e+00; EST_HUMAN HIT: BI520674.1, EVALUE 0.00e+00
tcacggatgtagcagttttcgtaattcacagggatccatgatgagcattgagcaggcttgattctcacacacatacgcagtggcctggtcttcctgccttcggagggtactcaggaaaggcagccagtgggacaggaaactcgaggggtccccatcagccagaatcagcaccatgttaggaatgtagacagggtggacgcactgcaccagaactttggtgtccttggcctggcggtctccacagatggtgatctgcctgagggtctgctgctgggctgagagggcacggaccatctccggcaatgccaccgggacatggtgcatgtgctgggagaaggcagtcactaggcacacacacttgtccatccagtccttgtgactcgtgaagctgtgcaaccagagcgggttgtgggctgacacggaattggcgctgggctctggagactgtaatgttttaaactctaggaggaatgtcct

SEQ ID NO: 20191 - DNA, 677 bp, Homo sapiens
  MAP TO AC018554.4; EXPRESSED IN HELA, SIGNAL = 1.6; EXPRESSED IN ADULT LIVER, SIGNAL =   2; EXPRESSED IN PLACENTA, SIGNAL = 1.8; EXPRESSED IN BRAIN, SIGNAL =   2; EXPRESSED IN LUNG, SIGNAL = 2.2; EXPRESSED IN HEART, SIGNAL =   2; EXPRESSED IN BONE MARROW, SIGNAL = 2.5; SWISSPROT HIT: Q9Y2N3, EVALUE 6.00e-05; NT HIT: AE002066.1, EVALUE 1.60e-01; EST_HUMAN HIT: BF900448.1, EVALUE 0.00e+00
aactggcgactccatggcccttggagtagaaactcactgcatgcacctgggccttgtcagtctggttgttttctgtcaagctcttgaggtggacatttccctccaaggtcctgggattgtaccaggaggaagtgaggtttccctgagtctccaggggcctagaggtggaggccgcttccccattgctacaggggccccttttattgtcctcctgcccctgggtctctacctggtctttcacctccgttgcttctttgggctcttctgccctcatctccgtcttcgggagcctggctgggatcacctgctcatcaaatgaaggaagttgaaggttaaacttgcctctgagacgagggatcctcaggggcctgaggtgtccaaacatcgtggagttgcgagcagacagcgcaggtttcttcctcgagggggggctccagaccacaggaggcaggaccctctgtggggtgcccgtgttctgagggctaagacacagcctcataggggcaccatcccacctgtctggaaaagaaggcccaagatgtcgctgacggttgaagagtgggaaatggccccagattccccgggcaggcacaggtgcaggagccgcggggtgagcccggccagctgggaaggcctcacggacaagacgagcaggtggccgatggcatggccaggac

SEQ ID NO: 20192 - DNA, 533 bp, Homo sapiens
  MAP TO AC022374.1; EXPRESSED IN HELA, SIGNAL = 1.4; EXPRESSED IN ADULT LIVER, SIGNAL = 1.7; EXPRESSED IN PLACENTA, SIGNAL =   2; EXPRESSED IN LUNG, SIGNAL = 1.7; EXPRESSED IN FETAL LIVER, SIGNAL = 1.7; EST_HUMAN HIT: AL521707.1, EVALUE 0.00e+00; SWISSPROT HIT: O51157, EVALUE 1.30e+00; NT HIT: AL163303.2, EVALUE 3.00e-61
atagtgactactctgatggacctgggcaaagtaaattgaacaccttctggaaagtattcatcattctggatgccattaaaaacatttatgatcaatgggaggtcaaaatgtcaacattaacaggagtttggaagaagttgattccagtcttcatggatgactttgagggattcaaggcttcagtggaggaagtaactgcagatgtggtggaaataccaagagagctagaattagaagtagagcctgaagatgtgagtgaattgctgcaatctcgtgatcaaactcgaatggatggggagttgctttttacggatgagcaaagagagtggtttcttgaaatggaatctactggtgaaaaagctgtgaacattgttgaaattatcacaaaggatttagaatattacataaacttacttgataaagcagggtttgagaagatagtttccaattttgaaagaagttctactgtgggtaaaatgctatcaaacagcatcacgtgctacagagaaatcttttgtgaaagaagagtcaat

SEQ ID NO: 20193 - DNA, 1229 bp, Homo sapiens
  MAP TO AL161668.1; EXPRESSED IN ADULT LIVER, SIGNAL = 2.5; EXPRESSED IN HELA, SIGNAL =   5; EXPRESSED IN BONE MARROW, SIGNAL = 2.7; EXPRESSED IN HEART, SIGNAL = 3.8; EXPRESSED IN FETAL LIVER, SIGNAL = 2.7; EST_HUMAN HIT: AW024296.1, EVALUE 0.00e+00; SWISSPROT HIT: Q9P2Y4, EVALUE 1.00e-114; NT HIT: gi14751677, EVALUE 0.00e+00
ctacataccctgcgtggcggtcgatcttgcctgggccccagcagcagaggcagagtgccccggtccctcacccgggcgcgggtgcagggaagccagagagcccagcgacctgccccgggcccaggtttcctcctcggcctccaccacctcctcttcttcctcaggctcctccgcacggtgccggcgagcccgggccgggagagcagaggacagcgggcggaagcctccgaagctgcggccgggaccgggctcagcaccctcgccgttgggccggccctcgccagctcgcaggctcaggtagcccaagaggctcgggggctcacggcgctcggccggggtgggagccggggccaagaggagcgctgggcccaacggctcataggccagcaggccgaggtcaggaggctggggggcgcgggcaggcccggaggcaggccccggggcacgcagtgggcccagcttgctggcgtgcaccttcatgtggttcttaaggaaccagggctccttgaagcagcggccgcacaccggacacgcatgatcgaaggaggccttgtgcttacgcatgtggcccttgagaaaccaagactgtgtaaagctctggccgcacacttggcagcggaactccggaggcgctgggggctcctcgggagcggcaggagctggggtcggggttgcctcacgttcgggctccggctccggctccggctgggggactgatctgggttcgggctggggtggaggctgaggctgaggctgaggcggaggcgcagcggaggtggccgccaggggacgctcgggagccccgtgggccgtcaggctgtggtgcagcagctcctcctcctggctggagccgaaactgcacaggccgcacttccagggcctatgcaggatgtgcaggtggcgttcgcgctccgccgaggtgcgaaacttgcctttgcagtaggggcaacggaaggcggacgatgaaggagcctggggccgcgccagaccctcagtggcaggggtggcctgcatgccccctgagcttcgggctctccccagtcgggcctcgcgtagtagcgcgcgctcttccaactccagcaacaggcgtgcagcaggactacgtgggcgctcgggctggtgtgtgcgcaggtgcgagcgcagcagagcccgctgcgccgcgcggtggccgcagtgagggcactggaaggcctgggctcctgggtgcgcccgcaggtgcaaagcaagga

SEQ ID NO: 20194 - DNA, 549 bp, Homo sapiens
  MAP TO AC004821.2; EXPRESSED IN PLACENTA, SIGNAL =   2; EXPRESSED IN HELA, SIGNAL = 4.5; EXPRESSED IN ADULT LIVER, SIGNAL = 1.3; EXPRESSED IN BRAIN, SIGNAL = 1.5; EXPRESSED IN HEART, SIGNAL = 3.9; EXPRESSED IN BONE MARROW, SIGNAL = 1.4; EXPRESSED IN LUNG, SIGNAL = 7.3; NT HIT: gi13647324, EVALUE 0.00e+00; EST_HUMAN HIT: BF855855.1, EVALUE 0.00e+00; SWISSPROT HIT: P18146, EVALUE 6.00e-83
gcgaaggctgctgggtgcggctctccaggccctggaagggcttctggtctggggtgcccaggcccagatccccctgctgctgtggaaacaggtagtcggggatcatgggaacctggaagccacccttggcggcagggtaggcaggaggcgggtactggagcgctgtccctgccgagcccgggaaggcctggctttgtggctcagggaaaatgtcagtgttcggcgtggggaaggtgggtgccgctgagtaaatgggactgctgtcgttggatggcactgcgcagctcaggggtgggctctgggaggcggaggcggaggaggccgctggagatggtgctgaggacgaggaggccggtgggttggtcatgctcactaggccactgaccaagctgaagaggggctcgggccacaaggtgttgccactgttgggtgcaggctccagggaaaagcggccagtataggtgatggggggcagtcgagtggtttggctggggtaactggtctccaccagcaccttctcgttgttcagagagatgtcaggaaaagact

SEQ ID NO: 20195 - DNA, 1032 bp, Homo sapiens
  MAP TO AC000357.1; EXPRESSED IN ADULT LIVER, SIGNAL = 1.5; EXPRESSED IN PLACENTA, SIGNAL = 1.9; EXPRESSED IN HELA, SIGNAL = 1.5; EXPRESSED IN BRAIN, SIGNAL = 1.6; EXPRESSED IN HEART, SIGNAL = 1.8; EXPRESSED IN BONE MARROW, SIGNAL = 1.4; EXPRESSED IN LUNG, SIGNAL = 1.6; SWISSPROT HIT: P53352, EVALUE 1.50e-01; NT HIT: gi16177842, EVALUE 0.00e+00; EST_HUMAN HIT: AW500001.1, EVALUE 0.00e+00
ctttctcatttcctgctgtaactgagcctggaaatggctcttaaggcgggcagcctcttcctgaagttcttgcagccggggatctggctgattcttctcatctcgaatggcctgcagttcacttttcagctcctccacctcacgggtcagctgcttggtctgcagttcaaatccttccatctgttcagctgcatatgctcgtcctgccaaggcttctcgggtctcttctaacctaagctccaagtcctggcgctgggtcctctcctcctgcagcagcttctggagctcacgcagcatcaaggcatggtcactctgctcttgggcccgatcatgctgctgcgtgataagccgggctttggtttctgctatttgctcctgcagccccttcaattctccctccaggcgggccctctcctcctccgccttgttactggcatcctctaagtcctgtttcatctttttcttgtcagccaagtaagaagcctccatgcgggacttctcctgagtgactgtagccaaagaactggtcaaagtagccaactgagtcttcagctggtgcagtcttttgtccacctccccacctgcaaatggcccatccccactgctactgctaacgccactctcggaccaactggcctcttcggactttggaggtggtggtccacgggccggtctgtcatcttctaccccaaactcacccttggtgctggtgagactggccgcagtatccaagctagtggcggtcccagtgctatcctcgctgtgagtggagcaccggtcatccacagagtcaggaaaggtgaggcctggaagctggacacctgcgaggcccacatctgcctcgtgggataccgacagcaccttgatgctggcctctaatgcctctttctccttcagcaggcttttataggcacggaccacatccttgagccgtgcctggtactggagaagctgcttcttctgggtctctatagtctccagcaagtccttcttgctcgggccgcccccgaaattcatcccaaacttctccat

SEQ ID NO: 20196 - DNA, 1905 bp, Homo sapiens
  MAP TO Z97183.1; EXPRESSED IN BRAIN, SIGNAL =   1; EXPRESSED IN HELA, SIGNAL = 1.2; EXPRESSED IN ADULT LIVER, SIGNAL = 1.2; EXPRESSED IN BONE MARROW, SIGNAL = 0.93; SWISSPROT HIT: P18730, EVALUE 6.00e-15; NT HIT: gi11417515, EVALUE 0.00e+00; EST_HUMAN HIT: AL523145.1, EVALUE 0.00e+00
atggagccatctcctctgtctcccagtggggcagcacttcccctgccgctgtcgctggctccgcccccactacccctgccagcagctgcagtggtacatgtgtccttccctgaggtgaccagtgccctcttggagtccctcaatcagcagcgtctgcagggccagctctgcgatgtatctatcagagtgcagggccgggagttccgggctcatcgggctgtcctggctgcctcctccccttacttccatgatcaggtcctactcaaaggcatgacctccatctcgctgcccagtgtcatggacccaggcgcctttgagactgtcctagcctccgcttacactggccgcctcagcatggctgctgctgacattgtcaacttccttacagtggggtctgtgctccaaatgtggcacattgtggacaagtgcactgaactactccgagaaggccgggcctcagctaccaccaccatcactactgctgcagccacctctgtcactgtccctggtgctggggtgccatccgggagtgggggcactgtggcccctgctaccatgggctctgcgcgctcccatgcctccagccgggccagtgagaatcaatctcccagcagcagcaactacttcagccccagggagtccactgatttctcatcttcctcccaagaggcatttgcagcttctgcagtgggcagtggggagcgtcgaggaggtggccctgtattcccagcccctgtcgttggcagtggaggggccacatctggaaagctgctgctggaggcagatgagctgtgcgatgatggtggggatgggaggggggcagtggttcctggggctgggctccggagacccacctacacaccccctagcatcatgccacagaaacactgggtatacgtgaagcgaggtggtaattgcccagcgccaacacccctggttccccaagacccagatctggaggaggaagaggaggaggaagatctggtgttgacctgtgaggatgatgaagatgaagaactagggggtagctccagggttccagtggggggagggcctgaggctaccctcagcataagtgatgtccgtaccctgagtgagcccccagacaagggggaggagcaggtcaacttctgtgagtcctccaatgactttggcccatatgagggtgggggtcctgtggcaggtcttgatgactcaggggggccaactccctcttcctatgccccctcccaccctcctcgaccgctccttcccttggacatgcagggcaaccagatcctggtcttcccgtcgtcgtcttcatcctcatcctcacaggctcctggccaaccaccagggaaccaagcagaacacggggcagtgaccgtggggggcacgtcggtggggagcctgggtgtgccgggtagcgttggtggggtccctggagggactggcagtggggacgggaataagatctttctgtgccattgtgggaaggccttctcccacaagagcatgcgggaccggcacgtgaacatgcacctcaatctgcggccgtttgactgccccgtgtgcaacaaaaagttcaagatgaagcaccatctgactgagcacatgaagacgcacacaggtctcaagccctacgagtgcggagtctgcgccaagaagttcatgtggcgagacagcttcatgcgccaccgaggacactgtgagcgccggcaccgcctgggcggggtcggggccgtacctgggcctgggactcccacggggccatccttgccgtccaagagagagtctcccggagtgggcgggggcagcggcgacgaagcgagtgcggccacgcccccgtccagcagacgtgtctggtccccacccagagtccacaaggtggagatgggcttcggtggaggtggaggagcaaactga

SEQ ID NO: 20197 - DNA, 810 bp, Homo sapiens
  MAP TO AF260011.1; EXPRESSED IN PLACENTA, SIGNAL = 2.3; EXPRESSED IN HELA, SIGNAL = 1.4; EXPRESSED IN ADULT LIVER, SIGNAL = 2.2; EXPRESSED IN BRAIN, SIGNAL = 2.2; EXPRESSED IN LUNG, SIGNAL = 2.4; EXPRESSED IN HEART, SIGNAL = 2.7; EXPRESSED IN BONE MARROW, SIGNAL = 2.6; SWISSPROT HIT: O94822, EVALUE 0.00e+00; NT HIT: AL163248.2, EVALUE 0.00e+00; EST_HUMAN HIT: AU156791.1, EVALUE 0.00e+00
cttggttagatcatccaagactttttttctttccatatcattgtcacagcaccggagagcactgtacaaaatgtccaccaggaaaccaaaatccttcctttgatcttcatttagccaacctatcagtttctggtataaaaactgcaccgcaggatttttttgtacaagcttggctatttcaagaggtttggcttggacaatactctgtttttcatcaccaagtagcattttaaatactcggcttgaagaaaaggagtcaagcagagtagaaagaaaccttagatgttgctctgactttcgttcattgacataattaatacttatatctgcgagtttacagactaagtcttccaaaggttttttccttagaggagacaaaaggcctgaagaattatgagtgagagaaggttcagttgttaattcccagccttcaatcttctctccttctgaagatacacatttttcattctctttattgctttcaagtatctcatcagcaaatctaaccttaccatttttttttttacttgacttcaatgagctcttcggcttctgaagcacctgtaataggttagatacacccaaaacggactcaacatcagcttctggctcactgattttcgcaacacagatctctgacagtctttcccagaaatgtatcagtacgttctccaagttgtgagctgttttttcatctttttccgtgtctgctttggcttcccaggaacttagagtttctgctaaatggttaaatagctgcccatgttgcaatcctgggtctttgagaactgcatcaataaaagggatcaa

SEQ ID NO: 20198 - DNA, 1206 bp, Homo sapiens
  MAP TO AC003665.1; EXPRESSED IN LUNG, SIGNAL =   5; EXPRESSED IN HEART, SIGNAL = 6.6; EXPRESSED IN BONE MARROW, SIGNAL =   7; EXPRESSED IN FETAL LIVER, SIGNAL = 7.2; EXPRESSED IN PLACENTA, SIGNAL = 8.5; EXPRESSED IN ADULT LIVER, SIGNAL = 5.3; EXPRESSED IN BRAIN, SIGNAL = 6.2; EXPRESSED IN HELA, SIGNAL = 7.3; EST_HUMAN HIT: BE146280.1, EVALUE 0.00e+00; SWISSPROT HIT: Q02447, EVALUE 4.00e-44; NT HIT: AJ275988.1, EVALUE 0.00e+00
gtcccgtctgaggtgcccctgaccgtccctgccctcaccccaccccggatcccggcaatgctaaccgctgtctgcggctctctgggcagccagcacacggaagcgccgcacgcctccccgccgcgcctcgacctgcagcctctccaaacttaccagggccacacgagccctgaggccggggactacccctccccgctgcagcctggagagctgcagagcctcccgctgggcccggaggtggacttctcgcagggctatgagctgccaggggcctcctcgcgggtaacctgcgaggacctggaaagcgacagtcccttggccccgggccccttttccaagctcctgcagccggacatgtcacaccattatgaatcgtggttcaggccgactcacccaggcgcggaggatggctcgtggtgggaccttcatccgggcaccagctggatggacctcccccacactcagggcgcgctgacctcacctggccacccgggggcgcttcaggcgggcttggggggctacgtcggagaccaccagctttgtgccccgccaccccacccgcatgcgcaccacctccttccagctgccggagggcagcatctcctagggccgcccgacggggctaaggccttggaagtagccgccccggagtctcaagggctggattccagcctggacggggcggcgcgtcccaaaggctcccggcggtcggtgccccgcagctcaggccagaccgtctgtcgctgccccaactgtctggaggcggagcgactgggggctccatgtgggcccgatgggggcaagaagaagcatttgcacaactgccacatcccgggctgcgggaaagcctacgccaagacgtcgcacctgaaggcgcacctgcgctggcacagcggcgaccgtcccttcgtgtgcaactggctcttctgcggcaagcgcttcacgcgctcggacgagctgcagcgccacctccagacccacaccggcaccaagaagttcccctgtgcagtctgcagccgcgtcttcatgcgcagcgaccacctggccaagcacatgaaaacccacgagggcgccaaggaggaggcggctggggcggcctcgggagagggcaaggccggcggcgcagtggagccccccgggggcaaaggcaaacgcgaggccgagggcagcgtggctccctccaactgagctcctcagtgccgcctc

SEQ ID NO: 20199 - DNA, 1427 bp, Homo sapiens
  MAP TO AJ132410.1; EXPRESSED IN LUNG, SIGNAL = 1.6; EXPRESSED IN BONE MARROW, SIGNAL = 1.3; EXPRESSED IN ADULT LIVER, SIGNAL = 1.4; EXPRESSED IN HELA, SIGNAL =   2; EXPRESSED IN BRAIN, SIGNAL = 1.3; EST_HUMAN HIT: BF125511.1, EVALUE 1.00e-117; SWISSPROT HIT: P08572, EVALUE 1.00e-03; NT HIT: gi15297880, EVALUE 0.00e+00
ctgtctgcagcatggataagtatgacgacctgggcctggaggccagtaaattcatcgaggacctgaacatgtatgaggcctctaaggatgggctcttccgagtggacaagggtgcaggcaacaaccccgagtttgaggaaactcgcagggtgttcgccaccaagatggccaaaatccacctccagcagcagcagcagcagctcctgcaggaggagactctgcccagggggagtagaggccctgtcaatggagggggccgcctgggcccacaggcccgttgggaagttgtgggcagcaagctgactgtggatggtgctgccaagcctcctcttgctgcctcgacaggggcacctggggcagtcaccaccctcgctgctgggcagcccccgtacccaccgcaggagcagagatccaggccatacctgcatggcacgaggcatggcagccaggactgtggttccagggagagcctggcgacttctgagatgtctgctttccaccagccaggcccctgtgaggatccttcctgcctcactcatggagactattatgacaacctctccttggcaagcccaaagtggggtgacaaaccaggagtgtcccccagcatcggcctgagtgtagggagtgggtggcctagctccccggggagtgacccaccactgcccaaaccctgcggggaccatcccctaaatcaccgacagctctccctgagctccagcaggtcttctgagggtagcctcggtggtcagaatagtggcattggtggccgcagcagcgagaagccaacaggcctttggtccactgcctcctcccagcgggtgagccctggcctgccttccccaaacttggagaacggagcaccagctgtggggcctgttcagcccaggactccttctgtgtcagcacccttggccctgagctgccccaggcaaggaggtcttccaagatcaaactcggggctggggggtgaggtttcaggtgtgatgtccaaacccaatgtggacccccaaccctggttccaggatgggcccaaatcttacctttccagttctgccccgtcatcctcgccagctggcctggacggttcacagcagggtgcggtccctgggctggggccgaagcctggctgcacagaccttggcactggtcccaagctcagccccaccagtcttgtccatccagtgatgtccaccctgcctgagttatcttgtaaagagggtcccctgggctggtcttctgatggtagcctgggatctgtgctcctggacagccccagctcccctagggtaaggctgccctgccagcccctcgtcccaggtcctgagctgagaccctctgctgctgagttgaaattagaagccctcacccaacgtctggagcgagagatggatgctcacccgaaggctgattactttggtgagtga

SEQ ID NO: 20200 - DNA, 660 bp, Homo sapiens
  MAP TO AL121917.12; EXPRESSED IN LUNG, SIGNAL = 1.1; EXPRESSED IN HEART, SIGNAL = 1.2; EXPRESSED IN BONE MARROW, SIGNAL = 1.3; EXPRESSED IN FETAL LIVER, SIGNAL = 1.3; EXPRESSED IN ADULT LIVER, SIGNAL = 1.3; EXPRESSED IN HELA, SIGNAL = 0.97; NT HIT: AJ251760.1, EVALUE 0.00e+00; EST_HUMAN HIT: AI393646.1, EVALUE 0.00e+00; SWISSPROT HIT: P24127, EVALUE 1.70e-02
cggttccccggcggccctgctgcccgcaggcagagtccgccgcattacctagaagcagcaggcggtgcgtacacatgtagcccatcttttcgtcctggagttgtttgtcgatgagcttactgcgtttcttctctgcgcgcttctgggcccgcttctccagggcttctttgcgcatctgtctgcgcttctccgccaggggtaccttcttgaccttgagagagcgcgaggctttgggctggggactctcagatcgaccgaagcagcccccgaaggcttgcacgagaaagttgcggagtaagttgcgctggggctttcggcggcggcgatttcgccgatgctgaaaccagcggaggcatccggaggtcccatcgtcggactcgtctccgctggagtcatcgtcgctgctggccaccccttcatcgtagtacacgcggcggccgcggctgctctcggacttgccccgccaggcagacgcgcgagtaggccgcggagtaggcggatcggcagcctggatctcggggctggggggtctgagatggatcttgcgtctggccccggaggcaggggctgcagaggccgcccggcggacttgggctgcccgggtggcagaagcggctggggcagtgggagcccctgcgtctggcgcagctggggcgacat

SEQ ID NO: 20201 - DNA, 577 bp, Homo sapiens
  MAP TO AL162390.2; EXPRESSED IN FETAL LIVER, SIGNAL = 3.3; EXPRESSED IN HEART, SIGNAL = 5.3; EXPRESSED IN LUNG, SIGNAL = 5.4; EXPRESSED IN ADULT LIVER, SIGNAL = 2.4; EXPRESSED IN PLACENTA, SIGNAL = 2.1; EXPRESSED IN HELA, SIGNAL = 2.4; NT HIT: gi13641684, EVALUE 0.00e+00; EST_HUMAN HIT: AI091332.1, EVALUE 0.00e+00; SWISSPROT HIT: Q13886, EVALUE 2.00e-86
ctgtatgcactctgtaatgggctttgagatgggaggattttccatagactttcccacagccactgtaggggcacttgtgcctcttttcggaggcgtgtttccccttcgcagccactccaggatggaggagggagagcgggctgggcgcgctgccaggatcctgtctctcctccgggctgtgggaaggactcgacccagattcggtggtcacgtcgctgtcggatcccatatcctcatctggactttccagactgtcgctgcacacggagggggtctggatgggtcggtacttgttcaggtccaacaagctcttggcgatggtgaccagtgtgcagtaatccttccaggtgtcccccgggtcaccgtgctccttggtcacctcgcgctcaggtagtcgcagccgctcggcgtccggagcgaccccatgctccggcaccgcagcgcggttcgaaatggaaaccagacactgggcagccacgaagtccatgtaggcggccgcggacatggtgcgggcgacggcagcccaggcggcgcggacaaacttggcggtggctgcggaggttcggctcgccctgcc

SEQ ID NO: 20202 - DNA, 730 bp, Homo sapiens
  MAP TO AL121917.12; EXPRESSED IN HELA, SIGNAL = 1.7; EXPRESSED IN ADULT LIVER, SIGNAL = 1.8; EXPRESSED IN PLACENTA, SIGNAL = 1.8; EXPRESSED IN BRAIN, SIGNAL = 1.4; EXPRESSED IN HEART, SIGNAL = 1.4; EXPRESSED IN BONE MARROW, SIGNAL = 1.6; EXPRESSED IN LUNG, SIGNAL = 1.7; SWISSPROT HIT: Q9TST4, EVALUE 3.30e+00; NT HIT: gi14786491, EVALUE 0.00e+00; EST_HUMAN HIT: BG724132.1, EVALUE 0.00e+00
ctgaatccatgaaaacaaggagaatctggacggcgtcctccattagtgacgccggatggggatgggtccctttttggaaggggactccggggacgcgtcacggcgggtgggcttctttggcttgcagcgacgccgctgcttctcctccttgggctccttcgactcttcggggtcccttggatctttgtcctcgggcttgagctcctccccttccctggggctctggggctcctgagtgctgggcggcgcgcgacttggggaggcgtcggggcttcgcaacttgagagcgtgcagacgctgggtgagggactggccgaaggtggagtgcttgggcaccaccgggccgcgatcgtcttcaggctcggtctcgggctcagtggtgggggcggtctcaggctcggtctcgaagtcggtctcggactcgatttcggactcggtctcgctctcggtctcgtagtcgaactcttcctcgtactctaggcactcggggagggacagctcaaggtctgcctcctcgtgctcgtggtcagattccgattcgggggactcagggaatacctgggcgccggagcggtggtgggcgttaaggaagctccggcgctgttgggcagccgcgcgctgctgggcacgggcgttggaggtggcaagggcgcggaggagcgcgatggagcaggagagccagaggagcgcggtggctgcccggcggcctatgggcgggcacaggtcgttg

SEQ ID NO: 20203 - DNA, 1069 bp, Homo sapiens
  MAP TO AH005332.1; EXPRESSED IN ADULT LIVER, SIGNAL = 3.5; EXPRESSED IN BRAIN, SIGNAL = 3.9; EXPRESSED IN PLACENTA, SIGNAL = 5.8; EXPRESSED IN LUNG, SIGNAL = 5.2; EXPRESSED IN HEART, SIGNAL = 4.2; EXPRESSED IN BONE MARROW, SIGNAL = 3.5; EXPRESSED IN FETAL LIVER, SIGNAL = 3.3; SWISSPROT HIT: P00519, EVALUE 0.00e+00; NT HIT: gi16161280, EVALUE 0.00e+00; EST_HUMAN HIT: BE792369.1, EVALUE 0.00e+00
gctggtgaaaaagaatgaggaagctgctgatgaggtcttcaaagacatcatggagtccagcccgggctccagcccgcccaacctgactccaaaacccctccggcggcaggtcaccgtggcccctgcctcgggcctcccccacaaggaagaagctggaaagggcagtgccttagggacccctgctgcagctgagccagtgacccccaccagcaaagcaggctcaggtgcaccagggggcaccagcaagggccccgccgaggagtccagagtgaggaggcacaagcactcctctgagtcgccagggagggacaaggggaaattgtccaggctcaaacctgccccgccgcccccaccagcagcctctgcagggaaggctggaggaaagccctcgcagagcccgagccaggaggcggccggggaggcagtcctgggcgcaaagacaaaagccacgagtctggttgatgctgtgaacagtgacgctgccaagcccagccagccgggagagggcctcaaaaagcccgtgctcccggccactccaaagccacagtccgccaagccgtcggggacccccatcagcccagcccccgttccctccacgttgccatcagcatcctcggccctggcaggggaccagccgtcttccaccgccttcatccctctcatatcaacccgagtgtctcttcggaaaacccgccagcctccagagcggatcgccagcggcgccatcaccaagggcgtggtcctggacagcaccgaggcgctgtgcctcgccatctctaggaactccgagcagatggccagccacagcgcagtgctggaggccggcaaaaacctctacacgttctgcgtgagctatgtggattccatccagcaaatgaggaacaagtttgccttccgagaggccatcaacaaactggagaataatctccgggagcttcagatctgcccggcgacagcaggcagtggtccggcggccactcaggacttcagcaagctcctcagttcggtgaaggaaatcagtgacatagtgcagaggtagcagcagtcaggggtcaggtgtcaggcccgt

SEQ ID NO: 20204 - DNA, 1259 bp, Homo sapiens
  MAP TO AL050328.24; EXPRESSED IN BRAIN, SIGNAL = 6.6; EXPRESSED IN ADULT LIVER, SIGNAL =  17; EXPRESSED IN PLACENTA, SIGNAL =  10; EXPRESSED IN FETAL LIVER, SIGNAL = 5.5; EXPRESSED IN LUNG, SIGNAL =  14; EXPRESSED IN HEART, SIGNAL =  13; EST_HUMAN HIT: AW440310.1, EVALUE 0.00e+00; SWISSPROT HIT: P18749, EVALUE 2.00e-40; NT HIT: Z48051.1, EVALUE 0.00e+00
ttatttatgtttcaagatgctcactgcctcctttgttttgtctcctttgcaggccttctctcttaggcctcttctcctgggggtatggatcctggggggagattgatcacctccatgcttccattcctccccagccatagtggggacatcatgagagaagccaagccactggcccaggatcacccggcatttatggtggctgctctggcacaggtccttgcctttatagcccctccagtgatccataaggccctctttctccccaaaggagaggtcacagatagggcaaaggtagctcttctgcttccagtgggtctgctggtgtctgaccagcctggaaaatgagctgaaagacttgctgcaatggaagcagtagttgggcggctctgtgaggtgggccttctggtgtctggagagataggatttcttgctaaaagtcaaagaacaatgggggcaacagaagacattgagtcttgagggcttcactggatgagagttggatctggcaacctgacagagggttccagtgatgggtgcctgggtcctggtcacaggtgcttggttcttaagtacagatgcctggttctgggccataggaccctcagttctaaatatgggttcctgggacctggccactggtgcatggttcacatccaaaagcccctggatggacctctggcttctggcgatgggtgtctggaattcagcctgggtgcctggaatcctcaaagtacactcctggtttccatccactggctcctggttttggtgtatcttctggtggcgtttgagctcagactggtcccggaagctcttcccacacacagagcatgaatggggccggtaacccagatggacgcggcggtgacgacttagtccagaagcatcacagtaggtcttgtcacagagcgtgcaacagaagggcctctccccaagatgcatgcgtctgtgatagctgagggacttggggctccgaaacaacttcccacactgactgcagctgttagtcagcttgggattgtgaacaaactggtggctatagaggtaggagcgcctgctgaaacatttgccacaggtgtagcaaaaaaagggtggcccagcctgggatgcttgaagcacccgggtcctgtccatagtcccagctggggcagatagggggcactggccggcccctctgcatgcaaggaagaccttgtcatcactagtcccctcatctctcagactgggatgttgttctcgaagctctttcttcttgcctt

SEQ ID NO: 20205 - DNA, 1650 bp, Homo sapiens
  MAP TO AC004232.1; EXPRESSED IN ADULT LIVER, SIGNAL = 2.4; EXPRESSED IN BRAIN, SIGNAL = 2.6; EXPRESSED IN HELA, SIGNAL = 4.4; EXPRESSED IN BONE MARROW, SIGNAL = 2.9; EXPRESSED IN LUNG, SIGNAL = 2.5; EXPRESSED IN FETAL LIVER, SIGNAL = 2.6; EST_HUMAN HIT: AV729575.1, EVALUE 0.00e+00; SWISSPROT HIT: P07199, EVALUE 3.00e-19; NT HIT: gi14777888, EVALUE 0.00e+00
ctaatgattagaaccagaagttgaaggcccactgaaggagtccttaatattatgaggcctaggtttcaaaaagctaccaattctagaatggattttactctggaactgtttcttgactatttcttgttgcatctctttcagtgtgaagtggaatctctgaaactcaggtgtggcatcaacaaagtcaagaaggtagtccaaactctctcttacagcagataatttaaattcagcagtctgcttctcagcttctcctcctttttgaacaacttcctttgttattccacctttggtttttaggagacaacccttttcttcatctccatttaaccacaccctatcatcatccaacttagtttccaactccccacatttttcaagaatttctctataatccccatgttctaagccttgaaaatcatattcaggttcctttttgtaaagaagattttcccatgcatttgctatggttatttgttttacttcttcccaactttttgcccagttaaaaattgcactttttatattgtagattttaattttggaaactcctttatctcctttctcttgctcatcatcactttcttcaaatattacaagactctcttcaagttgcttccatctatacagccgtttgcagctcaagatcacaccttgattcattggttgaatcaaggttgaagtgttatgggggaagaacatacattttattcgaccatcctcactggttagggattcagaggaaggatgagccgggcaactgtccagaagtaacaatgccctgacgtcctcgtcatgaaatcttagaacattaagttgaaaatgtcggacctcaggaacaaagttttgaaaaaaccattctgaaaacaattctctggtgaaccaaacatctttactgggtttatatatcacaggcaatgtacttgtgtcctctttcacacttttgggcagttttgattttccaataatgattgactttaatttatgagttccgtctgcatttgcacataaaaaggcagacaacctttctttgtttattttcttccctggtaggcagatatctttcctacttgcctgagaattttctggcattgacttccaaaagaggtctgtttcatccccactgtatagctgagctagacacagtttctcctctttgattatcatggacagtttttgtcgaaatggctcaacattttcagaaactgaacttaggacttgttccccacatccttttcggttcccaattgcatgccgatttcgaaatctaaaaagccaaccagtgctagctttgaaatctgttcgcccaaaacaccgtgcaaatctctctgcagcagcctgaagctccacgcctcttaccggaacaccggctgagcgtttctgttggtaccacatgtagaccgcatcatctacatcaccatatttggctcccgttgtcctctttctcttctcagcccctactaatggcatgtcctgcttcagtacaaagtccagaattaacttcttattttttttaatgtcataaaatgttgacttactgattccaaattcatccattacacttttaagtgatcgtccagcttcaattctacttagaaccttcattttctcctccaaattcagtgttgtatatttccctctcttattcat

SEQ ID NO: 20206 - DNA, 659 bp, Homo sapiens
  MAP TO AC009962.1; EXPRESSED IN ADULT LIVER, SIGNAL = 3.3; EXPRESSED IN PLACENTA, SIGNAL =  16; EXPRESSED IN BRAIN, SIGNAL = 0.81; EXPRESSED IN LUNG, SIGNAL = 2.6; EST_HUMAN HIT: BG775089.1, EVALUE 0.00e+00; SWISSPROT HIT: P05783, EVALUE 8.00e-67; NT HIT: gi4557887, EVALUE 0.00e+00
gaagagcagctcctccttgagagcctccatctctgtctccagtggcagccaagtgacattggtcatcagtgaccttgtggagcccatggatgtcactccccacagacgggtgcatggccagctctgtctcatacttgactctaaagtcatcggctgcaagacaggcattgtcaatctgcaaaacgatgccggcattgtccacagtatttgcgaagatctgaaccctcaggtcctcgatggtcttgaggtaatgactccagtctctgacctggagtcccttcttctccaggtgctcccggattttgctctccagcttccggttcttggtctccaggctcctcactctgtccaggtaggaggccagacggtcattcaggctttgcattgtctccttcttattctggatgcctcccattcctgccagacccccggccatccccgcggccaggtccccggaccccatgccaccccggaagctggtggagcgggacacggatatccgggaaccagagcccccggcgcctgcatagacgctggccatgcagctggccggccgggcgccgtagttggacacctggacagagcccaggaacaggtagttggtggagaagatggagcgagtggtgaagctcatgctatccagggaggagagtgagagg

SEQ ID NO: 20207 - DNA, 965 bp, Homo sapiens
  MAP TO AC000064.1; EXPRESSED IN LUNG, SIGNAL = 2.6; EXPRESSED IN BONE MARROW, SIGNAL = 3.1; EXPRESSED IN HELA, SIGNAL = 3.3; EXPRESSED IN ADULT LIVER, SIGNAL = 2.9; EXPRESSED IN PLACENTA, SIGNAL = 3.7; EXPRESSED IN BRAIN, SIGNAL = 3.8; EXPRESSED IN HEART, SIGNAL = 2.3; NT HIT: gi9635487, EVALUE 0.00e+00; EST_HUMAN HIT: BE150340.1, EVALUE 0.00e+00; SWISSPROT HIT: P10272, EVALUE 1.00e-50
ccgaagtgcagggctgtgcagtcggaattcttacacaaggaccgggaccatgccctgtagcctttttgtccaaacaacttgaccttactgttttaggctcgccatcatgtctccatgcggtagcttccgctgccctaatacttttagaggccctcaaaatcacaaactatgctcaactcactctctacagctctcacaacttccaaaatctattttctttctcacacctgacgcatatactttctgctccccggctccttcagctgtattcactctttgttgagtctcccacaattaccattcttcctggcccagacttcaatctggcctcccacattattctggataccacacctgaccctgatgattgtatgtctctgatctacctgacattcaccccatttccccatatttccttcttttctgttcctcatgttgatcacatttggtttactgacggcagttccaccaggcctgatcgccactcaccagcaaaggcaggctatgctatagaatcttccacatccatcattgaggctactgctctgcccccctccactacctctcagcaagccgaactgattgccttaactcgggccttcactcttgcaaagggactacacgtcaatatttatactgactctaaatatgccttccatatcttgcaccaccatgctgttatatgggctgaaagaggtttcctcactacgcaagggtcctccatcattaatgcctctttaataaaaactcttctcaaggctgctttacttccaaaggaagctggagtcacacactgcaagggccaccaaaaggcgtcagatcccattactctaggaaatgcttatgctgataaggtagctaaagaagcacctagcgttccaacttctgtccctcatggccagtttttctccttcccatcagtcattcccacctactcccccattgaaacttccgcctatcaatct

SEQ ID NO: 20208 - DNA, 467 bp, Homo sapiens
  MAP TO AC007262.4; EXPRESSED IN HELA, SIGNAL = 2.5; EXPRESSED IN BRAIN, SIGNAL = 1.2; EXPRESSED IN ADULT LIVER, SIGNAL = 1.3; EXPRESSED IN FETAL LIVER, SIGNAL = 1.2; EXPRESSED IN HEART, SIGNAL = 1.3; EXPRESSED IN LUNG, SIGNAL = 1.3; EXPRESSED IN BONE MARROW, SIGNAL = 1.2; NT HIT: AB051488.1, EVALUE 0.00e+00; EST_HUMAN HIT: AA658421.1, EVALUE 2.00e-90; SWISSPROT HIT: P53399, EVALUE 8.30e-01
agtaattactctgaatcctccttctggggatgaaagacaatgcaaaattgaattacatgttaagcatatgtgtaaagacaccatgtcatttcctttgaactcacctggacagcaatctggatcaaagatactagggcaactgactactgattttgtccatcactacattgttgccggtgacttttcagagctttttcatttgccatccttgagaaagtacaaaaccagacatcttgttttgaaagtaattttaaatatatctgaaaatccaactgcagccagagacatgatcaatatgaaggcactggcagcatcaaaactcatctttaaccataaagaggcaaaagccagtcttgttagtggtgtggccatatttattaacataaaggagcatatcagaaagggctcaattgtagttgttgatcacttgagttataatacactcatgggcattctcagggaagtta

SEQ ID NO: 20209 - DNA, 1333 bp, Homo sapiens
  MAP TO AC008727.5; EXPRESSED IN PLACENTA, SIGNAL = 1.5; EXPRESSED IN BRAIN, SIGNAL =   2; EXPRESSED IN ADULT LIVER, SIGNAL = 2.1; EXPRESSED IN BONE MARROW, SIGNAL = 2.2; EXPRESSED IN LUNG, SIGNAL =   2; EXPRESSED IN HEART, SIGNAL = 1.5; EXPRESSED IN FETAL LIVER, SIGNAL = 1.9; SWISSPROT HIT: Q9JIX9, EVALUE 4.00e-03; NT HIT: gi14729751, EVALUE 0.00e+00; EST_HUMAN HIT: AL557123.1, EVALUE 0.00e+00
cttgcagccgttgaaggaaaagaggcttgaatatttttgccagaaagttgactggatggcattcattaagtgaacatgaatgaagaagtttcaataatgatttgggtggaaaataattgaaatgagtgaatagcacgttttccagctttctaaataaagcagaggcatttggtggcaaataattgagtttcccaaatggttccattaaggcagaaatctgacgaggtgaaaatttttctgtttggcaaacaaaagtttctgccactgcattgaggatgggttttgaaagaatcagttctctactgcagtactccatgaccctgcagacaacttcaggatccaacgtgaggcacaccgcagctacacgatgctctagggcttttgtaaaaaatgtgtcatggtgcccaaaatatatgaacgcctccaagactctcctaagctcctcgttagtgaaatgtgggacatgcctcacgacatatttgcccaattttataatcagaggaaatgcttgactttgatcaagaaccaccagggcagtgagcatttggctaatcaatttaggactcaggttggaaactattgatagggaaaagttgtttatcttatttaaaaatgtttggtgttcatccactttttcagtacatgcctgcaagattctataaagggccacaatatcctccggggtaaatgtttccaatttttcaccttgaagttgatttataatgagttctagtgtcacacaacctgaactgtgcagtgtaatcagactttccccaagaatacaaagattgcgaacttccatgccaccttttctgagacgattttggcattctgccaccaggttcagcaacaggctactttgaggatccacatgcaacagaatcagagcttgcaaagcagtcactaaactagtgtttgacagctgtgagggctccttttcaaactgaaagcataaagcttgaaagatgctattctccagtatttcttttggcagcccttgatcaccatcctttttttccacttcacaaattcgttgtaaagctcctgctgccatagtgtcaggcagggtttccatcgtgcttataaaacttagcacttcttctgatgaagtcaagttgctcagtctcctgtaaaacatctgactctcctcatttttaacattttgttcaagcctgtcgcagtcagatacttgagagaacactggtccaccgagtggatgaaggtcatttccatttttcgaatgaaactttttacaatgggcatgatggaatttgaccccgaaaggctcaggttgtcgtgaacacaaccaagggcacagacgctccttgactac

SEQ ID NO: 20210 - DNA, 470 bp, Homo sapiens
  MAP TO AC004263.1; EXPRESSED IN HEART, SIGNAL = 4.2; EXPRESSED IN LUNG, SIGNAL = 3.9; EXPRESSED IN FETAL LIVER, SIGNAL = 3.1; EXPRESSED IN ADULT LIVER, SIGNAL = 4.8; EXPRESSED IN PLACENTA, SIGNAL = 4.5; EXPRESSED IN HELA, SIGNAL = 5.6; EXPRESSED IN BRAIN, SIGNAL = 3.5; SWISSPROT HIT: P22392, EVALUE 3.00e-80; NT HIT: U85976.1, EVALUE 0.00e+00; EST_HUMAN HIT: BE897501.1, EVALUE 0.00e+00
cttcccggaccacggccaacctcgagcgcaccttcatcaccatcaggccggacagcatgcagtgcggcctggtgggcaagatcatcaagcgcttcgagcagaaggggttccgcctcgtggccatgaagttcctcccggcctctgaagaacacctgaagcagcactacattgacctgaaggaccgcccattcttccctgggctggtgaagtacatgaactcagggccggtcgtggccatggtctgggaggggctgaacgtcgtgaagacaggccgagtgatgcttggggagaccaatccagcagattctaagccaggcaccattcgtggggacttttgcattcaggttggcaggaacatcattcatggcagtgattcagtaaaaagtgctgaaaaagaaatcagcctacggtttaagcctgaagaactggttgactacaagtcttgtgctcatgactgggtctatgaataa

SEQ ID NO: 20211 - DNA, 581 bp, Homo sapiens
  MAP TO AP001068.1; EXPRESSED IN LUNG, SIGNAL = 1.5; EXPRESSED IN HEART, SIGNAL =   2; EXPRESSED IN FETAL LIVER, SIGNAL = 1.7; EXPRESSED IN ADULT LIVER, SIGNAL = 1.7; EXPRESSED IN PLACENTA, SIGNAL = 4.1; EXPRESSED IN BRAIN, SIGNAL = 1.5; EXPRESSED IN HELA, SIGNAL = 0.62; EXPRESSED IN BONE MARROW, SIGNAL = 1.5; SWISSPROT HIT: Q03110, EVALUE 4.80e-01; NT HIT: AL163300.2, EVALUE 1.00e-88; EST_HUMAN HIT: BF057518.1, EVALUE 1.00e-58
acctcccccagctcacctcctccccaccccagcatggccgcgtccaccatgtctgtctgctccagcgcttactccgactcctggcaggtggacgactgcccagagagctgctgtgagcccccctgcagcgcccccagctgctgcgccccggccccctccctgagcctggtctgcaccccagtgagctgtgtgtccagcccctgctgccaggcggcctgtgagcccagcgcctgccaatcaggctgcaccagctcctgcacgccgtcatgctgccagcagtctagctgccagccggcttgctgcacctcctccccctgccagcaggcctgctgtgtgcctgtctgctgcaagactgtctgctgcaagcctgtgtgctgtgtgcctgtctgctgtggggctgcttcttcgtgctgccggcagtctagctgccagccagcttgctgtgcctcttcctcctgccagccggcctgctgtgtgcccgtctgctgcaagcctgtgtgctgtgtgtccacctgctctgaggattcctcttcatgctgccagcagtctagctgccagccagcttgctgcacctcctcctc

SEQ ID NO: 20212 - DNA, 570 bp, Homo sapiens
  MAP TO AC008283.3; EXPRESSED IN HELA, SIGNAL = 3.9; EXPRESSED IN ADULT LIVER, SIGNAL =   2; EXPRESSED IN HEART, SIGNAL = 1.9; EXPRESSED IN FETAL LIVER, SIGNAL = 1.9; EST_HUMAN HIT: BF698341.1, EVALUE 2.00e-01; SWISSPROT HIT: Q9UBV7, EVALUE 5.50e+00; NT HIT: AL161552.2, EVALUE 1.40e-01
tcgtcgaaaggtagggacagatggatccaggtgacacacagaggaatggccctttaggaaaatgcacatcaacttcattattctaggaaagaagagtggaagctgaccgagccaggtggtatgtggatttggatgatgatagttactgtctgtggcatttgtctcctttaacaatgaggcaagatgatcaggataatgagaggagaaggaaggcttagagaaaagaaaaaacaagaggtaaaatgtcctgcacagatagtaagtcctttttcatgtttattttgaacaagactttcatgaatatcaccagtgtgagaataaagttccagtatatttatttactgttttctataaattcaaatattgaaaactgagtatcttcaggtccaaatgaccagtcccactgcctcttttatcactcttctattctttggttattggatgcaagcttattctacatgttccattttcaaaacaaataaatgttagcatttccctgtattggtaagtaaaaatacagtttgccaatacattaatagtaaagtgaccttagagaattattagaaatgg

SEQ ID NO: 20213 - DNA, 667 bp, Homo sapiens
  MAP TO AC005050.2; EXPRESSED IN BONE MARROW, SIGNAL = 1.7; EXPRESSED IN LUNG, SIGNAL = 1.7; EXPRESSED IN FETAL LIVER, SIGNAL = 1.7; EXPRESSED IN BRAIN, SIGNAL = 2.8; EXPRESSED IN HELA, SIGNAL = 1.6; EXPRESSED IN ADULT LIVER, SIGNAL = 1.9; EST_HUMAN HIT: BE150340.1, EVALUE 1.00e-103; SWISSPROT HIT: P10272, EVALUE 2.00e-24; NT HIT: gi9635487, EVALUE 0.00e+00
tagaagtttcagtgggggagtaggtgggagtgaccagatgagaaggagaaaaactgctgtgagggatagaagttggaacgctagctgcttttttagctaccttatcagcataagtgttgtcctgagcgatgggatctgatgccttttgagggcccttgcagtgtatgactccagcttcctttggaagtaaagcggccttgagtagagtttttattaaagaggcattaatgatggaggacccttgcatagtgaggaaacatttcagcccataaaacagcatggtggtacaggatatggggtcagtataaatattgacgcatagtccctttgcaagagtgagggtccgagttaaggcaatgagttcggcttgctgagaggtagtggagtggggcagagtggtgacctcaatgatagatgtggaagatactatagcatagcctgcctttgctggtgtgtggcaattaggcctggtggaactgccatcaataaaccaagtgtgaaaagggtgaggaacaggaaagaaggaaacatggggaaatggagtgaatgtcaggtggatcagagagatacagtcataggggtcaggtgtagtatcaggaataatgtgggaggccagattgaagtctggaccaggaacaatggtaattgtgggagactcaacaaagag

SEQ ID NO: 20214 - DNA, 1578 bp, Homo sapiens
  MAP TO AC011447.2; EXPRESSED IN ADULT LIVER, SIGNAL = 2.4; EXPRESSED IN PLACENTA, SIGNAL = 2.6; EXPRESSED IN HELA, SIGNAL = 2.2; EXPRESSED IN LUNG, SIGNAL = 2.2; EST_HUMAN HIT: BE934091.1, EVALUE 0.00e+00; SWISSPROT HIT: P35789, EVALUE 0.00e+00; NT HIT: gi4508026, EVALUE 0.00e+00
tcaaagatttgccatgttcttcactatgtaggctttctgtccaatatgaatcctcttatgtgtattaaggtctgaggacaagttaaaagctttgccacattcttcacatttgtagggtttctctccagtatgacttatcttatgactagtaagctgtgaggagcgcttaaaggctttgccacattcttcacatttgtagggtttcgctccagtatgaattatcttatgtttactaaggactgaggagcgcttgaaggctttgccacattcttcacatttgtagggattctctccactgtgaattatcttatgtgtgctaagggctgaggagtacttgaaggctttgtcacattcttgacatttgtagagtttctcttcagtatgacttatcttatgtgtagtaaggtttgaggagcgcttgaaggctttgccacattcttcacatttgtagggtttctctccactatgaattatcttatgtgtgctaagggctgaggagcgtttgaagactttgtcacattcttgacatttgtagggtttctcttcagtatgacttatcttatgtatagtaagtgttgaggagcgcttgaaggctttgccacattcttcacatttgtagggtttcttttcactatgacttatcttatgtttataaaggagtgaggatgaaataaatgctttgccacatttatcacacttgtagggtttctctccagtatgaattctcttatgtgtacgaaggactaaggagcgcctgaaggctttgccacattcttcacatttgtagggtttctctccagtatggattctcttatgtgtactaaggattgaggagagcttgaaggctttgccacattcttcacatttgtagggtttctcttcagtatgacttatcttatgtacataaaggatcgaggatgaaataaatgctctgccacatttatcacacttgtagggtttctctccagtatgaattctcttatgtgcagtaagggtagaggaatactttaattctttgccacaatcttcacatttgtaccgtttctctccagtatgaattctcttatgtgcagtaagggtagaggaatactttaattctttgccacaatcttcacatttgtaccgtttctctccagtatgaattctcttatgtgaagtaaggtgtgaggacctgttgaaggctttgccacattcttcacatttgcaggttatctctccagtatgaattttcttatgtgtagcaagggttgaggactggttgaaagctttgccacattctatacatttgaaaggtttttttccagtatctcttatcttatgtctgtttgaatttgaaaatatatgagagactttcacatatgtatcacattgaaatactttgctctgggtagctgtcaaacattggttaagtccattataacctcttttgtgtactttaccctcatccacactttcacaacctttttttaactctaaattgccatattcacgtttttcatatcttgtcactatcactttttggaaggaatcttttaggctctgctctggacaaaggtcttgggcaaaatgaaaacacat

SEQ ID NO: 20215 - DNA, 1814 bp, Homo sapiens
  MAP TO AC035150.1; EXPRESSED IN BRAIN, SIGNAL = 1.9; EXPRESSED IN HELA, SIGNAL = 0.83; EXPRESSED IN ADULT LIVER, SIGNAL = 2.2; EXPRESSED IN LUNG, SIGNAL = 1.9; EXPRESSED IN HEART, SIGNAL = 2.3; EXPRESSED IN BONE MARROW, SIGNAL = 2.1; SWISSPROT HIT: Q02386, EVALUE 0.00e+00; NT HIT: gi4508028, EVALUE 0.00e+00; EST_HUMAN HIT: BE896068.1, EVALUE 0.00e+00
ttatcgagttttcctgtgtgaatcctctgatgaagggaagtccttgtcaccctcatcatcagcatggactcgctgatgaatgataagacttgagctccaactgaagcccttcccacactcctcacatttgtatggtttttctccggtgtgaactctttgatgggcttgaaggtatgagctccagctgaagactttcccacattcctcacatttgtatggtctctctcctgtgtggaccctctggtgggcttgaaggtaggatctctgtctgaagcgcttaccacacacatcacatcggtatggtttttctcctgtgtggactccacgatgtgccagaaaattggaggcccgacagaagcccttcccacactcctcacattgatagggtttctctccagtgtggcacctctgatgggcttgaagctgtgaacctacactgaagcccttcccacactctgcacactgatatggtttctctccagtgtgaactctctgatgcacctgaaggctggagaactgactgaaggccttaccacacttctcgcatttatagggtttctctcctgtgtggattctacagtgtacattaagatctgagctccgactgaagcccttcccacatgtaccacatttgtagggtttctctccagtgtggcctctttgatgggccagaagatttgaggcctggctgaagcccttgccacactcctcacatttatagggtttttcccctgtatggactctaaaatgaatgttaaaatctgagctacgactgaagcccttaccacatgcatcacactgatatggtttctctccagtatggcctctttgatggtccagcagatttgaggcccggcagaagcctttcccacactcctcacatttgtatggcttctctccagtgtggcttatctgatgggcctgaaggtgtgaacccacactgaaacctttcccacactcctcacacttatagggtttctctcctgtgtggattctacaatgaatgttaaggtgtgagctgtaactaaagctcttgccacatgcattgcatttgtatggtttctcgccagtgtggattcgctcatgagcctgcagtcgtgaacgccaactgaagctcttcccacactcttcacacttatatcgtttctttccagcgtgaactttcagatgaacttgaagatatgatctctgactgaagcccaccccacactcctcacatttatagggtttctctcccgtatgaactatcagaggagcttgacaatgtgagcttttcccaacattcttcccacactcttcatatttgtatggattctctccagtgggaactctctgatgatggggaagatgtgacctctgactaaaactcctgtaacttgcatcatttgtgtatgattttgctctactgtggactctctgatgggcttgaagacttgaaaaccgacggaaggcattatcacatttttcacatttgtagggcttctctcctgcgtgagccctttggttaatttgaagatgagagctccagctgaaacttttcacacaatgttctcctttgtagggtttttcaccagtgtggactctgtgaacttgaagatgggaactctgattactgaatccctcatctttatagtgcaaatcatctcgtttttccaactggcagcctgttctttgaatatttaccacagaatcttgatacttgattaactctcttgtaatctgttgccagatctgggagcagaaaagctcttcatgaggcaggtaccttaatcctacttcttgaagagtctccatctcttttagattcttggctc

SEQ ID NO: 20216 - DNA, 742 bp, Homo sapiens
  MAP TO AL024509.1; EXPRESSED IN FETAL LIVER, SIGNAL = 1.4; EXPRESSED IN BRAIN, SIGNAL = 1.3; EXPRESSED IN ADULT LIVER, SIGNAL = 1.6; EXPRESSED IN PLACENTA, SIGNAL = 1.5; EXPRESSED IN LUNG, SIGNAL = 1.6; EST_HUMAN HIT: AA830920.1, EVALUE 4.10e+00
ttcccattgttgaacaaataaataaaacaataaacttatatttcctattacttgttaataaaagtgaatcagaaagcctaatgagaataaatgttttaaaagatgatgagggagctttaaaaaaataaattttgctgcactctaagatgtaaaatatatgtaattatatgtgcatgttagtgtgcggatatccaggacattgacactaaggtgatggttatgcaattgattgacactgaaatatgttggttcagtgccactaaggagccagcctcagatcttaaacatctcaacaattactatgagtccatgggggccatacaagttgtaggctccttatcacatttgtcttaaatagtattttttaaattacaagaacccttagcccagataatccatgttgtcatacagtgaatagatatcagatgtgttgacatgttggttctctcagcccacagggcagccaggcagggcctggggatgtgctcgatcccctgggaagacctccttcagttgagagctaccttatctgtttatgctgatgtgctgaacaaatataatcattttctatgtgtgcatgtgatagactctggtctcactgcagatcacgtctacattcaagtaatatacttcgatttgtcttgacttttcacactagttctcattctagctcttcctattttgtttaaattatttatgcttttctcacagccagtgctgctttttcaaatgtgggatgtcc

SEQ ID NO: 20217 - DNA, 594 bp, Homo sapiens
  MAP TO AC002106.1; EXPRESSED IN FETAL LIVER, SIGNAL = 5.4; EXPRESSED IN ADULT LIVER, SIGNAL = 4.8; EXPRESSED IN PLACENTA, SIGNAL = 5.2; EXPRESSED IN BRAIN, SIGNAL = 4.8; EXPRESSED IN HELA, SIGNAL = 8.9; EXPRESSED IN LUNG, SIGNAL = 5.2; EXPRESSED IN HEART, SIGNAL = 4.5; EXPRESSED IN BONE MARROW, SIGNAL = 5.9; EST_HUMAN HIT: AI184988.1, EVALUE 8.40e-01; SWISSPROT HIT: O55098, EVALUE 3.40e-02; NT HIT: X01415.1, EVALUE 8.90e+00
tcatgtcccgctgtgatgtgcagtccagcatccttgggtcatgacaccagctgcactggcacagggaatgagagaatattcctgaaaatgaagactaccgcggaaggcaggagcttctaagctagagtgactggcagcttcaacaggccctgctgcacctgaaccagcccggggccccccagtgccgcggaaagagacagctgtggcagatttcacaaactcatgcccaggggagctcccggcttgctcatggcaaggaccacacaggggcatcttagggtccgcgggaggcagcggaactgtggagtcccagggcacattgtctccagcttcgccagctgggccattgctctccaacgccagcacccatgggtacttcctgatgcacctcatcctacccacgttactgtcagagtgaggaatgcgctcagcctcaggccctgagattgtcctctccttactcagcttctctttctgtccttgcagcatccggttcgcctcttcccccaactgccttttcgcatcctctgcctgctcttccctgcagttgtctgtgtctacatcattggcaggagttcctcgtgcactctgcat

SEQ ID NO: 20218 - DNA, 492 bp, Homo sapiens
  MAP TO AC005363.1; EXPRESSED IN ADULT LIVER, SIGNAL = 1.3; EXPRESSED IN PLACENTA, SIGNAL = 1.6; EXPRESSED IN HELA, SIGNAL = 1.7; EXPRESSED IN HEART, SIGNAL = 1.7; EXPRESSED IN LUNG, SIGNAL = 1.2; SWISSPROT HIT: Q04833, EVALUE 8.90e-01; NT HIT: gi13385711, EVALUE 6.00e-19; EST_HUMAN HIT: AW236968.1, EVALUE 0.00e+00
tgcaagaacgccgacgctggctgcatagtgacatgccccctggcccatcgcaaggggcaccaggactcatgcccctttgagctaacggcctgccccaacgagggctgcacctcgcaggtgccgcgtgggaccctggcagagcaccggcagcattgccagcaagggtcccagcagcgctgccccctgggctgcggggccaccctggacccggccgagcgtgctcgccacaactgctaccgggagctgcacaacgcctggagcgtgcgccaggagcgccgtcggcccctgctgctgtccctcctgcggcgtgtgcgctggctggaccaagccaccagtgtcgttcgtagagagctggcggagctcagcaacttcctggaggaagacaccgctctgctggagggtgccccacaggaggaggccgaggctgccccagaaggcaacgttggggctgaggtggtgggggagcccagggccaacataccttgtaaatag

SEQ ID NO: 20219 - DNA, 640 bp, Homo sapiens
  MAP TO AC004687.1; EXPRESSED IN ADULT LIVER, SIGNAL =   2; EXPRESSED IN BRAIN, SIGNAL = 1.7; EXPRESSED IN HELA, SIGNAL = 2.6; EXPRESSED IN BONE MARROW, SIGNAL = 1.8; EXPRESSED IN LUNG, SIGNAL =   2; EXPRESSED IN HEART, SIGNAL = 1.8; EXPRESSED IN FETAL LIVER, SIGNAL = 1.9; EST_HUMAN HIT: BG387031.1, EVALUE 0.00e+00; SWISSPROT HIT: P96192, EVALUE 5.60e-01; NT HIT: gi14769798, EVALUE 0.00e+00
agggagattcattttcccagtccctgggaccctctcgatcttaccaagaaccaggtcgaagactccacctcattcgccagcatcccggccatgcccactaccacctccctgctgcctacctgttgggcccttcccggagtgcagtggctcggcccccacgacctggtcccttcctgccatcccaggagccaggcatgggccctcggcatcaccgcttccccagagctgcacatccccgggctccaggagagcagcagcgcctggcaggagcccagcacccctatgcacaaggctggggactgagccacctccaatccacctcacagcaccctgctgcttgcccagtgcccctacgccgggccaggccccctgacagcagtggatctggagaaagctattgcacagaacgcagtgggtacctggcagatgggccagccagtgactccagctcagggccctgtcatggctcttccagtgactctgtggtcaactgcacggacatcagcctacagggggtccatggcagcagttctactttctgcagctccctaagcagtgactttgaccccctagtgtactgcagccctaaaggggatccccagcgagtggacatgcagcctagtgtgacctctcggcctcg

SEQ ID NO: 20220 - DNA, 780 bp, Homo sapiens
  MAP TO AC005263.1; EXPRESSED IN ADULT LIVER, SIGNAL = 2.5; EXPRESSED IN BRAIN, SIGNAL = 2.5; EXPRESSED IN HELA, SIGNAL = 3.8; EXPRESSED IN HEART, SIGNAL = 2.5; EXPRESSED IN BONE MARROW, SIGNAL = 3.3; EXPRESSED IN LUNG, SIGNAL = 3.1; EXPRESSED IN FETAL LIVER, SIGNAL =   2; EST_HUMAN HIT: AL539431.1, EVALUE 0.00e+00; SWISSPROT HIT: P04280, EVALUE 1.00e-04; NT HIT: gi15307287, EVALUE 0.00e+00
ttcttcctccagttccactttaagatggagaagcccccggctccacccagcctccctgctggcccccctggggtgaagcggcctccacccccgctgatgaacggtctgccccctcggccaccgctgcctgagtctttgccaccgcccccgccaggaggcctgcctctgccacccatgccccccacagggcctgcgccctcagggcccccgggaccaccccagctacccccgccagctccaggggtccaccccccggccccagtggtgcatccccctgcatctggggtccatcccccagctcctggcgtccaccccccagctcctggcgtccatcccccagcccctggggtccacccaccaacctctggggtccaccccccagctcctggagtccaccctccagcccccggggttcacccaccagcccccggagtccacccaccagcccctggggttcacccaccagccccaggggtccatcctcccccatcagcgggggttcacccccaggccccgggggtgcacccagcagcccccgccgttcaccctcaggccccaggggtgcacccaccagccccagggatgcaccctcaggccccgggggtccacccccaacctcccggggtccatccgtcggctcctggggtccaccctcagcctccgggagttcacccctcaaatcctggggtgcaccccccaactcccatgcccccaatgctgaggcccccacttccctccgaaggcccagggaacatacctccccctcccccaaccaactga

SEQ ID NO: 20221 - DNA, 686 bp, Homo sapiens
  MAP TO AL132777.2; EXPRESSED IN PLACENTA, SIGNAL = 4.6; EXPRESSED IN BRAIN, SIGNAL = 2.2; EXPRESSED IN HELA, SIGNAL = 1.9; EXPRESSED IN BONE MARROW, SIGNAL = 2.5; EXPRESSED IN LUNG, SIGNAL = 2.4; EXPRESSED IN HEART, SIGNAL = 2.6; EXPRESSED IN FETAL LIVER, SIGNAL = 2.6; EXPRESSED IN ADULT LIVER, SIGNAL = 2.7; EST_HUMAN HIT: AA375786.1, EVALUE 0.00e+00; SWISSPROT HIT: Q9UIU6, EVALUE 1.00e-93; NT HIT: gi14752867, EVALUE 0.00e+00
tgagttagatggcaaccccagcactgaagatgaatccagcaagggacatgaggatttatctcctcacccactctccagttcatctgatggcatcaccaacctcagcctttccagtcatatggagccagtatatatgcaacaaattggaaatgctaagatatcattaagctcttctggagttctgttgaatggaagcttggtacctgcaagtacttcacctgtcttccttaatggaaattcttttattcagggacccagtggagttatccttaatggattaaatgtgggaaatacacaggcagtggcattgaacccaccaaaaatgtcatcaaacattgtgagcaatggtatatccatgactgacatactggggtctacttcccaggacgtgaaggaattcaaagtcctccagagttctgctaactcagcaaccaccacgtcctacagccccagtgtccctgtctcattcccaggcctgatacccagcactgaggtgaaaagagaaggcattcaaacagtggcttcccaagatggagggtctgtagtgacttttactacaccagtgcaaattaaccagtatggcattgtccagatccccaattccggagcaaacagccagttccttaatgggagcattggattctctccactgcagctgccccctgtgtcagtggcagcttcacaag

SEQ ID NO: 20222 - DNA, 1344 bp, Homo sapiens
  MAP TO AL139099.2; EXPRESSED IN ADULT LIVER, SIGNAL = 1.5; EXPRESSED IN BONE MARROW, SIGNAL = 1.3; EXPRESSED IN FETAL LIVER, SIGNAL = 1.7; EXPRESSED IN LUNG, SIGNAL = 1.3; EXPRESSED IN HELA, SIGNAL = 2.4; EST_HUMAN HIT: AW167416.1, EVALUE 0.00e+00; SWISSPROT HIT: Q10469, EVALUE 0.00e+00; NT HIT: gi16162309, EVALUE 0.00e+00
tcactgcagtcttctataacttttacagagttcatggtccctaatatctccccaccctccattttttctaggtggggaaatggctaccacagtaaacttttcactgatagttagagtttctggaaacatgtattgtttgttattatttaagagtgactcaatttgggcactctgagtggatggtctacaggttttcttgtgatgcataccacagtctccagcatgaaagatcctaggaatttgaggaaccagcactttccagaattttggaagacaagatacagtcaagtattgaagagtccagtcccagttataatcatcataagtacagaaagtgtctgtgcactcgatcagcttctgataggcattccgggtcaaggctagacccatattgtgctctgtggatttccaagttttcacatctaccttgtcagccatgccatagaaactgcgactggcactataggtccccagggagagaacatcacattcagggcactcttgctgcttcagtttccacatctttttgaagacatggtaaaagtctggggctaagtagtgatcctcttctaggaaaagtataaggccagcataatctcgaagaattttcactctttcccacacaaaatgcagcttccaccaccagtgatgtttggtctgggagaatttggcctctctataatggccgaaggagtcgggatactcagcattgatgcaccccaatttcaaagcggcattcttcggcaggtctctgggacaatctctagggtcactacctggaaactcgttagggtacaactgaatgctgaaaggaaagaacacctgcagaaccggacagaaattcaccccggcgatcagctgattgatctcggtcgaccagaagtcatggctaaagatgacgaggacgttgtcaattccctgggcttttcgaagtgagtccagcagcagtctgaggtattcgggccggttatgcacctggaccaccagcaccagctcccggggggcccaggtgccagccttatctacattcctcagggtctgatcaaagttcagctggtacaccagggaccggtaccgcagcgtcaggttgtccgcctcgggctgggggaccgccgggaccagggaagccgccgacacgttggagaccctgcggatgcccacagccacagaggggtggtccccaccgcggccgccggcaccccgcgcgggttcggcgtccagcaacggtggggcgagggcctcgttcttcctttgtcgcccattgctgctccagaggacgaagccgcaggcggccaccacgagcgtcaggattagcaccttccgtttgtagatgcggaacctcat

SEQ ID NO: 20223 - DNA, 1727 bp, Homo sapiens
  MAP TO AL137784.2; EXPRESSED IN PLACENTA, SIGNAL = 1.7; EXPRESSED IN HELA, SIGNAL = 0.92; EXPRESSED IN BRAIN, SIGNAL = 1.7; EXPRESSED IN HEART, SIGNAL = 1.9; EXPRESSED IN BONE MARROW, SIGNAL = 1.8; EXPRESSED IN LUNG, SIGNAL = 1.5; EXPRESSED IN ADULT LIVER, SIGNAL = 1.7; EST_HUMAN HIT: AL541093.1, EVALUE 1.60e-01; SWISSPROT HIT: Q13360, EVALUE 2.00e-15; NT HIT: gi12732346, EVALUE 0.00e+00
gggaggagcgctacatctgctggtactgctggaggacgtttagataccccaacagccttaaggcacacctgcgtttccactgcgtgttcagcggcggtggaggcggcgccttcctgcaccacgaacacgcggctcgccaaggcgccgtcccagcggctgatggcctcggtctctccccaaaacccccggcgcccgatttcgccgcgccttcccaggcaggaactttgcgaccccaccccctgggcccgccaccagttcaggcctgcggtgcgcgggagggcatcaagcgcgaggcctcttccgcgccctcggccacctcgccgaccccaggcaagtgggggcagcccaagaagggcaaggagcagctggaccgtgccctggacatgagcggagccgcccgaggacaagggcacttcctcggcatcgtgggcggctcctcggcgggggtcggcagcctggctttctaccccggcgtgcgctcagctttcaagcccgccggcctagcgagggcggcggcggccgctcacggcgacccctaccgggaggagagcagcagcaagcaaggagccggcctcgctttgggcaggctgctgggcgggggccgggcgtgcgggcgccccgggagcggggagaactcggcggcgggcggcgcgggtcaccaccatcaccaccacgcgcaccaccaccaccatcccaagtgcctgctcgctggggacccgccgccgccgccgccgcctggcctgccctgctctggggccctgcgcggcttccctctgctctccgtccccccggaagaggcgtccgccttcaagcacgtggagcgcgccccgcccgcagccgccgcgctgccaggagcgcgttatgcgcagctgccccctgcgccggggttgcccctcgagcgctgcgcgctgccgcccctcgacccgggcggtctcaaagcctatccgggtggtgagtgcagccacctgcccgccgtcatgccggcctttacagtctacaacggggagctgctctacggctcaccggccaccaccgcttattacccgctcaaattgcacttcggcgggctgctgaagtatccggagtccatctcctacttcagcgggcctgcagcggccgccctaagccccgccgagctggggtcgctggccagcatcgaccgagagatcgccatgcacaatcagcagctgtccgagatggctgccgggaagggtcgcggacgcctggactcggggacgttgccaccggccgtcgcggcggcgggaggcaccgggggcggcggcagcggaggcagcggcgcaggtaagcccaagaccggccacctgtgcctctactgtggcaagctgtactcgcgcaagtatgggctcaagatccacatgcggacgcacacgggctacaagccactcaagtgcaaagtctgtctgcggcccttcggcgaccccagcaatctcaacaagcacatccggctgcacgccgagggcaatacgccctaccgctgcgagttctgcggcaaggtacttgtgcgccgccgggacctggagcgacatgtcaagtcccgccaccctggccagagtctgctcgccaaagcgggcgacggcccgggtgccgagcccggctatcccccggagcctggggatcccaagagcgacgacagtgacgtggacgtctgcttcacagacgaccagagcgaccccgaggttgggggcggcggggagcgcgacttgtaa

SEQ ID NO: 20224 - DNA, 1719 bp, Homo sapiens
  MAP TO U82670.2; EXPRESSED IN ADULT LIVER, SIGNAL = 1.4; EXPRESSED IN BRAIN, SIGNAL = 0.84; EXPRESSED IN LUNG, SIGNAL = 0.99; EXPRESSED IN HELA, SIGNAL = 0.54; EST_HUMAN HIT: BE311776.1, EVALUE 1.00e-02; SWISSPROT HIT: P02457, EVALUE 1.20e-01; NT HIT: U82695.2, EVALUE 0.00e+00
agcccctcctggggaggctcctcagcctcctggcctccaacctggacaaggccctctggctcccagctgggacctcctggggccatgtcgactgcactgcccatcctggctgggaggcccccaggggcgtcgggggaccttccctgacctaggccttcaaggcctgcaggggcattttcatcttccccagtggcaggggcaaccctggcggcctctttggtggtggaagcagcctcatcagcatcttctgctccgggatcagcctcgctggcgtccccctgggccggggaggcctgggcagcagctgggtcttcactctccactggggccgctgcccaggccacaccctgctggctccttgctagggaggctgcccacgcctccatgtcccggatgagccgcagcagcctcaggaagtcaggtggcctcctctccagctgcatcctcctcagggtatcctggagtgcctcgctggggcgggcccgagacagcacctgccgcagtcgcaggtggttggccatggctgggtggaccgcccccttctccacggccttctgcagcaggccttccaggcgcaccacgaaggcaaacagcccctcctggggcccctgcgtgcaggtcaggaacttcatccgcgaggtcatccatgtatcccggctcctaaacacctgccccagcgccgtcaggcagtcctgcgcagagaagtctggatcttcctccaggaggccgctcacgatatccagggccaggccatccaagctgtccagcagccgcctccttctctccctttccgacgcgtggcaccacagctgcagcatatccttggcgtcctccaaccagctctcaaaggactcttccacgcagcctggctgctccctcccggaaaagggtctcagttcccggtaggccatagttttcaccagaggccgcagggtctggcgccatgactgggtccaggcctccaccacacctgcacctactgcctcacctgcagctcctgcctcatcttcacctccttcctcacctgcgcctcctgcctcacctgcacctccttcctcacctgtacctccttcctcacctgcacctcctgcctcacctgcacctcctgcctcacctgcacctcctgcctcacctgctgctcctgcctcacctgctgctcctgcctcacctgctgctcctgcctcacctacacctcctgcctcacctatacctcctgcctcatcttcacctgcagatctttcctcattcacacctcctgcctcacctacagatcctgcctcacctgcagctcctgcttcacctgcacctctggccactgcttgcccctggggctgtgcagggaaactgggtatatcctgaaactcagcatcaagggcctggggcagggagatcactttccagggtccccctttgcctgctatttggcggggaatcaagctttggtttaaaccctcagcgaattccaccaaggctgccctggccccgagctcctttctgaagaccttgatgagcactcggtacctgcccaggggcgacagggcagcccgcacggcctcctggaactcatgttcctcgcagtcgtcagggatatccaggatgagcagagagcgctctgcgttcacacccatcctcctgcaccagtcctgaagcatcgccagagctatcgcagaggacttgagggagggagcctgatcagacaggaatgtgtgctgactgttg

SEQ ID NO: 20225 - DNA, 484 bp, Homo sapiens
  MAP TO AC005218.1; EXPRESSED IN LUNG, SIGNAL = 7.4; EXPRESSED IN ADULT LIVER, SIGNAL = 4.3; EXPRESSED IN BRAIN, SIGNAL = 7.4; EXPRESSED IN HELA, SIGNAL = 9.5; EXPRESSED IN HEART, SIGNAL = 9.4; EXPRESSED IN BONE MARROW, SIGNAL =  27; EST_HUMAN HIT: AW865613.1, EVALUE 0.00e+00; SWISSPROT HIT: P15475, EVALUE 4.00e-56; NT HIT: AB004047.1, EVALUE 1.00e-120
aagatcctcaccgagcacagctacagctttaccaccatggccgagcgggaaatcgtgtgtgacatcaaggagaagctatactatgtcaccctggactttgagcaggagatggccacagcggcctccagctcctccctggagaagagctatgagctgtccgatggccaggtcatcaccattggcaatgagctatcctgctgccctgaggcgctcttccagccttccttcctgagcatggaatcctgtgacatccacaaaactaccttcaactccatcatgaaatgtgacatggacatccgcaaagacctgtacaccaacacagtgttgtttggcggcaacaacatgtaccctggcattgcgaacagggtgcagaagatcgtcactctggtgtggatgggcagctccatcctggccttgctgtccaccttccagcagatgtgggtcagcaagccaggagtatgatgagtctggcctctccatcgtc

SEQ ID NO: 20226 - DNA, 782 bp, Homo sapiens
  MAP TO Z82211.1; EXPRESSED IN ADULT LIVER, SIGNAL = 1.2; EXPRESSED IN HELA, SIGNAL = 1.2; EXPRESSED IN BRAIN, SIGNAL = 1.1; EXPRESSED IN HEART, SIGNAL = 1.5; EXPRESSED IN BONE MARROW, SIGNAL = 1.2; EXPRESSED IN LUNG, SIGNAL = 1.4; EST_HUMAN HIT: BI524653.1, EVALUE 0.00e+00; SWISSPROT HIT: Q99865, EVALUE 1.00e-125; NT HIT: gi15309593, EVALUE 0.00e+00
ttaggactttttcaccaaatcgtagacatagatatggaaatcatcatcaaacttgatgaaatacacagagggtttggcttccacttggtgaatgaccatgccgatccttttggagccatcttctttggtatattccacatgcttacctattaggccatctacaactcctcctggctccctctctgttggaggagactcactggattctggcatgatgcggaggtcaccttccttataatcatctagaagctggtacatgtacaagacaggatctttctcataggtaatataaaaccaggctttcatgataggtgcttgagctaagaccatccccctccattcatccttagaaccatgctctccctcaaacatatgttccactgctttgccaattatggtatttgcaaggttggcatcactaatgtgagatgatgccaccctgtcagaaagaattttaagagacaaaaccctttcatctctgtgaagttccagtccatagacacagtcaattccatcatatttcaccagataaagagagggatttataggcacctgatccagaacggttcctttccactgcgtgatgggctcatctccttccttccatccatgagaaattctgcagcccacgatgttcctgcggggctgggatgaaggtcggcctctctgcttcttttgggagacttttttctttgtcatgtttgcagacccagtggcccgtcctgcagctgccctggtttgttgcccttcggcttcctgtgcgttgggggtcttcatgcctg

SEQ ID NO: 20227 - DNA, 696 bp, Homo sapiens
  MAP TO AL121928.13; EXPRESSED IN HELA, SIGNAL = 0.62; EXPRESSED IN PLACENTA, SIGNAL = 1.6; EXPRESSED IN ADULT LIVER, SIGNAL = 1.3; EXPRESSED IN FETAL LIVER, SIGNAL =   1; EXPRESSED IN LUNG, SIGNAL = 1.3; EXPRESSED IN HEART, SIGNAL = 1.6; EST_HUMAN HIT: BF510736.1, EVALUE 0.00e+00; SWISSPROT HIT: Q9PV94, EVALUE 6.30e-01; NT HIT: gi13646184, EVALUE 0.00e+00
tcagctcaggcccttgctcttcctggggcggccgcgctccgcggcttcccgggctgggctgctgtcgccgctgtcgggccggcgccgcacgcgccactccacgcggtggtcgggctcgagcacgcgcggcgtcgcctgcagcaggaactggccgcggcgctgggtgacgcgcacgtcggcgcgggggtaggtgccgtacgcgcgccgcagctcccggcgcacgaagtccggtagctgcagaggggggccccgcgcgcgctccacgcggccccagcgcagctcggtttgcaggctcccgccctccggccacggcgcccagctctcggccaccgccgcgggcgcctgcagcgacagtcccgagatgccggcggcggcgcagggccggcgcagggtcgtggcgtaggccggagggcaggcccaccagggcggcgcggcctcgggtggcgcggcggggccgtagaagcggtggtattcccgtggggccgcccactcgcccgcatgcaggctcccgggccggctgcggaagctgtgggcctggactgggggtagcagcagaggggcggccaggtaggtgcaggtgagcagctgcggcggcggcggccagacgccctgtttgggcggcggccagctgtacacatacatggtcggccccccaggcggctgctgttcttactgggggctcctgcggatccagac

SEQ ID NO: 20228 - DNA, 702 bp, Homo sapiens
  MAP TO AC007000.2; EXPRESSED IN BRAIN, SIGNAL = 3.7; EXPRESSED IN HELA, SIGNAL = 5.7; EXPRESSED IN FETAL LIVER, SIGNAL = 4.4; EXPRESSED IN PLACENTA, SIGNAL = 4.6; EXPRESSED IN ADULT LIVER, SIGNAL = 3.6; EXPRESSED IN BONE MARROW, SIGNAL = 4.5; EXPRESSED IN HEART, SIGNAL = 3.6; EXPRESSED IN LUNG, SIGNAL = 3.9; SWISSPROT HIT: Q14314, EVALUE 0.00e+00; NT HIT: gi13627545, EVALUE 0.00e+00; EST_HUMAN HIT: AL574274.1, EVALUE 0.00e+00
gcttaaagtgcttgggtctgatcatcatcttagcctctttgaaggaggacttgtagccaccagggtgtgcctcacttacaccaggccaggtaccccagaaaatcccattacggacacctctgtatttttggtgataatatttgccatttaagtttgcagaaagacatgcatcaaaccaccagcctgaactgtagtacagcccacagttcccagaaggatatcgatcattgtctttatctggagtggtgaaaaacttcagatcgtggttgtaatgtttgttgaaacgtaatgcatctccagctgtgccattatagttaccaacgtgtaaacgatatttgagaaactcattagccacataaaactgatcatacaaggcatatagttcgacaccattaaagtcttcaagatctattctcagaatcatttccttactcttggtcagaagatgaattttatcgttccccagccaaaattcccttctgaggtttccaaagcctgctttgtagtcttgccatgttctggtgaagttggtgctcccatcgagacgtgcctgcagcactgtccagcctccccccatggtctccatgtcacagtaaacttcaaagctactatttttgggatcaggtgtaactctgtaggtctcactgcttcttttgcctattgcgtagtagtcagagcaatctttatatattagatgttgaa

SEQ ID NO: 20229 - DNA, 1172 bp, Homo sapiens
  MAP TO AL132641.1; EXPRESSED IN FETAL LIVER, SIGNAL = 2.8; EXPRESSED IN ADULT LIVER, SIGNAL = 2.5; EXPRESSED IN PLACENTA, SIGNAL = 2.7; EXPRESSED IN BRAIN, SIGNAL = 2.7; EXPRESSED IN HELA, SIGNAL =   3; EXPRESSED IN LUNG, SIGNAL =   3; EXPRESSED IN HEART, SIGNAL = 2.9; EST_HUMAN HIT: AU118229.1, EVALUE 0.00e+00; SWISSPROT HIT: P98161, EVALUE 2.00e-08; NT HIT: gi13648109, EVALUE 0.00e+00
tcacgtatggcagtgctccaggtctggcacgctgctgttgcagtatcgcatgttgttggggatatggcagtctgtgtaattaatgcccccatttggggtgtaaatgggctgcagtctgaaatctcctttaaggagttgatcgttatttaaggagacgatctgaaaactggtttctgtcatctccaggatggagttgtccttcttggtgcctgcctcgcaataatcatctttccgccggccccggttgtatttccacttctgggaggtgtagcgcccctttttgtgcatatgccagcaaaagacgctgagcaagaccaccagcacaaatatcaccgcgcccccgatcaagcccgccagcagaaagggggagcccatgctgtgggacgtcgtctgctcatggctggacgctgtgttgctgccgttgttcagataggaggcatgggtggtggcctctgaacaaatggtgtcttctaccgcgcggtagttaaaagcatccagtggcactaaacaaatccgataggtggatcggggctctaagttaaccaggctcaggtgttgcttctcaccgctgactatgcgctcctgaacgatgccccctactaaactgtggcccattttcacccatgtgagtttgtatgccatcacggtgaagagagagagccagctgacttgaatggaagtatcattcacaaaatggatagagagctggatccgttcagaaataggtggggtcactctttctctgccatcccagtcaggaatcgtgggaagtttcgatgtggtaggagttggaggcgtgtagcttctgctagggtttggaatagagagggtgggaggctgagtggtcggagaagctgtacttggggctggggtgaagagaggcaggccgggggtcgtggtgggacaggacaaaagattcatatttaattccctgacggccatcccccggacttgttcaggaccttggcacatgaaaccccgcacgttgagagatgaagggatatatttgagccattctgtgacccatttaatactgcagtcacaaaaccaagggttattccgagcagtgagctgcttcaggttggagagattatcaaaaaccccttgagtcagcatccgcagttggttgttggatatatccagccgttccagcttacgcagatttgagaagg

SEQ ID NO: 20230 - DNA, 648 bp, Homo sapiens
  MAP TO AL080312.4; EXPRESSED IN BRAIN, SIGNAL = 0.99; EXPRESSED IN HELA, SIGNAL = 1.6; EXPRESSED IN ADULT LIVER, SIGNAL = 1.4; EXPRESSED IN BONE MARROW, SIGNAL =   1; EXPRESSED IN LUNG, SIGNAL = 1.2; EXPRESSED IN HEART, SIGNAL = 1.2; SWISSPROT HIT: P13993, EVALUE 2.00e-15
ctgcacgccctggtggtgcttcctgcaaacgcctgtaaatgggatttttggcctgagagcccacaagctcacgtggcagctaggagtgccagagagtgaatgcctggccctcaggtgcacatccctcatccctcaggtggacgcccctcagagggacaaccttcaggtgggactcccctcaggtggattcccctcagatggattctcctcaggtggatgcccctcaggtggattcccctcaggtggatgcccctcaggtggattcccctcaggtggattcccctcaggtggatgcccctcaggtggattcccctcaggtggatgcccctcaggtggattcccctcaggtgaatgctcctcaggtgtgtgtccctcaggtggatgcccctcaggtggactcccctcaggtggactcccctcaggtggattcccctcaggtggattcccctcaggtggactcccatcaggtggacacccctcaggtggattcccctcaggtctgtgcccctcaggtggattcccctcaggtggagtcccctcaggtggagtcccctcaggtggacactcatcaggtggattcccatcaggtgtctgtccctcaggtggacgcccctcaggtggacactcatcaggtggacacccctcagg

SEQ ID NO: 20231 - DNA, 463 bp, Homo sapiens
  MAP TO AC007318.2; EXPRESSED IN HELA, SIGNAL = 6.8; EXPRESSED IN LUNG, SIGNAL = 4.9; EXPRESSED IN HEART, SIGNAL =  14; EXPRESSED IN BONE MARROW, SIGNAL = 3.4; EXPRESSED IN PLACENTA, SIGNAL = 4.9; EXPRESSED IN ADULT LIVER, SIGNAL = 3.4; EXPRESSED IN BRAIN, SIGNAL = 4.7; SWISSPROT HIT: P45880, EVALUE 2.00e-87; EST_HUMAN HIT: BE906030.1, EVALUE 0.00e+00; NT HIT: gi14736135, EVALUE 0.00e+00
cttacaagagggagtgtataaaccttggttgtgatgttgactttgattttgctggacctgcaatccatggttcagctgtctttggttatgagggctggcttgctggctaccagatgacctttgacagtgccaaatcaaagctgacaaggaataactttgcagtgggctacaggactggggacttccagctacacactaatgtcaatgatgggacagaatttggaggatcaatttatcagaaagtttgtgaagatcttgacacttcagtaaaccttgcttggacatcaggtaccaactgcactcgttttggcattgcagctaaatatcagttggatcccactgcttccatttctgcaaaagtcaacaactctagcttaattggagtaggctatactcagactctgaggcctggtgtgaagcttacactctctgctctggtagacgggaagagcattaatgctgg

SEQ ID NO: 20232 - DNA, 702 bp, Homo sapiens
  MAP TO AL121889.3; EXPRESSED IN HELA, SIGNAL = 1.4; EXPRESSED IN ADULT LIVER, SIGNAL = 1.2; EXPRESSED IN BRAIN, SIGNAL = 1.1; EXPRESSED IN LUNG, SIGNAL = 1.2; EXPRESSED IN BONE MARROW, SIGNAL = 1.3; NT HIT: gi14770824, EVALUE 1.00e-126; SWISSPROT HIT: P28697, EVALUE 2.40e+00; EST_HUMAN HIT: BE018829.1, EVALUE 1.00e-121
atggcgcgggcctgtttgattcaaaggttgcctataaagcgggactgcacgccggtttttgtccgagggctgtcgagtccgagcgccgccatggctctgctgtccgagggcctggacgaggtgcccgccgcctgcctgtcgccgtgcgggccgcccaacccgaccgagctgttcagcgagtcacggcgcctggctctggaggagctggtggcgggcggccccgaagccttcgcggccttcctgcgacgcgagcgcctggctcgtttcctgaaccccgatgaggtgcacgccattctgcgcgcggcggagaggccgggagaggagggcgcggcggcggcggcggcggccgaggactcgttcggctcctcgcacgactgctcttcgggcacctacttccccgagcagtcggacctggagccaccgctgttggagcttggctggcccgccttctaccagggcgcctaccgcggcgccacgcgtgtcgagacgcacttccagccccgcggcgctggcgaaggtggcccctacggctgcaaggacgctctgcgccagcagctccgctcggcgcgagaggtgagcggccctccagggccctgggtcgcacgggagacccccttcaagaatgggaaattgaggcctgctgggagtacgggccggggccactacctcctctgcgccctaccggaagcgcgcgcgggctag

SEQ ID NO: 20233 - DNA, 619 bp, Homo sapiens
  MAP TO M63796.1; EXPRESSED IN ADULT LIVER, SIGNAL = 1.7; EXPRESSED IN BRAIN, SIGNAL =   2; EXPRESSED IN HELA, SIGNAL = 1.3; EXPRESSED IN BONE MARROW, SIGNAL = 2.1; EXPRESSED IN LUNG, SIGNAL = 1.8; EXPRESSED IN HEART, SIGNAL = 2.3; EST_HUMAN HIT: BG819530.1, EVALUE 0.00e+00; NT HIT: gi11427747, EVALUE 0.00e+00; SWISSPROT HIT: P20130, EVALUE 1.20e+00
gcttaggaagagcagtgtggctgcccctttaaggaggcgttgcaacaaaccatattggacagacgatgggggcgacccatcgggacccgacgggcctctgactccagcaatacagcgaatcagcggctttcgggaatacatttttcggaaaaagacttcttcctcggttttctgctctgcacacgttgaaattttccccagtttttcctgcagatcgggagtcgagcaatgcctacccccgcgctcccgcaccagttgggcgctcccggatgatgccctacccctttggatccacgtggtctgcaacctggtgcgagcagcccgggctacagggttgcctgaggtgtgggtcccaggatggaggagccccaggccggcggtgagggtgcgggttgacggggtgcggagggtgcgttggtggaaggagaaaggggcgtccgagagggttcgggcggaaaaggaggcgtacctgcaagcaggacttgcgaagagcgtgcattcccagtgggcgaacgggaattcgaacggagagagggttatcttgtggggggctacccgtggagagcaaggcgcccccaggggttggatcggtgaaattgaggtcgcccctggggaacag

SEQ ID NO: 20234 - DNA, 615 bp, Homo sapiens
  MAP TO AC004584.1; EXPRESSED IN LUNG, SIGNAL = 1.8; EXPRESSED IN BONE MARROW, SIGNAL = 1.6; EXPRESSED IN FETAL LIVER, SIGNAL = 1.4; EXPRESSED IN ADULT LIVER, SIGNAL = 1.8; EXPRESSED IN BRAIN, SIGNAL = 1.3; EXPRESSED IN HELA, SIGNAL = 0.34; EST_HUMAN HIT: BF794053.1, EVALUE 0.00e+00; SWISSPROT HIT: Q14258, EVALUE 1.00e-114; NT HIT: gi16178751, EVALUE 0.00e+00
atggcagagctgtgccccctggccgaggagctgtcgtgctccatctgcctggagcccttcaaggagccggtcaccactccgtgcggccacaacttctgcgggtcgtgcctgaatgagacgtgggcagtccagggctcgccatacctgtgcccgcagtgccgcgccgtctaccaggcgcgaccgcagctgcacaagaacacggtgctgtgcaacgtggtggagcagttcctgcaggccgacctggcccgggagccacccgccgacgtctggacgccgcccgcccgcgcctctgcacccagcccgaatgcccaggtggcctgcgaccactgcctgaaggaggccgccgtgaagacgtgcttggtgtgcatggcctccttctgtcaggagcacctgcagccgcacttcgacagccccgccttccaggaccacccgctgcagccgcccgttcgcgacctgttgcgccgcaaatgttcccagcacaatcggctgcgggaatttttctgccccgagcacagcgagtgcatctgccacatctgcctggtggagcataagacctgctctcccgcgtccctgagccaggccagcgccgacctggaggtagggaacggcctgctg

SEQ ID NO: 20235 - DNA, 585 bp, Homo sapiens
  MAP TO AL109808.2; EXPRESSED IN HEART, SIGNAL = 7.2; EXPRESSED IN BONE MARROW, SIGNAL = 2.3; EXPRESSED IN ADULT LIVER, SIGNAL = 2.3; EXPRESSED IN BRAIN, SIGNAL =  15; EXPRESSED IN HELA, SIGNAL = 3.5; EST_HUMAN HIT: AL553160.1, EVALUE 0.00e+00; SWISSPROT HIT: P04156, EVALUE 2.00e-59; NT HIT: M81930.1, EVALUE 0.00e+00
ttctctttgtggccacatggagtgacctgggcctctgcaagaagcgcccgaagcctggaggatggaacactgggggcagccgatacccggggcagggcagccctggaggcaaccgctacccacctcagggcggtggtggctgggggcagcctcatggtggtggctgggggcagcctcatggtggtggctgggggcagccccatggtggtggctggggacagcctcatggtggtggctggggtcaaggaggtggcacccacagtcagtggaacaagccgagtaagccaaaaaccaacatgaagcacatggctggtgctgcagcagctggggcagtggtggggggccttggcggctacatgctgggaagtgccatgagcaggcccatcatacatttcggcagtgactatgaggaccgttactatcgtgaaaacatgcaccgttaccccaaccaagtgtactacaggcccatggatgagtacagcaaccagaacaactttgtgcacgactgcgtcaatatcacaatcaagcagcacacggtcaccacaaccaccaagggggagaacttcaccgagaccgacgttaaga

SEQ ID NO: 20236 - DNA, 858 bp, Homo sapiens
  MAP TO AC003972.1; EXPRESSED IN LUNG, SIGNAL = 1.7; EXPRESSED IN FETAL LIVER, SIGNAL = 1.7; EXPRESSED IN HELA, SIGNAL = 0.69; EXPRESSED IN ADULT LIVER, SIGNAL = 1.7; EXPRESSED IN HEART, SIGNAL = 1.6; EXPRESSED IN BONE MARROW, SIGNAL =   2; EST_HUMAN HIT: AL134361.1, EVALUE 0.00e+00; SWISSPROT HIT: P27539, EVALUE 1.00e-117; NT HIT: gi14766956, EVALUE 0.00e+00
ttagcggcagccgcactcgtccaccaccatgtcctcatactgccgcagcaccacgttgtcgctgttgtcaaagaagagcacggagatgggcgacaggcgcgcgggcacgcagcagggcaggtcggcggctcccggggcggccgcgtgcatgagcgcgcgcagcacagcgtggttgagcgccggcggccccccggaccccgacagcgcgacgggcagcgcgcactgaccctggcagtagttggccaggaagccgcgcggcgcgatgacccagcggtgccagcccacctcgcggaagctcacgtacagccgccgcgcgcgacaagcgcccccggggccgccgcccaacacgggttcggcgtcgcgccgcggccgggccagggggtggcacaggcgcgggtcgagggtcaccagcagcagcgaggcctcggccaggcgcgcgcaggcggcaggggcccgggggcgtagcgccagcgccaggcggaggctgcgcggccatgaggcgttgcgagcccaagcggcgcccagcagctccgcgcgcactggcggccccagggcgggcaccaactggcggagcagcaccggcccggggtccgcgcccgcgccctggcccgcttgcgccacgctcagctcccagccgccctccggggctgccgccgccgccgccgcgaaacgcagctccaggcgggcccggctcgggcgctcagcgggttccacagccgacaggtcgaagacgactgtccactcagggcaatgccccgcggccgaggcaggctccgaggcccgggtgggcgcacctggggaggtaggaacaggaactcggctcgcgctgcgtccccggcctgcccatggggtctcggt

SEQ ID NO: 20237 - DNA, 7019 bp, Homo sapiens
  MAP TO Z68873.1; EXPRESSED IN PLACENTA, SIGNAL = 3.5; EXPRESSED IN BRAIN, SIGNAL = 2.2; EXPRESSED IN BONE MARROW, SIGNAL = 2.4; EXPRESSED IN FETAL LIVER, SIGNAL =   2; EXPRESSED IN LUNG, SIGNAL = 2.2; EXPRESSED IN HEART, SIGNAL = 2.1; EXPRESSED IN ADULT LIVER, SIGNAL = 2.5; EXPRESSED IN HELA, SIGNAL = 2.7; SWISSPROT HIT: P05790, EVALUE 4.00e-23; EST_HUMAN HIT: BE828281.1, EVALUE 0.00e+00
gtccacctccagaggcagctgtagtggcctttgagtggctgaagaccagcaccctcacaggcctacacccacaactaccactctctttaccccagcccgagtgcgctctaccataccttgttcgtgcttttagcaggggtgattacatgggccgcattcaggaagtgggctgggtgactgcaggactggtgatctgggctggcacctgctactacatttacaaatttaccaagggaagagcccagagtgtgaggactcttgccagaaatggatccacagttaagatggagactgtggttggggtacagagccagaccttggccataaatgaagcagagattaagactaaaccccaagtcgagattggagcagaaactggagcaagaagtgggcctagggctgaagtagagaccaaggccactgctatagccatacacagagccaactctcaggccaaggcaatggttggggcagagccagagactcaatctgagtccaaagtggtggctggaacactggtcatgacagaggcagtgactctgactgaggtcaaggccaaagccagggaagtggccatgaaagaagcagtgacccaaactgatgctgaggctggcaaaatagttaagaaagaagcagtgacacagaccaaggctaaagcttgggcgctggttgccaagacagaggccaagagagaagcaatgacccagaccaaagctgaaactcatatattggctgaaaaagagacagagattaacagagtaatggttacacagagtgagaccttggcagtacccagggaagtggccaagatgggggccacgaacaagactggaattgtggatgaaaccaagacaagagctctggaagagactgtgagtgtggctaagactcagtctgaggccaggcctggtgccacagttgatgctaggggaaatcccaatggcatgtccagggaggtggctggagtggacatgaagtcctgtgcacagtctcaggctgtgaccaagatccagggtgatgacatgcctggtactggggttgaggacatggggaattgtaaaaccatgtctagggcagagtctggggcagacacgagggcttctgctcagcctcaaatttttgccaaaacccagactgaggccattcctggggcaaagattgatgccgggggtaacaccaatgccatgtgtaaggtgggggcaggggcagatgtgagagcttgtatacaacctcagactgtggccaagaaacaggctgaggtgacgtctggtgccagggttgatggtaggggaaataccaatgtcatatctaaggcaataactggagctgacatgagagctgctgctcagcctcaagctgttgccagtactcacgctgaggccatgtctgatgctaaggttaagaacagaggcaatcccaatgccatgactaaagcaggggccaaggcaaacttgagggccaattcccaggttgaggccttgcctgatgccagggataagagcagaggcaatcccaatgttatggctaaggtgggggatgggacagacatgttgtcctgtacacagcctcagcttgtggccagtgttcaggctgataccttgtctgatggcaaaattaaggtcaggggcaatgtcaataccatgcctaaggaaggagctggggtggatatgaaggctcaaggtatggcccagagccagggtgaagccttacctaatactagaggtaaggctaggggcaaagccaaagccaagtgtaagacagggcctgggatggacatgaaaacctgtacacaacctcaggctggggtcaagaccccagctgaggccttgcttgattccagggttgatggtaggggcaatcctaatgccacttctaaagccgggactaaggcagaccagagggtctgtggtcagcccctggttgtggccaatccccagggtgaggccttgcctggtgccaagaataaagtcaagggcaatccccatactgtgcttaaggtgggggctggagaaggtacaacagactctgcccagcctgaggcagtggtcagtttccagggtgaggccttgcttggcaccaagaataaagttaagggtaatcccaatgttgtgcttaaggcagaagttggggaaggtgcaatgggcactgcccagcttcagattatggccagttccaagggtgaggccttgcttgattctaagaataaggtcaagggtaattccaatgctgtgtctaaggcaggggctgggacagatacaacaggctctgtccagccccagattgtggccaattcccagggtgaggtcttgcctggtgccaagaataagatcagaggcaatcccactactgtgcctaattcaggggttgggccatatacaacagactctgcccggctccaggctgtggccaattctcagggtgaggtcttgcctggtgccaaaaataaggtcaaggccaatcttaatgctgtgtctaaggcagaagctgggatgggtgcaacaggctctgtccagccccaggctgtggctaattcccattgtgagaccttgcctggtgccaagaataaggtcaggggaaattggaatgctgtgtctaaggcaggggctgggatggatacaaggggctctgcccagccccaggctgtggccaattcccagggtgaagtcttgcctggtgccaagaataaggtcaagggcaatcccaatgtcgtgtctaaggcaggggccagagaagatacagtgggctctacccagcctcaggttttggccagctcccagcgtgagaccttgcctggtgccaggaataaggtcaagggcaattccaatgttgtgtctaaggcaggggccagagaagatacaatgggctctgcccagcctcaggttgtggccaactcccagcgtgagaccttgcctggtgccaggaataaggtcaagggcaattccaatgctatttctaaggcagaggctggggcaggcataatgggctctgtccaggtccaggttgtggccagttttcagggtgaggtcttgcctggggccaaaaataaggtcaggggcaattccaatgctgtgcctaaggcagaggctggggcagatacagtgggctctgcccagccccaagctgtcgctaattcccagagtgagaccttgcttggtgccaggaataaggtcaagggcaataccattgctgtgcctaaagcagggactggggcaggcacaaggcactctgcccagcctcagattgtggccggttcccagggtgagaccttgcctggggcaagggacaagtctatgtccacttctgaggcagaagccacagcagaagatgaggcctatgcaaagcctgaggctgaggccatgcccacttctgagagtgagggtgggtcaggcactcaagcctgcagaaagactcagcctaacatccatgactactactggaatgggattggtgttgaagactggattgctgctgagcggtggatcaaatttaggtttcagaccatggatggagactgggaaaatagcgtgtcctgggctgatgatgagaatgaagccagtattgggtcctggagtggggctagtgataaggctgggattattcggtcttgggctgtggcttgtgatgagaccagtgttaagtcctgggctggggccagggctgagaatgtggttggtattgggacttgggctagagctggggagcaggccagtggagggctctgggctgggggtcagactagtgaggggacctgggctggggacaaggccagtggaggagcctggactggggctgagaaccaggccagtggggggtcttgggctctcgctgggaatcaggccattggagagctttgggctgcgggtcaggccagtgatgggtcctggcctgggggacaggccagtggggtgtcctgggttggggaagaggccattggagggtcctggactggggctgagaaccaagccagtgaagggtcttgggctggagctggggctgggaatatgagtagtgtttcatactgggctggggttgtggatcaggccggtggagggtcctgggctgggactagtgatcaatctggtggtgggtccaagcctagatttgaggatcaagccagtggagaagggtcctgggctggggctggtggccaggctagtggagggtcaatgttggggcctgaggaccagtccagtggaaggtcttgggctgacactgcagaccaagccagtggagggtctaggctgggccacgtagatcagtccagtggtggggcctgggctgggacacttgatcagtctggtggtgggtccaagcctagatttgaaaatcagaccacagaagaagggtcttgggctggggctggtggccaggctggtggagggtccaaggtggggcctgaagaccagtccagtggaaggtcatgggctaactctggggaccaaatcagtggaggattcttagttgggattgtggaccaggccaatggagggtcctggactggggctgggcatccagctagtgttgggccaaagcctatatttgaggatcaggtcagtggcagagggtcctgggctgatgccagggagcaggttgttggagattctaggctggggcttagggaccagtctagtggagattcctgggctgacactggggaccaggccagtggatggttctgtgtttgccctgggagtcagacgaatggagggtcttggggtggggctagtggccaggatgttggagggtctaggccagggcccacgaaccagtccagtgctgggtcctgggatagccctgggagtcaggtcagtggaagctgctggactggggctggggctgtggatcaggctggtggttgttccaaacctggatttgaggatcaggccattggaggggggttctggcctggtgctggggaccagactggtggaggctccaggccagggtctgaggatcagtccagtggaataggttcctggggtgtggctggtggccaggtccttgggggagctaggccggggcctgcagaccagtccagtggtgggtcctgggctggcactgggaatcagtccagtggaaggtcctggattgggcctggggatcaggctgttgactgttccaagcctgaatttgaggatcaggcttgtggaggaggctcctgggctggtgctgggagccaagccagtggagaatcctgggctggatctaggcctgggaatgaggccattggaggatctaggatgggatctgaggaccaggccactggaggatcctgggctagatctgaggaccaggccagtggaaggttccaggtcagttttgaggtggaggccaatgaaggattctggtttgggcctggagctgaggccgttatagggtcttggtgctggacagaggaaaaagctgatattgtgtccaggcctgatgataaagatgaggccactactgcatccagatcaggggctggggaagaggccatgatttgttctaggattgaggctgagaacaaggctagtagtggctcctggattagatctgaggaggtggcttatatgggctcctgtgtaggggctgaggctggggctggggctgaggctggggctggggctgaggctggggctggggctggggctgaggctggggctgaggctggggctggggctggggctgggcctgggactgagtctggggctgggatttggtcctgggatggagatgcaaccactgtagagtctaggcttggggctggggaagaggctggtgtagagtcctggaccttggctaggaatgtgggagaggatgagctaagtagagagtccagccctgatattgaggagatcagtttaaggtctttgttttgggctgagagtgagaacagtaatacgttcagatctaagagtgggaaagatgccagttttgagtctggagctggggataacaccagcatcaaggataagtttgaggctgctggtggagttgatatagggtcttggttctgtgctggtaatgaaaacacaagtgaggacaaatctgcacctaaggctaaagccaaaaagtcatctgagtcaagaggcatatatccgtacatggtccctggggcaggaatggggtcatgggatggagccatgatctggtcggaaactaagtttgcacaccaaagtgaggccagcttcccagttgaagatgagtccagaaaacaaaccaggactggggaaaaaactcggccctggtcttgccgctgtaaacacgaagctaatatggatccacgagatcttgaaaaactcatttgcatgattgagatgactgaagatccttctgttcatgaaatagccaataatgctttatataacagtgctgattattcttattctcatgaagttgttcgtaatgtaggtggaatttcagttattgaaagcttgctcaataatccctaccccagtgttaggcagaaggctttaaatgcactgaataatatctcagtggctgctgaaaaccataggaaggttaaaacttacttaaaccaagtatgtgaagacactgtcacctatcccttgaattcaaatgtgcagttggctggactaaggttgataaggcatctgactattaccagtgaatatcagcatatggttacaaattatatttcagaatttcttcgtttgttaacggtgggaagtggagaaactaaagaccatgttttgggaatgcttttgaatttctctaaaaatccatctatgacaaaagacttgctcattgccaatgcaccaacatcactgattaacatttttagcaagaaagagacaaaggagaatattcttaatgctctttcactatttgaaaatataaattaccattttaaaagaagagcaaaagcatttacccaggacaaattcagtaaaaattccctttatttcctattccaacgacctaaagcatgtgccaagaaacttcgagccttagcagcagaatgcaatgaccctgaggtgaaagagagagttgagctattaataagtaaactctga

SEQ ID NO: 20238 - DNA, 810 bp, Homo sapiens
  MAP TO AL139347.2; EXPRESSED IN ADULT LIVER, SIGNAL =  15; EXPRESSED IN BRAIN, SIGNAL = 6.6; EXPRESSED IN HELA, SIGNAL =  15; NT HIT: gi16157477, EVALUE 0.00e+00; SWISSPROT HIT: P18124, EVALUE 1.00e-123; EST_HUMAN HIT: BF967942.2, EVALUE 0.00e+00
atgagagatttgactagtagaaagaccattaaagacaaaagtttagctctttttccggctggaaccatggagggtgtagaagagaagaagaaggaggttcctgctgttccagaaacccttaagaaaaagcgaaggaatttcgcagagctgaagatcaagcgcctgagaaagaagtttgcccaaaagatgcttcgaaaggcaaggaggaagcttatctatgaaaaagcaaagcactatcacaaggaatataggcagatgtacagaactgaaattcgaatggcgaggatggcaagaaaagctggcaacttctatgtacctgcagaacccaaattggcgtttgtcatcagaatcagaggtatcaatggagtgagcccaaaggttcgaaaggtgttgcagcttcttcgccttcgtcaaatcttcaatggaacctttgtgaagctcaacaaggcttcgattaacatgctgaggattgtagagccatatattgcatggaggtaccccaatctgaagtcagtaaatgaactaatctacaagcgtggttatggcaaaatcaataagaagcgaattgctttgacagataacgctttgattgctcgatctcttggtaaatacggcatcatctgcatggaggatttgattcatgagatctatactgttggaaaacgcttcaaagaggcaaataacttcctgtggcccttcaaattgtcttctccacgaggtggaatgaagaaaaagaccacccattttgtagaaggtggagatgctggcaacagggaggaccagatcaacaggcttattagaagaatgaac

SEQ ID NO: 20239 - DNA, 609 bp, Homo sapiens
  MAP TO AC005788.1; EXPRESSED IN BRAIN, SIGNAL = 2.4; EXPRESSED IN HELA, SIGNAL = 2.2; EXPRESSED IN PLACENTA, SIGNAL = 1.8; EXPRESSED IN ADULT LIVER, SIGNAL = 1.9; EXPRESSED IN HEART, SIGNAL = 1.4; EXPRESSED IN LUNG, SIGNAL = 1.4; EXPRESSED IN BONE MARROW, SIGNAL = 1.5; NT HIT: gi14765222, EVALUE 0.00e+00; SWISSPROT HIT: P23468, EVALUE 2.00e-48; EST_HUMAN HIT: BI962554.1, EVALUE 0.00e+00
cttggtcccgcaggaacgtccggtagcggacgggggggctgaaggggccagggccccggcgcgtgtgggctcgcacttggaggtcataggccgtgtcgggcttcaggccctgcagcgtgagcgcgttctccgcgcccggctcagccgctgccggcagctcagtctctcgggcagggcccagggcaccggcctcccgcacggccaccgtgtatttgacgatggccccgttgcgctcggcgggcacgggtggcagccagcggagaaggacggtcccggccgaggcgttgccggccgcctccagaatctgcgggtggccacggggcgtgtcctccgggatgctcaggacctcggctgcctcctcgcccaggccgccgcggctccgggccgcaagccggaacacatacgtggcccccttgtgcacgcctgatgccgtgtagcggtcctcggagggcgggaactccagggtggccaggggcgtcgagtcctcacggccaaactgcaggcggtagcccagcacctggtcctccgcggtgccagccgggggctcccagcgtgccagcaggctgccctcgggggtctgctgcaccgacagggttgggcggcccagca

SEQ ID NO: 20240 - DNA, 1005 bp, Homo sapiens
  MAP TO AL096810.1; EXPRESSED IN BRAIN, SIGNAL = 1.6; EXPRESSED IN ADULT LIVER, SIGNAL = 1.3; EXPRESSED IN PLACENTA, SIGNAL = 1.7; EXPRESSED IN LUNG, SIGNAL = 1.2; EXPRESSED IN BONE MARROW, SIGNAL = 1.2; EXPRESSED IN FETAL LIVER, SIGNAL = 1.4; NT HIT: AL096810.1, EVALUE 0.00e+00; SWISSPROT HIT: P13983, EVALUE 9.00e-40
ccccccgggaaccatccctcctaatcccaccagaccacctgcccgccacgggcacctccctcctaatcccaccagacaacctgcccgccacagacacctccctcctaatccctccagaccacctgcccaccacaggcacctccctcctaatcccaccagacaacctgcccaccacaggcacctccctcctaatcccaccagacaacctgcccaccacgggcacctccctcctaatcccaccagacaacctgcccgccacagacacctccctcctaatcccaccagacaacctgcccccccgggaaccatccctcctaatcccaccagaccacctgcccgccacgggcacctccctcctaatcccaccagacaacctgcccgccacagacacctccctcctaatccctccagacaacctgcccaccacaggcacctccctcctaatcccaccagacaacctgcccaccacaggcacctccctcctaatccctccagacaacctgcccaccacggacacctccctcctaatccctccagaccacctgcccaccacaggcacctccctcctaatccctccagaccacctgcccaccacaggcacctccctcctaatccctccagaccacctgcccaccacagacacctccctcctaatccctccagaccacctgcccaccacagacacctccctcctaatcccaccagacaacctgcccaccacgggcacctccctcctaatcccaccagacaacctgcccaccacgggcacctccctcctaatcccaccagacaacctgcccaccacaggcacctccctcctaatcccaccagaccacctgcccaccacgggcacctccctcctaatcccaccagaccacctgcccaccacgggcacctccctcctaatcccaccagaccacctgcccgccacgggcacctccctcctaatccctccagaccacctgcccgccacgggcacctccctcctaatccctccagaccacc

SEQ ID NO: 20241 - DNA, 597 bp, Homo sapiens
  MAP TO AC007009.1; EXPRESSED IN ADULT LIVER, SIGNAL = 2.6; EXPRESSED IN PLACENTA, SIGNAL = 8.3; EXPRESSED IN BRAIN, SIGNAL = 4.5; EXPRESSED IN LUNG, SIGNAL = 2.9; EXPRESSED IN HEART, SIGNAL = 3.1; EXPRESSED IN BONE MARROW, SIGNAL = 4.4; EXPRESSED IN HELA, SIGNAL = 4.3; NT HIT: X80130.1, EVALUE 5.70e-01
ggtagtgagagaggcgtgagtggttgtgaaagtggtagcagtgtttgtgttggtgatgctggtgatggcagcggtggtgacaaaggaggtgaaagcaatgacagcagcagtgctagaggaggtgctggtggtagtggtgatggaggagatgatggtagtggtggaagaggtgatggtggtagtggtgggggtagtggtgatgaaggagataatggtggtagtggtggtggaggtgatggtgatggtggcggaggaggtgatggtggtagtggtgggggtagtggtgttgaaggagatggtggtggtggtggtggaggtgatggtgatggtgatagtggtgggggtagttgtgatgaaggagatggtggttgtggtggtggtggtgatggtggaggaggtgatggtggtagtggtgggggtagtggtgattaaggagataatggtggtggtggttgtggttgttgtggaggagatggtggttgttgtggaagaggtgatggtggtagtgctgggggtagtggtggtgaaggagatggtggtggtggtggtggtggtggaggtggtgatggtaatagcagtagtgaaagaggtgagtgg

SEQ ID NO: 20242 - DNA, 747 bp, Homo sapiens
  MAP TO D16583.1; EXPRESSED IN HEART, SIGNAL = 2.1; EXPRESSED IN BONE MARROW, SIGNAL = 2.4; EXPRESSED IN LUNG, SIGNAL =   2; EXPRESSED IN ADULT LIVER, SIGNAL = 2.1; EXPRESSED IN BRAIN, SIGNAL = 2.1; EXPRESSED IN HELA, SIGNAL = 2.3; EXPRESSED IN PLACENTA, SIGNAL = 3.6; EST_HUMAN HIT: AI695885.1, EVALUE 3.00e-35; SWISSPROT HIT: P19113, EVALUE 0.00e+00; NT HIT: gi14785285, EVALUE 0.00e+00
ggtcctaattgtctcacagaaaatgtgttaaaggaaatagctaaagctggccgtctcttcctcatcccggccactatccaggacaagttaatcatccgtttcactgtgacatcccagtttaccactagggatgacatcctgagagactggaatctcattcgagatgctgccactctcatcctgagtcagcactgtacttcccaacccagccctcgggttgggaacctcatctcccaaatcaggggtgccagagcctgggcctgtggaacgtcccttcagtctgtcagtggggcaggagatgatccagtccaggccaggaagatcatcaagcagcctcagcgtgtgggagccggtcccatgaaaagggaaaatggcctccatcttgaaaccctgctggacccagttgatgactgcttttcagaagaggccccagatgccaccaagcacaagctgtcctccttcctgttcagttacttgtctgtgcagactaagaagaagacggtgcgctccctcagttgcaacagtgtgccagtgagtgctcagaagccactgcccacagaggcctctgtgaagaatgggggctcctccagggtcagaatcttttccaggtttccagaagacatgatgatgctgaagaaaagtgccttcaaaaaactcatcaaattctacagcgtccccagctttcctgaatgcagctctcaatgtggactccagctgccctgttgccctctgcaggccatggtttag

SEQ ID NO: 20243 - DNA, 720 bp, Homo sapiens
  MAP TO AC008468.4; EXPRESSED IN BONE MARROW, SIGNAL = 1.3; EXPRESSED IN FETAL LIVER, SIGNAL = 1.2; EXPRESSED IN LUNG, SIGNAL = 1.3; EXPRESSED IN HEART, SIGNAL = 1.3; EXPRESSED IN ADULT LIVER, SIGNAL = 1.2; EXPRESSED IN BRAIN, SIGNAL = 2.6; EST_HUMAN HIT: BF931752.1, EVALUE 0.00e+00; SWISSPROT HIT: Q9UN73, EVALUE 1.00e-125; NT HIT: gi14861872, EVALUE 0.00e+00
tgccgcctctgggcagcaacgtgacgctgcaggtgttcgtgctggacgagaacgacaacgcgccggcgctgctggcgcctcgggtgggtggtactggtggtgcagtgagcgagctggtgccgcggtcactgggtgcaggccaagtggtggcgaaggtgcgcgcagttgacgccgactcaggctacaacgcgtggctttcgtatgagctgcagcccccggcaagcagcgctcgcttcccgtttcgcgtggggctgtacacgggcgagatcagcaccactcgtgtcctggacgaagcggactctccgcgccaccggctgctggtgctggtgaaagaccacggtgagccggcgctgacagcgacggccacggttctggtgtcgctggtggagagtggccaggctccaaaggcgtcatcacgggcgtcggtgggcgccgcgggcccagaggcggcgctggtggatgtcaacgtgtacctgatcatcgccatctgcgcggtatccagcctgctggtcctcacgctactgctgtacacagcgctgcggtgctcggcgccacccaccgagggcgcgtgcacggcggacaagcccacgctggtgtgctccagcgcagtggggagctggtcgtactcgcagcagaggcggcagagggtgtgctccggggagggcccacccaagatggatctcatggcctttagccccagcctttcaccttgtcctatta

SEQ ID NO: 20244 - DNA, 2229 bp, Homo sapiens
  MAP TO AC010328.4; EXPRESSED IN BRAIN, SIGNAL = 1.7; EXPRESSED IN HELA, SIGNAL = 1.8; EXPRESSED IN ADULT LIVER, SIGNAL = 1.8; EXPRESSED IN BONE MARROW, SIGNAL = 1.5; EXPRESSED IN FETAL LIVER, SIGNAL = 1.7; EXPRESSED IN LUNG, SIGNAL = 1.5; NT HIT: gi14754702, EVALUE 0.00e+00; EST_HUMAN HIT: BE536889.1, EVALUE 0.00e+00; SWISSPROT HIT: Q05481, EVALUE 0.00e+00
atgaaagatttactacacaaagggaagagtaatacaggagaagtattccaaacagtgatgttggaaagacaggaaagccaagacattgaaggatgttccttcagggaagtccagaaaaatacacatggccttgagtatcaatgcagagatgctgaaggaaattacaaaggagtgcttttgacccaagaaggcaatctcactcatggaagagatgaacatgataaaagagatgcaagaaacaagcttattaaaaatcagcttggattaagccttcagtcacatctgcctgaactgcagctttttcaatatgaagggaaaatttatgaatgtaatcaggttgagaagtctttcaacaataattcctcagtttcaccacctcaacaaatgccttataatgtcaaaacccacatttctaagaaatatctcaaagattttatctcttctttattactcacacaggggcaaaaagcaaataattggggaagcccttacaaatctaatggatgtggcatggtctttcctcaaaattcacaccttgcaagtcatcagagaagtcatactaaagagaaaccttacaaatgttatgagtgtggcaaagcctttagaacacgttcaaacctaactacccatcaggtgatccatactggcgaaaaacgttacaaatgtaatgagtgtggtaaggtctttagtcgaaattcacaactctcacaacatcagaaaattcacactggagagaaaccttataaatgtaacgaatgtggcaaggtcttcactcagaattcacaccttgtaagacatcgaggaattcatactggagagaaaccttacaagtgtaatgagtgtgggaaagcctttagagctcgttcaagcttagctatccatcaggcaacccacagtggagaaaaaccttacaaatgtaatgaatgtggcaaggtcttcactcaaaattcacaccttacaaatcactggagaattcacactggagagaaaccttacaagtgtaatgagtgcggcaaagcctttggtgttcgttcaagcctagctattcatctggtaattcacaccggagaaaagccttacaaatgtcatgaatgcggcaaggtctttaggcgtaattcacaccttgcaaggcatcagctaattcatactggagagaaaccttataagtgtaatgagtgtggcaaagcctttagagcacattcaaacctaactacccatcaggtcatccatactggagaaaagccttacaaatgtaatgaatgtggcaaggtcttcactcaaaattcacaccttgcaaatcatcaaagaattcatactggagtgaagccttatatgtgtaatgagtgcggcaaagccttcagtgtgtattcaagcctaactacccatcaggtcatccatactggagaaaaaccttacaaatgtaatgagtgtggcaaggtcttcactcagaattcacaccttgcaagacatcggggaattcatactggagagaaaccttataaatgtaatgaatgtggcaaggtctttaggcataattcatacctttcaaggcatcagcgaattcatactggagagaaaccttacaagtataatgagtatggcaaagcctttagtgaacattcaaacctaactacccatcaggtcatccatactggtgaaaaaccttacaaatgtaatgagtgtggcaaggtcttcactcagaattcacaccttgcaagacatcggagagttcatactggaggtaaaccttaccagtgtaatgaatgtggcaaagcctttagtcaaacatcaaagcttgcaaggcatcagagagttcatactggagagaaaccatatgagtgtaatcagtgtgggaaagcctttagtgtccgttcaagcctaactacccatcaggcaatccatactggaaaaaaaccttacaaatgcaatgagtgtgggaaggtcttcactcagaattcacaccttgcaagacatcggggaattcatactggagagaaaccttacaagtgtaatgagtgtggcaaagcctttagtcaaacttcaaaacttgcaaggcatcagagaattcataccggagagaaaccatatgagtgtgggaaaccctttagtatctgttcaagcctaactacccatcagacaatccatactggtgggaaaccttacaaatgtaacgtgtggaaagttctaaagtcagagttcaaaccttgcaagccatcacagaattcatag

SEQ ID NO: 20245 - DNA, 472 bp, Homo sapiens
  MAP TO AC005618.1; EXPRESSED IN PLACENTA, SIGNAL = 1.5; EXPRESSED IN HELA, SIGNAL = 2.6; EXPRESSED IN ADULT LIVER, SIGNAL = 1.5; EXPRESSED IN BRAIN, SIGNAL = 1.7; EXPRESSED IN HEART, SIGNAL = 1.8; EXPRESSED IN FETAL LIVER, SIGNAL = 1.6; EXPRESSED IN LUNG, SIGNAL = 1.6; EXPRESSED IN BONE MARROW, SIGNAL = 1.6; SWISSPROT HIT: Q9UN66, EVALUE 2.00e-31; NT HIT: gi14724452, EVALUE 0.00e+00; EST_HUMAN HIT: AA296447.1, EVALUE 0.00e+00
atggctccactggtgtggagctggcaccccgctccgcagattccggctacctggtgaccaaagtggtggcagtggacagagactcaggtcagaatgcctggctgtcctacagcctactcaagtccagcgagccgggactatttgcagtggggctgcacacaggcgaggtgcgcaccgcacgggccctgctggacagagacgcgctcaagcagaggcttgtagtggtcgtccaggaccatggccagccccctctctcggccaccgtcacactcactgtggctgtggccgacagcatcccagatgtcctggctgacttgggcagcctcaagccttcagcagacccagacgactcgggcctcacactctatctcgtggtggcagtggccgctgtctcctgcgtcttcctggcttttgtcacggtgctgctagcactcaagctgagacgctggcacaagtcacgcctgcttcacgc

SEQ ID NO: 20246 - DNA, 472 bp, Homo sapiens
  MAP TO AL008723.8; EXPRESSED IN ADULT LIVER, SIGNAL = 2.9; EXPRESSED IN PLACENTA, SIGNAL = 4.4; EXPRESSED IN HELA, SIGNAL = 0.86; EXPRESSED IN BONE MARROW, SIGNAL =  83; EXPRESSED IN HEART, SIGNAL = 2.7; SWISSPROT HIT: P15814, EVALUE 1.00e-31; NT HIT: X57808.1, EVALUE 2.00e-49; EST_HUMAN HIT: BF869264.1, EVALUE 2.00e-53
acagagatttgttttaggaacattgtgtgacacccttctgagacactgtggaccatgtctgaggggtcctgcactggcactgagggggcctgacccctcttcatacactgaggtcagggggctcccaggtacacaacaggatgctgacctcctgccgctcgcccactcacaggccagcccaaggccaccccctcggtcactctgttcccgtcctcctctgaggagctccaagccaaaaggccacactgctgtgtctcatgagtggcttctacccgggagctgtgacggtggcctggaaggcaaacagcacccctgtcacccagggtatggaagtcaccaaggcctccaaacagagcaacaagtacacagccagaagcgacctgagcctgacaccccatcaatggaggtcccgcagcagctacagctgccgggtcacacacaaagagagcgctgtggagaagacagtggcccc

SEQ ID NO: 20247 - DNA, 596 bp, Homo sapiens
  MAP TO AP001674.1; EXPRESSED IN FETAL LIVER, SIGNAL = 5.7; EXPRESSED IN ADULT LIVER, SIGNAL =  11; EXPRESSED IN HELA, SIGNAL =  34; EXPRESSED IN PLACENTA, SIGNAL = 7.3; SWISSPROT HIT: P05092, EVALUE 3.00e-96; NT HIT: gi14780058, EVALUE 0.00e+00; EST_HUMAN HIT: BG716227.1, EVALUE 0.00e+00
aaggcaagactgaaggtgtgctggtaggatggcgtcttaagaagcaattacttggctttgcagacgccgccgccgaggaaaaccgtgtactattagccatggtcaaccccaccgtgttcttcgacattgccgtcgacggcgagcccttgggccgcgtctcctttgagctgtttgcagacaaggtcccaaagacagcagaaaattttcgtgctctgagcactggagagaaaggatttggttataagggttcctgctttcacagaattattccagggtttatgtgtcagggtggtgacttcacacgccataatggcactggtggcaagtccatctatggggagaaatttgaagatgagaacttcatcctaaagcatacaggtcctggcatcttgtccatggcaaatgctggacccaacacaaatggatcccagtttttcatctgcactgccaagactgagtggttggatggcaagcatgtggtgtttggcaaagtgaaagaaggcatgaatattgtggaggccatggagcgctttgggtccaggaatggcaagaccagcaagaagatcaccattgctgactgtggacaactcgaataa

SEQ ID NO: 20248 - DNA, 697 bp, Homo sapiens
  MAP TO AC008101.15; EXPRESSED IN LUNG, SIGNAL = 3.4; EXPRESSED IN PLACENTA, SIGNAL = 4.2; EXPRESSED IN HELA, SIGNAL = 8.9; EXPRESSED IN ADULT LIVER, SIGNAL =   2; EST_HUMAN HIT: BG697371.1, EVALUE 0.00e+00; SWISSPROT HIT: Q9NY65, EVALUE 1.00e-124; NT HIT: gi16166973, EVALUE 0.00e+00
acagatgcttgctctggcctgcagggcttcctgattttccacagttttggtgggggcactggctccggcttcacttctctgctgatggaacgcctctccctggattatggcaagaaatccaagctggagtttgccatctacccagccccccaggtctctactgcagtggtggagccctacaactccatcctgaccacccacaccacactggaacattcagattgtgctttcatggtggacaacgaagccatctatgacatctgccgcaggaaccttgacattgagcgccctacctataccaacctcaaccgcctcatcagtcagattgtgtcctcaatcactgcttctctccgctttgacggggccctcaatgtggacctcactgagttccagaccaacctggtgccctacccccgcatccacttcccgctggtcacctacgcgcccatcatctctgccgagaaagcctatcacgaacagctctctgtggccgagataaccagctcctgctttgagcccaatagccagatggtgaagtgcgacccgagacatggcaagtacatggcctgctgcatgctctaccggggcgacgtggtgcccaaggatgtgaatgtcgctattgctgccatcaagaccaagaggaccatccagtttgtagactggtgtcccacaggcttcaaggtgagagctgatgact

SEQ ID NO: 20249 - DNA, 704 bp, Homo sapiens
  MAP TO Z97653.12; EXPRESSED IN HEART, SIGNAL =   2; EXPRESSED IN LUNG, SIGNAL = 2.2; EXPRESSED IN BONE MARROW, SIGNAL = 0.95; EXPRESSED IN ADULT LIVER, SIGNAL = 2.2; EXPRESSED IN HELA, SIGNAL = 0.46; EXPRESSED IN PLACENTA, SIGNAL = 1.5; NT HIT: AE004762.1, EVALUE 4.30e-02; EST_HUMAN HIT: AW300990.1, EVALUE 0.00e+00; SWISSPROT HIT: P20186, EVALUE 9.50e-02
ggttgctgctgcccgcccctgccccccagccctgtcccccccgagcctggtgcacacctcgaggcctgcgtccgtgatggtggagcgcttgaggctcatggctttgacacccttcttggagagcgcatagttgtcaatgaactcacagatgtccaggtcggagacgccaaccaggcagaagccctcgaagcctctggcggcaaaaccctgcaggttcacgaactccttctcgccaccaggcagcacgttgtagagctccttggcatgcagcaccggcgtgaggcctgcccagaacttgggctggtacagcacgcgccgccaggccttgcacacctgggccagcacacacttctcgcaggccgagaaataccagaagagcccattgaggatcttctcgtccgtggccagcggcggccgctccgctgggtgcccaggtgccaaggctgaggctggtccacctgccggggtgcacgggcccccagccagggcagcccgggacagtggagcagccaggctgggtggtgggagggtgggtgggggtggtggctggcaggggcggttcttggtggctggcgtgcccttggtgatgctggccgcacccaggccgttgggctggcccggcagcttcaccagaccgtttcgaggcaagcatggaggcttggggtcgccgtcgatgcccgggctcgacatcttcctggcacgct

SEQ ID NO: 20250 - DNA, 558 bp, Homo sapiens
  MAP TO AC005368.1; EXPRESSED IN ADULT LIVER, SIGNAL = 1.8; EXPRESSED IN PLACENTA, SIGNAL = 1.8; EXPRESSED IN BRAIN, SIGNAL = 1.2; EXPRESSED IN HELA, SIGNAL = 1.9; EXPRESSED IN BONE MARROW, SIGNAL = 2.2; EXPRESSED IN LUNG, SIGNAL = 2.7; EXPRESSED IN HEART, SIGNAL = 1.6; NT HIT: gi14724241, EVALUE 0.00e+00; EST_HUMAN HIT: AA732869.1, EVALUE 6.00e-88; SWISSPROT HIT: O60610, EVALUE 2.00e-08
cttggaccagtttggcctccggagctgcacctctggcttataaagctttttgggggttaatccaaatggcagaactggggctgcaggaactccaaatccaaatgggggaggtggaggcatacccattccgggtggaggtggaggaatgccagggcctccgggaaatggaggaggtggagggattccaggaccaccaggaagagggggaggaggaggtggcattcctgcttctccaggcaagggaggaggtggggggggaattccagcactcccaggcaaaggaggtggtggtggggggattctagcactcccaggcaaaggaggaggtggggggatggcagtacctccaggcaaagaagagggtgaagggatgccaacaccctcaggcaaaggagggggtggagggatggtagcatccccagacaaaggagggggtggagagatagcagtacctccaggtaaagaagggggtgaggagatgcaaacacccccaggcaaaggaggtggaggaggaggaggaggaggaggaggaggaggagtggtactatccccaggagc

SEQ ID NO: 20251 - DNA, 704 bp, Homo sapiens
  MAP TO AL138849.5; EXPRESSED IN BONE MARROW, SIGNAL = 2.6; EXPRESSED IN FETAL LIVER, SIGNAL = 2.1; EXPRESSED IN LUNG, SIGNAL = 2.5; EXPRESSED IN HEART, SIGNAL = 2.8; EXPRESSED IN PLACENTA, SIGNAL = 3.8; EXPRESSED IN ADULT LIVER, SIGNAL = 2.3; SWISSPROT HIT: P14164, EVALUE 2.40e+00; NT HIT: gi14728782, EVALUE 0.00e+00; EST_HUMAN HIT: AL529781.1, EVALUE 0.00e+00
cttgccagaggttaaaataaacttatcaaacacataatataattcctgggtggggaggttatcatcatcattaaggtcagaagcatcttctgtagctttgcagttgcaagaggtagcagatgtgtcggtgcacacactctgatgtgaactctctgtttctaaatttgacctgcagtctgttccagtagatttatctgggtcaggcgacttagacaaatcaatgcaattacattggctgagctctttttttaaacaagtttctgaaggcgctaaatcatcttgtttcttatctaattttggctctatttcactgcttttgctggtagaaagagatgaagagtcctgtccgtggtcagcaaaatctagttcatttaccaacaaattgttgttgtcaataatacatctctgtgatgtacagtccatttcatcacattgaacaggttgctctctttctgcatttattttttctgtggtttccccaagcagaatacaaccattggttgccatattgttcgacttgactggtttcttattgcttattttccccttctctcttttcttgaaatccactgtagacttatttccacccttcgtctgaggacaggcaaaataccgataagctgccctaaatctctccacaacatattcgtaaaccagctggctgtttaagctccgtgcaacattcctcttgactgaaaatggat

SEQ ID NO: 20252 - DNA, 734 bp, Homo sapiens
  MAP TO AL139248.2; EXPRESSED IN PLACENTA, SIGNAL = 2.6; EXPRESSED IN ADULT LIVER, SIGNAL = 1.9; EXPRESSED IN BRAIN, SIGNAL = 1.7; EXPRESSED IN HELA, SIGNAL = 1.2; EXPRESSED IN BONE MARROW, SIGNAL =   2; EXPRESSED IN LUNG, SIGNAL = 1.9; EXPRESSED IN HEART, SIGNAL = 2.3; EXPRESSED IN FETAL LIVER, SIGNAL = 1.7; SWISSPROT HIT: Q9UPN9, EVALUE 2.00e-18; NT HIT: gi13638241, EVALUE 0.00e+00; EST_HUMAN HIT: BE730280.1, EVALUE 0.00e+00
cttctccttgtaggacacatttggctggatcaacctctttggtattaatcgtaccataaatttcatagccacggcactggcctgctttctcctgaggacagaagcgtatcttatcatttactccaggacgggtgctatattgaactttgttcagcttcctgagccgttctaccaccaccctcttggtgatgaggatctccaagtctgagccgctggtcagcaagtgctcggtgaactccactccagtccgcatgtctgccagtaactgttccagctgggccttctgcagctgcagggaattttccttctgggcccgtatgtcttccagctgcttcagcagcttgtcccgatgctcctcaatggccttaatgtagccctccgagaatgtccggacatcagctgccactgcctccactcgcttctggagggcactgtttattatgtggatctgagccagggcttcctccagggcctccacgtggggctgagtacctttgaggagctcccacacagagtccccatgcttgtggatgacattgctggtgaagtcacaggggtgttcccgatgctcccccaccacacaatcctggcacacgggccggtcacagaactcacagaacagcctcagttcctctgcagggtgaacaggacacaggatgggcttcccaatccggctgtagcctttcaagtcttttaggtccaccatggtgtggtaagtcgttttcttctgccgc

SEQ ID NO: 20253 - DNA, 598 bp, Homo sapiens
  MAP TO AL157858.2; EXPRESSED IN ADULT LIVER, SIGNAL = 1.4; EXPRESSED IN HELA, SIGNAL = 1.4; EXPRESSED IN BRAIN, SIGNAL = 2.6; EXPRESSED IN HEART, SIGNAL = 1.8; EXPRESSED IN BONE MARROW, SIGNAL = 1.4; EXPRESSED IN LUNG, SIGNAL = 1.5; EXPRESSED IN FETAL LIVER, SIGNAL =   1
cattttaaccttcaacaccaccatcacctccatcacgagtatcaccatcaccaccattgtcaaccgaaccatcaccaccaccattaccctaaccatcactatcatcaccaccatcattagcatcatcactgctgccaccatcaccattgctacctccatcaccccattaccaccagcatcaccactaccaccatcaccccattaccaccagcatcaccactaccaccatcaccccattaccaccagcatcaccactaccaccaccaccccattaccaccagcatcaccactaccaccaccaccccattaccaccagcatcaccactaccaccaccaccccattaccaccagcatcaccactaccaccaccaccccattaccaccagcatcaccactaccaccaccaccccattaccaccagcatcaccactaccaccatcaccccattaccaccagcatcaccactaccaccaccaccccattaccaccagcatcaccactaccaccatcaccccattaccaccagcatcaccactaccaccaccaccccattaccaccagcatcaccactagcaccatctgcttcatcacattttga

SEQ ID NO: 20254 - DNA, 591 bp, Homo sapiens
  MAP TO AC024196.2; EXPRESSED IN HELA, SIGNAL =   3; EXPRESSED IN PLACENTA, SIGNAL = 1.6; EXPRESSED IN ADULT LIVER, SIGNAL = 1.6; EXPRESSED IN BRAIN, SIGNAL = 1.8; EXPRESSED IN FETAL LIVER, SIGNAL = 1.7; EXPRESSED IN HEART, SIGNAL = 1.8; SWISSPROT HIT: P04264, EVALUE 2.00e-25; NT HIT: gi5174490, EVALUE 2.00e-84; EST_HUMAN HIT: BG682569.1, EVALUE 2.00e-84
cttgtcaatgaaggaggcaaattggttgttgagtgacttgatttgctccctttctcgagacttcaccttttggatctcagggtcaatctccacattgaggggctgaagaaggctctggttgatagtgacttcttgtatgccaccaggagggcagacaggaccataaccacccccatatccaccacccccaaagccacctccaccaaaaccaccaccaccactgccaaaaccaccaaagccaccacccccaatgccacctccaccaaagccaccaccaccaaagccaccaccaccaaagccaccaccaccataaccaccaccaaagccactaccacgtccacctcctctagccacacttatggagatgcttttactgccaccaaggttaacaagactccgacttccaaatccaccaccagcaccaaagctaccaccaccaccaccacagcttgaaaatctcccaccacctcctccactgcggcgtgtggagctgctggtggtcctgcgctggtagttgatgatcccagcagagccagagctgaagccccctccacttcggtacccagacctggaactaaactgtcgactcat

SEQ ID NO: 20255 - DNA, 552 bp, Homo sapiens
  MAP TO AL022238.1; EXPRESSED IN HELA, SIGNAL = 0.33; EXPRESSED IN BRAIN, SIGNAL = 1.4; EXPRESSED IN ADULT LIVER, SIGNAL = 1.4; EXPRESSED IN BONE MARROW, SIGNAL = 1.1; EXPRESSED IN LUNG, SIGNAL = 1.2; EXPRESSED IN HEART, SIGNAL = 1.4; EST_HUMAN HIT: BI918600.1, EVALUE 0.00e+00; SWISSPROT HIT: P25439, EVALUE 3.10e-02; NT HIT: gi14779091, EVALUE 0.00e+00
gttgttcgccgcaggacccagcggaggaagtccaccatcactgctctgctcttcggtgagagctctgcgagtgccaggcagtgtgggcatgcgggagtctgtcctcacgctcatgtggacgtggagcttcctcctcgggggcctggagtgggctgtggtcaccatggttctctgggcctcctaggggaggatgacctggaggcactcaaggccaagaacatcaagcagacggaactggtggctgacctccgggaagccatcctgcgcgtggcacgccacttccagtgcacagaccccaaaaactgcagcgtggtgagtcgccagctccctgggctgctaccaaacacggccctaactcctccaacccccttggtgggcctgtgttcactgtggcaggagctgactccagactatagcatggagagccaccagcgggaccacgagaactacgtggcgtgctcacgcagccaccggcgccgagccaaggccctgctggactttgagcggcacgacgacgacgagctgggcttccgcaagaacgacatcatcaca

SEQ ID NO: 20256 - DNA, 628 bp, Homo sapiens
  MAP TO AC008481.4; EXPRESSED IN LUNG, SIGNAL = 2.1; EXPRESSED IN ADULT LIVER, SIGNAL = 2.4; EXPRESSED IN BRAIN, SIGNAL = 2.1; EXPRESSED IN HELA, SIGNAL = 0.92; EXPRESSED IN HEART, SIGNAL = 2.2; EXPRESSED IN BONE MARROW, SIGNAL = 2.1; NT HIT: gi16176275, EVALUE 0.00e+00; EST_HUMAN HIT: BI764621.1, EVALUE 0.00e+00; SWISSPROT HIT: P17111, EVALUE 5.50e-01
tgggcaatgggctggtggctggcagctctgactcatccagctctggctctgcctctgactctgaggagtctcctgagggccagccggtcaaggctgcggcagcggcagcggcagcgacgcccaccagcccggtgggcagcagcgggctcatcactcaggagggcgtgcacattccctttgacgtccaccacgtggaaagcctggccgagcagggtaccccgctgtgctccaacccagcaggcaatgggcctgaagccctggagacagtggtgtgcgtgccggtgcctgtgcaagtgggtgcgggccccagcgccctctttgagaacgtgccccaggaggccctgggtgaggtggtggccagctgccccatgccaggcatggtgcccggctcacaggtgatcatcattgcgggccctggttacgacgctctcacggccgagggcattcacctcaacatggcagcaggcagcggtgtccccggcagtggactgggcgaggaggtgccctgtgccatgatggagggtgtggcagcctacacccagacagagcccgagggtagccagcctagcaccatggacgccaccgcagtagcaggcatcgagaccaagaaaggtctgggggacctgtc

SEQ ID NO: 20257 - DNA, 1485 bp, Homo sapiens
  MAP TO AL159140.2; EXPRESSED IN ADULT LIVER, SIGNAL = 2.4; EXPRESSED IN HELA, SIGNAL = 1.9; EXPRESSED IN HEART, SIGNAL = 2.7; EXPRESSED IN FETAL LIVER, SIGNAL = 2.4; SWISSPROT HIT: Q9QXZ9, EVALUE 1.00e-13; NT HIT: gi14753049, EVALUE 0.00e+00; EST_HUMAN HIT: BF516449.1, EVALUE 0.00e+00
ttagaggctggtatccccagcttcggatttaggctgtttggtcactgccgtcaccggctctggtggtccctctcggcagaaaagtacaactggatttttgcgggcccacatggccacgtcccctgccactccgctggccgggttggaagaggacatcctgttgcaggcccccagccggttggcatagcggtttcgaaggcgactgcggcttctggcttgcagacccgggccctggctgggcaggaaagcgtccacattcctagtccggtagccctcctcgcggttgcgccctaggagcatcgaaatgttgggattgcggatggcgtagatgacagggttgatggccccattggcccaggtcagccagacggccaccacgctgaggagcgagggggcctgcatggtctgggcctgccgggcggcggccagcagcaccaggaagcagtagggcccccagcagcagatgacgaagacgatcatgatgaggacggtggtggccgtgcgcacctcgctgaagaagcgcagcacgcgcgcgtaggtgttcaccggccgcacgcgcacgtccgacaggcgcaccgtcttgcagatgtggtagtggcagaagcacatgagcaggaagggcagcaggtagcaggccaccaccagccccacgctgaaggccgcgcccagctgcgcggggtccggggaggtccggtagaggcagccgtggaagctctgcgccgccgcgagttcccggggcgccccgagcagctcccagggcaaggagaagcccagggccgtcagccaggcgcccgccagcagctgcagcgcgcggcggcggccgatcttctcccgcggcggccgcacgatagcgcagtaacggtccaacgagatgagcgccacgctgagcgtggacacgatgccgaagcacgagctgaagaagcggctggcggcgcagaagccgcgccagggccccgcggcggcggcaggcgccgaacccccgggcggagtgaagaggtccaggaaggcggcgggcaggcagagcagcgccgtgagcagatccgatagggacagcgacaggatgaaggcgttggtgacggtgcggagctgccggtgcttcacaatcacccccatcaccgcgcagttgccaaggctagacagcaggaagatgagcaggaggacgagcgcctgggccgccactgcagctccgtgcgacagcagcggcgccgcctccgtcgctagcggccgcctcaccgccgcccccgcctcccgcgctgccccggacccgccaaggccgccgccaccgggagcggcagctgtgccgcctccgcttgcgtcgctcaggttccccagcgccgcggtcgccacggtgctgaaggagagcacggccgccgtggccgcggaggaagtcccgccaggtgggccggccgcggagggggcgccggagtgctggctgcccagtaaggccatgctcgctggtgggcggggcggctgcggctcctccat

SEQ ID NO: 20258 - DNA, 880 bp, Homo sapiens
  MAP TO AC007920.18; EXPRESSED IN ADULT LIVER, SIGNAL = 2.6; EXPRESSED IN BRAIN, SIGNAL = 1.2; EXPRESSED IN BONE MARROW, SIGNAL = 1.1; EXPRESSED IN LUNG, SIGNAL = 1.1; EXPRESSED IN HEART, SIGNAL = 1.6; EXPRESSED IN HELA, SIGNAL = 1.1; SWISSPROT HIT: O00187, EVALUE 8.00e-42; NT HIT: gi16160647, EVALUE 0.00e+00; EST_HUMAN HIT: AW855182.1, EVALUE 6.00e-58
agtgtggtcagccctcccgctccctgccaagcctggtcaagaggatcattgggggccgaaatgctgagcctggcctcttcccgtggcaggccctgatagtggtggaggacacttcgagagtgccaaatgacaagtggtttgggagtggggccctgctctctgcgtcctggatcctcacagcagctcatgtgctgcgctcccagcgtagagacaccacggtgataccagtctccaaggagcatgtcaccgtctacctgggcttgcatgatgtgcgagacaaatcgggggcagtcaacagctcagctgcccgagtggtgctccacccagacttcaacatccaaaactacaaccacgatatagctctggtgcagctgcaggagcctgtgcccctgggaccccacgttatgcctgtctgcctgccaaggcttgagcctgaaggcccggccccccacatgctgggcctggtggccggctggggcatctccaatcccaatgtgacagtggatgagatcatcagcagtggcacacggaccttgtcagatgtcctgcagtatgtcaagttacccgtggtgcctcacgctgagtgcaaaactagctatgagtcccgctcgggcaattacagcgtcacggagaacatgttctgtgctggctactacgagggcggcaaagacacgtgccttggagatagcggtggggcctttgtcatctttgatgacttgagccagcgctgggtggtgcaaggcctggtgtcctgggggggacctgaagaatgcggcagcaagcaggtctatggagtctacacaaaggtctccaattacgtggactgggtgtgggagcagatgggcttaccacaaagtgttgtggagccccaggtggaacg

SEQ ID NO: 20259 - DNA, 494 bp, Homo sapiens
  MAP TO AP001697.1; EXPRESSED IN ADULT LIVER, SIGNAL = 1.5; EXPRESSED IN PLACENTA, SIGNAL = 3.3; EXPRESSED IN BRAIN, SIGNAL = 1.4; EXPRESSED IN HEART, SIGNAL = 1.3; EXPRESSED IN LUNG, SIGNAL = 1.4; EXPRESSED IN BONE MARROW, SIGNAL = 1.4; EXPRESSED IN HELA, SIGNAL = 0.91; NT HIT: AF208161.1, EVALUE 1.00e-108; SWISSPROT HIT: P26808, EVALUE 6.00e-12; EST_HUMAN HIT: BE734284.1, EVALUE 1.00e-108
ggccagtgttgcgactgtgcacttgtgcaactcttaacccagccacattgcttccagacaatgaagaaaagatagaacataactgtcaacaaataattgctcaaacctacactgctcgaggggaccttttagaagttcccttgactgatcccgatctcaacttgtatactgatggaagttcctttgcagaaaaaggacttcaaaaggcggtgtatgcagtagtccttcaaaatcgaagagctttagaattgctaatcactgagagagggggaacgtttttatttttaggggaagaatgctgttattatgttaatcaattcggaatcatcaccaagaaagttaaagaaattcaagatcgaatacaacgtagaacagaggagcttaaaaaacactggaccctggggcctcctcagccaatggatgccctggattctccccttcttaggacctctagcagctatatttctactcctctttggaccctgtatctttaa

SEQ ID NO: 20260 - DNA, 1408 bp, Homo sapiens
  MAP TO AC006063.1; EXPRESSED IN HEART, SIGNAL = 1.7; EXPRESSED IN ADULT LIVER, SIGNAL = 1.3; EXPRESSED IN HELA, SIGNAL = 2.2; EST_HUMAN HIT: BI117089.1, EVALUE 0.00e+00; NT HIT: gi11525741, EVALUE 0.00e+00; SWISSPROT HIT: Q09470, EVALUE 0.00e+00
ttaaacatcggtcagtagcttgctcttattaacgcagttttggttagcagtggtgcaattggcagttctgatattgacctgtctataatgggctatgctattattcatatcctcttcgatctccatgtactcagacttgctcatagtagaggaactgcggcgactgaggtcactgtcagaggctaagttaggggaactgacgtggagcaactgagcctgctcttccccctcagtttctcggtggtagaaatagttgaaattggacacaatgacaggtacgggcagggcaattgttagcacaccagcgatggcacacaaggagcccacgatcttgcctccaattgtcacagggtacatgtcaccgtatcctacagtggtcatggacaccaccgcccaccagaaagcatcggggatactggagaagtgcgactcagcttcttccgcctcggcaaagtacactgcactagaaaacaggatgaccccgatgaagaggaaaaagatgagcagccctagctctctcatactagctttgagggtctggcccaggatctggaggcccttagagtggcgggagagcttgaagattctaaaaacccttaccaagcggatgaccctgaggatggccagggaggtggcctgctcgcccttctggtttccttcctgctcagctatctcggtgcccagcgtgatgaaataaggaatgatggccacaatgtctatgaagttcatgatgtttttgaagaagtccgtcttgctggggcaggcgaagaagcgcaccaccagctcgaaggagaaccagatgatacacagcgtttccacgatgaagaaggggtctgtgaagatgttggaattgtagatgaccgtggtgttgtcgatgcggtggacggtgcccgtgaagtccttgtcatccttcagctcggggagcgtctccaggcaaaagatgacgatggagatgaggatgaccatgacggagacgatggcgatgaccctggcgggccccgagctctcggggtactcgaagagcagccacacctggcgctggtactccttctcgggcagagggcgctcctcctccttgatgaagccctcgtcctcccggaacttctccatggcctcctcgcccaactcgtaaaacttgatctcctcggagaacatgtccaggggcacgttgaccggcctccgcaggcggccgccggactggtagtagtagaggatggcgtcgaagctgggccggttgcggtcgaagaagtactcgttcctcagggggtcgaagtagcgcatgcgtttcttagggttgcccagcagcgtgttggggaactgcgccagggtcttgagctgcgtctcgaagcgcagcccggagatgttgatcaccacgcgctcgcagcactcgtggtcgtcgtggtcggcc

SEQ ID NO: 20261 - DNA, 477 bp, Homo sapiens
  MAP TO Z94055.1; EXPRESSED IN PLACENTA, SIGNAL = 1.8; EXPRESSED IN BRAIN, SIGNAL = 1.9; EXPRESSED IN HELA, SIGNAL =   4; EXPRESSED IN ADULT LIVER, SIGNAL = 1.7; EXPRESSED IN FETAL LIVER, SIGNAL =   2; EXPRESSED IN LUNG, SIGNAL = 1.7; EXPRESSED IN BONE MARROW, SIGNAL = 1.8; NT HIT: gi14723980, EVALUE 0.00e+00; SWISSPROT HIT: P10039, EVALUE 3.00e-58; EST_HUMAN HIT: AI879057.1, EVALUE 2.00e-62
gacaactggactatatccctcactgcagtggccacggcaactttagctttgagtcctgtggctgcatctgcaacgaaggctggtttggcaagaattgctcggagccctactgcccgctgggttgctccagccggggggtgtgtgtggatggccagtgcatctgtgacagcgagtacagcggggatgactgttccgaactccggtgcccaacagactgcagctcccgggggctctgcgtggacggggagtgtgtctgtgaagagccctacactggcgaggactgcagggaactgaggtgccctggggactgttcggggaaggggagatgtgccaacggtacctgtttatgcgaggagggctacgttggtgaggactgcggccagcggcagtgtctgaatgcctgcagtgggcgaggacaatgtgaggaggggctctgcgtctgtgaagagggctaccagggccctgactgctcagcag

SEQ ID NO: 20262 - DNA, 770 bp, Homo sapiens
  MAP TO AF051976.2; EXPRESSED IN PLACENTA, SIGNAL = 3.8; EXPRESSED IN ADULT LIVER, SIGNAL =   3; EXPRESSED IN BRAIN, SIGNAL = 5.2; EXPRESSED IN HELA, SIGNAL = 2.9; EXPRESSED IN LUNG, SIGNAL = 3.3; EXPRESSED IN HEART, SIGNAL =   8; EXPRESSED IN BONE MARROW, SIGNAL = 3.5; EST_HUMAN HIT: BG682567.1, EVALUE 0.00e+00; NT HIT: gi14775691, EVALUE 0.00e+00; SWISSPROT HIT: Q06205, EVALUE 1.80e-01
atggcggccgccagcggctacacggacctgcgtgagaagctcaagtccatgacgtcccgggacaactataaggcgggcagccgggaggccgccgccgctgccgcagccgccgtagccgccgcagccgcagccgccgctgccgccgaaccttaccctgtgtccggggccaagcgcaagtatcaggaggactcggaccccgagcgcagcgactatgaggagcagcagctgcagaaggaggaggaggcgcgcaaggtgaagagcggcatccgccagatgcgcctcttcagccaggacgagtgcgccaagatcgaggcccgcattgacgaggtggtgtcccgcgctgagaagggcctgtacaacgagcacacggtggaccgggccccactgcgcaacaagtacttcttcggcgaaggctacacttacggcgcccagctgcagaagcgcgggcccggccaggagcgcctctacccgccgggcgacgtggacgagatccccgagtgggtgcaccagctggtgatccaaaagctggtggagcaccgcgtcatccccgagggcttcgtcaacagcgccgtcatcaacgactaccagcccggcggctgcatcgtgtctcacgtggaccccatccacatcttcgagcgccccatcgtgtccgtgtccttctttagcgactctgcgctgtgcttcggctgcaagttccagttcaagcctattcgggtgtcggaaccagtgctttccctgccggtgcgcaggggaagcgtgactgtgctcag

SEQ ID NO: 20263 - DNA, 852 bp, Homo sapiens
  MAP TO AC005481.2; EXPRESSED IN PLACENTA, SIGNAL = 1.6; EXPRESSED IN HELA, SIGNAL = 1.5; EXPRESSED IN ADULT LIVER, SIGNAL = 1.5; EXPRESSED IN BRAIN, SIGNAL = 1.4; EXPRESSED IN HEART, SIGNAL = 1.6; EXPRESSED IN BONE MARROW, SIGNAL = 1.4; EXPRESSED IN LUNG, SIGNAL = 1.2; EST_HUMAN HIT: AA077394.1, EVALUE 0.00e+00; NT HIT: AF095585.1, EVALUE 3.20e+00; SWISSPROT HIT: P14590, EVALUE 1.00e-09
tggtgagggctctgcaagacccagtatgcatgggtagatggtgagggctctgcaagacccagtatgcatgggtagatggtgagggctctgcaagaaccagtatgcatgggtagatggtgagggctctgcgagacccagtatgcatgggtagacggtgagggctctgcaagaacccagtatgcatgagtagacggtgagggctctgccaagacccagtatgcatgggtagacggtgagggctctgcacagacccagtatgcatgtgtagacggtgagggctctgcaaagacccagtatgcatgtgtagatggtgagggctctgcagagatccagtatgcatgggtagatggtgagggctctgcagagatccagtatgcatgggtagacggtgagggctctgctaagacccagtatgcatgggtagacggtgagggctctgccaagatccagtatgcataggtagatggtgagggctctactaagacccagtatgcatgggtagatggtgagggctctactaagatccagtatgcatgggtagatggtgagggctctactaagatccagtatgcatgggtagatggtgagggctctactaagacccagtatgcatgggtagatggtgagggctctactaagatccagtatgcatgggtagatggtgagggctctactaagacccagtatgcatgagtagatggtgagggctctactaagacccagtatgcatgagtagatggtgagggctctctcaagatccagtatgcatgggtagacagtgagggctctgcgaagacccagtatgcatgggtagatggtgagggctctgccaagatccagtatgcatgggta

SEQ ID NO: 20264 - DNA, 811 bp, Homo sapiens
  MAP TO AL133543.2; EXPRESSED IN FETAL LIVER, SIGNAL = 1.3; EXPRESSED IN LUNG, SIGNAL = 1.3; EXPRESSED IN ADULT LIVER, SIGNAL = 1.4; EXPRESSED IN PLACENTA, SIGNAL = 2.2; EXPRESSED IN BRAIN, SIGNAL =   1; EXPRESSED IN HELA, SIGNAL = 2.2; EXPRESSED IN BONE MARROW, SIGNAL =   1; EST_HUMAN HIT: BI039774.1, EVALUE 0.00e+00; NT HIT: gi15300899, EVALUE 0.00e+00; SWISSPROT HIT: P15924, EVALUE 1.00e-110
atgtgtgtaaagagaaataagaatgcacattggtctgggaggggaaaagtactgcttctttcttggaatgtgaggtgtttttcttttgacataatctctgatttcattccacagctgaaaaataccaagatcgaagttttggaagaggagctcagactggcccgagatgccaactcggaaaactgtaataagaacaaattcctggatcagaacctgcagaaataccaggcagagtgttcccagttcaaagcgaagcttgcgagcctggaggagctgaagagacaggctgagctggatgggaagtcggctaagcaaaatctagacaagtgctacggccaaataaaagaactcaatgagaagatcacccgactgacttatgagattgaagatgaaaagagaagaagaaaatctgtggaagacagatttgaccaacagaagaatgactatgaccaactgcagaaagcaaggcaatgtgaaaaggagaaccttggttggcagaaattagagtctgagaaagccatcaaggagaaggagtacgagattgaaaggttgagggttctactgcaggaagaaggcacccggaagagagaatatgaaaatgagctggcaaaggtaagaaaccactataatgaggagatgagtaatttaaggaacaagtatgaaacagagattaacattacgaagaccaccatcaaggagatatccatgcaaaaagaggatgattccaaaaatcttagaaaccagcttgatagactttcaagggaaaatcgagatctgaaggatgaaattgtcaggctcaatgacagcatct

SEQ ID NO: 20265 - DNA, 823 bp, Homo sapiens
  MAP TO AL160191.1; EXPRESSED IN LUNG, SIGNAL = 1.7; EXPRESSED IN FETAL LIVER, SIGNAL = 1.7; EXPRESSED IN ADULT LIVER, SIGNAL = 1.6; SWISSPROT HIT: P57103, EVALUE 0.00e+00; EST_HUMAN HIT: BI913344.1, EVALUE 0.00e+00; NT HIT: gi15147253, EVALUE 0.00e+00
tgctcctgagatactcctctctttaattgaggtgtgtggtcatgggttcattgctggtgatctgggaccttctaccattgtagggagtgcagccttcaacatgttcatcatcattggcatctgtgtctacgtgatcccagacggagagactcgcaagatcaagcatctacgagtcttcttcatcaccgctgcttggagtatctttgcctacatctggctctatatgattctggcagtcttctcccctggtgtggtccaggtttgggaaggcctcctcactctcttcttctttccagtgtgtgtccttctggcctgggtggcagataaacgactgctcttctacaaatacatgcacaaaaagtaccgcacagacaaacaccgaggaattatcatagagacagagggtgaccaccctaagggcattgagatggatgggaaaatgatgaattcccattttctagatgggaacctggtgcccctggaagggaaggaagtggatgagtcccgcagagagatgatccggattctcaaggatctgaagcaaaaacacccagagaaggacttagatcagctggtggagatggccaattactatgctctttcccaccaacagaagagccgtgccttctaccgtatccaagccactcgtatgatgactggtgcaggcaatatcctgaagaaacatgcagcagaacaagccaagaaggcctccagcatgagcgaggtgcacaccgatgagcctgaggactttatttccaaggtcttctttgacccatgttcttaccagtgcctggagaactgtggggctgtactcctgacagtg

SEQ ID NO: 20266 - DNA, 459 bp, Homo sapiens
  MAP TO AL358913.1; EXPRESSED IN HELA, SIGNAL =   4; EXPRESSED IN ADULT LIVER, SIGNAL =   3; EXPRESSED IN PLACENTA, SIGNAL =  19; EXPRESSED IN HEART, SIGNAL = 2.2; EXPRESSED IN BONE MARROW, SIGNAL = 1.8; EXPRESSED IN LUNG, SIGNAL = 3.4; SWISSPROT HIT: P05787, EVALUE 1.00e-42; EST_HUMAN HIT: BE392001.1, EVALUE 5.00e-97; NT HIT: gi14757451, EVALUE 4.00e-97
atggtgctgtggcaattaaccgtatcccagatctgggacacgtctgtggtgctgtccgtggacaacggccgcacctcagccctgctgcgcttggcaatctcgtcggactgcgccttgacctttgcaatgatgctgtccaagcacagcagggctgaggctgagagcatgtaccagatcaagtatgaggagctgcagacactggctgggaagcacggggatgacctgcagctcacaaagactgagatctccaagatgaatcggaacatcagccagctccaggctgagactgagggcctcaaatgccagagggcttccctggaggcctccatcacagttgccgagcagcgcagggagctagctgttaaagatgccaaggccaagctgtccgagctggtggctgccctacagcgggccaagcaggacttggagcagcagctgcgggcgagtaccaggagctga

SEQ ID NO: 20267 - DNA, 761 bp, Homo sapiens
  MAP TO AC007957.34; EXPRESSED IN PLACENTA, SIGNAL = 3.8; EXPRESSED IN HELA, SIGNAL = 1.6; EXPRESSED IN FETAL LIVER, SIGNAL = 1.5; EXPRESSED IN ADULT LIVER, SIGNAL = 1.3; EXPRESSED IN BRAIN, SIGNAL = 1.3; EXPRESSED IN BONE MARROW, SIGNAL = 1.3; EXPRESSED IN HEART, SIGNAL = 1.5; EXPRESSED IN LUNG, SIGNAL = 1.2; SWISSPROT HIT: Q15149, EVALUE 2.10e-02; EST_HUMAN HIT: BG773464.1, EVALUE 3.00e-19; NT HIT: gi14777593, EVALUE 0.00e+00
atggccaaggactcgcccagccccttgggcgcgtcgcccaagaagccgggctgctccagcccggcggcggcagtgctggagaaccagaggcgggagctggagaagctacgggcggagctggaggcggagcgggcaggctggcgggcggaacggcggcgcttcgctgcccgggagcgccagctgcgtgaggaggccgagcgggagcggcggcagctggctgaccgtctgcgctccaagtgggaggcacagcgcagccgggagttgcggcagctgcaagaggagatgcagcgggaacgcgaggccgagatccggcagctgctgcgctggaaggaggccgagcagcggcagctgcagcagctgctgcaccgggagcgcgatggcgtggtgcgccaagcccgggagctgcagcgccagctggccgaggagctggtgaaccgcggccactgtagccgcccgggggcgtccgaggtttccgcggcgcagtgccgctgtcgcctgcaggaagtgttggcgcagcttcgctggcagactgacggcgagcaggcggcgcgcatccgctatctgcaggcggcgctggaggtggagcgccagctcttcctcaagtacatcctggcgcacttccgcgggcacccggctttgtcgggatcaccggacccccaagctgtgcattccttggaagaaccgctgccccagacctccagcggctcttgccacgcccccaaacccgcctgccaactcggatctctagacagcctgagtgc

SEQ ID NO: 20268 - DNA, 659 bp, Homo sapiens
  MAP TO AC005317.1; EXPRESSED IN BRAIN, SIGNAL = 2.4; EXPRESSED IN HELA, SIGNAL = 3.3; EXPRESSED IN PLACENTA, SIGNAL = 5.2; EXPRESSED IN LUNG, SIGNAL = 2.3; EXPRESSED IN HEART, SIGNAL =   3; EXPRESSED IN BONE MARROW, SIGNAL = 2.6; EXPRESSED IN FETAL LIVER, SIGNAL = 3.2; EXPRESSED IN ADULT LIVER, SIGNAL = 2.7; NT HIT: gi15300936, EVALUE 0.00e+00; SWISSPROT HIT: P54098, EVALUE 4.00e-78; EST_HUMAN HIT: AL528934.1, EVALUE 0.00e+00
caggccgagggggatatggccaccgccaatgtggggcaagttccctctgccaagcagacctccacgtcgaacaccagggcccgctcctcggggatggccacgggtacggcctccccctcggggccgtaccgggtccagccctccgcccaggcccaagccgggggcttcgggggcagctgggcctgcaacagcaagttggccgcctccaggtagggcaggctctgcttctgggccaggaggcggaagtgctggtccaggttgtccccgtagaggggcggcaggcgcagctccacgtcgggcaagggcacggctggctgcccccagagcccgtgcttctgcaggtgctcgacgctgcggcgcaccgcggcctcgccaggcatctcccctccttgcccgaagatttgctcgtgcagccctctcgagagcatctggatgtccaatgggttgtgccgcagctgcccgccctccgaggatagcacttgcggctgctgaggctgctgttgctgctgctgctgctgctgctgctgctgctgccgccgccgctgcccgtcgctggggtcggacgcggggacggagctggagacccagcgccccggagctggaaccggccctggcccgacggtggcgccggccaccttcctccagagcaggcggctcat

SEQ ID NO: 20269 - DNA, 1920 bp, Homo sapiens
  MAP TO AL121883.13; EXPRESSED IN ADULT LIVER, SIGNAL = 1.6; EXPRESSED IN BRAIN, SIGNAL = 2.5; EXPRESSED IN HEART, SIGNAL = 2.6; EXPRESSED IN BONE MARROW, SIGNAL = 1.6; EXPRESSED IN FETAL LIVER, SIGNAL = 1.5; EXPRESSED IN PLACENTA, SIGNAL = 3.2; EST_HUMAN HIT: AU123772.1, EVALUE 0.00e+00; NT HIT: gi7662161, EVALUE 0.00e+00; SWISSPROT HIT: P39968, EVALUE 2.00e-04
tcagaatttgttcactagttttataactttcactttcactaagaggtcatggtgatttgctaaggctctaattttcttaacacacactccagatgtagtgcataagtaaaaaagggaacctttattgaattctctatagttaaacacttctgctctgagattgtcatagataatctcaaatagagtaagggcattaataaggatttctgattccacgtaagaattatagagggaactaaatgatgctggcacttgggtactgagaagtttcttcaacatatctggattttcagcaaaattcgaaaggattttcaaaatctcaaccttgatttttccacctccctgagatagcaaacggaaaaagtttgcaatggaattgacaagcaggtgttggtagtcattagtaatagtcatgtttgttagaaattttagtccaactacttgaactgctgagttcaggttagaggccatgatatcatccatcactttattcatgtacacctgaagccggccctgattttcataattctcactcaggttattcatggccattaaggctttttccttaatgtgtggatcagttttgttgatcatgtttgcaataattgggaggcctcccaatttgcggattgtctcttgattgcatgaataattggcattgttgctcagagtgagcaaagctacctgttggatgaaaggatcatcagatttctgaagcaaggcaaggaccttcctgagatcgcggacacccagaatctcatcaatttcataaggaaaggggcgcttctgcatggcaacgggtcttcttcccctccctctgcgctgggtctcgggctcagagtctgaatctgactctgtgtcagtccacccggactccccttcctcagaatcagggacctctgccaggaaagcctgtccgccattagcagaggctgcagcagctgctgcagccccatctccaggacggaagcccatccccagttcgtctacttcaactttgcttttcttgcccttgcccttgcccccattccgggacctggttacacccttgcctccacctttgggtaccgctccagtcgctgatgtggctttcggtatagccccagtgtgagccccaggggttgctttcttggcagctgatgttccaggaaccaccgctgttctaggggaaccagaagttccaggagactctgcagccccagtaggtgctgcagccccagtaggcgttgcgggcacaggagcctcagctgcctcggtaggcgatgccaccccgggagcttcagctaccttggtaggtgctgctaccccaggaccctcggtcacctcagtgggtgctgccgcttcggtaggcaccactgtcccaggaggcaccgctgccctggaagtctccgcttctctgggagcttctgccactttgggagcccctgccattgcaggggcttctgcagccccaagggcctctgtcaccccgggaggtggtgctattgcagaagccattgcagccccaactactgattcggccttaggcccaaccccggctccatctgcctcttgggcctgactgcctgccccactctgagcctcagcgctggatgcagctggggccactgcctcagctccaactgtgtccagagcagaggcttcatcctgggccctgtcctctgcttcagcacggactggggttgggggactgaatcctgacccaaggtcgattgtgaatccggctcttagcccagctctagccctggctccagtcccagccacagcccggtttttgggcttggccattctcttcttggtctggtctctccccctggtgtatttgtagacacagtaccaggcaccagcccctatcactatccccgccgctacacagccagcatcccgaacgcggctcatggtgcagctggggttattcac

SEQ ID NO: 20270 - DNA, 822 bp, Homo sapiens
  MAP TO AL136122.1; EXPRESSED IN ADULT LIVER, SIGNAL = 1.5; EXPRESSED IN BRAIN, SIGNAL = 1.7; EXPRESSED IN FETAL LIVER, SIGNAL = 1.7; EXPRESSED IN BONE MARROW, SIGNAL = 1.4; EXPRESSED IN LUNG, SIGNAL = 1.4; EST_HUMAN HIT: BF725742.1, EVALUE 0.00e+00; NT HIT: AF153836.1, EVALUE 0.00e+00; SWISSPROT HIT: P31629, EVALUE 1.00e-129
aatttaagaagaggattacctcaggttccttacttcagtctctatggagaccaagaaggtgcttatgaacatccaggctccagccttttccctgagggtcctaatgactatgtcttcagtcatcttccactccactctcagcaacaagtgcgagcccctatccccatggtgcccgttggtgggatccagatggttcactccatgccgccagccctttccagtttacatccttcacccacattgcccctgccaatggagggctttgaggagaagaaaggcgcgtcaggggagtccttctccaaggacccctatgtgctttctaagcagcatgagaagcgaggtcctcacgctttgcagtcatctggtccgcctagcactccctcctctcctcggctgttgatgaaacagagcacttcggaagacagcctaaacgcaacagagcgggaacaggaggaaaatatacagacttgtacaaaagccattgcctctctccggattgccacggaagaggcagctctgctcgggccagatcagccagcgcgggtgcaggagccccaccagaaccccctgggaagtgcacatgttagcattagacactttagtagacctgagccaggtcagccctgtacctcagccacccaccctgacttgcatgatggtgaaaaggacaattttggtacatcacagactccattagctcactccacgttttacagcaagagttgtgtggatgacaagcagttggactttcacagcagcaaggaattatcttcaagcacagaggaaagcaaagatccttcatcagaaaagagtcagctacat

SEQ ID NO: 20271 - DNA, 948 bp, Homo sapiens
  MAP TO AC004597.1; EXPRESSED IN ADULT LIVER, SIGNAL = 1.2; EXPRESSED IN BRAIN, SIGNAL = 0.97; EXPRESSED IN HELA, SIGNAL = 2.8; EXPRESSED IN LUNG, SIGNAL = 0.98; EXPRESSED IN HEART, SIGNAL = 1.6; SWISSPROT HIT: O60403, EVALUE 0.00e+00; EST_HUMAN HIT: BG197640.1, EVALUE 0.00e+00; NT HIT: gi11427064, EVALUE 0.00e+00
atgctggggctaaaccacacctccatgtctgaattcatcctcgtcggcttctctgccttcccccacctccaactgatgctcttcctgctgttcctgctgatgtacctgttcacgctgctgggcaacctgctcatcatggccaccgtctggagcgagcgcagcctccacacgcccatgtacctcttcctgtgcgtcctctcagtctccgagatcctctacaccgtggccatcatcccgcgcatgctggccgacctgctgtccacccagcgctccatcgccttcctggcctgtgccagtcagatgttcttctccttcagcttcggcttcacccactccttcctgctcaccgtcatgggctacgaccgctacgtggccatctgccaccccctgcgctacaacgtgctcatgagcccacggggctgcgcctgcctggtgggctgctcctgggctggtggctcggtcatggggatggtggtgacctcggccattttccaactgactttctgtggatcccatgagatccagcattttttatgtcatgtgccacctctgttgaagttggcctgtggaaataatgtaccagctgtggccctgggcgtgggcttggtatgtatcatggcactgctgggctgttttctcctcatcctcctctcctatgccttcatcgtggccgacatcttgaagatcccttctgctgaaggtcggaacaaggccttctccacctgtgcctctcaccttattgtggtcattgtgcactatggctttgcctctgtcatctacctcaagcccaaaggtccccactctcaggagggtgacaccctgatggccaccacctacgcagtcctcacgcccttcctcagccccatcatcttcagcctcaggaacaaagaactgaaggttgccatgaagaggaccttcctcagcacactctattcctcaggcacctga

SEQ ID NO: 20272 - DNA, 967 bp, Homo sapiens
  MAP TO AL160314.1; EXPRESSED IN ADULT LIVER, SIGNAL = 2.2; EXPRESSED IN BRAIN, SIGNAL = 2.1; EXPRESSED IN HELA, SIGNAL = 3.3; EXPRESSED IN BONE MARROW, SIGNAL = 2.1; EXPRESSED IN FETAL LIVER, SIGNAL = 2.3; EXPRESSED IN HEART, SIGNAL = 2.1; EXPRESSED IN LUNG, SIGNAL =   2; SWISSPROT HIT: P23267, EVALUE 9.00e-73; EST_HUMAN HIT: BF363816.1, EVALUE 7.00e-21; NT HIT: X94744.1, EVALUE 7.00e-11
atctgcttctcagcactgccctcatcctcttttcaaaaactcctcgaaccctgacccacacatccctgaggactccctgcactgtgtcattcctcagagtatatataaaggggttgaggaatggagtcaccacactgctcagaaccaaagggatcttgttgatctccagatattctttctgggagggagtcacatagataaacacagtgatgccactaggaatgatgactatggtcaggtgggaagcacaggtattaaaggccttcttccttccacttgcagaaggaatgcgcactatggtcaagatgatgtacgtataggaataggccacgaggactatgcagcagaggatgaccatggaagaaagcataaaatccatcagctcgatggcagtggtgtctgcacaggccagggccagcaagggtccactgtcacagaagaagtggttaatgatattggagccacagaagggcagctgggagatgaggatggttggaaagagcacagacaggaagcctcccacccaagagaatacaacggtcccaatgcagacagaaggtctcatgatggtggtgtaccgcagggggcagcagatggtggcataacggtcataggacatgaccgtcagcaggaggaactcaactgtgcccaagaaaaagtagaaatagcactgggtgatacatccggcaaaggagatggttttatccctagatcctaagttggccaacacttttggagagatgactgaggtgaagaggatgtccaggatagagaggttgcacaagaagaagtacatgggggtgtggaggcgggagcaggacagcacagtggagatgatgagcaggttccccagaagagtcagcaggaacgtgggcagcaggagcaccaggagcagcagctccacctccctgctcagggaaaaccccagcagaacaaactcagtcaccgctgcagtccagttacccat

SEQ ID NO: 20273 - DNA, 664 bp, Homo sapiens
  MAP TO AP001712.1; EXPRESSED IN ADULT LIVER, SIGNAL = 1.9; EXPRESSED IN HELA, SIGNAL = 1.6; EXPRESSED IN PLACENTA, SIGNAL = 1.9; EXPRESSED IN BRAIN, SIGNAL = 1.7; EXPRESSED IN HEART, SIGNAL =   2; EXPRESSED IN BONE MARROW, SIGNAL = 1.9; SWISSPROT HIT: P05228, EVALUE 1.30e+00; EST_HUMAN HIT: BI911379.1, EVALUE 3.70e+00; NT HIT: AE000843.1, EVALUE 9.90e+00
tcacgtcaggctccatagacccagctggaatcccagaggctcatttcctccatccaggtctattccacccaggtctattccatccaggtccattccatcgagatccactccatccagatccactccatccaggtcctctccattcgggtccactccatccaggtccactgtatccaggtccactccatccaggtccactgtatccaggtccactccatccaagtgaattccatccaggtccactccatccaagtgaacttcatccaggtgcgctccatccaggtgcactccatccggattcactccatccagatccactctatctgggtccactccatccgagtccactccatccaggtccaatccatccagatccacttcatccaagtccactccatccagatccactccatccaggtccactccatccaggtgcactccattcaggcccactccatccaggtccactccatccgggtccactccatctgggtccgctccatctaggtccactgtatccaggtccactccatccaggtgaactccatccagagccacttcatccagatccactccatttgggtccactccatctgggtccactccatccgggtccactccatccaggtccactctatctgggtccactctatccaggtccact

SEQ ID NO: 20274 - DNA, 701 bp, Homo sapiens
  MAP TO AL050330.9; EXPRESSED IN ADULT LIVER, SIGNAL = 3.6; EXPRESSED IN PLACENTA, SIGNAL = 5.5; EXPRESSED IN BRAIN, SIGNAL = 2.3; EXPRESSED IN HELA, SIGNAL = 0.94; EXPRESSED IN LUNG, SIGNAL = 4.8; EXPRESSED IN HEART, SIGNAL = 3.6; EXPRESSED IN BONE MARROW, SIGNAL = 3.2; EXPRESSED IN FETAL LIVER, SIGNAL = 2.5; EST_HUMAN HIT: BG743914.1, EVALUE 0.00e+00; NT HIT: gi13644794, EVALUE 0.00e+00; SWISSPROT HIT: P18892, EVALUE 1.00e-50
ccatcctccttgtttctgaggaccagaggagtgtgcagcgtgctgaagagccgcgggatctgccagacaaccctgagagatttgaatggcgttactgtgtccttggctgtgaaaacttcacatcagggagacattactgggaggtggaagtgggggacagaaaagagtggcatattggggtatgtagtaagaacgtggagaggaaaaaaggttgggtcaaaatgacaccggagaacggatactggactatgggcctgactgatgggaataagtatcgggctctcactgagcccagaaccaacctgaaacttcctgagcctcctaggaaagtggggatcttcctggactatgagactggagagatctcgttctataatgccacagatggatctcatatctacacctttccgcacgcctctttctctgagcctctatatcctgttttcagaattttgaccttggagcccactgccctgaccatttgcccaataccaaaagaagtagagagttcccccgatcctgacctagtgcctgatcattccctggagacaccactgaccccgggcttagctaatgaaagtggggagcctcaggctgaagtaacatctctgcttctccctgcccaccctggagctgaggtctccccttctgcaacaaccaatcagaaccataagctacaggcacgcactgaagcactttac

SEQ ID NO: 20275 - DNA, 992 bp, Homo sapiens
  MAP TO Z82200.1; EXPRESSED IN ADULT LIVER, SIGNAL = 2.8; EXPRESSED IN HELA, SIGNAL = 3.5; EXPRESSED IN BRAIN, SIGNAL =   3; EXPRESSED IN HEART, SIGNAL = 2.9; EXPRESSED IN FETAL LIVER, SIGNAL =   3; EXPRESSED IN LUNG, SIGNAL = 2.8; NT HIT: gi11422044, EVALUE 0.00e+00; EST_HUMAN HIT: BI905912.1, EVALUE 0.00e+00; SWISSPROT HIT: P32250, EVALUE 5.00e-44
ccatggcgggatagttggtcacgaaactctgaagccataaagtaataaagaattggatccaaaaggcagcagagacttgcaaggcacaggcaaaaagggtggaaatacagtgcgattcggacaacgggacaactgctaatgatggtttcctttaccatggtgtaaaaaataaagttaatatgatagggagtgaagcagatgaagaagactgcagcacacatgaacaccatccgcagtgctttctgcctctcactgatcccttggaaagccattggtggctgtctcaaggatatagtagttttccaggtacaccatgcgatgatgatcactgggatcacaaatcctgcaagctcagcaactgtaatcatcccgaccaacgcaactgcattcatttgcttgtatccaagatcagcaaagcaggacttgttgttgtttaagtctgtgcttctcaggatgggaaatggcaaacaggcagtccccacaacgatccagatggcagcactgatgcccacatcgtacctacgcttccagtctctggccctgaagggcttgaggagaaaaaagcacctttgaagactgatgcacgtcaggaaacaaatgctggcatacatgttgagatacttcaggtagaagcagagcaggcaaagggctctctggaaaggccagtggtggctgatgtaatagtaaatccggaggggtaaagataatacatgagcaaggtcagccacagagaggttgatcatgaaaatgatggctttatttttcttgctgatgaagcggcacagaacccacaaggctgcactgttagccagaagaccaggaatgaatatgaggatataggtggttgcatagagggagtattgaaatttcacattagtgacattacagtaaatctcagcagtgctggtactgttgctacccatcttgaatgtttcagtgtatttgtcaaggttagccatggatttatggttcctgcccaaagtaaaacaaaa

SEQ ID NO: 20276 - DNA, 575 bp, Homo sapiens
  MAP TO AL030996.1; EXPRESSED IN LUNG, SIGNAL = 1.8; EXPRESSED IN BONE MARROW, SIGNAL = 1.8; EXPRESSED IN ADULT LIVER, SIGNAL = 1.4; EXPRESSED IN BRAIN, SIGNAL =  31; EXPRESSED IN HELA, SIGNAL = 2.4; EXPRESSED IN PLACENTA, SIGNAL =   2; SWISSPROT HIT: P08840, EVALUE 2.00e-58; EST_HUMAN HIT: BG748443.1, EVALUE 0.00e+00; NT HIT: gi16175554, EVALUE 0.00e+00
catcttccacccacgccgctgcagctccccacgctcacgccacctccgccacatccaccctcagcaccaccaccatgcaggagatcatgcacctgcaggccggccagtgtggcagccagatcagggccaagttttgggaggttatcagtgacaaacatgggcatcgaccccacaggcacatactatagggacagtgacctgcaaccggaaaggatcaacgtgtactacaatgaggccagaggaggaaattatgtccccagagcggtgctggtggacctggaacccagcaccatggactctatcctttccggccccttcggtcagatctttcggccggacaacttcgtgtttggccagtccagagccggcaacaactgggtgaaggggcactacacggagggcacagagctggtaggcactgtcctggacgtggtccagaaggaggcctagaactgcgactgccttcaaggcttccagctgacgcacttgctggggggtggcacggggtccgggatgggcacactgctcatcagtaagatccgtgaggagttcccagaccgcatcatgaacacctt

SEQ ID NO: 20277 - DNA, 1542 bp, Homo sapiens
  MAP TO AL135785.2; EXPRESSED IN BONE MARROW, SIGNAL = 2.2; EXPRESSED IN FETAL LIVER, SIGNAL = 2.4; EXPRESSED IN LUNG, SIGNAL =   2; EXPRESSED IN BRAIN, SIGNAL = 1.8; EXPRESSED IN ADULT LIVER, SIGNAL = 7.6; EXPRESSED IN PLACENTA, SIGNAL = 2.2; SWISSPROT HIT: P30837, EVALUE 0.00e+00; EST_HUMAN HIT: BG766431.1, EVALUE 0.00e+00; NT HIT: gi14736775, EVALUE 0.00e+00
agtgtcagcatgctgcgcttcctggcaccccggctgcttagcctccagggcaggaccgcccgctactcctcggcagcagccctcccaagccccattctgaacccagacatcccctacaaccagctgttcatcaacaatgaatggcaagatgcagtcagcaagaagaccttcccgacggtcaaccctaccaccggggaggtcattgggcacgtggctgaaggtgaccgggctgatgtggatcgggccgtgaaagcagcccgggaagccttccgcctggggtccccatggcgccggatggatgcctctgagcggggccggctgctgaaccgcctggcagacctagtggagcgggatcgagtctacttggcctcactcgagaccttggacaatgggaagcctttccaagagtcttacgccttggacttggatgaggtcatcaaggtgtatcggtactttgctggctgggctgacaagtggcatggcaagaccatccccatggatggccagcatttctgcttcacccggcatgagcccgttggtgtctgtggccagatcatcccgtggaacttccccttggtcatgcagggttggaaacttgccccggcactcgccacaggcaacactgtggttatgaaggtggcagagcagacccccctctctgccctgtatttggcctccctcatcaaggaggcaggctttccccctggggtggtgaacatcatcacggggtatggcccaacagcaggtgcggccatcgcccagcacgtggatgttgacaaagttgccttcaccggttccaccgaggtgggccacctgatccagaaagcagctggcgattccaacctcaagagagtcaccctggagctgggtggtaagagccccagcatcgtgctggccgatgctgacatggagcatgccgtggagcagtgccacgaagccctgttcttcaacatgggccagtgctgctgtgctggctcccggaccttcgtggaagaatccatctacaatgagtttctcgagagaaccgtggagaaagcaaagcagaggaaagtggggaacccctttgagctggacacccagcaggggcctcaggtggacaaggagcagtttgaacgagtcctaggctacatccagcttggccagaaggagggcgcaaaactcctctgtggcggagagcgtttcggggagcgtggtttcttcatcaagcctactgtctttggtggcgtgcaggatgacatgagaattgccaaagaggagatctttgggcctgtgcagcccctgttcaagttcaagaagattgaggaggtggttgagagggccaacaacaccaggtatggcctggctgcggctgtgttcacccgggatctggacaaggccatgtacttcacccaggcactccaggccgggaccgtgtgggtaaacacctacaacatcgtcacctgccacacgccatttggagggtttaaggaatctggaaacgggagggagctgggtgaggatgggcttaaggcctacacagaggtaaagacggtcaccatcaag

SEQ ID NO: 20278 - DNA, 2559 bp, Homo sapiens
  MAP TO AC005175.1; EXPRESSED IN BRAIN, SIGNAL = 1.2; EXPRESSED IN HELA, SIGNAL = 2.4; EXPRESSED IN ADULT LIVER, SIGNAL = 1.5; EXPRESSED IN BONE MARROW, SIGNAL = 1.6; EXPRESSED IN LUNG, SIGNAL = 1.7; EXPRESSED IN HEART, SIGNAL =   2; SWISSPROT HIT: P05790, EVALUE 3.00e-44; EST_HUMAN HIT: BI821220.1, EVALUE 0.00e+00
gccagccctgagaccaagcccagctctagaactcagatgagctttgagaccatgcccagcactgagaccaagccctgttctagaactcaggcctgctctgaggccaagcccagctctagaacccagatgagctctgagaccatgcccagctctagaactcagatgggctctgagaccatgcccagctctagaactcagatgggctctgagaccgagcccagctctagaactcagatgggctctgagaccgagcccagctctaaaactcagatgggctctgagaccatgcccagctctagaactcagatgggctctgagaccgagcccagctctagaactcagatgggctctgagaccgagcccagctctagaactcagatgggctctgagaccatgcccagctctagaactcagatgggctccgagaccaagcccagctctagaacccagatgagctctgagaccatgcccagctctagaactcagatgagctctgagacagagcccagtattgagaccaagccctgttctagagtccaggccagctccgagaccaagcccagctctagaacccagataagctctgaaaccaagcccagcatagagaccaagccgtgttctagaattcaggccacatctgaagccaagcccagctctagaactcaggtcagccctgagaccaagcccagctctagaacccagataagctctgaaaccaatcccagcattgagaccaagccctgttctagaactcaggccacctctgaggccaaacccagctctagaacccagataagatctgagaccaagccctgctctgaagcccaggccagctctgagacgaagcacatctctagaatccagctgagccctgacaacaagccaaactctggaacccagacacattttaagacccagaccagcttggagaccaatcccagttccagaatccaggctagctcggagaccaagccctgctggaaaactcaagctgactctggaactctggacagctccacgatgcagccacacctggacactcggtctagctccggaaccccagttaattttggaacccatgtgagattcatgaagcagcccagctctggaaccccagtcagctcaggattcagagacagctcccaaatcaaatcctattcaagaactcagaccagctcagaaacccaggtccacacggctgcccagtccagatcccaaccccagttgcatccaagtgcccatccccatcctgcagcccagtccagctccagtgatgattccagctctgagactgagcccagctctagaacctcgcctagtgctacaaccaggcccaactccaggattcagaccagctctggaaccccatccatcttggaagcaagacccagctccagcacacagcttggtgccaagccccactctccttgcacaatgcagctcagctctagaatgcagtttacttccaggacccagaccaatttcaaggcctggccaagctccagagctcaatccagcccaagcaccgcacccagctctggaactcagctcagttctggagcacaggctggttctgaaatcccagccagctccaaaacacagacagcagctgagacccagccaagttccagaatccagctaagctctggagtccaatctagtcctgggacccaggccatcgcagcaatagaattaagctccacagccctgtctagttccgacagcaggtccagctccaggacccagcgctgcccaggagctcgaccagcctctgggactcaattcgcctctaaaaccctgccaggttctagataccagctccagaccacagccccagacagctctggtattcaactggactttgggaagcagagcagttctgaaagtcagcttagctttggaactcagcccagctctgggacccagataagctcaagaattcaagccagctctggaagtcagcttagttcgggaacccagctgatttccggagcccaacccagctccagaactcagactagttctggaaaccagctcagctccgggacccagaccactgcaagaattcagctcagccctggagctcatcttagctccagaacccagtccagtcctgagaccaggctcagctctgaggctcagtccagctctggaacccagttcagttctgggattcagtttggctctgaaacccagaccggctcaagaattcagcccgactctggagcccaacttagttccagaacccagtccagctctgagaccgggctcagctctgaaacccagaccggctcaagaattcagcccagccctggagcccaccttagttctggaacccagcctgtttctggaacccaatccagttccagaactcacaccagttcaagaatctggctgagccctggaaatggaatctgcccacagacccctggccttgaccctagaatccagcttgaggcccctgccccagcccaacctcagcccccaggcccatcccccagagaccccaccccagcccctagcaaagacccccagcctctgcctcagccccatgatcag

SEQ ID NO: 20279 - DNA, 491 bp, Homo sapiens
  MAP TO AL121675.8; EXPRESSED IN HELA, SIGNAL = 2.3; EXPRESSED IN ADULT LIVER, SIGNAL = 1.6; EXPRESSED IN PLACENTA, SIGNAL =   2; EXPRESSED IN LUNG, SIGNAL =   2; EXPRESSED IN FETAL LIVER, SIGNAL = 1.8; EXPRESSED IN HEART, SIGNAL =   2; EXPRESSED IN BONE MARROW, SIGNAL = 2.3; SWISSPROT HIT: P25100, EVALUE 4.00e-46; NT HIT: gi14771729, EVALUE 0.00e+00; EST_HUMAN HIT: BI828457.1, EVALUE 2.00e-72
ttaaatatcggtctcccgtaggttgctgtagtcggccaattcgtaggcctggcaggtggcgccctcggccacctcgtgtgggacgcctagggacacagcctccacctctgagcgctgggcgcacgctgcctctgcgcgctgcgcgcccccggcgcggatcttgtgcgacaggctggagactttggcgcgcagctgggtcgtgggtctccggaacggccccagcagcctccactcgcggaaggcgctgggtggctttcgacggctggcgaccggagcctgcatctcgggcgtgcctgggggttcggggtcggggtcggggagcgcggtgagggccagcggcgctccggggggcgcgtcgcccgaactcggggcgcagtcctggcgcaggccgctggtggaggcccgccagtggtggccgtagacacgccagagagggcggcggcgccggcgacgacggcactggcagcgcaggagacggaggaaggcgcgct

SEQ ID NO: 20280 - DNA, 617 bp, Homo sapiens
  MAP TO AC011536.5; EXPRESSED IN LUNG, SIGNAL = 1.7; EXPRESSED IN PLACENTA, SIGNAL = 1.7; EXPRESSED IN BRAIN, SIGNAL = 1.1; EXPRESSED IN HELA, SIGNAL = 2.3; EXPRESSED IN ADULT LIVER, SIGNAL = 1.2; EXPRESSED IN BONE MARROW, SIGNAL = 1.2; EXPRESSED IN FETAL LIVER, SIGNAL = 1.4; NT HIT: gi16163229, EVALUE 0.00e+00; EST_HUMAN HIT: AW409926.1, EVALUE 0.00e+00; SWISSPROT HIT: Q28983, EVALUE 1.00e-31
agatcacctgcccagaaaacagccactatgaggtctgtggcccaccctgcccggccagctgtccgtcccctgcaccccttacgacgccagccgtatgtgagggcccctgtgtggagggctgccagtgcgacgcgggtttcgtgttaagtgctgaccgctgtgttcccctcaacaacggctgcggctgctgggccaatggcacctaccacgaggcgggcagtgagttttgggctgatggcacctgctcccagtggtgtcgctgcgggcctgggggtggctcgctggtctgcacacctgccagctgtgggctgggtgaagtgtgtggcctcctgccatccggccagcacggctgccagcccgtcagcacagctgagtgccaggcgtggggtgacccccattacgtcactctggatgggcaccgattcgatttccaaggcacctgcgagtacctgctgagtgcaccctgccacggaccacccttgggggctgagaacttcactgtcactgtagccaatgagcaccggggcagccaggctgtcagctacacccgcagtgtcaccctgcaaatctacaaccacagcctgacactgagtgcccgctggccccggaagctacag

SEQ ID NO: 20281 - DNA, 729 bp, Homo sapiens
  MAP TO AC004178.1; EXPRESSED IN ADULT LIVER, SIGNAL = 1.5; EXPRESSED IN HELA, SIGNAL =   2; EXPRESSED IN FETAL LIVER, SIGNAL = 1.8; EXPRESSED IN LUNG, SIGNAL = 1.6; EXPRESSED IN BONE MARROW, SIGNAL = 1.8; EXPRESSED IN BRAIN, SIGNAL = 1.4; SWISSPROT HIT: Q9GZK4, EVALUE 0.00e+00; EST_HUMAN HIT: AI023490.1, EVALUE 0.00e+00; NT HIT: AJ302611.1, EVALUE 0.00e+00
ttaagcagctctccagctttccctggagtctctttccttccctagtaacctcctgagtgctcgctttatctccttgttcctcagggtgtatacgagagggttaagtgaaggagtgcccactgcatagaagagaccaaagaacttgcccctcccttgggcatacggatttttgggctggaggtagacagcaatgactgagctgtagaagagggtgaccacagtgagatgggaggagcaggtcccaaaggcctttctccatgctgtggcagagttaatcctcagcactgcctgggcagtggctccataagaggcaaggatgaggctgagaggcacaaccacgaagatgacactggacacagccaactggatttcattgtaggaggtatctccacaggagagtcgaatcagagatgggacctcacataaaaagtcatctatctgctggtggggacagaagggcaagtggagggtggatggtgtctggactatcgattgaaccagactcataacccaggccacagatgccagctgccagcacaggcgggggtggatgatggtggcatagtggaggggctggcagacagccacgtatcggtcaaaggccatcactgtcaggaggatgcactcagtggtccccagggacaggaagatgaagagctggacagagcatcccaggaagctgatggtcttctttgggccccagaggttgaccagcatctgggggacaca

SEQ ID NO: 20282 - DNA, 1291 bp, Homo sapiens
  MAP TO AC007066.4; EXPRESSED IN ADULT LIVER, SIGNAL = 2.2; EXPRESSED IN BONE MARROW, SIGNAL = 2.7; EXPRESSED IN FETAL LIVER, SIGNAL = 2.8; EXPRESSED IN LUNG, SIGNAL = 2.3; EXPRESSED IN HEART, SIGNAL = 2.1; EXPRESSED IN PLACENTA, SIGNAL = 2.1; EXPRESSED IN BRAIN, SIGNAL = 2.1; EXPRESSED IN HELA, SIGNAL = 3.4; SWISSPROT HIT: Q28151, EVALUE 5.00e-23; EST_HUMAN HIT: BI825189.1, EVALUE 0.00e+00; NT HIT: gi14744450, EVALUE 0.00e+00
atgtctgaaagatcagatctccttcacttcaagtttgaaaattatggagattcaatgttacaaaaaatgaacaaattaagagaagagaataaattttgtgatgttacagttctcatagatgatattgaggtacagggacataaaattgtgtttgctgcaggttcccccttcttaagagaccaatttttactgaatgattccagagaggtgaaaatctccatattacagagttccgaagtggggagacaattgctcttatcctgttatagtggtgtgctggaattccctgagatggaactggtaaattacttgactgctgcaagttttcttcagatgagccacattgtagaacggtgcacacaggccctgtggaagtttataaagccaaaacaaccaatggatagtaaagagggatgtgaaccacagagtgcttctccccagtcaaaagaacagcagggagatgccagaggctccccaaagcaggactcaccttgtattcatccatctgaagacagtatggatatggaggacagtgatattcagattgttaaggtagaatctattggggatgtatcagaggttagaagtaaaaaagatcagaaccagtttatttcttctgaacccactgctttacattcatcagagccccagcactccctgataaattcaactgtggaaaacagagtaagtgaaatagaacaaaaccatctccacaattatgccctttcttatacaggcagtgataacatcatcatggcctcaaaagatgtctttggccctaatattcgaggtgtagacaaaggcctacagtggcatcaccagtgcccaaagtgtaccagggtgtttcgtcacctggagaactacgccaaccatttaaaaatgcacaaactctttatgtgtctactctgcggcaagactttcactcagaaaggcaaccttcatcgacacatgcgtgtgcatgccggaattaaacctttccagtgtaaaatctgtgggaaaaccttttctcagaagtgttccttacaggatcatcttaaccttcacagtggagataagccccataaatgtaactattgtgatatggtttttgcacataaaccagttttgaggaaacaccttaaacagctgcatggcaaaaacagctttgataatgccaatgagagaaatgtacaagacctcacagtggattttgattcttttgcatgtacaacagtcacagactctaaagggtgtcagccacaacccgatgcaacacaggtcctggatgcaggtaaactggcccaagctgtcc

SEQ ID NO: 20283 - DNA, 673 bp, Homo sapiens
  MAP TO AC006124.1; EXPRESSED IN HELA, SIGNAL = 0.43; EXPRESSED IN ADULT LIVER, SIGNAL = 1.4; EXPRESSED IN BONE MARROW, SIGNAL = 1.5; EXPRESSED IN LUNG, SIGNAL = 1.1; SWISSPROT HIT: P98077, EVALUE 3.00e-14; NT HIT: AB001451.1, EVALUE 2.00e-47; EST_HUMAN HIT: AL134433.1, EVALUE 3.00e-47
gtgacgccgtgggaacccggaccccagcgcctccgggtgggggcagccgccggccgccggccggggatgggggtccggggtggcgggagagcaggaaggatggggaggggacacctggctcgcggggtccgggggtcccggaggagagggtgggggaggggaggccgccgcgaacgggctcccggggggggtgggggggactcacccgcacgacgtaggagaccccgggccccaggaccctggcgtcggggtgtagccagccgtgcgcgggtttgtggatgaagctgcccttccggatccactcggcggcggcggcggcgtccccggaccccgccgccccccgcccgccccgcgacccccgcgaccccgcgccccgacagcggctgagcgcgggcaggggacagggcgcggcgcagcggggctcgcaggcgcccaggacggcggccgccagcgccgggacgccccccgggcccgccggctcgggttgggggtccgcgccccccgaggccccagccgcccgcgccgccgccgggccgcggcccaggaagccgcccggggccgcgaacttccactgcggcattcggggcagcaacgcgcagaaggtggtgggcgcctcgggctcggggggcgcggggggcgccgggggcgcgcgcccgcccggaccctgcgtcat

SEQ ID NO: 20284 - DNA, 1926 bp, Homo sapiens
  MAP TO AF134726.1; EXPRESSED IN ADULT LIVER, SIGNAL = 5.5; EXPRESSED IN BRAIN, SIGNAL = 4.8; EXPRESSED IN HELA, SIGNAL = 3.1; EXPRESSED IN BONE MARROW, SIGNAL =  11; EXPRESSED IN HEART, SIGNAL = 7.9; SWISSPROT HIT: P08107, EVALUE 0.00e+00; NT HIT: gi11417761, EVALUE 0.00e+00; EST_HUMAN HIT: AL045580.1, EVALUE 0.00e+00
ctaatccacctcctcaatggtagggcctgacccagaccctcccttgggaccctgagccccgaagcccccaggcccgggaccaccggcaccctggtacagtccgctgatgatggggttacacacctgctccagctccttcctcttgtgctcaaactcgtccttctcggccaaggtgttggcgtccagccacgagatgacctcttgacacttgtccagaaccttcttcttgtccgcctcgctgatcttgcccttgagcccctcatcctccacggcgctcttcatgttgaaggcgtaggactccagggcgttcttggctgacaccctctcgcgctgcacctcgtcctccgctttgtacttctccgcctcctgcaccatgcgctcgatctcctccttgctcaggcggcccttgtcgttggtgatggtgatcttgctggccttgccggtgctcttgtccgtggccgtgacgttcaggatgccgttggcatcgatgtcgaaggtcacctcgatctggggcacgcccctgggggccggagggatgccgctcagctcgaagcgccccaacagattgttgtctttcgtcatggccctctcgccctcgtacacctggatcagcaccccgggttggttgtcggagtaggtggtgaagatctgcgtctgcttggtggggatggtggagttgcgcttgatcagggcagtcatcacgcctccggccgtctccagccccagcgacaggggagccacgtccagcagcagcaggtcctgcacgttctcggacttgtcccccatcaggatggccgcctgcaccgccgccccgtaggccacagcctcgtcggggttgatgctcttgttcaggtcgcgcccgttgaagaagtcctgcagcagcttctgcaccttggggatgcgggtggagcccccgaccaggaccaggtcgtgaatctgggccttgtccagcttggcgtcgcgcagagccttctccacgggctccagggtgcttcggaacaggtcggagcacagctcctcgaacctcgccctggtgatggacgtgtagaagtcgatgccctcaaacagggagtcgatctccaggctggcctgggtgctggacgacagggtcctcttggccctctcgcaggcggtgcgcagccgcctcacggctcgcttgttctggctgatgtccttcttgtgttttctcttgaactcctccacgaagtggttcaccagcctgttgtcaaagtcctccccacccaggtgggtgtccccggccgtggccttcacctcgaagatgccgtcgtcgatcgtcaggatggacacgtcgaaggtgcccccgcccaggtcaaagatgagcacgttgcgctcccccttgcccgttctgtccaggccgtaggcgatggcggcggccgtgggctcgttgatgatccgcagcacgttgagccccgcgatcacacccgcatccttggtggcctggcgctgcgagtcgttgaagtaggccggcacggtgatcaccgcgttggtcaccgggtagcccaggtacgcctcggcgatctccttcatcttggtcagcaccatggacgagatctcctcggggtagaatgccttggtctcccccttgtagctcacctgcaccttgggcttgtctccgtcgttgatcacctggaaaggccagtgcttcatgtccgactgcaccaccgggtcgccgaacttgcggccgatcagccgcttcgcgtcaaacacggtgttctgcgggttcagcgccacctggttcttggccgcatccccgatgagccgctcggtgtccgtgaaggccacgtagctgggggtggtgcggttgccctggtcgttggcgatgatctccaccttgccgtgttggaacacccccacgcaggagtaggtggtgcccaggtcgatgccgatcgccgcggctttggccat

SEQ ID NO: 20285 - DNA, 738 bp, Homo sapiens
  MAP TO AC008857.4; EXPRESSED IN PLACENTA, SIGNAL = 1.4; EXPRESSED IN HELA, SIGNAL = 2.4; EXPRESSED IN ADULT LIVER, SIGNAL = 1.4; SWISSPROT HIT: P40189, EVALUE 1.00e-120; EST_HUMAN HIT: BE005682.1, EVALUE 0.00e+00; NT HIT: gi16156969, EVALUE 0.00e+00
cacaattttaattcaaaagatcaaatgtattcagatggcaatttcactgatgtaagtgttgtggaaatagaagcaaatgacaaaaagccttttccagaagatctgaaatcattggacctgttcaaaaaggaaaaaattaatactgaaggacacagcagtggtattggggggtcttcatgcatgtcatcttctaggccaagcatttctagcagtgatgaaaatgaatcttcacaaaacacttcgagcactgtccagtattctaccgtggtacacagtggctacagacaccaagttccgtcagtccaagtcttctcaagatccgagtctacccagcccttgttagattcagaggagcggccagaagatctacaattagtagatcatgtagatggcggtgatggtattttgcccaggcaacagtacttcaaacagaactgcagtcagcatgaatccagtccagatatttcacattttgaaaggtcaaagcaagtttcatcagtcaatgaggaagattttgttagacttaaacagcagatttcagatcatatttcacaatcctgtggatctgggcaaatgaaaatgtttcaggaagtttctgcagcagatgcttttggtccaggtactgagggacaagtagaaagatttgaaacagttggcatggaggctgcgactgatgaaggcatgcctaaaagttacttaccacagactgtacggcaaggcggctacatgcctcagtga

SEQ ID NO: 20286 - DNA, 579 bp, Homo sapiens
  MAP TO AL031658.10; EXPRESSED IN HEART, SIGNAL =   2; EXPRESSED IN BONE MARROW, SIGNAL = 1.7; EXPRESSED IN LUNG, SIGNAL = 1.7; EXPRESSED IN ADULT LIVER, SIGNAL =   2; EXPRESSED IN BRAIN, SIGNAL = 2.2; EXPRESSED IN HELA, SIGNAL = 1.5; EXPRESSED IN PLACENTA, SIGNAL =   2; SWISSPROT HIT: P51811, EVALUE 1.00e-05; EST_HUMAN HIT: BE504230.1, EVALUE 0.00e+00; NT HIT: gi16162363, EVALUE 2.00e-06
ccctctccacctccgcctccctcgtgtctctggcctggacgctggcctcctaccagaaggtgctgcgggactcgcgggacgacaagcggccgctgtcctacaagggcgccgtggcacaggtgctgtggcacctgttcagcattgccgcccgcggcctggccttcgcgctcttcgccagcgtctacaagctctattttggcatcttcatcgtggcccactggtgcgtcatgaccttctgggtcatccaaggggagacggacttctgcatgtccaagtgggaggagatcatctacaacatggtcgtgggcatcatctacatcttctgctggttcaacgtcaaggagggccgcagccgccgccgcatgaccctctaccactgcatcgtcctgctggagaacgccgcgctcaccggcttctggtactccagccgcaacttctcaaccgacttctactcgctcatcatggtctgcgtagtggcctccagctttgcgctgggcatattcttcatgtgtgtctactactgtctcctgcaccccaatgggcccatgctgggtccccaggcacctggttgcatcttcc

SEQ ID NO: 20287 - DNA, 473 bp, Homo sapiens
  MAP TO AC005392.1; EXPRESSED IN ADULT LIVER, SIGNAL = 1.7; EXPRESSED IN HELA, SIGNAL = 3.7; EXPRESSED IN PLACENTA, SIGNAL =  16; EXPRESSED IN BONE MARROW, SIGNAL = 1.8; EXPRESSED IN HEART, SIGNAL = 1.3; NT HIT: gi14767539, EVALUE 0.00e+00; SWISSPROT HIT: Q00887, EVALUE 3.00e-46; EST_HUMAN HIT: BG011880.1, EVALUE 0.00e+00
ctttttcaggccagacacaaggtcagccataagaaaacagaaaaacaaggagaagagagtctgtagagacaaattgggagggttcaggaggagaatttgggatttgcttgtgcccatgggacacaggctgggaataaaaatgttttcctgactcttctctgaaagccagatagactccacataaaaccctactgccaaggatgctgggatccacttaccagagactttgactgtcatggatttggagatttccttgccagtggctgagttatgaacagagcaagcatagagcccgctatgatttctagtaatttgggggataaagagcttttgtcctgattgctgaaacttcccattaattgtccaaaaatactctgccggtgggttagattccgtgaagcaggacaagtcgaggttttctcctgaacggtaataggtgaatgaagggtaaattctggggaggtctggaccat

SEQ ID NO: 20288 - DNA, 1458 bp, Homo sapiens
  MAP TO AC016630.5; EXPRESSED IN ADULT LIVER, SIGNAL = 1.4; EXPRESSED IN HELA, SIGNAL = 0.65; EXPRESSED IN BRAIN, SIGNAL = 1.6; EXPRESSED IN BONE MARROW, SIGNAL = 1.6; SWISSPROT HIT: P28698, EVALUE 0.00e+00; EST_HUMAN HIT: AI806315.1, EVALUE 0.00e+00; NT HIT: gi13629619, EVALUE 0.00e+00
atgaatggtccccttgtgtatgcagggttcgcgctgcagctaggcagcatctccgcaggtccaggtagtgtaagccctcacctccacgtcccctgggacctcggcatggctggcctttctggccagatccaatcaccctcccgcgaaggtggctttgcgcatgcgcttctgctccccagcgatctgaggagtgaacaggaccccacggacgaggatccctgccggggtgtgggccctgctctgatcaccacccgctggcgctcccccaggggccggagccggggccgccccagcactgggggcggggtggttaggggcggccgttgcgatgtatgtggcaaggtgttcagccaacgcagcaacctgctgaggcaccagaagatccacacgggtgagcgaccattcgtgtgcagcgagtgcggccgcagcttcagccgcagctcgcacctgctgcgccaccagcttacgcacaccgaggagcggccgttcgtgtgcggcgactgtggccagggcttcgtgcgcagcgcgcgcctggaagagcatcggagagtgcacacgggcgaacagcctttccgttgcgctgagtgcggccagagcttccggcagcgctccaatctgctgcagcaccagcgcatccacggcgatcccccgggccctggcgctaagcccccggcccctcctggtgcgcccgagcctcccggcccctttccgtgcagcgagtgccgcgagagcttcgcgcggcgcgccgtgctgctggagcaccaggcggtacacacgggcgacaagtcctttggctgcgtcgagtgcggcgagcgcttcggccgccgctcagtgctgctgcagcaccggcgcgtgcacagtggcgagcggcccttcgcctgtgccgagtgcggccagagcttccggcagcgctccaacctgacgcagcaccggcgcatccacaccggggagcggcccttcgcctgcgccgagtgtggcaaggccttccgccagcggcctacgctcacgcagcatctccgcgtacacacgggcgagaaaccctttgcctgccccgagtgtggccagcgcttcagccagcgcctcaagctcacgcgtcatcagaggacacacaccggcgaaaagccctaccactgcggtgagtgcggcctgggcttcacgcaggtctcgcggctcaccgagcaccagcgcatccacacgggcgaacggcccttcgcctgccccgagtgcggccagagctttcggcagcacgccaacctcacccagcaccggcgcatccacacgggtgaacggccctacgcatgccctgagtgtggcaaggccttccgccagcggcccacgctcacgcagcatctgcgcacccaccgacgagagaagcccttcgcctgccaggactgtggccgccgcttccaccagagcaccaagctcattcagcaccagcgcgtccacagcgccgagtag

SEQ ID NO: 20289 - DNA, 935 bp, Homo sapiens
  MAP TO AL035665.25; EXPRESSED IN ADULT LIVER, SIGNAL = 3.8; EXPRESSED IN LUNG, SIGNAL = 2.4; EXPRESSED IN HEART, SIGNAL = 1.6; EXPRESSED IN BONE MARROW, SIGNAL = 1.4; EXPRESSED IN PLACENTA, SIGNAL = 1.7; SWISSPROT HIT: P54842, EVALUE 1.00e-121; EST_HUMAN HIT: BI916207.1, EVALUE 0.00e+00; NT HIT: gi14770838, EVALUE 0.00e+00
ccagcccgctggccatggagtatgtcaacgacttcgacctgctcaagttcgacgtgaagaaggagccactggggcgcgcggagcgtccgggcaggccctgcacacgcctgcagccagccggctcggtgtcctccacaccgctcagcactccgtgtagctccgtgccctcgtcgcccagcttcagcccgaccgaacagaagacacacctcgaggatctgtactggatggcgagcaactaccagcagatgaaccccgaggcgctcaacctgacgcccgaggacgcggtggaagcgctcatcggctcgcacccagtgccacagccgctgcaaagcttcgacagctttcgcggcgctcaccaccaccaccatcaccaccaccctcacccgcaccacgcgtacccgggcgccggcgtggcccacgacgagctgggcccgcacgctcacccgcaccatcaccatcatcaccaagcgtcgccgccgccgtccagcgccgctagcccggcgcaacagctgcccactagccaccccgggcccgggccgcacgcgacggcctcggcgacggcggcgggcggcaacggcagcgtggaggaccgcttctccgacgaccagctcgtgtccatgtccgtgcgcgagctgaaccgccacctgcggggcttcaccaaggacgaggtgatccgcctgaagcagaagcggcggaccctgaagaaccggggctacgcccagtcttgcaggtataaacgcgtccagcagaagcaccacctggagaatgagaagacgcagctcattcagcaggtggagcagcttaagcaggaggtgtcccggctggcccgcgagagagacgcctacaaggtcaagtgcgagaaactcgccaactccggcttcagggaggcgggctccaccagcgacagcccctcctctcccgagttctttctgtga

SEQ ID NO: 20290 - DNA, 672 bp, Homo sapiens
  MAP TO AC022336.12; EXPRESSED IN FETAL LIVER, SIGNAL = 4.9; EXPRESSED IN ADULT LIVER, SIGNAL = 3.5; EXPRESSED IN PLACENTA, SIGNAL =   3; EXPRESSED IN BRAIN, SIGNAL = 3.5; EXPRESSED IN HELA, SIGNAL =   8; EXPRESSED IN BONE MARROW, SIGNAL = 4.7; EXPRESSED IN LUNG, SIGNAL = 3.8; EXPRESSED IN HEART, SIGNAL = 3.5; SWISSPROT HIT: P11172, EVALUE 1.00e-123; EST_HUMAN HIT: BI829891.1, EVALUE 0.00e+00; NT HIT: gi14729863, EVALUE 0.00e+00
gaactaagcgtcttgtagaaggaactattaatccaggagaaacctgtttaatcattgaagatgttgtcaccagtggatctagtgttttggaaactgttgaggttcttcagaaggagggcttgaaggtcactgatgccatagtgctgttggacagagagcagggaggcaaggacaagttgcaggcgcacgggatccgcctccactcagtgtgtacattgtccaaaatgctggagattctcgagcagcagaaaaaagttgatgctgagacagttgggagagtgaagaggtttattcaggagaatgtctttgtggcagcgaatcataatggttctcccctttctataaaggaagcacccaaagaactcagcttcggtgcacgtgcagagctgcccaggatccacccagttgcatcgaagcttctcaggcttatgcaaaagaaggagaccaatctgtgtctatctgctgatgtttcactggccagagagctgttgcagctagcagatgctttaggacctagtatctgcatgctgaagactcatgtagatattttgaatgattttactctggatgtgatgaaggagttgataactctggcaaaatgccatgagttcttgatatttgaagaccggaagtttgcagatataggaaacacagtgaaaaagcagtatgaag

SEQ ID NO: 20291 - DNA, 956 bp, Homo sapiens
  MAP TO AC005015.2; EXPRESSED IN ADULT LIVER, SIGNAL = 1.3; EXPRESSED IN PLACENTA, SIGNAL = 1.9; EXPRESSED IN BRAIN, SIGNAL = 2.9; EXPRESSED IN BONE MARROW, SIGNAL = 1.4; EXPRESSED IN LUNG, SIGNAL = 1.4; EST_HUMAN HIT: BG748918.1, EVALUE 0.00e+00; SWISSPROT HIT: O42184, EVALUE 2.00e-54; NT HIT: gi15300231, EVALUE 0.00e+00
gtgggtgtgctgggaggagcacagggcctcgaccgcctggagtctgttctcagccaccaggagcttctcccgcaaactctcgacctcctgtttgccctgggcttctgcccgctgcagccgctcgtagtccaacatcttcttctcggccagcgagatctgctccttgaggaactcgatagcctgcgcctggccccggtactccacgtccagtttttccagctcgtgcacacgcagctcggcatcccggcgctggtcctgggcctcctgcagctccagccggtgctggctggcttgcacctccagctgggcccgccagtgccgctgcagcccagccagctcctcctgggcctcctgcagcttctctcgcagggcctccttctccttcacgtgcatggcggtctccaggtcatgcttggcctgcaagttacccagctccagctggtgctccatcttgatgccctccatcactgccttcagctcgccgatctccttctgctgggcgcctgggcccgagttcagggtggctttgaggtcctccagggacttctggtggtccgaggccagcgagtccagcttggatttccagttgtccattagccccatgttctcgctggtggcctgctgaaccttgtccttcaggcccgccacctcctgtgcgtacttctcgttggccgcgcggagcttgtccacctccgcctggtaggccttcagggccttctcgtatttatcccgcagcaccccactctccctctggtgttccttgctggccgagagcagccgctcccgtagccgcaggatctcggcggcgtctgggtggtccggaggtgggggacccgagtgcaacaggcactgctggagctcctcgatttcacctcggcgcagggtgagctcctcctccagctgcagcacgcgcgacttctcggccactgtggtcagctgtggggagagagggagac

SEQ ID NO: 20292 - DNA, 602 bp, Homo sapiens
  MAP TO AC005409.1; EXPRESSED IN ADULT LIVER, SIGNAL = 1.5; EXPRESSED IN HELA, SIGNAL = 1.7; EXPRESSED IN BONE MARROW, SIGNAL = 1.3; EXPRESSED IN FETAL LIVER, SIGNAL = 1.2; EXPRESSED IN LUNG, SIGNAL = 1.1; NT HIT: gi14741165, EVALUE 2.00e-22; SWISSPROT HIT: P11369, EVALUE 2.00e-34; EST_HUMAN HIT: BF798369.1, EVALUE 7.00e-20
atgataccacttctctacaatctctttcagaaaatggaagcagagagaacatttcctaattcattctatgaggccaaaactaccctaataccaaaacaaggcaaagacattacaagaaaggaaacttataaaccactatctctcatgaacacagatgcgaaaaccctcagtaaaatattatcaaatcaaatccaacaatatataaaaagaattatttaccacaaccaactgggattcatcccaggtatacaagcctggtttaacaaccaaaaatcaattcataaaatccttcacatcaacaagctaaagaagaaaaattgtatgacgataccaatagatgcagaaaaagcatttgacaatccaacattaatttatgataaaaatgttcagcaaactaggaatacaggagaacttcctcagtttgatagagcatccacaaaaacagtttcacctaatatcatacttagtgatgagaaactacatgctttcctcctaaaaccaggaacaagacaagtgtggactcctcctcccatcaccattcttattcaaaattgtacctgaagtcctagctgatgcagtaagacaaaaaaaggaaataaaag

SEQ ID NO: 20293 - DNA, 856 bp, Homo sapiens
  MAP TO AL137225.7; EXPRESSED IN HELA, SIGNAL = 5.7; EXPRESSED IN ADULT LIVER, SIGNAL = 4.7; EXPRESSED IN PLACENTA, SIGNAL = 8.8; EXPRESSED IN HEART, SIGNAL = 5.3; EXPRESSED IN BONE MARROW, SIGNAL = 5.8; EXPRESSED IN LUNG, SIGNAL = 4.4; SWISSPROT HIT: P54681, EVALUE 2.00e-04; NT HIT: S71529.1, EVALUE 2.10e-01
cctccaaatgacttgtttccttgctgaccatactcatatgacctatccccagtttgaccgtaaccagatgacctaccaccagtctgataactcattaaccctgcctcagactgaccaaaatcatcatttttcccagtcccaggatgatcagttattagtcctgccctagattgacccaaaccatcagatgactcagccccatactgaccgtaactgccaggtgaagccaccccagacacaacagcatttcctgaagaagcatctgaaggttgaccactgcctgagaagctcatatcacccacacctgtatggccagattgggtcatccacttgtggtcagagtagccaaggctctttataaccttctgacttaattgtccaggggtagtcattcctttgtgacctaaggatccttgactgatcacagcacttttgtcagtagagcctggaccgcccatctcactctgaccaagtttacccatagtgtcttgattggtcacatggattctcacagatggagtaggggcagaagcagccattctcactgggggtgtgggcagcagagtgggcatctggaacatactggatttcccaggcttgatgctgtactcagtggcatcttcggcatgaggggaactcagataaatgtattcctggtcattctcaaggtggtttggctcagagaggtgagcagcaactcttgtagttggggaaccactgttggccccagcctgatggttattcccactgagaaggcctgtgccaagaacaccaccattgccgagcacctggccattcttgagaagtcctgtacccaagagaccactgctgcccaggagacctccatttctactac

SEQ ID NO: 20294 - DNA, 455 bp, Homo sapiens
  MAP TO AL035551.6; EXPRESSED IN ADULT LIVER, SIGNAL = 1.3; EXPRESSED IN HELA, SIGNAL = 0.99; EXPRESSED IN LUNG, SIGNAL = 1.4; EXPRESSED IN FETAL LIVER, SIGNAL = 1.1; SWISSPROT HIT: O00409, EVALUE 9.00e-57; EST_HUMAN HIT: AW303985.1, EVALUE 1.00e-120; NT HIT: gi15300653, EVALUE 0.00e+00
ccgccgcttctttaatctcctcttcttcgccctggtggggggcggtgcgggggcggtgctttacagtgcgtctctttttgaggggcagtgtgtcgctggggaccttcctggccttagcaaagtcctggcgtttcttgtgctgggatgcgtacccgctgtcccccagagcatccctgggctccttctggctgtgtttcctgtcgtcctcttccctgtcgctgtggctctcgtggctccggaagctcccctcgctgccctcattgccctcctggctctccttgctggcaaacttgtagtggtcgtcggccaaggaggaggaggggatggagtcgctggtgggcaaggtgctccgggcgttggaggatttggcattggtgcagttgtgatcctccttagggtctccgctaaccaccggggagccacacgatggctcgctctcagtccgcatccggcag

SEQ ID NO: 20295 - DNA, 468 bp, Homo sapiens
  MAP TO AL022394.1; EXPRESSED IN BONE MARROW, SIGNAL = 4.4; EXPRESSED IN LUNG, SIGNAL =   4; EXPRESSED IN HEART, SIGNAL = 4.1; EXPRESSED IN HELA, SIGNAL = 6.7; EXPRESSED IN ADULT LIVER, SIGNAL =   4; EXPRESSED IN PLACENTA, SIGNAL = 3.6; EXPRESSED IN BRAIN, SIGNAL = 4.1; SWISSPROT HIT: Q9NUA8, EVALUE 4.20e-02; EST_HUMAN HIT: AL580725.1, EVALUE 0.00e+00
agggatgctctgctccacaaccacatgattgtctggcttggccacgttccacacaaagctggcttccccggagtgacatgtggcattgtgcaaggaaagcccctcaggggtttttgccagaaaactgcacccactgcatacaaaggttgggtctttattaaagtctgtgtgctctgagttcatatgtcccacaaattgggtcatgtcatgggatctgaaatcgcagtatttacaggaatataaatagccatctaaagtgctccgatgcccattggccagtgtagagccatcagtactgctggggttctgtgctgcctcactgctggcagcagatgcttctgggggcagatcctgctggggtccttcaggcaaggtctcagcgggctgggcctccatgctggcatcttgcaacaccacagtcttcactgggatcatgcatggtgtggtggatttcctcttgctggccat

SEQ ID NO: 20296 - DNA, 2240 bp, Homo sapiens
  MAP TO AF025422.1; EXPRESSED IN ADULT LIVER, SIGNAL = 2.2; EXPRESSED IN PLACENTA, SIGNAL =   2; EXPRESSED IN HELA, SIGNAL = 2.2; EXPRESSED IN BONE MARROW, SIGNAL = 2.3; EXPRESSED IN LUNG, SIGNAL =   2; EXPRESSED IN HEART, SIGNAL = 2.2; EXPRESSED IN FETAL LIVER, SIGNAL = 2.2; NT HIT: AF192979.1, EVALUE 0.00e+00; EST_HUMAN HIT: AI909644.1, EVALUE 0.00e+00; SWISSPROT HIT: Q9UJW7, EVALUE 0.00e+00
gagacaagaatggaaaggatacggagtatattcaagatgaagaattaaggttcttttcacacaaagagctctcctcatgcaaaatctgggaagaggtggcaggtgaattacctgggagccaagactgtagagtaaatctgcaaggaaaagacttccagttctcagaagatgctgctccccatcaagggtgggaaggagcatctacgccgtgttttccaattgagaatttcctggacagtctacaaggggatgggcttatcggtctagaaaatcaacagtttccagcctggagagctataagaccaatccccattcaaggatcttgggcaaaagcgtttgtgaaccagttaggggatgttcaagaaagatgtaaaaatctcgacacagaagacacagtatataaatgtaactgggatgatgacagcttttgctggatatcttgtcatgttgatcacagattccctgaaatagacaagccgtgtggttgcaataaatgcagaaaagactgcattaaaaactctgtacttcatcgcattaaccctggagagaatggcttgaaaagtaacgaatacagaaatggcttcagggacgatgcagaccttcccccgcatccaagagtacctttgaaagagaaactctgtcaatatgatgagtttagtgagggcttgaggcacagtgcccatcttaacagacatcaaagagttcccacaggagagaaatctgttaagagtcttgagcgtggtcggggcgtcagacagaacacgcacatacgtaaccaccccagagcccctgtgggagacatgccctatagatgtgatgtctgtggaaaggggttcaggtataaatcggttcttcttattcatcaaggggtgcacacaggaaggagaccctataaatgtgaggagtgtgggaaggcatttggtcgaagttcaaacctgcttgtccatcagagggtccacactggagagaaaccatataaatgcagcgagtgtgggaagggcttcagttacagctcagtgcttcaagtccatcagaggctgcacacaggggagaagccctacacctgcagcgagtgtggcaaaggcttctgtgccaagtctgcactgcacaaacaccagcacattcaccctggagaaaagccctacagctgtggcgagtgtggaaagggattcagctgcagctcccacctcagcagtcatcagaagacacacaccggcgagaggccctaccagtgtgacaagtgtggcaaaggtttcagtcacaactcgtaccttcaagctcaccagagagttcacatggggcagcatctgtacaaatgtaacgtgtgtggtaagagtttcagttacagctcagggcttctcatgcatcagagactgcacacaggagagaaaccctacaaatgcgagtgcgggaagagctttggccggagctccgacctccacatccatcagagggtccacacaggagagaaaccctataaatgcagtgagtgtgggaagggcttccggcggaattcagaccttcacagccaccagagggtccacacgggagagaggccctacgtgtgtgacgtgtgtgggaagggtttcatctacagctccgacctccttatccatcagagggtccacactggagagaaaccctataaatgtgctgagtgtggcaaaggcttcagttacagctcagggcttctcattcaccagagagtccacacaggcgagaaaccttacagatgccaagagtgcggaaagggctttaggtgcacatcaagccttcacaaacatcagcgagtccacacgggaaaaaagccctatacgtgtgatcagtgtggcaagggattcagttatggctctaatcttcgcacccaccagaggttgcacacaggagagaaaccctacacttgttgtgaatgtgggaagggtttcagatatggctcaggtctccttagtcataagagagtgcacactggcgagaagccatacagatgccacgtgtgtgggaagggctatagtcagagctcacatcttcaaggtcatcagagggtccacactggtgagaaaccctataaatgtgaggagtgtgggaagggctttggccgcaactcctgtcttcatgttcatcagagagtccacactggagagaagccctatacgtgtggtgtgtgtgggaaaggcttcagttatacctcaggtctgcggaaccaccaaagagtgcatttaggcgagaacccttataagtag

SEQ ID NO: 20297 - DNA, 676 bp, Homo sapiens
  MAP TO AC005015.2; EXPRESSED IN ADULT LIVER, SIGNAL = 2.2; EXPRESSED IN HELA, SIGNAL = 0.21; EXPRESSED IN PLACENTA, SIGNAL =   4; EXPRESSED IN BONE MARROW, SIGNAL = 1.8; EXPRESSED IN FETAL LIVER, SIGNAL =   2; EXPRESSED IN LUNG, SIGNAL = 2.5; EXPRESSED IN HEART, SIGNAL = 2.9; EST_HUMAN HIT: BI047278.1, EVALUE 5.00e-52; SWISSPROT HIT: P30622, EVALUE 2.00e-43; NT HIT: AF041055.1, EVALUE 0.00e+00
ataaggaatgggtgtcccaggctggaccctgtccgagcccccttcgagtccccaccctgcccagcccaggggggtccagcttcgccaagtggggcggagcaggggagggaagggaagctgggcccagagcccagtactgcccgcactcaccagcacgcggtcccccaggcgcaggtccttttcgccccgcttcacagagccgctgtctgagaggttggatcccgactcgttgccagtcttcacggagctgttgaggacgctctcccgcagggggatgacgcggctggtcagcgggggcgtggccgtgcccgaatgcaatgacaggttctgggcagtcagcgactccacggagtgggcatcactccccgagccctcggccgtgggctgccgggtcagcttggagggccgcgtgaagataccctggagggccgggcactcgaagtagcgcacgccgcccaccgcgccatcattcttgcccaccgggtcgtccagcaccacgccagcccactggcccggtgcgaactgcgtctctcccagatactgcaccacgcctggcttcacgccgttcacccacacccgctcgcccaccacaaagtcccccaggaagtcatcccccacttccgccgccttggggcccggcttctcgggggcagcagctgcggccggggaggaggag

SEQ ID NO: 20298 - DNA, 496 bp, Homo sapiens
  MAP TO AP000536.1; EXPRESSED IN ADULT LIVER, SIGNAL = 1.8; EXPRESSED IN PLACENTA, SIGNAL = 2.6; EXPRESSED IN HELA, SIGNAL = 3.2; EXPRESSED IN LUNG, SIGNAL = 1.7; EXPRESSED IN FETAL LIVER, SIGNAL =   2; EST_HUMAN HIT: BG009093.1, EVALUE 3.00e-43; SWISSPROT HIT: P18175, EVALUE 9.00e-05; NT HIT: AL163202.2, EVALUE 4.00e-88
tgttatggaatcctatgtgagggaccaaccctcagaacccagcagcagtgtgctggattcctttctgaggcacaaacattcagagcctcgtagcagtgttctcgaatcctatatgagggacaaacaccccgaacccagcagcggtgttttggaatcctttgtgagagaaaaactttctgaccctcaaagcagtgttctggaatcctatgtgacagagaaacactcaaaacccagcagccgtgttctggtatcctacatgaggggcaagcattcagaccatcatagcagtgttctggaatcatatgtgagagacaaacattcagaccctcgtagctgtgttctgcaatcctatgagagggaaaaacattcagaacccagcagcagtgttctggagtcctttgtgacggacaagcattcagacccttgtagcagtgttctggaatcctatgtgagagacaaatattcaaaccttcatatcagtgttctggatttctat

SEQ ID NO: 20299 - DNA, 707 bp, Homo sapiens
  MAP TO AC015478.3; EXPRESSED IN ADULT LIVER, SIGNAL = 2.5; EXPRESSED IN HELA, SIGNAL =   1; EXPRESSED IN HEART, SIGNAL = 2.8; EXPRESSED IN BRAIN, SIGNAL = 2.4; EXPRESSED IN PLACENTA, SIGNAL = 5.8; EXPRESSED IN FETAL LIVER, SIGNAL = 3.9; EXPRESSED IN BONE MARROW, SIGNAL = 2.5; EXPRESSED IN LUNG, SIGNAL = 2.7; EST_HUMAN HIT: AV745488.1, EVALUE 2.00e-08; NT HIT: L02938.1, EVALUE 2.00e-10
  unsure 646
atggccaacatctgcggaaccccagagggaggccatgagaggccgtgtcatggtggagggagctctgcattggggtatggaggcttggagccacctctgggccctccaactattaaacagggacccaggcacttccttcacctccttgtaccattcctctcctgggaggagagaatggtaggacctgcctcttggagttgttgggggagggttggtaatgaggtcttgtcacacagcccttcactgcacagtgcctgggccacgagcttgattgggagtcggggggagtggagctgtgatgacaatgatgatgatggaggtggtgatgataaacatgatgatggccatggtaatgccagtgatggtggtggtgatggtggtggtggtgatggttgtggtggtgatggtggtggttctgatgatggtggtagtggcgatgattgtggtgatggtggtggtagtgacagtgatggtggtgatggttgtcgtggtgatggtgttgttggtggtagtggtgatggtgatggtggtggtggtgacagtggcagtgctcttgatggtggtgatggtgttggtggtgacagtcatggtagcagtattggtggtggtggtggtggtggtaatggtgatgtcggtctttctggtnggggaccgatctcggtggggggggctggtcatagctgtttcctgtgtgaaattgttatccg

SEQ ID NO: 20300 - DNA, 968 bp, Homo sapiens
  MAP TO AC000015.2; EXPRESSED IN HELA, SIGNAL = 1.5; EXPRESSED IN PLACENTA, SIGNAL = 1.6; EXPRESSED IN BRAIN, SIGNAL = 0.98; EXPRESSED IN ADULT LIVER, SIGNAL = 1.3; EXPRESSED IN LUNG, SIGNAL = 1.3; EXPRESSED IN BONE MARROW, SIGNAL = 1.2; EST_HUMAN HIT: BF680103.1, EVALUE 0.00e+00; SWISSPROT HIT: P41891, EVALUE 1.00e-03; NT HIT: gi14768458, EVALUE 0.00e+00
ttccaatttggtgttcagaagattattttttagtaagttattttcagagtcttgaatattattgaaatcttcattcccaaaagtatcacatgttgcaattatttctacatcttcagtttcaacatgcccaagcaattgaacctctgggctcttaacagattgtctgtccactgtctgtataatttcaccctcagaagattctaacttggggctctctataagctcctctgtttttagtgtaaaatctttatgttcagtaatttctactagggaactctctgttattttttcttcattaaccactgactctacattctcagataagtcacttaggggacaagatacaggttggtacactttgctttcagatgttaaacatgtaggaaaatcatttggaagatgaactgtacatacatctgtctttacctctgattgtgaaagtccagatatctggtcttgcttttccaatggatcacctcctttttcaagaatattttcagaaatctcactttccaaacacaaaacattagcctctatacctgtattctcgagttttttaacttccccttcctcaccaactagcacaggaagatcttgagcacaagactcagaagatgaagatcctactctttcctctgtatcataatttgcagtatgcttctcactttcttctatttgctcattgcaacttttcaagcaattagcagactggttttctacatgagtctgcacagtacaaatgttactactgtctacatctggttggtgctctttttctaacacaggtgatgtgtcagattctgctgtttcttcatctactgaatcattggaagatgatttttcaggggcagctacagagctccgaagtttctttttcagtaaaggtggttttcttcctcttcttacagacttccgttttggagcctgtcttgtttgcttttctgactcagctgaagagggaacactta

SEQ ID NO: 20301 - DNA, 476 bp, Homo sapiens
  MAP TO AP002025.1; EXPRESSED IN HEART, SIGNAL = 3.5; EXPRESSED IN LUNG, SIGNAL = 2.9; EXPRESSED IN ADULT LIVER, SIGNAL =   3; EXPRESSED IN HELA, SIGNAL = 0.45; EST_HUMAN HIT: BI545676.1, EVALUE 0.00e+00; SWISSPROT HIT: Q29131, EVALUE 6.50e-01; NT HIT: gi16164754, EVALUE 0.00e+00
ctcttctgcaggtgttagcagttttcttttggttgggcagaatcccagttggcacagacctgctgcgatatccccaaagtggtggcagaagatcaagctccccagagatgtgtgctgagcaacattcagaagggccttgcagctggtgtacagtcttcgagttgcatcgggggcagcatcaaaacacaccacgtcttgaacgacggcaccaaattcagttctatatctcaaagggactccaacaccaggcatgagataggggcagatacccaaggtaactacaaactgcaaaacgaactggacagtcttctgttgtgagatactaagtgcatcggggctcagggcaggagcaacttccggagtcctagggttgggtttacctggattgaaattagctgcaaggcggatcatggtttccttcaagcacaaaagcaacaacaaggtttgagaggtaaaactccaagtgacatccacag

SEQ ID NO: 20302 - DNA, 749 bp, Homo sapiens
  MAP TO AL035685.17; EXPRESSED IN ADULT LIVER, SIGNAL = 1.7; EXPRESSED IN BONE MARROW, SIGNAL = 1.5; EXPRESSED IN FETAL LIVER, SIGNAL = 1.5; EXPRESSED IN LUNG, SIGNAL = 1.5; EXPRESSED IN HEART, SIGNAL = 2.1; EXPRESSED IN BRAIN, SIGNAL = 1.4; EST_HUMAN HIT: AA166676.1, EVALUE 0.00e+00; SWISSPROT HIT: Q14721, EVALUE 1.00e-100; NT HIT: gi14786308, EVALUE 0.00e+00
atgccggcgggcatgacgaagcatggctcccgctccaccagctcgctgccgcccgagcccatggagatcgtgcgcagcaaggcgtgctctcggcgggtccgcctcaacgtcggggggctggcgcacgaggtactctggcgtaccctggaccgcctgccccgcacgcggctgggcaagctccgcgactgcaacacgcacgactcgctgctcgaggtgtgcgatgactacagcctcgacgacaacgagtacttctttgaccgccacccgggcgccttcacctccatcctcaacttctaccgcactgggcgactgcacatgatggaggagatgtgcgcgctcagcttcagccaagagctcgactactggggcatcgacgagatctacctggagtcctgctgccaggcccgctaccaccagaagaaagagcagatgaacgaggagctcaagcgtgaggccgagaccctacgggagcgggaaggcgaggagttcgataacacgtgctgcgcagagaagaggaaaaaactctgggacctactggagaagcccaattcctctgtggctgccaaggtgagtctgggatctgggggctgctggtctggggggatctgcttgcatccccatattgaggaccactgctggaggactctggctttgttcccaacgatgaagattagtaatggggaggggctaggactgagtccccagaggtgaggaccaaccccctcagacttttcccatgtggcactggt

SEQ ID NO: 20303 - DNA, 725 bp, Homo sapiens
  MAP TO AL033383.24; EXPRESSED IN ADULT LIVER, SIGNAL = 2.6; EXPRESSED IN PLACENTA, SIGNAL = 4.2; EXPRESSED IN BRAIN, SIGNAL = 2.2; EXPRESSED IN BONE MARROW, SIGNAL = 2.2; EXPRESSED IN LUNG, SIGNAL = 2.4; EXPRESSED IN HEART, SIGNAL = 2.6; EXPRESSED IN FETAL LIVER, SIGNAL = 2.2; EST_HUMAN HIT: AL547477.1, EVALUE 0.00e+00; NT HIT: gi14746990, EVALUE 0.00e+00
tggccttaccaattttctcttgagatcgccttctaagggtaggggattttgatttccttgcttgatcttgagacttacttcttttggatgggcttttagattttttcctctcctttgacttgctcctagttgttttctctttaacgatttcaataccccccttacttttctttttatcagacctatgtctagtccgttctttggatctgcttttacttcgtttctttgtagtaattttattgtccacaagttcaagtttcccctttgtacttgaagatctagtactagacctatttccatttcttgccttttcatgaatttccccctcttcttcagagccagactcataaccttgcaaaatgagccccataccagactggacctttccttccattaactcattatcaagttcggccttaatcaaggctctctgtttttccaagtcttctagcaaagctaaatcatcaagtttagttctttttgctggagacataccctctttatcagaagcatcaataatctcttttcttttgtgtttcttatgtttatgcttatgtttatgttttttatccttgtcttcttctgaggaatgtttatgtttcttatgtttacttctgtgtttatgcttcttttttttgtgacgactgtgcttattttgagactggtcttctgatacttctccattttcttcatttatactcttttcagaattagcatcttccatc

SEQ ID NO: 20304 - DNA, 673 bp, Homo sapiens
  MAP TO AL035685.13; EXPRESSED IN HELA, SIGNAL = 0.7; EXPRESSED IN ADULT LIVER, SIGNAL = 1.9; EXPRESSED IN HEART, SIGNAL = 1.9; EXPRESSED IN BONE MARROW, SIGNAL = 1.8; EXPRESSED IN FETAL LIVER, SIGNAL = 2.1; EXPRESSED IN LUNG, SIGNAL = 1.9; NT HIT: gi14786308, EVALUE 0.00e+00; SWISSPROT HIT: Q14721, EVALUE 1.00e-100; EST_HUMAN HIT: AA166676.1, EVALUE 0.00e+00
taatcttcatcgttgggaacaaagccagagtcctccagcagtggtcctcaatatggggatgcaagcagatccccccagaccagcagcccccagatcccagactcaccttggcagccacagaggaattgggcttctccagtaggtcccagagttttttcctcttctctgcgcagcacgtgttatcgaactcctcgccttcccgctcccgtagggtctcggcctcacgcttgagctcctcgttcatctgctctttcttctggtggtagcgggcctggcagcaggactccaggtagatctcgtcgatgccccagtagtcgagctcttggctgaagctgagcgcgcacatctcctccatcatgtgcagtcgcccagtgcggtagaagttgaggatggaggtgaaggcgcccgggtggcggtcaaagaagtactcgttgtcgtcgaggctgtagtcatcgcacacctcgagcagcgagtcgtgcgtgttgcagtcgcggagcttgcccagccgcgtgcggggcaggcggtccagggtacgccagagtacctcgtgcgccagccccccgacgttgaggcggacccgccgagagcacgccttgctgcgcacgatctccatgggctcgggcggcagcgagctggtggagcgggagccatgcttcgtcatgcccgccggcat

SEQ ID NO: 20305 - DNA, 516 bp, Homo sapiens
  MAP TO AC005950.1; EXPRESSED IN BONE MARROW, SIGNAL = 1.8; EXPRESSED IN LUNG, SIGNAL = 1.9; EXPRESSED IN HEART, SIGNAL = 1.6; EXPRESSED IN FETAL LIVER, SIGNAL = 1.8; EXPRESSED IN BRAIN, SIGNAL = 1.8; EXPRESSED IN ADULT LIVER, SIGNAL = 2.1; EXPRESSED IN PLACENTA, SIGNAL = 1.8; EXPRESSED IN HELA, SIGNAL = 2.4; NT HIT: gi16164423, EVALUE 0.00e+00; SWISSPROT HIT: Q09639, EVALUE 5.50e-01; EST_HUMAN HIT: BG326097.1, EVALUE 0.00e+00
tcatggcgtgcggggtttgggctgcggggatggcctggagggctccgagggctcggagggtgcggcggccgcggcagccacggcgtcctcggcgggtgcggcgggtgcggtgcgttcctggcggctgcgaaagtcctgcagggcgcggcggttctggaaatcgatgagcgccagcgcgatggccgcgttccagcagctctcgcccgcgcagcggaagtcgatctccttgtggtcggtggtgacgatggtgaagtacacgtacttgcccgtgcgctccacgcagtccaccttgaggatggagtggaagcgcagctccttggggcgcgcgcgggggctggcggggaacaggctcaggcggtcggaggtgagcaccccgcgcttcttcttccatagctggaagaggctgtcgctgcgcttctccaactcgccctcgcgtagcacctcgtcgggggatttcatgtcgtgccgagcgcgggactgggagcggcaatgcgggcggtgacggcgccggctctg

SEQ ID NO: 20306 - DNA, 3191 bp, Homo sapiens
  MAP TO AP001747.1; EXPRESSED IN ADULT LIVER, SIGNAL = 1.4; EXPRESSED IN HELA, SIGNAL = 1.1; EXPRESSED IN LUNG, SIGNAL = 1.2; EXPRESSED IN BONE MARROW, SIGNAL = 1.2; EXPRESSED IN FETAL LIVER, SIGNAL = 1.4; SWISSPROT HIT: P24856, EVALUE 8.00e-80
accagtgtcagggccgagtagccacaggacagaactgagaagcgagtaccaacatcaagcctgccgcgccatttatatccacgcatgcgtttccccttacctgcaccgagcctcccgccccgtttacatccacgcaggcgtttccccttacctgcaccgagcctccattcccgtttatatccacgcaggcgtttccccttacctgcaccgagcctcccgccccgtttacatccacgcaggcgtttccccttacctgcaccgagcctcccgccccgtttacatccacgcaggcgtttccccttacctgcaccgagcctcccgccccgtttacatccacgcaggcgtttccccttacctgcaccgagcctcccgccccgtttacatccacgcaggcgtttccccttacctgcaccgagcctcccgccccgtttacatccacgcaggcgtttccccttacctacaccgagcctcccgccccgtttacatccacgcaggcgtttccccttacctgcaccgagcctcccgccccgtttacatccacgcaggcgtttccccttacctgcaccgagcctcccgccccgtttacatccacgcaggcgtttccccttacctgcaccgagcctgccgccccgtttacatccacgcaggcgtttccccttacctgcaccgagcctgccgccccgtttacatccacgcaggcgtttccccttacctgcaccgagcctcccgccccgtttatatccacgcaggcgtttccccttacctgcaccgagcctccattcccgtttacatccacgcaggcgtttccccttacctgcaccgagcctcccgccccgtttacatccacgcaggcgtttccccttacctgcaccgagcctgccgccccgtttacatccacgcaggcgtttccccttacctgcaccgagcctcccgccccgtttatatccacgcaggcgtttccccttacctgcaccgagcctccattcccgtttacatccacgcaggcgtttccccttacctgcaccgagcctcccgccccgtttacatccacgcaggcgtttccccttacctgcaccgagcctccattcccgtttacatccacgcaggcgtttccccttacctgcaccgagcctccattcccgtttatatccatgcaggcgtttccccttacctgcaccgagcctcccgccccgtttacatccacgcaggcgtttccccttacctgcaccgagcctcccgccccgtttacatccacgcaggcgtttccccttacctgcaccgagcctcccgcccggtttacatccacgcaggcgtttccccttacctgcaccgagcctcccgccccgtttacatccacgcaggcgtttccccttacctgcaccgagcctcccgccccgtttacatccacgcaggcgtttccccttacctgcaccgagcctcccgccccgtttacatccacgcaggcgtttccccttacctgcaccgagcctccattcccgtttatatccacgcaggcgtttccccttacctgcaccgagcctgccgccccgtttacatccacgcaggcgttgccccttacctgcaccgagcctgccgccccgtttacatccacgcaggcgtttccccttacctgcaccgagcctccattcccgtttatatccacgcaggcgtttccccttacctgcaccgagcctccattcccgtttatatccacgcaggcgtttccccttacctgcaccgagcctcccgccccgtttacatccacgcaggcgtttccccttacctgcaccgagcctccattcccgtttatatccacgcaggcgtttccccttacctgcaccgagcctcccgccccgtttacatccacgcaggcgtttccccttacctgcaccgagcctccattcccgtttatatccacgcaggcgtttccccttacctgcaccgggcctgccgccccgtttacatccacgcaggcgtttccccttacctgcaccgagcctccattcccgtttatatccacgcaggcgtttccccttacctgcaccgagcctccattcccgtttatatccacgcaggcgtttccccttacctgcaccgagcctcccgccccgtttacatccacgcaggcgtttccccttacctgcaccgagcctccattcccgtttatatccacgcaggcgtttccccttacctgcaccgagcctcccgccccgtttacatccacgcaggcgtttccccttacctgcaccgagcctccattcccgtttatatccacgcaggcgtttccccttacctgcaccgagcctcccgccccgtttacatccacgcaggcgtttccccttacctgcaccgagcctccattcccgtttatatccacgcaggcgtttccccttacctgcaccgagcctccattcccgtttatatccacgcaggcgtttccccttacctgcaccgagcctccattcccgtttatatccacgcaggcgtttccccttacctgcaccgagcctcccgccccgtttacatccacgcaggcgtttccccttacctgcaccgagcctccattcccgtttatatccacgcaggcgtttccccttacctgcaccgagcctcccgccccgtttacatccacgcaggcgtttccccttacctgcaccgagcctccattcccgtttatatccacgcaggcgtttccccttacctgcaccgagcctcccgccccgtttacatccacgcaggcgtttccccttacctgcaccgagcctccattcccgtttatatccacgcaggcgtttccccttacctgcaccgagcctccattcccgtttatatccacgcaggcgtttccccttacctgcaccgagcctccattcccgtttatatccacgcaggcgtttccccttacctgcaccgagcctcccgccccgtttatatccacgcaggcgtttccccttacctgcaccgggcctgccgccccgtttacatccacgcatgcgtttccccttacctgcactgggcctgccaccctgtttatatctatgcctgcgttttcctcttgccttttcaatccagaggcctcactagctttggcctagtcatcctttctccttgtcttctcttcaggtattttattgatgacttcctgatagcaccaaatggctccccgagggctctgaggcattcacacgtgt

SEQ ID NO: 20307 - DNA, 693 bp, Homo sapiens
  MAP TO AC019063.4; EXPRESSED IN BONE MARROW, SIGNAL = 2.6; EXPRESSED IN FETAL LIVER, SIGNAL = 3.8; EXPRESSED IN LUNG, SIGNAL = 2.5; EXPRESSED IN ADULT LIVER, SIGNAL = 2.5; EXPRESSED IN PLACENTA, SIGNAL = 5.3; EXPRESSED IN BRAIN, SIGNAL = 2.5; EXPRESSED IN HEART, SIGNAL = 2.8; EXPRESSED IN HELA, SIGNAL = 4.3; SWISSPROT HIT: P25823, EVALUE 2.40e+00; EST_HUMAN HIT: AL119731.1, EVALUE 1.00e-92; NT HIT: AL163202.2, EVALUE 1.00e-130
atgaaaacaatggttgaattctgtgagttgaatgaacacatcacaaagaagtttaggagaaagcttctgtccagtttttatgggaagatattcctgtttacaatgaagtcctcaaagcggtccaaatatccacttgcagattctagaaaaacagtgtttcaaaactgctctacgaaaagtaaggttcaattctgtgagttgatgtcacacatcacaaagaagtttctcagaatgcttctgtccagtttttatgtgaagatatttctgtttccaatgaagggctcaaagcgctccaattatctaattgaagattctacaaaaagagtttttcaaaagagctgtatcaataggaagtttcaactctctgaggtgaatacacacatcacaaagaagcttatgagaatgcttctgtctaatttttatgtgaagatatccccatttccaccatggatctcaaagcactccaaatatccccttgcagattctacaaaaagagtgtctcaaaactgctctatcaaagggaaggttcaactctgtgagttgaatgcacacatcacaaagaagtctctgagaatgcttctgtctagtttttctgtgaagatatttccatttcaaccacaggcctcaaaactctccatatatccacttgcagattatacaaaaagtgtttcaaaactgctctatgaaaaataa

SEQ ID NO: 20308 - DNA, 1314 bp, Homo sapiens
  MAP TO AC010642.4; EXPRESSED IN ADULT LIVER, SIGNAL = 1.9; EXPRESSED IN BRAIN, SIGNAL = 1.7; EXPRESSED IN HELA, SIGNAL = 0.67; EXPRESSED IN PLACENTA, SIGNAL = 2.9; EXPRESSED IN FETAL LIVER, SIGNAL = 2.4; EXPRESSED IN LUNG, SIGNAL = 1.9; EXPRESSED IN HEART, SIGNAL = 1.8; EXPRESSED IN BONE MARROW, SIGNAL =   2; SWISSPROT HIT: P52742, EVALUE 2.00e-89; EST_HUMAN HIT: BE792666.1, EVALUE 0.00e+00; NT HIT: M88360.1, EVALUE 0.00e+00
tcattgcagcaccgtgatgtggatccgcaagtgaaccatcagggctgagctacgactgaaggccttcccacagtcgctgcacttataaggcttctctcccgtgtggatcctctggtgctcaatgagggaggagctctgtgcaaaggccttcggacaaaccttacactgatatggcttctctccagagtggattctcagatgtcggatcagggctgagcagtcgctgaaggctcggccacacgcgtcacacttgtagggcttctccccggtgtggatgcgctggtgttgagtcaggtgcgtgctctggctgaaggctttcccacacgcgtcacactcgtagggccgctcccccgtgtgcacccgctggtgctgggtgaggtgagtgctgcggctgaaggttttaccacattccccacatttgtagggtttctctccagtatgaatcctttggtgctgagtcaggtgggtgactcggctgaaggccttcccacattccttacactcatggggcttcgcccctgtgtggacaacctggtgctgggcgaggtgagtgctccggctgaaggctttcccacactcgctgcaggcatatggggtcttccgagaatgggtcttctggtgtgcctcgagcgccgaagcactctggaacatcttcctacactcgcgacacttggaggacctcttccctgagtaggtgtatggaggctctgtcccataagcatccaccagatcaaatttgtcttctgaaggaggcttctcttgggaggtgaggtttggccacgcactagaactgttcctcgaggcaccagattcacggccacgctggtctgtggggacatccttgtaaggccctgaagttttcttgaagtggatctgttgggtgacagactttgtccagatctcccctgatagtccagacctctctgagctgccctcaggttcacatgccttgacaaaggcgggtccaagggaaacacctcccatgagggtctcagtgacatttgatggctctgactctcccaggtcactctgcttgcagcttgcctctgtgggctcggctcctggatcccatcctgaaacagtccgaaccacactgtcactcctcctaccacaccaagcctcccctactctgccgagggccccggtcacactttgtaaggggagatgtggcccgttcctaacatctggccccagttccaaggggaagtttctcatttggtgtcttggatgacaaagggtgcagggctgtcctcccacaccatccaaaactacaccatgggttctgatttctcctcctcccaccaaactcgccat

SEQ ID NO: 20309 - DNA, 538 bp, Homo sapiens
  MAP TO AC005973.2; EXPRESSED IN HEART, SIGNAL = 2.7; EXPRESSED IN BRAIN, SIGNAL = 2.3; EXPRESSED IN ADULT LIVER, SIGNAL = 4.2; EXPRESSED IN FETAL LIVER, SIGNAL = 4.1; EXPRESSED IN BONE MARROW, SIGNAL = 2.6; EXPRESSED IN LUNG, SIGNAL = 2.2; EXPRESSED IN HELA, SIGNAL = 0.61; EXPRESSED IN PLACENTA, SIGNAL = 4.9; SWISSPROT HIT: P76072, EVALUE 3.00e+00; EST_HUMAN HIT: AW002856.1, EVALUE 0.00e+00
ttaggccagctggagcaggccgcgctcggccagcaggctctgggtgcggttgtagacatcctccaaggtgccggcggcccggaccagcgcggcccgcgcctccgcctcggtggctccgggacacgccagctccagcaggcggcggcgacccgggaaggcgaggaaggcgaggcgggcggtctgtcggaccagccaggggtgatgcggacccagggccgcacggtaggcgtcgctgcactgcacgcccgcgtccgggcctcccagcgcgccggtcgccacccggtggaggcagagctgggaccagcgcagcgcgcggtgcagcaggagcagcgtgcgagagcccgagctccgggtcgggtcccggggggccgcccccggctgctccagcagtcccgccctccgctcccacgccgccatggccaccagcgaccagtagtgctccgcgtccgggccgtgcacccgagcctccaggtctgtcaccttggtgaaggcctccctagtggcgaaggcgaagacggagccgaggggagtcaggaac

SEQ ID NO: 20310 - DNA, 633 bp, Homo sapiens
  MAP TO AC008821.4; EXPRESSED IN PLACENTA, SIGNAL = 1.4; EXPRESSED IN BRAIN, SIGNAL =   1; EXPRESSED IN BONE MARROW, SIGNAL = 1.2; EXPRESSED IN LUNG, SIGNAL = 1.3; EXPRESSED IN FETAL LIVER, SIGNAL = 1.6; EXPRESSED IN ADULT LIVER, SIGNAL = 1.3; EXPRESSED IN HELA, SIGNAL = 1.6; SWISSPROT HIT: O00472, EVALUE 3.00e-65; EST_HUMAN HIT: BG121995.1, EVALUE 0.00e+00; NT HIT: gi13646934, EVALUE 0.00e+00
aaacggcttttggattcagagtttattgatcctttaatgaataaaaaagcccgaatatctcacctgacgaacagagtaccaccaacactaaatggtcatttgaatcccaccagtgaaaaatctgctgcaggcctcccgctgccccctgcggctgctgccatccctacccctccaccgctgccttcaacctatctgcccatctcacatcctcctcagattgtaaattctaactccaactcccctagcactccagaaggccgggggactcaagacctacctgttgacagttttagtcaaaacgatagtatctatgaggaccagcaagacaaatatacctctaggacttctctggaaaccttaccccctggttccgttctactaaagtgtccaaagcctatggaagaaaaccattcaatgtctcacaaaaagtccaaaaagaagtctaaaaaacataaggaaaaggaccaaataaaaaagcacgacattgagactattgaggaaaaggaggaagatcttaagagagaagaggaaattgccaagctaaataactccagtccaaattccagtggaggtattttacctttagatgaaccagaagtgcatgctatcatgagtttgaaattacacagttta

SEQ ID NO: 20311 - DNA, 547 bp, Homo sapiens
  MAP TO AC008103.27; EXPRESSED IN PLACENTA, SIGNAL = 1.8; EXPRESSED IN ADULT LIVER, SIGNAL = 1.9; EXPRESSED IN BRAIN, SIGNAL = 1.5; EXPRESSED IN HELA, SIGNAL = 1.3; EXPRESSED IN LUNG, SIGNAL = 1.6; EXPRESSED IN HEART, SIGNAL = 1.7; EXPRESSED IN BONE MARROW, SIGNAL = 1.7; EXPRESSED IN FETAL LIVER, SIGNAL = 1.5; SWISSPROT HIT: P10266, EVALUE 1.00e-98; EST_HUMAN HIT: BE217830.1, EVALUE 0.00e+00; NT HIT: Y10391.1, EVALUE 0.00e+00
actgatcttgtggagtggtcattccttcctcacagtacagttaagacttttacattgtacttggatcaaatggctacattaatcggtcagacaagattacgaataataaaattatgtggaaatgaccaagacaaaatagttgtccctttaaccaaggaacaagttagacaagcctttatcaattctggtgcatggcagattggtcttgctaattttgtgggaattattgataatcattacccaaaaacaaagatcttccagttcttaaaattgactacttggattctacctaaaataaccagacgtgaacctttagaaaatgctctaacagtatttactgatggttccagcaatggaaaagcagcttacacagggccgaaagaacgagtaatcaaaactccatatcaatcggctcaaagagcagagttggttgcagtcattacagtgttacaagattttgaccaacctatcaatattatatcagattctgcctatgtagtacaggctacaagggatgttgagacggctctaattaaatatagcatgg

SEQ ID NO: 20312 - DNA, 1425 bp, Homo sapiens
  MAP TO AL136179.15; EXPRESSED IN ADULT LIVER, SIGNAL = 3.2; EXPRESSED IN PLACENTA, SIGNAL = 5.6; EXPRESSED IN BRAIN, SIGNAL =   3; EXPRESSED IN LUNG, SIGNAL = 3.9; EXPRESSED IN HEART, SIGNAL = 3.4; EXPRESSED IN FETAL LIVER, SIGNAL = 4.2; EXPRESSED IN BONE MARROW, SIGNAL = 3.4; NT HIT: gi13642696, EVALUE 0.00e+00; SWISSPROT HIT: Q06945, EVALUE 1.00e-126; EST_HUMAN HIT: BE794341.1, EVALUE 0.00e+00
atggtgcagcaaaccaacaatgccgagaacacggaagcgctgctggccggcgagagctcggactcgggcgccggcctcgagctgggaatcgcctcctcccccacgcccggctccaccgcctccacgggcggcaaggccgacgacccgagctggtgcaagaccccgagtgggcacatcaagcgacccatgaacgccttcatggtgtggtcgcagatcgagcggcgcaagatcatggagcagtcgcccgacatgcacaacgccgagatctccaagcggctgggcaaacgctggaagctgctcaaagacagcgacaagatccctttcattcgagaggcggagcggctgcgcctcaagcacatggctgactaccccgactacaagtaccggcccaggaagaaggtgaagtccggcaacgccaactccagctcctcggccgccgcctcctccaagccgggggagaagggagacaaggtcggtggcagtggcgggggcggccatgggggcggcggcggcggcgggagcagcaacgcggggggaggaggcggcggtgcgagtggcggcggcgccaactccaaaccggcgcagaaaaagagctgcggctccaaagtggcgggcggcgcgggcggtggggttagcaaaccgcacgccaagctcatcctggcaggcggcggcggcggcgggaaagcagcggctgccgccgccgcctccttcgccgccgaacaggcgggggccgccgccctgctgcccctgggcgccgccgccgaccaccactcgctgtacaaggcgcggactcccagcgcctcggcctccgcctcctcggcagcctcggcctccgcagcgctcgcggccccgggcaagcacctggcggagaagaaggtgaagcgcgtctacctgttcggcggcctgggcacgtcgtcgtcgcccgtgggcggcgtgggcgcgggagccgaccccagcgaccccctgggcctgtacgaggaggagggcgcgggctgctcgcccgacgcgcccagcctgagcggccgcagcagcgccgcctcgtcccccgccgccggccgctcgcccgccgaccaccgcggctacgccagcctgcgcgccgcctcgcccgccccgtccagcgcgccctcgcacgcgtcctcctcggcctcgtcccactcctcctcttcctcctcctcgggctcctcgtcctccgacgacgagttcgaagacgacctgctcgacctgaaccccagctcaaactttgagagcatgtccctgggcagcttcagttcgtcgtcggcgctcgaccgggacctggattttaacttcgagcccggctccggctcgcacttcgagttcccggactactgcacgcccgaggtgagcgagatgatctcgggagactggctcgagtccagcatctccaacctggttttcacctactga

SEQ ID NO: 20313 - DNA, 597 bp, Homo sapiens
  MAP TO AC000099.1; EXPRESSED IN HELA, SIGNAL = 0.24; EXPRESSED IN ADULT LIVER, SIGNAL = 1.6; EXPRESSED IN PLACENTA, SIGNAL = 1.4; EXPRESSED IN BRAIN, SIGNAL = 1.3; EXPRESSED IN LUNG, SIGNAL = 1.3; EXPRESSED IN BONE MARROW, SIGNAL = 1.2; EXPRESSED IN FETAL LIVER, SIGNAL = 1.4; SWISSPROT HIT: O00222, EVALUE 7.00e-85; EST_HUMAN HIT: AL134272.1, EVALUE 0.00e+00; NT HIT: gi14753087, EVALUE 0.00e+00
aataaactttgggtcttggattgcaataccacctgtggagaaaatggtatgcgagggaaagcgatcagcctcttgcccttgtttcttcctcttgaccgccaagttctactggatcctcacaatgatgcaaagaactcacagccaggagtatgcccattccatacgggtggatggggacattattttggggggtctcttccctgtccacgcaaagggagagagaggggtgccttgtggggagctgaagaaggaaaaggggattcacagactggaggccatgctttatgcaattgaccagattaacaaggaccctgatctcctttccaacatcactctgggtgtccgcatcctcgacacgtgctctagggacacctatgctttggagcagtctctaacattcgtgcaggcattaatagagaaagatgcttcggatgtgaagtgtgctaatggagatccacccattttcaccaagcccgacaagatttctggcgtcataggtgctgcagcaagctccgtgtccatcatggttgctaacattttaagactttttaaggtaggtaaaggcattgtctttctgaccattgtgaaagaacaatg

SEQ ID NO: 20314 - DNA, 967 bp, Homo sapiens
  MAP TO AC007956.5; EXPRESSED IN LUNG, SIGNAL = 1.9; EXPRESSED IN HELA, SIGNAL = 4.4; EXPRESSED IN ADULT LIVER, SIGNAL = 2.2; SWISSPROT HIT: P49752, EVALUE 0.00e+00; EST_HUMAN HIT: AW177996.1, EVALUE 0.00e+00; NT HIT: gi14784504, EVALUE 0.00e+00
ttttgaaggaaatcgccccgatgggccaagacccagatatgaaggtcacccagcagagggcactaaaagcaagtggggaatgattccccgggggccagcatctcaattttatattacccccagtacatccctaagtcctcgacagagtggaccacagtggaaaggccccaaaccagcttttggacagcagcatcagcagcaacctaagtcacaagcagaacctctttcaggaaacaaagaaccattagcagacaccagtagtaaccagcagaagaattttaaaatgcaatcagctgcattttccattgctgcagatgtaaaggatgtcaaggcggctcagtcaaatgagaatctaagcgactctcaacaagagccacctaaaagtgaagtctcggaagggcccgtagagccctctaattgggaccagaatgttcaaagtatggagactcaaatcgacaaagcccaagctgttactcagcctgtaccccttgcgaataagcctgtacctgctcaatctacttttccttcaaaaacaggggggatggagggaggaacagcagtagcaacatcatcattaacagcagataatgattttaaacctgtgggtattggtctaccccattcagaaaacaaccaagataaaggcctgcctcggccagataatagagataatagattagaaggcaatagaggcaacagctcatcttacagaggtcctgggcaaagcagaatggaagacacacgggataaaggtctagtaaacagaggtcgcggccaggcaatcagtcgaggcccaggattggtcaagcaagaagactttcgggataagatgatgggtagaagagaagatagtcgagagaagatgaacagaggagaaggtagccgggacagagggttggtgaggcctggaagcagtcgggagaaagtgccaggtggtcttcaagggagccaggacaggggtgcagct

SEQ ID NO: 20315 - DNA, 1638 bp, Homo sapiens
  MAP TO AC025738.1; EXPRESSED IN LUNG, SIGNAL = 1.5; EXPRESSED IN HEART, SIGNAL = 1.7; EXPRESSED IN ADULT LIVER, SIGNAL = 1.4; EXPRESSED IN PLACENTA, SIGNAL = 1.7; EXPRESSED IN HELA, SIGNAL =   4; SWISSPROT HIT: Q13796, EVALUE 2.20e+00; EST_HUMAN HIT: AI525749.1, EVALUE 0.00e+00; NT HIT: gi14740885, EVALUE 0.00e+00
cctgtctaaccgtctagcttctatatgtctaagcagctgttgtctccagtctgcaggcattttaccacagctctcctctcccttcacaggagtaggcctcgtctttaaatcactgttatctgatggcttgtcaccatagttacccaagttatagtcagatggtattttttccaaaagagctgccatagtaggcctagctgaaactggcctggtttgggaggcaccgtaactctctgtactgtagcttctcgcagacaatggcctcctttgggtaaggtttttaaccggaaaacttcccgcctgagctttcacttcttgatatgaagggtgttcatcttcatacctgccattccttttcaggaactgggactcagtcactgtaacgctgctttggcgatccagccctcccctatatgggggtctgccgtacctatcagttgggggcagctcatgaggctcattgacccttctaaacatggccatttctgtggcgctcaccagggagtcggcccttctcaggaagcccgccctggccccttggcttgcgaactgggcattcaccacagcatcctcattcacagatggctgagaaaatgaaaacatttgctccatcggtgggtatcctctgtaagctctaggactaatcaaatccttggcgatgtttttgctggcctgttgcacgtactcgggattgtgttgaaaagggggtggtatcctcttttcggctttcacttccactgatccttgaggattgaagctttggtcaaactgatagactttttttgtcatagaagctttttgttgttgtggccccttactacttccgtaggtgagcatctcatcatccagcattgggactgactggcttcgagacatactggacataccatgctctggtcccagcatcttatccggtcgttcgtggcttcctaagtgatcactcccagaagcatagttttctaatggtatgttatacaccttatatgtaccaatgtcaatctcatcgatactctgtgactttttgaatttattagacttgatatctttcattaggggggaaagcctctctgtgcttttgctaattgaaataacacctttagaagattccgggcggcagtggatttgagaaaagacattactaagactcctgttgggattggaatcatgatactcccatggtacgcctggagaaaaaggactaggtatttcagtagattcctttatatgttctttcctttcaggcaatgggctggtagtgggggttgtctctaatttggaaggaaaagcggtcctgtcttcaaacggactaggggttctggtccaattctgccaaggattggaaggaggcacttctgtttctggtgtgtgtctgtgtgtagactgctcgagttccaggggaacaccaacaatcctgtcttgcctgatcaaaggcctgcgtccatgcgaagatgtgcttctagatttcgaacttaagagaggattactgttggcattctcggctgtggtttcctcagcaacaaaccctgtgttgtcataatgcgagccatcagtccagttgtcagtgaaagtatcactcatgggcagccggtcaggacgctgtggtatattgcctgggggaacagcctcccgctggctgag

SEQ ID NO: 20316 - DNA, 822 bp, Homo sapiens
  MAP TO AC000080.2; EXPRESSED IN FETAL LIVER, SIGNAL = 2.2; EXPRESSED IN HELA, SIGNAL = 1.8; EXPRESSED IN ADULT LIVER, SIGNAL = 2.3; EXPRESSED IN LUNG, SIGNAL =   2; EXPRESSED IN BONE MARROW, SIGNAL = 2.4; NT HIT: AJ223837.1, EVALUE 5.10e-02; SWISSPROT HIT: P10263, EVALUE 2.00e-14; EST_HUMAN HIT: H11869.1, EVALUE 7.00e-36
atggaaaatatggtcaccctattcagggcagtggaagaacactgtccttggtttcctgaaaagggaacgttagatgtggaactatgggatcatgttggtgcaaaattccgagaactggtcccaacaggaaattatgttcctgtcactgtttggggtgattgggccttggtacgtgccatcctaatgacataccaatcccgtgacaccctgcagttaccacagttttctgaatctggccaccctctacctcttcctcagctttcctctcccactcggccttcattatctgctcagcccctccctttgcctactcctcccccacctgacgatactgaggattcaatatctaactccagtgactttggcttaacatcaccccctgatgatcttatttcttttcacgaagagccgacacttgtagctcctgcggccccaactcagacagcccaggaccatatctatgctaactcttccctctccaaacctttacagtctttgcctccggagccatccaaactacaatttacctgtaattctgcaggccctcccccatccaccacagcccctcaccctcctatcattttggtccctcaaccggtcactttgccatccactcaacctgcttctctgtacccttcttcatgcagggacacccctgccactctggttgtgcaggactgggccagtaatcaccagtatgcttctgcctcttctgctcccccaatgcccctttctcacactcttataccagtccgaccccgtcaatctcagtttctcttatctatacatacttttcctgtcacttctatgccgactctatct

SEQ ID NO: 20317 - DNA, 736 bp, Homo sapiens
  MAP TO AL353999.2; EXPRESSED IN PLACENTA, SIGNAL = 3.1; EXPRESSED IN BONE MARROW, SIGNAL = 1.9; EXPRESSED IN LUNG, SIGNAL = 1.8; EXPRESSED IN HEART, SIGNAL = 1.7; EXPRESSED IN ADULT LIVER, SIGNAL = 1.9; EXPRESSED IN BRAIN, SIGNAL = 2.1; EXPRESSED IN HELA, SIGNAL = 0.34; SWISSPROT HIT: P45494, EVALUE 7.60e+00; EST_HUMAN HIT: AV753538.1, EVALUE 3.00e-75; NT HIT: AF355147.1, EVALUE 1.80e-01
gccctgggtgtcacctctaccgcggacgttctcacctgcggctttggctggcccaggaagcaggaactctgggaagagatgcgcgtccacgggcattcggcggccggagcgctgtgtgccaggccgagaggacagtgacgtcgccgcggctgctgcggcggctgctaagaagacccggagccccagggtcttgagtcggagaccgccgccctcagaccgggaggaggaggagaaggaggaggaggaggaggaggaggaggaggaggaggagcaggaggaggaggaggaggaggaggaggaggaggaggaggaggaggaggaggaggaggaggaggaggaagaagcgggaggggagggggctaagcctccgccgcccgggtcttcccggagctgtgggaatgggcgggcgccgccccgcagtgcctcttctggcagaaaacagtaccgcaggctacagcctgagggatgcgggggcgctgctcccagaggtggggctgctcatgtgaggcttgaaagagaccataagcctaaaagccaggcccagtgtaagcgcttaataactgttacctgttgttgtgatgaatccgatcattctggattatcttcgtatccctccttctctcctgtggagaaggctcctaagagcgtaggcatttctgtccagcggctgcctctgcagcttcctcttcagatcatctacctgaagttgctttgctcagtgcctggcctagagtaa

SEQ ID NO: 20318 - DNA, 518 bp, Homo sapiens
  MAP TO AC004189.1; EXPRESSED IN ADULT LIVER, SIGNAL = 1.3; EXPRESSED IN HELA, SIGNAL = 1.3; EXPRESSED IN LUNG, SIGNAL =   1; EXPRESSED IN FETAL LIVER, SIGNAL = 1.1; EST_HUMAN HIT: BE872086.1, EVALUE 0.00e+00; SWISSPROT HIT: Q02084, EVALUE 7.00e-27; NT HIT: gi14761254, EVALUE 0.00e+00
tcagcctttcagcgtaaggcaggaaccttttttccagacggcaaagaaagggaagactttgccggagaaagaggcagtgaaggtgaagatgggctcctgggtctgggcgttgtggagggtcacctgccccgcctcgtagtccagggcgactctcacgccgcgcgggatctcgctcagcggcaggtcggtgcccggggaggtgctggcccagcactgctggtgcgagatgatcacggcccagacgccgtcctcggcgctgagtcccatctctcccttcctcctcaccccctccccggccacccccaccgtgcagccgccgccgtcgcccagctgcaggtcaacctgccagcggtggcgcccggaggagaagcccgggaagcccagaaccgccgggaggccgtcgaagcgcagggggctgtctggcaggctcttcttctgccgggtgtacctcactgacttcctgtcttccgagagaaccaggctccggctggcggtctgagggtccagagtgatgaccc

SEQ ID NO: 20319 - DNA, 582 bp, Homo sapiens
  MAP TO AC007286.18; EXPRESSED IN ADULT LIVER, SIGNAL = 1.8; EXPRESSED IN PLACENTA, SIGNAL = 2.1; EXPRESSED IN BRAIN, SIGNAL = 1.9; EXPRESSED IN HELA, SIGNAL = 4.6; EXPRESSED IN LUNG, SIGNAL = 1.9; EXPRESSED IN HEART, SIGNAL = 2.2; SWISSPROT HIT: Q01040, EVALUE 3.30e+00; EST_HUMAN HIT: BF681264.1, EVALUE 2.10e-01; NT HIT: AE001443.1, EVALUE 5.60e-01
aacattggaaggcgacagagaggaagttgaaccagtctgtgtagaaggatgtgagcactgggatttcaaagacgaggtttgtagaggccccagtctgcatctttatatgatttcctccagcatttttgtaacattacattgcattttgtaacattgctgagcccctctttgagtaattggcagaaaaggctgagtcctcatagaattgtgtgctatttctaaaacatatccatggtttaaaaagctttaagatctataaactaaaatccacccattttgcaggatgattcacagtgtcgacagtttggatcaatttcctgaagaaaggacaaaactggaagctattctttatgtaagtgaaatctagattatcatttttctttgggctgaaacaaccatccttcatcttctacattaaaatgcagctgaatttgtaattagatccctgtccaaaacttgtattcccttattaagagaattaattgagttatctcagaagagaatattgattacattgagatttgactaataaaaacttctctccagaacttatctaaagtgaggtctggaactaggtcaccg

SEQ ID NO: 20320 - DNA, 468 bp, Homo sapiens
  MAP TO AL022578.1; EXPRESSED IN PLACENTA, SIGNAL = 2.7; EXPRESSED IN BRAIN, SIGNAL = 2.2; EXPRESSED IN HELA, SIGNAL = 2.7; EXPRESSED IN ADULT LIVER, SIGNAL = 1.7; EXPRESSED IN BONE MARROW, SIGNAL = 3.6; EXPRESSED IN LUNG, SIGNAL = 3.7; EXPRESSED IN HEART, SIGNAL =   3; SWISSPROT HIT: Q9Y6W5, EVALUE 1.00e-68; EST_HUMAN HIT: AW504702.1, EVALUE 0.00e+00; NT HIT: AF134304.2, EVALUE 0.00e+00
ggacgatggaacagaggcactcaaattctacacagacccttcatacttctttgatctttggaagaagaagatgctgcaggacaccagggatatcatgaaagagaagagaaagcacaggaaagaaaagaaagataatccaaatcgagggaatgtaaacccacgtaaaatcaagacacgtaaggaagagtgggagaaaattaagatggggcaagaatttgtggagtccaaagaaaagctggggccttttgggtatccacccaccttggtgtaccagaatggcagcattggctgtgttgaaaacgtggatgcaagtagctatccaccaccatcacagtcagactctgcttcttcaccttctccttccttctccgaggacaacttgcctcctccaccagcagaattcagttacccagtggacaaccaaagaggatctggtttggctggacccaaaagatccagtgtggtcag

SEQ ID NO: 20321 - DNA, 590 bp, Homo sapiens
  MAP TO AC006548.19; EXPRESSED IN ADULT LIVER, SIGNAL = 1.2; EXPRESSED IN BRAIN, SIGNAL = 1.1; EXPRESSED IN HELA, SIGNAL = 1.9; EXPRESSED IN FETAL LIVER, SIGNAL = 1.3; SWISSPROT HIT: Q01814, EVALUE 1.10e+00; EST_HUMAN HIT: AA393521.1, EVALUE 0.00e+00; NT HIT: AL163284.2, EVALUE 6.00e-07
ggggaggagacaatgttttgtttagtgacctcgacagaaagggtgtcctcctgcaaccactcatttgttactttccttcttcctgaattgcctggacccactcctcctccatttgactggctccgtgcactgatgttatagtcaggagatttttgggaattgtggcttctaaaaatgtacactcaactctacccacagctggccctgtgaacctacacagctgttccactgtgtctccttctcaaagagacactcttcctgctgagtctctgccctctgctcctagatccaaatggcatctcctaccctatccctgtatggcttaacctagggaaactctttcccaaaggagtcaggtaaggagacggtggctgagcttcttacagacttaaaggagacatcctggaatttaggagtctgtccttcctttctgtctccctggcagctcctgctgctgctcaaagtttagctttgtctctcatccagctcagactgttgctggtcctgatggcctctgcttagctgtattagtatgttcttgcattgctataaagaaatacatgagaagtacctttagttggctcacggtt

SEQ ID NO: 20322 - DNA, 1422 bp, Homo sapiens
  MAP TO AC008626.5; EXPRESSED IN LUNG, SIGNAL =   2; EXPRESSED IN PLACENTA, SIGNAL = 6.8; EXPRESSED IN HELA, SIGNAL = 3.3; EXPRESSED IN BRAIN, SIGNAL = 2.7; EXPRESSED IN ADULT LIVER, SIGNAL = 1.6; SWISSPROT HIT: Q03923, EVALUE 0.00e+00; NT HIT: gi16163761, EVALUE 0.00e+00; EST_HUMAN HIT: AI554749.1, EVALUE 0.00e+00
atggatgagtgtaaggtgcacgaagaatgttacaatggacttaaccagtgtttgagaactacccagagcaaaatattacaatgtgataaatatgtgaaagtctttcataaattttcaaattcaaacagatataagataagacatactggaaagaaacctttcaaatgtaaagaatgtgaaaagtcattttgcatgctttcacacttagctcaacataaaagaattcatactagagagaaaccctacaaatgtaaagaatgtgggaaagcctataatgaggcctcaaacctttctacacataagagaattcatactggaaagaaaccctacaaatgcgaacagtgtggaaaagcctttaaccggctctcacaccttactacacataagataattcatactggaaagaaaccctacatatgtgaggactgtggcaaagcttttaaccaatctgcaaaccttactacacataagagaattcatactggagagaaaccctacaaatgtgaagaaagtggcaaagcttttagccagtcctcaacccttactacacataagataattcatgctggagagaaaccctacaaatatgaagaatgtggcaaatcttttaaccaatcctcaacccttactacacgtaagataattcatactggagagaaattctgcaaatgtgaagaatggggcaaggcctttagccggttatcccaccttactacacataagagaattcattctggagagaaaccctacaaatgtgaagaatgtggcaaagcttttaaacaatcctcaacccttactacacataagaggattcattctggagagaaattctacaaatgtgaagtatgtagcaaagcctttagccggttctcacaccttactacacataagagaattcattctggagagaagccctacaaatgtgaagaatgtggcaaagcttttaacctatcttcacaccttactacacataagataattcatactggagagaaaccctacaaatgtgaagaatgtggcaaagcttttaacctatcttcacaccttactacacataagataattcatactggagagaaaccctacaaatgtgaagaatgtggcaaagcttttaaccagtcctcaactctttctaaacataaggtaattcatactggagagaaaccctacaaatgtggagaatgtggcaaagcctttaaccagtcctcacaccttactacacataagataattcatactggagagaaaccctacaagtgtgaagaatgtggcaaagcctttaacaactcctctattcttaacagacataagatgattcatactggagagaaattctacaaacctgaaagttgtgacaatgcttgtgacaacatctcaaacatttccaaacataaaagaaattgtgctggtgagaaaacatag

SEQ ID NO: 20323 - DNA, 1532 bp, Homo sapiens
  MAP TO AC010328.4; EXPRESSED IN LUNG, SIGNAL =   2; EXPRESSED IN BONE MARROW, SIGNAL = 2.4; EXPRESSED IN PLACENTA, SIGNAL = 3.4; EXPRESSED IN HELA, SIGNAL = 1.8; EXPRESSED IN ADULT LIVER, SIGNAL = 2.3; EXPRESSED IN FETAL LIVER, SIGNAL = 2.3; EXPRESSED IN HEART, SIGNAL = 2.3; SWISSPROT HIT: P51522, EVALUE 0.00e+00; NT HIT: gi12741394, EVALUE 0.00e+00; EST_HUMAN HIT: BG291884.1, EVALUE 0.00e+00
atctgtctcgtaactgtgtaatcaaggaactagcaccacaacaggaaggtaacccaggagaagtattccacacagtgacattggaacaacatgaaaaacatgacattgaagagttttgcttcagggaaatcaagaaaaaaatacacgactttgactgtcagtggagagatgatgaaagaaattgcaacaaagtgactacggccccaaaagaaaatcttacttgtaggagagaccaacgcgatagaagaggtataggaaacaagtctattaaacatcagcttggattaagctttctaccacatccccatgaactgcagcagtttcaagctgaagggaaaatttatgaatgtaaccatgttgagaagtctgtcaaccatggttcctcagtttcaccaccccaaataatttcttctaccatcaaaacccatgtttctaataaatatgggactgatttcatctgttcttcattactcacacaagaacagaaatcatgcattagggaaaaaccttacagatatattgagtgcgacaaagccttgaatcatggctcacacatgactgtacgtcaggtaagtcattctggagagaaaggatataaatgtgatctgtgtggcaaggtctttagtcaaaaatcaaaccttgcgcgtcattggagagttcatactggagagaaaccatacaaatgtaatgaatgtgacagaagtttcagtcgcaactcatgccttgcactacatcggagagttcacactggagagaaaccttacaaatgttatgagtgtgacaaggtcttcagtcgaaattcatgccttgcactacatcagaaaactcatattggagagaaaccttacacatgtaaagagtgtggcaaagcctttagtgtgaggtcaacacttaccaaccatcaggtaattcatagtggcaagaaaccttacaaatgcaatgaatgtggcaaggtgttcagtcagacttcaagccttgcaactcatcagagaattcacactggggagaaaccatacaagtgtaatgaatgtggtaaagtcttcagtcagacttcaagccttgcaaggcattggagaattcatactggagagaaaccttacaaatgcaatgaatgtggtaaggttttcagttacaattcacaccttgcgagtcatcggagagttcatactggagagaaaccttacaagtgtaatgagtgtgggaaagcctttagtgtgcattcgaacttaactacccatcaggtcatccatactggagagaagccttacaaatgtaatcaatgtggcaaaggcttcagtgtgcattcaagcctaactacccatcaggtcatccatactggagaaaaaccttacaaatgtaatgagtgtggcaaatcctttagtgtgcgcccaaacctcactagacatcagataatccatactggaaagaaaccttacaaatgtagtgattgtgggaagtcctttagtgtgcgcccaaacctcttcagacatcaaattatccatactaaggagaaaccttataaaagaaattaa

SEQ ID NO: 20324 - DNA, 560 bp, Homo sapiens
  MAP TO AF127577.2; EXPRESSED IN ADULT LIVER, SIGNAL = 1.2; EXPRESSED IN PLACENTA, SIGNAL = 1.5; EXPRESSED IN BRAIN, SIGNAL = 1.1; EXPRESSED IN HEART, SIGNAL = 1.2; EXPRESSED IN BONE MARROW, SIGNAL =   1; EXPRESSED IN FETAL LIVER, SIGNAL = 0.98; EXPRESSED IN LUNG, SIGNAL = 1.1; SWISSPROT HIT: P48552, EVALUE 1.00e-97; NT HIT: gi16165990, EVALUE 0.00e+00; EST_HUMAN HIT: BG828330.1, EVALUE 0.00e+00
gggaaacaggttggtcagattctgatttttcagttcggtgtttgcaagacaagtctatgggaacacagttggaataagaactttcatcaccactgctgtcatctgtaaaactaggattgttatctgaatattcatcaatagttgtaggtgtactactttcctcaaaaatgcttcctctctcactgtgactgtgtccattcattggcttaggtatagtctggcttttaagaagatgtaaaagcaaactattgttagcagcttgttttatattgtttctttccagtgagttcttataacctgcatttttaggggaagaaggaatgatacccattggattttgaaacactgtagcactacttttgctagccatcagtttgcttgatgatgttcttgcctgaccattaagatggcttgacattccttttgggagctggtaactgccaacatccttctggccattttcttgcaatctggccatagcagcaagtctttcacttgctgcttgatttgcattttgcgtttttaaagcgtgttctcgagaatactgctgcaaatgggct

SEQ ID NO: 20325 - DNA, 737 bp, Homo sapiens
  MAP TO AC006486.1; EXPRESSED IN ADULT LIVER, SIGNAL = 1.5; EXPRESSED IN BONE MARROW, SIGNAL = 1.6; EST_HUMAN HIT: AL042387.2, EVALUE 0.00e+00; SWISSPROT HIT: Q13164, EVALUE 7.40e-02; NT HIT: gi14756138, EVALUE 0.00e+00
caggccaagccccactgctggctcccggtcaggtgggcgtgtcacctgtgcccagtccccagctgccgcctgcctgtgcagcccccggaggtcctgtcataacagcattttactctggcagccctgcacccacctcctcagcacccctggcccagccatcccaggcccccccaagcctggtctacactgtggccaccagcacaaccccacctgcagccaccattctgcccaagggcccgccagcccctgccactgccaccccagccccgactagccctttccccagcgccacaggtaggtgtcagatcaacccagagcagagtgagttgggggacccaggggatgggctccagtcaggcctggctcagcaaacaattttctccccactagcaggttccatgacctacagcttagtggcccccaaggcccagcggcccagcccgaaggccccccagaaagtgaaggcagccatcgccagcattcccgtggggtcctttgaggcaggtgcctctgggcggcctggccctgcaccccggcagcctctggagcctggcccagtccgagagccaactgccccagagtctgagcttgaggggcagcccacaccaccagcccctccacccctgccagagacctggactcccacggcccggagcagccccccactgcccccacctgctgaggagcggaccagcgccaagggccctgagaccatggtgagcgcctgcaggccgtgg

SEQ ID NO: 20326 - DNA, 572 bp, Homo sapiens
  MAP TO AP000127.1; EXPRESSED IN ADULT LIVER, SIGNAL = 1.9; EXPRESSED IN BRAIN, SIGNAL = 2.2; EXPRESSED IN HELA, SIGNAL =   3; EXPRESSED IN LUNG, SIGNAL = 1.9; EXPRESSED IN HEART, SIGNAL = 2.1; EXPRESSED IN FETAL LIVER, SIGNAL = 1.9; SWISSPROT HIT: P24499, EVALUE 3.70e-01
cctgaaatccaacattctgttcattacatcttgatgattttagtaaatgataatgaccttaaaaagtatgattatgagatcacgatggcgtagtaagaatattaatttggataagaggttatagttaggtaaccctattagccagctattataagagtcaggtatgaaagaatcaaggcctaggtcaagctggtctcaatgcaggcacataagagcacatgaggaaaatgctgatgaaaaagcgtcaaactatgttaaactgtgtccaccatgccttaccaattttgtcatattttcttaaatcctttcctactttgaattttctataaacattcattgcattcctatatactgagatatattatactttttctggcttctccatttagcataactttctgcatgctttggtacatctttttttctacaaaagaactagcaacaactgagaacctcgtctttgcatcaggtaggatttatcctacatgaaatctaacaaaaagattccagaattaaaattggttaaacacacacacacacacacacacacacacacacacacacacaattgg

SEQ ID NO: 20327 - DNA, 674 bp, Homo sapiens
  MAP TO AL161747.1; EXPRESSED IN ADULT LIVER, SIGNAL = 1.6; EXPRESSED IN PLACENTA, SIGNAL = 2.5; EXPRESSED IN BRAIN, SIGNAL = 3.1; EXPRESSED IN BONE MARROW, SIGNAL = 1.5; EXPRESSED IN LUNG, SIGNAL = 1.6; EXPRESSED IN HEART, SIGNAL = 1.7; EXPRESSED IN FETAL LIVER, SIGNAL = 1.2; EST_HUMAN HIT: BI597635.1, EVALUE 0.00e+00; SWISSPROT HIT: P10074, EVALUE 4.00e-08; NT HIT: gi16189789, EVALUE 0.00e+00
ctggtggtgtgccaggagcatatgcttcttgagggtagcccgctcaagaaagccctgcctgcagaaaacacaagtgaagagcggcccctccttggggtgggtcttctgatgctcctccagagctgcctgggagggaaaggcctggccacacacttcgcaggcctttctgctgctgctctctcctggctcctttctcattgcctcctgcaggctcagctcctctaccaaggtcacgctggtggcttccccttctggggtgagtgctgatgccggacttgagcttctctccggtttgcccccctcttccttgcctcctaaaacaccactgcttccctgctccattggctgaggctgatccaggctgtcaggtggtggtggtggtggcaaagaagactgttgagtagttttctcattactgtccatctccttcccagctgtggctgctgccgccactgtccccacctcctcctctgccccagatgcctcttctgaatcacctctcactgatattgccttctcacctccactctctgagcctctccctgccagggaatcttcatcagtcacatcttcctcttcttcctcatcctcctcttcctcctcctcagacaactcctcttccggtgatggctgctgggactgctgctgggggaaactccgtgccccggagactg

SEQ ID NO: 20328 - DNA, 1494 bp, Homo sapiens
  MAP TO AL096814.26; EXPRESSED IN FETAL LIVER, SIGNAL = 1.7; EXPRESSED IN BRAIN, SIGNAL = 1.4; EXPRESSED IN ADULT LIVER, SIGNAL = 1.4; EXPRESSED IN HELA, SIGNAL = 1.3; EXPRESSED IN HEART, SIGNAL = 1.8; NT HIT: gi16174155, EVALUE 0.00e+00; EST_HUMAN HIT: BE062715.1, EVALUE 0.00e+00; SWISSPROT HIT: O60248, EVALUE 2.90e-01
atgggtgaccagcaactgtacaagaccaaccatgtggcccatggtagtgagaaccttttctaccaacagccaccacttggcgtccacagcgggctgaaccacaactatgggaatgcagttacagggggcggaatggatgcccctcaggcctcgccaatctccccccacttccctcaagatacacgggatggtctgggcttgcctgttggctccaaaaaccttggccaaatggatacctcgaggcagggagggtggggaagtcatgcagggcctggaaaccatgtccagctacgtggaaacctggccaactcaaacatgatgtggggggcaccagcccaggctgagcccactgatggctaccaatacacctactcccaggccagcgagatccggacccagaagcttaccagcggtgtcttacacaagctggactctttcacccaggtgtttgccaaccaaaacctgcgaattcaggtcaacaatatggcccaggtgctgcacactcagtcagcagtgatggatggagcccctgacagtgctctccgccagctgctgtctcagaagcccatggagcccccagcaccggctatcccttcccgctaccagcaggtgccccagcagcctcaccctggtttcactggtgggctgtccaaaccagctcttcaggtcgggcagcaccctacccaagggcacctgtattatgactaccagcagcctctggctcaggtgccagtgcagggaggacagccactgcaggccccacagatgctgtcacagcacatgcaacagatgcagcagcaccagtattacccaccgcagcaacagcagcaagccgggcaacagcgtatctccatgcaagaaatacagacgcagccgcaacaaattcgcccatcacagccacagccgccgccacagcagcagcagccgcagcagctacagctgcagcagcggcagggttcaatgcagatacctcagtattatcagccccaacccatgatgcagcacttgcaagagcagcagcagcaacagatgcacctgcagcctccttcttatcacagggaccctcaccagtataccccagagcaggcacacactgtccagctgattcccctgggctccatgtcccagtactactaccaggagccccagcagccctacagccaccccctctaccagcagagccacctgtcccagcaccagcagcgtgaggacagtcagctgaagacctactctagtgacagacaggcccaggccatgctgagctcccatggggacctggggcctcctgacacaggaatgggagacccagcgagctcagatctgacccgggtcagcagcaccctcccccatcgccccctcctatcccccagtgggatccacctcaacaacatggggcctcagcatcagcagctgtctcccagtgccatgtggccccaggtattctcccattggaagtttctctcaatacccagtgtgctacagggtcagggctga

SEQ ID NO: 20329 - DNA, 711 bp, Homo sapiens
  MAP TO AL034425.6; EXPRESSED IN PLACENTA, SIGNAL = 1.8; EXPRESSED IN ADULT LIVER, SIGNAL = 1.6; EXPRESSED IN BRAIN, SIGNAL = 1.5; EXPRESSED IN HEART, SIGNAL = 1.8; EXPRESSED IN LUNG, SIGNAL = 1.3; EXPRESSED IN FETAL LIVER, SIGNAL = 1.5; NT HIT: J00413.1, EVALUE 6.80e-01; EST_HUMAN HIT: AI126503.1, EVALUE 5.00e-89
aactatcttttatatttatcccaaaaacattgtgatgtgttcaacagagatacatcaaagagaaggaggcctccaaagtaatatcaattggctggttactgggagtttaggggctgaatgcaagctattcagctgttactgcacaaatgaagtccaagtgattcaggccatgagaaaacagcccattttctctttctttaaaagatatcaagtcaaagtgacatccaaaatatgcaccctatactattctgtgggagatcttaaaagaatttcatcagggcatgctgctgccttcaggtgctcctcctccccccctcctcctcctcctcctcttgctcctccttctctttctcttcctgccctcctttctcctcgtcctgtccctcctccttctccgtcttcctcttttcctccttctcctcctgcttcctcatctccctcttctgtttcttctcttcttattctccctccttctccttatttactcttcctcttcttcctccctgtctcttcttcctccttctccacctccttctttttcttttcttcttcaatttggcatttcgctcacaggggaacctgaatggtcacaatcttcttcatgactttcccatctttatcctatcaaaaggttttttccatgaatttacagttctgtcttgccaccccaaccaagcccatctttctttgtctgggtcactcctgcctgaa

SEQ ID NO: 20330 - DNA, 498 bp, Homo sapiens
  MAP TO AC005630.1; EXPRESSED IN HELA, SIGNAL = 0.48; EXPRESSED IN ADULT LIVER, SIGNAL = 1.2; EXPRESSED IN BRAIN, SIGNAL = 1.4; EXPRESSED IN BONE MARROW, SIGNAL = 1.1; EXPRESSED IN HEART, SIGNAL =   2; EXPRESSED IN FETAL LIVER, SIGNAL = 1.1; EXPRESSED IN LUNG, SIGNAL = 1.6; SWISSPROT HIT: Q00657, EVALUE 8.00e-65; NT HIT: gi14720077, EVALUE 0.00e+00; EST_HUMAN HIT: BG991974.1, EVALUE 0.00e+00
gctgaccacggctggatcccgctgcaggtgtccgatgggcagcaccaggccatcacggtgctggaggtgcaggccttggagccttacctctgtgtggccaatggctccggcctcatggttcctcaaggaggccagggtaccatcaacatggccgagctccacctgggcaccaacctcaacatctgcagtagggatgaggcccactaccacgtcacagacagccctcactggggacagttgctccaagccactcagccagccacagccttctctcagcaggacctgctggttggggctgttccctatggccacaatggcagcctcagctcccgcaacaccctggccttctcaatggatgtgggaccagtgcacacagatgccaccctacaagtgaccattgccctagagggcccagtagccccactgaagctggcccagcacaagaagatctacatcttccagggagaggcagctgagatcagaagggaccagctggag

SEQ ID NO: 20331 - DNA, 915 bp, Homo sapiens
  MAP TO AJ011930.1; EXPRESSED IN ADULT LIVER, SIGNAL = 1.9; EXPRESSED IN PLACENTA, SIGNAL = 4.4; EXPRESSED IN BRAIN, SIGNAL = 1.6; EXPRESSED IN HEART, SIGNAL =   2; EXPRESSED IN BONE MARROW, SIGNAL = 1.9; EXPRESSED IN FETAL LIVER, SIGNAL = 2.5; EST_HUMAN HIT: BF057518.1, EVALUE 4.00e-62; SWISSPROT HIT: O75690, EVALUE 2.00e-05; NT HIT: AL163300.2, EVALUE 0.00e+00
ttattggggagcaggaggaggtgctgacaggttcaagtcgaggccaagtgacctggggcagagaagctgggagggaggacaggggacccaacaggcaggtgggcccctgctgggaggcaggagctggggagcttcgaggatggagattcctgggagtatggaggggggggtcacctcagcacatgggggccccgtcccaagcgggggcaacctcctaacccgagtcaggaccagttggccctgggggatgtgcacatcagcaactggactcctggcctgagcagaggcctcagcaggccaggcgggagcacgcggggcggcagaggagggacacgcaggaggccgggcggcagcagctggcctggtaggaggaggcaggggcacagcaggaggagatgggcacgcagcaggcgggcctgcatatggggcggcagaggagggacacggaggaggagggtctgcagcaggaggtggtgcagcaagccggctgacagctagactgctggcagcatgaagtggaagccccagagcagacgggcacacagcagatgggtttgaagcagacaggcttgcaacagacaggcacgtagcaggactgctggcagggggaggaggtgcagcaagtcggctggcagctagaatgctggcagcatgaagaggaatcctcagaacaggtgggcacacagcacacgggcttgcagcagacaggcacacagcaggactgctggcaggaggaagaggcacagcaagttggctggcagctagactgctggcagcatgaagaggaatccttagagcaggtgggcaggcagcacacaggcttgcagcagacgggcacgcagcaggcctgctggcagggggaggaggcgcagcaagccggctggcagcacgagggcgtgcaggagctggtgcagc

SEQ ID NO: 20332 - DNA, 550 bp, Homo sapiens
  MAP TO AC004755.1; EXPRESSED IN HEART, SIGNAL = 2.7; EXPRESSED IN BRAIN, SIGNAL = 2.6; EXPRESSED IN FETAL LIVER, SIGNAL = 3.1; EXPRESSED IN HELA, SIGNAL = 3.6; EXPRESSED IN ADULT LIVER, SIGNAL = 2.8; EXPRESSED IN PLACENTA, SIGNAL = 2.5; SWISSPROT HIT: O60423, EVALUE 1.00e-40; EST_HUMAN HIT: BF807201.1, EVALUE 7.70e-01; NT HIT: AB019485.2, EVALUE 1.30e-01
acagaaacgggaaggtcgtgggggatactctgaagagccagaagctctgggtggtggtagtcatgatggcgtagaaaccaaggctgaggaggatggtcgccacgcacagggcggtccagtacttgatgataagaatgacctggacaggcagcggtggggtaaatccggggcctagcggggcttgcaccaggacaccagcccctggggtccaggaagggcacctggcaatgcccccaaagcaggggtccccaggggaggaggcctccataggccatgtccaaggccccggggaggtgaggaccttgcccacctccatggtgatggacagcaggcaagacagggccaccacgaccgcaaaggactggtggtcgctgaagctggcgggtcccgccgtgtcgcggctgatccacagtgtcatgaagaagttgaccagagaggtggtcacaccatgggcgatggcttggacgaagacccagtagttgaagagctcgtccttctgccccaccacgtacagctccggcttctccaggctctgctctgcgctcacgtc

SEQ ID NO: 20333 - DNA, 1631 bp, Homo sapiens
  MAP TO AL008724.1; EXPRESSED IN LUNG, SIGNAL = 2.9; EXPRESSED IN HEART, SIGNAL =   3; EXPRESSED IN BONE MARROW, SIGNAL = 2.6; EXPRESSED IN ADULT LIVER, SIGNAL = 2.9; EXPRESSED IN BRAIN, SIGNAL = 2.4; SWISSPROT HIT: P08046, EVALUE 1.00e-02; NT HIT: gi14778004, EVALUE 0.00e+00; EST_HUMAN HIT: BG391148.1, EVALUE 0.00e+00
ttagcatttggaagaagggaaaaatcttcctggagacaggaacttgtagccatttccagaaggaagcctcaaagggcgcgcgggggctgtggcgggagggccggcgggcagcggcagtgagcccagcgaggtggtctcggtgcgccagtgtccgttgggaggggctttcggtggagctccgtcatgctgctgcagggacagctccttcagttcaagcttatccactccctcctccttcttattgtgccgtggtgacaaattcaacagactgaggacatcccttttggaagtcatcgtgccaggagccccccggaagatcttcattggccctgtggaatgctggggtgtgctctgccagaacatcttcaggttatggacagcctgcaccttttcatcaatggctgccattttcagtttgtctatgtcgggagcgtctgctggacttgagcgagcagatccagctgaggagtaggagagagctggggagggtgcactgccagcaggagactggtggccggagcttggggacatgttccttggtgatttggaaatgtgagcgctgtaaggagagctggggtacttcagtttaaagagaggctggtccagctgggaagtctgtgagtcgcagccgggcgatggccggccactgtgctggctcgggctgtctttgatggacatctctgaggtggtggggctgctatatccggaactcaccttgggcagggaggagctcctggctgggggctttggtttaacagtgactggtgatggctgactcttctgatgggagagaacaggcctgctgaacgcactggtttctgacgctctgaagacagcagtgctgctgggcgcctgaacgccgtcttcagggttattactcttgctcacctggccgccgctcctctgaagacgctccaccgcaatgagatgactctgtgtctcctccagaattttctgggctaactcttgtggatccagttttgggttgctttcttcttgggatttcacggtactgtccgtttctgtgctagactggtctgattctcctgtatctgagcttgctagttttcccaccttttggaagggtgagttggggctgggaatcagagtcattttcactggagaatttggagtgctgatgctccctttggagctcaccgagactctcatgcctccggctgtcccaggttggggttgtttgtggtctggtgagaagcatgtgtttcggttttcttggtaggtcgccaagggctcgttactgatgatagaaaacccttcatattcttcttcatctttgttgcctgcagggcgggtctggggaggcagctggctcctaggcagggtggatctctgcaggtaagcgttcttggaccggtcatggtcctgccgtcctccggggcctccaccctctgatccaccctcgggtttggagacaaagctcattgaggaggcaatggagctcagactgtacacagagatggcatctgaggcgatgctgtccgcaccggtgggagagaaggggggttgctggtaacccaagggcagggcgttggaaacagactgagcagaagcaagagactcgagggaggaggagctgtcaaggctgaggcgcttgggtagctcagtagaat

SEQ ID NO: 20334 - DNA, 662 bp, Homo sapiens
  MAP TO AC026717.3; EXPRESSED IN BRAIN, SIGNAL =  16; EXPRESSED IN HELA, SIGNAL =  23; EXPRESSED IN ADULT LIVER, SIGNAL = 6.8; EXPRESSED IN LUNG, SIGNAL =  20; EXPRESSED IN HEART, SIGNAL = 9.8; SWISSPROT HIT: P29751, EVALUE 2.00e-95; NT HIT: X63432.1, EVALUE 0.00e+00; EST_HUMAN HIT: BG755546.1, EVALUE 0.00e+00
atctacattccaccgccgagactgcatccgccttgcgagcacagagcctcgccttcgctgctccactgccagtccacacctgccaccagctcaccatggatgatgatatcaccgcgctcgtcattgacaacggctccggcatgtgcaaggccagcttcacgggcgacaatgccgcccgggcagtcttcccctccatcgttgggcaccccaggcaccagggcgtgatggtgggcatgggtcagaaggattcctatgtgggcgacgaggcccagagcaagagaggcatcctcaccctgaagtaccccattgagcacggcattgtcaccaactgggacgacatggagaagatctggcaccacaccttctacaatgagctgcgcgtggctcccgaggagcaacccatgctgctgtttgaggcccccctgaaccccagggccaactgcaagaagatgacccagatcatatttgagaccttcaacaccccagccatgtacttggccatccagactatgctgtccctgtacgcctctggccgtaccactggcatcgtgttggactccagtgatggggtcacccacactgtgcccatctacgaggggtatgccctccccaacgccatcctgcttctggacctggctggccgggacctgactacctcatga

SEQ ID NO: 20335 - DNA, 1152 bp, Homo sapiens
  MAP TO AF134576.1; EXPRESSED IN ADULT LIVER, SIGNAL = 1.7; EXPRESSED IN PLACENTA, SIGNAL = 4.1; EXPRESSED IN BRAIN, SIGNAL = 1.4; EXPRESSED IN LUNG, SIGNAL = 1.6; EXPRESSED IN HEART, SIGNAL = 1.9; EXPRESSED IN FETAL LIVER, SIGNAL = 2.3; EXPRESSED IN BONE MARROW, SIGNAL = 1.8; SWISSPROT HIT: P43363, EVALUE 0.00e+00; NT HIT: gi14762534, EVALUE 0.00e+00; EST_HUMAN HIT: BG282169.1, EVALUE 0.00e+00
gcctgtgggtccccatcgcccaagtcctgcccacactcccacctgctaccctgatcagagtcatcatgcctcgagctccaaagcgtcagcgctgcatgcctgaagaagatcttcaatcccaaagtgagacacagggcctcgagggtgcacaggctcccctggctgtggaggaggatgcttcatcatccacttccaccagctcctcttttccatcctcttttccctcctcctcctcttcctcctcctcctcctgctatcctctaataccaagcaccccagaggaggtttctgctgatgatgagacaccaaatcctccccagagtgctcagatagcctgctcctccccctcggtcgttgcttcccttccattagatcaatctgatgagggctccagcagccaaaaggaggagagtccaagcaccctacaggtcctgccagacagtgagtctttacccagaagtgagatagatgaaaaggtgactgatttggtgcagtttctgctcttcaagtatcaaatgaaggagccgatcacaaaggcagaaatactggagagtgtcataaaaaattatgaagaccacttccctttgttgtttagtgaagcctccgagtgcatgctgctggtctttggcattgatgtaaaggaagtggatcccactggccactcctttgtccttgtcacctccctgggcctcacctatgatgggatgctgagtgatgtccagagcatgcccaagactggcattctcatacttatcctaagcataatcttcatagagggctactgcacccctgaggaggtcatctgggaagcactgaatatgatggggctgtatgatgggatggagcacctcatttatggggagcccaggaagctgctcacccaagattgggtgcaggaaaactacctggagtaccggcaggtgcctggcagtgatcctgcacggtatgagtttctgtggggtccaagggctcatgctgaaattaggaagatgagtctcctgaaatttttggccaaggtaaatgggagtgatccaagatccttcccactgtggtatgaggaggctttgaaagatgaggaagagagagcccaggacagaattgccaccacagatgatactactgccatggccagtgcaagttctagcgctacag

SEQ ID NO: 20336 - DNA, 773 bp, Homo sapiens
  MAP TO AC009963.2; EXPRESSED IN ADULT LIVER, SIGNAL = 2.9; EXPRESSED IN PLACENTA, SIGNAL = 4.7; EXPRESSED IN BRAIN, SIGNAL = 3.6; EXPRESSED IN HELA, SIGNAL = 5.6; EXPRESSED IN BONE MARROW, SIGNAL = 2.8; EXPRESSED IN FETAL LIVER, SIGNAL = 2.7; SWISSPROT HIT: P49792, EVALUE 1.00e-102; NT HIT: gi6382078, EVALUE 0.00e+00; EST_HUMAN HIT: BG621615.1, EVALUE 0.00e+00
cacccatactctttctgtccctttcatattttgcaaactcatgtctggagttattgtgtgattggcacaaagttttaatacttggtcccttctcatcactatacgaacttgcttattatcataattctgtaaaatctttatatcaccaatgcccctttctttccattgaccaacatctttatcatatctgtagagttctgccctgtgactaaaaacaactttttcattttcctcaccactggatacttcaactagatcaggtaaaggaacaacaggttcaaagtactgtccatctctctcttcttcttgagtaacatcagattcttcatcagtgccaactgaagtcccactctgattcaacttggcaggagacttagatggactcaaagcagatttaaaactgaagttagatcctgttgttgactcaccaaaatggaaaagattttttctcacagggctacttgccaatggagaagcatgtactgagctactactgacactatcatccaaagcatcttcccttaaatcacagttatcccattctaatgtgggcccagtgttttcaggattgggttttattgttgtgtctgaggcaccggccgcacctgtacctgaacccttattttcttcctcagtgacttttgtttgatcatttgtcaaaaatgttttgaaatctttcagtccactcttcatttcttcagctctctgtattaacttggcagctctgccagtatctacaagtttatggggagtttgaagtggtatgtctaaca

SEQ ID NO: 20337 - DNA, 1189 bp, Homo sapiens
  MAP TO AC004943.1; EXPRESSED IN ADULT LIVER, SIGNAL =  29; EXPRESSED IN PLACENTA, SIGNAL =  34; EXPRESSED IN BRAIN, SIGNAL =  29; EXPRESSED IN BONE MARROW, SIGNAL =  18; EXPRESSED IN LUNG, SIGNAL =  22; EST_HUMAN HIT: BE265432.1, EVALUE 0.00e+00; SWISSPROT HIT: P36704, EVALUE 6.90e-01; NT HIT: gi14777633, EVALUE 0.00e+00
ataaactagggtgctctttggcgtttcttgctgctctcgtgattgttctgtgtttgtgcaaggccgactcgagatgttgactcagagcttcctccccacagagcgcgctctcgcacgccaggcagtggtacgagccgccgccgccgccgccgccgccaccgccgccgccgccgccactgccaccgccgccgccgccggtggggacgtgaagcaccatctcttgcaggttcaccacagactggccgaagaagcagagggacttcaggtggctcctcgctgcctcctcgtcgctgaagcccgcctggcacttgcggcagaccaacttgtactgcacctttggaacaatgaaggggtcgtagagggagtccgcacttttgctttctgcttctggctcttcagggagtttcggcaggaggggggacacctcacggggggtgtttttctgttcttctggtttgggggattctttggcagggtctttgtctggggaaggagccccgggggggactggggtttggcttgctttgggctgctgctgctgcactttttgctgctgctgctgctgtagttgccgctgctgctgctgctgaattgcctcctgcagactctgctggtattgctggtactgctgcagtagggagcctggggacagccccatcagggcctgcgacagtgcagggctgtaggggaacaggccttccatgccatacataggctgcaggtacccgctctgcagggcgccagggatctggggagcataataaggagaaaagcctggtacaaagtaaggaaggaactggcttgtgagcaatgctgtggggtccgaagtcaacgcggcctgcagggcctgcagctgtgcagggtctaccgcatactccatggtgggcagcggggctgagatcgtggctgcagttgccgtgggggcctctcctttctccttcttggggacaggcaggggttcccctttccctttgtgtgccttttccttctcctttactttctcactgtctttgtccttgcgttgctgctgctgttgcagtgggagctgtggtgtgggtggcggctgggctgctggcggcgggggaggctgctgcacctgtggttgctgctgctgctgctgctgctgggggggttgctgagggcccatcgccatcgtggcttgtgctggggttggggagctcagcgacgc

SEQ ID NO: 20338 - DNA, 457 bp, Homo sapiens
  MAP TO AC010683.1; EXPRESSED IN LUNG, SIGNAL = 1.3; EXPRESSED IN FETAL LIVER, SIGNAL = 1.8; EXPRESSED IN BRAIN, SIGNAL = 1.3; EXPRESSED IN HELA, SIGNAL = 0.85; EXPRESSED IN ADULT LIVER, SIGNAL = 1.4; EXPRESSED IN HEART, SIGNAL = 1.5; EXPRESSED IN BONE MARROW, SIGNAL = 1.5; NT HIT: AL163303.2, EVALUE 3.00e-54; SWISSPROT HIT: P25806, EVALUE 4.00e+00; EST_HUMAN HIT: AL521707.1, EVALUE 3.00e-92
tgcacctagtcactcaagagctctggtggagatgtacaaggagatctgtgttgttttcacgcttgttaacacaacacctgttcttcagcttacagatcaaggagtaattttgactctcaagtcttactatttaagaaatacattttgtaaggctatagctgccatagatagtgattcctctaatggatctgggcaaagtaaattgataactatctggaaaggactcaccattctaaatgtcattaagaacatttgtgattcatgggaggaggtcaaaatagcaacattagcaggagttaggaaaaagttgaatctaatcctcattaatgactttgaggggtttaagatgtcagtggaggaagtaacagcaaatgtggtgaaaatagcaagagaactagaattagaagtggagcctaaagatgtgactgaattgctacaatctcatgataaaacttaa

SEQ ID NO: 20339 - DNA, 506 bp, Homo sapiens
  MAP TO AP000271.1; EXPRESSED IN FETAL LIVER, SIGNAL = 1.2; EXPRESSED IN ADULT LIVER, SIGNAL = 1.3; EXPRESSED IN BRAIN, SIGNAL = 1.3; EXPRESSED IN BONE MARROW, SIGNAL = 1.3; NT HIT: gi14736825, EVALUE 1.00e-103; SWISSPROT HIT: Q9NQT5, EVALUE 5.00e-35; EST_HUMAN HIT: BF677694.1, EVALUE 0.00e+00
caactctaagtagcatggggcccattttggctgaggttcccccagaggccaaaaaggtcactttgagtacatccttggatagctcctctggtagaatggaggacggtagactggacacgggtcacactgaggttccagtaacttcaggcctcttcatcagagtgttgaataagaagcagaactttagcctccaaataaggtgtagttttggccggggaccgggaaagctgagacactgctgggctggggccgccatagccctgggaacggagtatattctagtgaaaggagaccaggtgactggcatagtgacagctaaatctggagatatattcagagttgatgttggagggagtgagccagtttctttgtcttacttggcatttgaaggtgcaactaaaagaaacagaccaaatgtgcaggttggagatctcatctatggccaatttgtggttgctaataaagacatggaaccagagatggtctgtattgacagctatggatga

SEQ ID NO: 20340 - DNA, 585 bp, Homo sapiens
  MAP TO AL031282.1; EXPRESSED IN FETAL LIVER, SIGNAL = 2.4; EXPRESSED IN ADULT LIVER, SIGNAL = 2.5; EXPRESSED IN PLACENTA, SIGNAL = 2.4; EXPRESSED IN HELA, SIGNAL = 1.8; EXPRESSED IN BRAIN, SIGNAL = 2.5; NT HIT: AF080691.1, EVALUE 0.00e+00; SWISSPROT HIT: P21127, EVALUE 4.00e-14; EST_HUMAN HIT: AI660068.1, EVALUE 0.00e+00
tacactgactcccgtagccgctcccccatccaagccctgcacagatgccggtaacaaggccttggtgcctacataacccgcccacgcaggggtcaagtggaaggcactgctctccagtgcggaggaggacgcaactcgggcagcagtgacagcagcgcggccgcacgcccaggctgcctttcaagccgcagagcagtcctgcgggcagctccctgtccacccagttccgtccagcatgagaaagaggcgggacctagaagcatgaggggccagtggctgtgcccgcccgtcactgccccagtgggcccagcagccctgtgaggcgacagacgccaacacgggggccaggcttcgctcagcccctgtggtaactccgactgccaatgcggacagcggcccggggcgaggggagggcctgacctgcagggccggcaggtacttgggcagctcctgcttgagctcgatgggcaacagggcaggggagtcgggcacatagtcgccctctgtcagggcgctgctctgcggcgttccctcacccacttcttcctctgcttcttcactctccccggaatctcggtcgaaccg

SEQ ID NO: 20341 - DNA, 927 bp, Homo sapiens
  MAP TO AC005494.1; EXPRESSED IN HEART, SIGNAL = 1.5; EXPRESSED IN LUNG, SIGNAL = 2.4; EXPRESSED IN BONE MARROW, SIGNAL = 2.4; EXPRESSED IN FETAL LIVER, SIGNAL = 1.9; EXPRESSED IN ADULT LIVER, SIGNAL = 2.3; EXPRESSED IN BRAIN, SIGNAL = 2.1; EXPRESSED IN HELA, SIGNAL = 3.7; NT HIT: gi14753097, EVALUE 0.00e+00; SWISSPROT HIT: O00222, EVALUE 0.00e+00; EST_HUMAN HIT: BF082374.1, EVALUE 0.00e+00
cttttctgctgactgggctgtaccaaaaaagatggggatgaaagctaaccaaatgatgcaggtggtatacatggtaaatccaataggtttggcttcattgaaagtctctgggacacctctcgttttaatggcataaacagtacaagtgaccatcaagaggatactgtatccaagtgaacaaatgagtgagagatcagaaatgtcacacttgagcactcccctggccttctctggatctagtgtccgctgctctccatagtcaatgatgatgtgggggggatccacaacaaaccagacaaacactccaaggagctggacggagatgaggctgaaggtgatcaccagctgagatgctggactaatgaacttgggcgctgtgacagatttcttcccctgctcaaatattcggtggatacggtttgttttggtcagaagggctgcatagctgaaacacatgccaagtcctaggaagacccgtcggaaggagcatatgattgtatctggtgctgcaatcattaaaaacgtgattgaataacagagaaaaatccccgttaggagcacgtaactaagttcgcgtcctgaagccctcacgataggtgtgtcattatagcggacaaaggtcacgatcacaaaggtggtggcgatgattcccaatattgcaacaaacacaggcaccacagcccagggagaatgccactccaatttgatgatggggataagctggcagcctgtgcggttcatgttgggtctctgatccagagggcaaagttcacaggacagctcatccacctggtagttgtaaccttcacagcgttcacagtgccagcagcaagggacccctttcaccgttttcttcctctcccctggcttacacggcaggctgcagacagacgccgggtgagtatgttctctatgagcccactgcat

SEQ ID NO: 20342 - DNA, 683 bp, Homo sapiens
  MAP TO AC004186.1; EXPRESSED IN HEART, SIGNAL = 2.3; EXPRESSED IN BONE MARROW, SIGNAL =   2; EXPRESSED IN LUNG, SIGNAL = 1.9; EXPRESSED IN PLACENTA, SIGNAL = 1.5; EXPRESSED IN BRAIN, SIGNAL = 1.8; EXPRESSED IN HELA, SIGNAL = 0.99; EXPRESSED IN ADULT LIVER, SIGNAL = 2.3; EST_HUMAN HIT: BE900982.1, EVALUE 0.00e+00; SWISSPROT HIT: Q02084, EVALUE 3.00e-14; NT HIT: gi14761275, EVALUE 0.00e+00
tgagcgtcaccctggacccacagtcggccagtgggtacctgcagctgtcagaggactggaagtgcgtgacctacaccagcctgtacaagagtgcctacctgcacccccagcagtttgactgtgagcctggggtgctgggcagcaagggcttcacctggggcaaggtctactgggaagtggaagtggagagggagggctggtctgaggatgaagaagagggggatgaggaggaagagggagaagaggaggaggaggaagaggaggccggctatggggatggatatgacgactgggaaacggacgaagatgaggaatcgttgggcgatgaagaggaagaagaggaggaggaagaggaggaagttctggaaagctgcatggtgggggtggctagagactctgtgaagaggaagggagacctctccctgcggccagaggatggcgtgtgggcgctgcgcctctcctcctccggcatctgggccaacaccagccccgaggctgagcttttcccagcactgcggccccggagagtgggcatcgccctggattatgaagggggcaccgtgactttcaccaacgcagagtcacaggaactcatctacaccttcactgccaccttcacccggcgcctggtccccttcctgtggctcaagtggccaggaacacgcctcctgctaagaccctga

SEQ ID NO: 20343 - DNA, 648 bp, Homo sapiens
  MAP TO AL050330.9; EXPRESSED IN HELA, SIGNAL = 0.75; EXPRESSED IN ADULT LIVER, SIGNAL = 1.8; EXPRESSED IN LUNG, SIGNAL = 2.1; EXPRESSED IN HEART, SIGNAL = 2.2; EXPRESSED IN BONE MARROW, SIGNAL = 2.2; EXPRESSED IN PLACENTA, SIGNAL = 1.7; EXPRESSED IN BRAIN, SIGNAL = 1.5; SWISSPROT HIT: P18892, EVALUE 5.00e-45; NT HIT: gi14751923, EVALUE 0.00e+00; EST_HUMAN HIT: BE741117.1, EVALUE 0.00e+00
gaccagaggagtgtacagcgtgctgaggagccccatgacctaccagacaaccctgagagatttgaatggcgttactgtgtgcttggctgtgaaagcttcatgtcagagagacactactgggaggtggaagtgggggacagaaaagagtggcatattggggtatgtagtaagaacgtggagaggaaaaaagtttgggtcaaaatgacaccggagaacggatactggactatgggcctgactgatgggaataagtatcgggctctcactgagcccagaaccaacctgaaacttcctgagcctcctaggaaagtgggggtcatcctggactatgagactggacatatctcgttctacaatgccacggatggatctcatatctacacatttctgcacgcctcttcctctgagcctctgtatcctgtattcagaattttgaccttggagcccactgccctgaccgtttgcccaataccaaaagtagagagttcccccgatcccgacctagtgcctgatcattccctggagataccactgaccccaggcttagctaatgaaagtggggagcctcaggctgaagtaacatctctgcttctccctgcccagcctggagctaagggtctcaccctccacaacagccagtcagaacca

SEQ ID NO: 20344 - DNA, 731 bp, Homo sapiens
  MAP TO AC002123.1; EXPRESSED IN ADULT LIVER, SIGNAL = 1.9; EXPRESSED IN BRAIN, SIGNAL = 1.9; EXPRESSED IN BONE MARROW, SIGNAL = 2.3; EXPRESSED IN LUNG, SIGNAL = 2.1; EXPRESSED IN FETAL LIVER, SIGNAL = 2.1; EXPRESSED IN PLACENTA, SIGNAL = 1.8; SWISSPROT HIT: Q04657, EVALUE 1.50e+00; NT HIT: AL163303.2, EVALUE 2.00e-26; EST_HUMAN HIT: AL521707.1, EVALUE 0.00e+00
atcaatctgcagcccatggatcaaagggtaattttgactttcaagtcttattatttaagaaatgttttcataaggctatagctgctatagatagtgattactgtgatggatctgggcaaagcaaattcgaagccttctggaaaggattcacccatctagatgtcattaagaacacttgtgattcatggaaagaggttaaagtatcaacattaactggagttttgaagttgattccaaaactcatggatgactttgagggattcaaggcttcagcgaaggaagtaatggcagatatggtgaaaatagtgggagaactggaattcgaagtggagcccgaagatgcgactgaattgcttcaatgtcatgatcaaactttagcagttgaggagctgcttcttacgaatgagcacagaaagtggtctcttgagagggaatctactcctggcaaaaatgctgtgactattattgaaacaaccacaaaagacttagaatattgcataaacttatttgataaagcagtagcagggtttgaggggattgattccaattttgaaagaggttctctgggtaaaatgttatcaaacagtattgcatgcttcagagaaatctttcatgaaagagagagtcaatcgatgcagcaaacttcactgttgtctcattttaagaaatttccacagccagcccagccttcagcaaccaccctcatgatcaatcaacagccatcaacatag

SEQ ID NO: 20345 - DNA, 479 bp, Homo sapiens
  MAP TO AC007606.2; EXPRESSED IN HELA, SIGNAL = 1.3; EXPRESSED IN ADULT LIVER, SIGNAL = 2.3; EXPRESSED IN PLACENTA, SIGNAL = 1.7; EXPRESSED IN BRAIN, SIGNAL = 3.2; EXPRESSED IN LUNG, SIGNAL = 1.9; EXPRESSED IN BONE MARROW, SIGNAL = 2.2; EXPRESSED IN FETAL LIVER, SIGNAL = 1.8; SWISSPROT HIT: P30519, EVALUE 1.00e-90; NT HIT: gi15319788, EVALUE 0.00e+00; EST_HUMAN HIT: BI758647.1, EVALUE 0.00e+00
ctgcatgttatactcaaaagccttgttggcctcctccacgatcctctctttggtcttcatgttcaggtccagggcgttcatcctggcccggtagagctgcttgaactgctgggcattgtccacattctcaaacaggtagaactgggtcccttcccctgtgctggggagtttcagtgctcgctgggccaccttcttcagcacctggccccccgagagatcccccatgtagcgggtgtatgcatgggccaccagtagctccggctcgttctgccctatgtagtggatccgctccacgtacttctgggcagccttggggcactgcacctgctcctcccagttttcaccaaagaaatactccatgtccttggtcagcgcctccttccggtgcagctccatggggaagtacaaaggggcaaaggctggatggtccttgttgcgctccatttcctcctcgagggctgagtatgtgaagtaaagtg

SEQ ID NO: 20346 - DNA, 576 bp, Homo sapiens
  MAP TO AC011330.4; EXPRESSED IN ADULT LIVER, SIGNAL = 1.2; EXPRESSED IN PLACENTA, SIGNAL = 2.3; EXPRESSED IN HELA, SIGNAL =   2; EXPRESSED IN HEART, SIGNAL = 1.4; EXPRESSED IN BONE MARROW, SIGNAL = 1.6; EXPRESSED IN LUNG, SIGNAL = 1.3; EXPRESSED IN FETAL LIVER, SIGNAL = 1.7; SWISSPROT HIT: Q92997, EVALUE 2.20e-01; NT HIT: AJ251207.1, EVALUE 3.50e-02; EST_HUMAN HIT: Z42308.1, EVALUE 0.00e+00
gctttctgtctggatcaccacccccaccccctgccctccttcactgcctgagcacgggcgtgcctctgcccagagcttctcagccgtcagcccacatcagcccacgccaacggcgagccatcactgtggaggccctctgtgagaaccacttaggcccagcaccaccctacagcatttccaacttctccatccacttgctctgccagcacaccaagcctgccactccacagccccatcccagcaccactgccatctgccagacagctgtgtggtatgcagtgtcctgggcaccaggtgcccaaggctggctacaggcctgccacgaccagtttcctgatgagtttttggatgcgatctgcagtaacctctccttttcagccctgtctggctccaaccgccgcctggtgaagcggctctgtgctggcctgctcccaccccctaccagctgccctgaaggcctgccccctgttcccctcaccccagacatcttttggggctgcttcttggagaatgagactctgtgggctgagcgactgtgtggggaggcaagtctacaggctgtgccccccagcaacc

SEQ ID NO: 20347 - DNA, 656 bp, Homo sapiens
  MAP TO AL022319.2; EXPRESSED IN ADULT LIVER, SIGNAL = 2.1; EXPRESSED IN BRAIN, SIGNAL = 2.5; EXPRESSED IN PLACENTA, SIGNAL = 4.4; EXPRESSED IN HEART, SIGNAL = 2.5; EXPRESSED IN BONE MARROW, SIGNAL = 2.3; EXPRESSED IN FETAL LIVER, SIGNAL = 2.7; EST_HUMAN HIT: BI755159.1, EVALUE 3.70e+00; SWISSPROT HIT: P18128, EVALUE 1.60e-02; NT HIT: gi14779039, EVALUE 0.00e+00
tccaggaccccgggccggcctgtcccccgccgctcgccgccgcctgagcctgcgcggccggggcctcttcagcctgcgggggctgcgggcgcatcagcgcagccacagcagcgggggctccaccagcccgggctgcacccaccacgactccatggacccctcggacgaggagggccgcggtggcgcgggcggcgggggcgcgggcagcgagcactcggagaccctcagcagcctctcgctcacctccctcttctgcccgccgcccccgccgccagcccccggcctcacgcccgccaggaagttcagcagcaccagcagcctggccgcccccggccgcccccacgccgccgccctggcccacggcctggcccggagcccctcgtgggccgcggaccgcagcaaggacccccccggccgggcaccgctgcccatgggcctgggccccttggcgcccccgccgcaaccgctccccggagagctggagccgggagacgccgccagcaagaggaagagatgagggtcgcaggggcccccggccgcccaccgcccgccccgtctcaccttctttacctcaggagccaggagcagacagcaatacttcgtccacacctgggatcgcgcagggcccgcagggcacaggcgcccgacagccgggc

SEQ ID NO: 20348 - DNA, 639 bp, Homo sapiens
  MAP TO AC006062.4; EXPRESSED IN LUNG, SIGNAL = 1.2; EXPRESSED IN PLACENTA, SIGNAL = 3.7; EXPRESSED IN ADULT LIVER, SIGNAL = 1.7; EXPRESSED IN BRAIN, SIGNAL = 1.5; EXPRESSED IN BONE MARROW, SIGNAL = 1.5; EXPRESSED IN HEART, SIGNAL = 2.2; EXPRESSED IN FETAL LIVER, SIGNAL =   2; NT HIT: gi14786115, EVALUE 0.00e+00; EST_HUMAN HIT: AI824821.1, EVALUE 0.00e+00
ctacacactcggtagttcttccatctcgctctcctgactcagtggttcttccatctcgctctcctgactcagtggttcctccacctggctctcctgactcagtggttcttccatctcgctctcctgactcagtggttcctccacctggctctcctgactcagtggttcttccacctcgctctcctgactcagtggttcctccacctggctctcctgactcagtggttcttccacctcgctctcctgactcagtggttcctccacctcgctctcctgactcagtggttcctccacctggctctcctgactcagtggttcttccacctcgctctcctgactcagtggttcctccacctggctctcctgactcagtggttcttccacctcgctctcctgactcagtggttcctccagctcgctctcctgactcagggggtcgtgctgggtcccctcgctcactggctcctccggcggcagctcgtgctgagggagctcctggctgggctggtcgctggggccgggtgccgctggcccgctctccgcctcaggtgccgtcacggccgccatctttgtcgcagcccctttcttcccgcgtctccctctacgaactgcttttcccttcttggccaccttggtagt

SEQ ID NO: 20349 - DNA, 473 bp, Homo sapiens
  MAP TO AL356017.1; EXPRESSED IN LUNG, SIGNAL = 1.5; EXPRESSED IN BONE MARROW, SIGNAL = 1.4; EXPRESSED IN FETAL LIVER, SIGNAL = 1.4; EXPRESSED IN ADULT LIVER, SIGNAL = 1.6; EXPRESSED IN BRAIN, SIGNAL = 1.7; EXPRESSED IN HELA, SIGNAL = 1.6; EXPRESSED IN PLACENTA, SIGNAL = 2.3; NT HIT: gi14748176, EVALUE 0.00e+00; EST_HUMAN HIT: AW747968.1, EVALUE 0.00e+00; SWISSPROT HIT: P34529, EVALUE 7.00e-03
ctgtttaagacaactgctgtgtatcttctttccacaaaaataattccgcacaaaatgttggtaaaaggagaaggaaaatttgtctctggcttctctttttcttcaatttcttcatcctcatcatcatcctcagaatcactccatgacacataattatcctgatttctattattataccactcaacgctttcaaactgctgtcgctcatatggtttatatttgcgtaagatttcgagcagtttgattactttaggagttacaaatttcaggtcaagtgaggcaggtgagaagtgctcttcacatagtgcatgtattttccttaggaaagtgtctgtaaacaataaaaatttcctgtgcagctcctcttgctcatgtttgatgtatttctgtagttctcttaccatcattccagctactttatctgcacaccagggtcccagaactaccaatacggcacgacagtctgatagtat

SEQ ID NO: 20350 - DNA, 1705 bp, Homo sapiens
  MAP TO AL133543.2; EXPRESSED IN LUNG, SIGNAL = 1.4; EXPRESSED IN ADULT LIVER, SIGNAL = 1.5; EXPRESSED IN BRAIN, SIGNAL = 0.97; EXPRESSED IN HELA, SIGNAL = 1.9; NT HIT: gi15300899, EVALUE 0.00e+00; EST_HUMAN HIT: AU127260.1, EVALUE 0.00e+00; SWISSPROT HIT: P15924, EVALUE 0.00e+00
atgattcaaaacattattttttcccatttctttcttcttcaattccaggcatctaataggattcaggaatcaaagaatcagtgtactcaggtggtacaggaaagagagagccttctggtgaaaatcaaagtcctggagcaagacaaggcaaggctgcagaggctggaggatgagctgaatcgtgcaaaatcaactctagaggcagaaaccagggtgaaacagcgcctggagtgtgagaaacagcaaattcagaatgacctgaatcagtggaagactcaatattcccgcaaggaggaggctattaggaagatagaatcggaaagagaaaagagtgagagagagaagaacagtcttaggagtgagatcgaaagactccaagcagagatcaagagaattgaagagaggtgcaggcgtaagctggaggattctaccagggagacacagtcacagttagaaacagaacgctcccgatatcagagggagattgataaactcagacagcgcccatatgggtcccatcgagagacccagactgagtgtgagtggaccgttgacacctccaagctggtgtttgatgggctgaggaagaaggtgacagcaatgcagctctatgagtgtcagctgatcgacaaaacaaccttggacaaactattgaaggggaagaagtcagtggaagaagttgcttctgaaatccagccattccttcggggtgcaggatctatcgctggagcatctgcttctcctaaggaaaaatactctttggtagaggccaagagaaagaaattaatcagcccagaatccacagtcatgcttctggaggcccaggcagctacaggtggtataattgatccccatcggaatgagaagctgactgtcgacagtgccatagctcgggacctcattgacttcgatgaccgtcagcagatatatgcagcagaaaaagctatcactggttttgatgatccattttcaggcaagacagtatctgtttcagaagccatcaagaaaaatttgattgatagagaaaccggaatgcgcctgctggaagcccagattgcttcagggggtgtagtagaccctgtgaacagtgtctttttgccaaaagatgtcgccttggcccgggggctgattgatagagatttgtatcgatccctgaatgatccccgagatagtcagaaaaactttgtggatccagtcaccaaaaagaaggtcagttacgtgcagctgaaggaacggtgcagaatcgaaccacatactggtctgctcttgctttcagtacagaagagaagcatgtccttccaaggaatcagacaacctgtgaccgtcactgagctagtagattctggtatattgagaccgtccactgtcaatgaactggaatctggtcagatttcttatgacgaggttggtgagagaattaaggacttcctccagggttcaagctgcatagcaggcatatacaatgagaccacaaaacagaagcttggcatttatgaggccatgaaaattggcttagtccgacctggtactgctctggagttgctggaagcccaagcagctactggctttatagtggatcctgttagcaacttgaggttaccagtggaggaagcctacaagagaggtctggtgggcattgagttcaaagagaagctcctgtctgcagaacgagctgtcactgggtataatgatcctgaaacaggaa

SEQ ID NO: 20351 - DNA, 612 bp, Homo sapiens
  MAP TO AP001679.1; EXPRESSED IN LUNG, SIGNAL = 3.9; EXPRESSED IN ADULT LIVER, SIGNAL = 4.4; EXPRESSED IN PLACENTA, SIGNAL =  16; EXPRESSED IN HELA, SIGNAL = 7.8; SWISSPROT HIT: P05783, EVALUE 1.00e-89; NT HIT: gi4557887, EVALUE 0.00e+00; EST_HUMAN HIT: BG248547.1, EVALUE 0.00e+00
ctagtatttgtccagctcctctcggtttttccgagccagctcatcgtattgggcctggatgtctgccatgatcttggtgaggtcctgcaatttgagggcatctacttccacggtcaacccagagctggcaatctgggcttgtaggccttttacttccacttcgtggttcttcttcatgaagagcagctcctccttgagagcttccatctctgtctccagctgcagttgagtgacattggtgtcatcagcgatcttgtggagcccatggatgttgctctccacagactggtgcatggccagctctgactcatacgtgactctaaagtcattagcagcaatacgggcattgtcgatctgcagaacgatgcaggaactatccacagtatttgcgaagatatgagcactcaggtcctcgatggtcttgaagtaatggtcccagtctctgacctggggtcccttcttctccaggggctcccggattttgctctccagcttccagttctccgtctccaggctcctcactctgtccaggtaggaggccagccagttgttcaggctttgcatcgtctccgcattctggatgcctcccattccagccagaaccccggccat

SEQ ID NO: 20352 - DNA, 912 bp, Homo sapiens
  MAP TO AC000082.4; EXPRESSED IN ADULT LIVER, SIGNAL = 2.1; EXPRESSED IN PLACENTA, SIGNAL = 2.8; EXPRESSED IN BONE MARROW, SIGNAL = 2.1; EXPRESSED IN FETAL LIVER, SIGNAL = 1.7; SWISSPROT HIT: O00501, EVALUE 4.00e-95; NT HIT: gi14777026, EVALUE 0.00e+00; EST_HUMAN HIT: BI838208.1, EVALUE 0.00e+00
tcagacgtagttcttcttgtcgtagtcgccggtggccgtgggccgccgcggcgctgagtacttcacggggaagctgaggtcgggacggccggtgcagacccaggcgccgcagcacaagaggcagccgcctaccatgagcagcgcggtggccgcccagccgatgtacagcgctgcgcccagctcgtacttctgcgacacgggcacagacgggtcgtaaaactcgcggacgacaatgttggcgaaccagcagagtggcacgagcgccagcagcccgcaaaacaggtagagcacgcctcccgtgagggccacacgcgccttggccgggcccggggccacgcaggtggtgcactgcgcgcccgccagggtcacgaagagcgcaacgaacgccagcagcacggcgctcacggtgagcgcccgcgccgcctgcacctcggtgctcagagccagcaccgagtcgtacactttgcactgcatgtgcccggtgctctgcaccacgcacgacatccacagccccttccaggtggtctgcgccgtcacgatgttgtggtccaggaaggcggtcacctgccacatgggcagcccgcacgccaggatcagacccccccagcccaccaggcacagcaccaggcccaggatctccaacgctgcggaccccatggctagaggcgagacgcgcacccgaaggcccgcagaacccccaaggccgtgctgcgcggcgccctgggcgggccctggtgcctttgcgcccgcgctcccggctcttggccccagtccgtttgccccgcgggtctgtcgcacctcctgggtctgccagctcctgccggggggtaccctctttgaaggttcgggggcggattctgtcccccgggcccggccccccggcccgaagcagccaatccgtgcgcgggtcat

SEQ ID NO: 20353 - DNA, 528 bp, Homo sapiens
  MAP TO AL022067.1; EXPRESSED IN HELA, SIGNAL = 0.41; EXPRESSED IN ADULT LIVER, SIGNAL = 2.5; EXPRESSED IN PLACENTA, SIGNAL = 2.1; EXPRESSED IN HEART, SIGNAL = 2.4; EXPRESSED IN BRAIN, SIGNAL = 2.3; EXPRESSED IN BONE MARROW, SIGNAL = 2.5; EXPRESSED IN LUNG, SIGNAL = 2.5; SWISSPROT HIT: P41183, EVALUE 1.00e-17; NT HIT: gi4557362, EVALUE 0.00e+00; EST_HUMAN HIT: BG697234.1, EVALUE 0.00e+00
gtctgccacaagagatttagcagcaccagcaatctcaagacccacctgcgactccattctggagagaaaccataccaatgcaaggtgtgccctgccaagttcacccagtttgtgcacctgaaactgcacaagcgtctgcacacccgggagcggccccacaagtgctcccagtgccacaagaactacatccatctctgtagcctcaaggttcacctgaaagggaactgcgctgcggccccggcgcctgggctgcccttggaagatctgacccgaatcaatgaagaaatcgagaagtttgacatcagtgacaatgctgaccggctcgaggacgtggaggatgacatcagtgtgatctctgtagtggagaaggaaattctggccgtggtcagaaaagagaaagaagaaactggcctgaaagtgtctttgcaaagaaacatggggaatggactcctctcctcagggtgcagcctttatgagtcatcagatctacccctcatgaagttgcctcccagcaacccactacctctg

SEQ ID NO: 20354 - DNA, 889 bp, Homo sapiens
  MAP TO AC007308.13; EXPRESSED IN FETAL LIVER, SIGNAL = 1.6; EXPRESSED IN ADULT LIVER, SIGNAL = 2.6; EXPRESSED IN HELA, SIGNAL = 0.35; SWISSPROT HIT: P05546, EVALUE 0.00e+00; EST_HUMAN HIT: AL538162.1, EVALUE 0.00e+00; NT HIT: M58600.1, EVALUE 0.00e+00
atgaaacactcattaaacgcacttctcattttcctcatcataacatctgcgtggggtgggagcaaaggcccgctggatcagctagagaaaggaggggaaactgctcagtctgcagatccccagtgggagcagttaaataacaaaaacctgagcatgcctcttctccctgccgacttccacaaggaaaacaccgtcaccaacgactggattccagagggggaggaggacgacgactatctggacctggagaagatattcagtgaagacgacgactacatcgacatcgtcgacagtctgtcagtttccccgacagactctgatgtgagtgctgggaacatcctccagctttttcatggcaagagccggatccagcgtcttaacatcctcaacgccaagttcgctttcaacctctaccgagtgctgaaagaccaggtcaacactttcgataacatcttcatagcacccgttggcatttctactgcgatgggtatgatttccttaggtctgaagggagagacccatgaacaagtgcactcgattttgcattttaaagactttgttaatgccagcagcaagtatgaaatcacgaccattcataatctcttccgtaagctgactcatcgcctcttcaggaggaattttgggtacacactgcggtcagtcaatgacctttatatccagaagcagtttccaatcctgcttgacttcaaaactaaagtaagagagtattactttgctgaggcccagatagctgacttctcagaccctgccttcatatcaaaaaccaacaaccacatcatgaagctcaccaagggcctcataaaagatgctctggagaatatagaccctgctacccagatgatgattctcaactgcatctacttcaaag

SEQ ID NO: 20355 - DNA, 575 bp, Homo sapiens
  MAP TO AP001679.1; EXPRESSED IN FETAL LIVER, SIGNAL = 1.1; EXPRESSED IN ADULT LIVER, SIGNAL = 1.2; EXPRESSED IN HELA, SIGNAL = 1.9; SWISSPROT HIT: P15377, EVALUE 3.70e-01; NT HIT: AL163282.2, EVALUE 1.00e-128; EST_HUMAN HIT: AU124571.1, EVALUE 1.00e-125
tttctatatacaatgcgggtacaggtgttgggtaaatgcagcagttccaaatgggagaaattggccaaaacaaaagggttacttatgaaaatttctgcagctgccttgaatttctccccagaatatggatttttcttttctatcacatattcaggctgcatattttccaaactcttatgctctgcttctcctataaaactaaatgcctttaacagtacccgagatacctcttgaatgctttgctgcttagaaatttcttctgccagatactctaaatcatctttctcaagttcaaagttcaacaaatctctagagcagggacaaaatgccaccagtctctttgctaaaacataacaagagtcacctttactccagtttccaagaagttcttcatctccatctgagtccgcctcagcctggaccttactgtccatatcgctatcagcatttttggcagaaccactcaacaagtctctaggaagttccaaattttcccatattttcctgtcatcttctgagccctccaaactgttccaacctctgcctgttacccagttccaaagttgcttccacat

SEQ ID NO: 20356 - DNA, 633 bp, Homo sapiens
  MAP TO AL031864.1; EXPRESSED IN ADULT LIVER, SIGNAL = 2.6; EXPRESSED IN PLACENTA, SIGNAL = 3.8; EXPRESSED IN HEART, SIGNAL = 2.9; SWISSPROT HIT: Q10711, EVALUE 1.00e-04; NT HIT: gi14736535, EVALUE 0.00e+00; EST_HUMAN HIT: BE870705.1, EVALUE 0.00e+00
acggccccagatgagcttcttgaagatggacatgacgcagatggagtttcctgatgcctcgttccaggtggtgttggacaagggcaccctggatgctgtcctgacagatgaggaagagaagaccttacaacaggtggacaggatgctggctgaggttggccgtgtcctgcaggtgggcggtcgctatctctgcatctccctggctcaggctcacatcctgaagaaagcagtgggccacttctcccgggaggggtggatggtgagggtgcaccaagtggccaacagccaggaccaggtgttggaagcagagcctcagttctccttgcctgtctttgccttcatcatgaccaagttcaggccagtccctggctctgcccttcagatctttgagctgtgtgctcaggagcagcgcaagcctgtgcggctggagagtgccgagcggctggccgaggcggtgcaggagcgacagcagtatgcctggctgtgcagccagctgcgccgcaaggccaggctggggagtgtgtctctggacttgtgcgatggggacacgggggagccacgctacaccctccacgtggtggacagccccactgtgaaaccatcgcgggacaatcattttgcgattttcatcag

SEQ ID NO: 20357 - DNA, 588 bp, Homo sapiens
  MAP TO AL355076.2; EXPRESSED IN ADULT LIVER, SIGNAL = 7.6; EXPRESSED IN PLACENTA, SIGNAL = 9.9; EXPRESSED IN HELA, SIGNAL = 5.6; EXPRESSED IN BRAIN, SIGNAL = 6.9; EXPRESSED IN HEART, SIGNAL = 6.2; EXPRESSED IN LUNG, SIGNAL = 7.2; EXPRESSED IN BONE MARROW, SIGNAL = 9.3; EXPRESSED IN FETAL LIVER, SIGNAL = 8.4; EST_HUMAN HIT: BG567776.1, EVALUE 0.00e+00; NT HIT: gi16190498, EVALUE 0.00e+00; SWISSPROT HIT: P46778, EVALUE 9.00e-58
ttatgccatgaattcacagggaataggttccagcagctcaggctccttcccattggttctcacaaagtgtgctgctctggatggagcaggctggtgcttcagttgaacccaggtacctttctctttggcttctttctttttctgatcattttcctttacgtgtttcaggaagctattttggctcttagagtgctgaatgtgctcaatacgcacattaattctcttggcaagaatcctgcccttaacttgtttgtttacaacaatgccaacggcgtgctgggtaacactgcagactcttccagttttgccattataacactcgcggagcattcctttttgaacagtacccattcccttgatgtctacgatatctacgatatcacctttctttccttctttctttctttctttctttctttctttctttctttctttctttctttctttctttctttctttctttctttctttctttcctgctttctttctttcttttctctttctttctttctttctttccttctttctttctttctttccttctttccttctttctctttctttctttctttttcttccttccttcat

SEQ ID NO: 20358 - DNA, 930 bp, Homo sapiens
  MAP TO AC002988.1; EXPRESSED IN ADULT LIVER, SIGNAL =   2; EXPRESSED IN HELA, SIGNAL = 3.3; EXPRESSED IN BONE MARROW, SIGNAL = 2.1; EXPRESSED IN FETAL LIVER, SIGNAL = 1.8; SWISSPROT HIT: O14581, EVALUE 0.00e+00; EST_HUMAN HIT: AI909504.1, EVALUE 0.00e+00; NT HIT: gi14768167, EVALUE 0.00e+00
ttattgctttcctctgaaggacattttcagagccctctttatgtctttattcctcagactgtagataaaggggttcagcatgggggtggccacagtgtacatcactgaggctgttgcacttgtgtgtgagttgtgggttgcagcagaagtaaggtacacacctaggcccgtacaacaaaataaagagacaactgagaggtgtgatgcacaggtggaaaatgccttgtacttcccctgagctgatgagattgcacgtatggaggaaactatcttagagtaagagcaaaggatccccacaaggggaccaccagccagcagccctgctgcaaaatacatccccatgtcattaagaaaggtgtcagaacaggcaaggtggatgacctgattaagttcacagaaaaagtgggggatttccaagtctgtgcagaaggacagccacaataccattaagctttgtgacaaggaattcagggcagcaatcatccaggatgccagaaccaggagtccacagagccgagggttcatgatgactgtgtagtgcagaggatgacagatggccacaaaccgatcataggccatcacagccaggagtaagctgtctaaccctccaaaaagtacaaaaaagcacatctgggtgatgcagcctgcataggtgatgactctgctctgtgtctggatgttaatgagcatctttgggattgtagtggagatgaaacagatgtctgcaaaggacaggttggagaggaagaagtacatgggggtgtggaggtgggagtctgagattgtggccaggatgatgagcagattcccgagcacagtgaccaggtacatggacagaaacagcccaaagaggaagggctgcaattctggttcctcagaaagtcccagaagaacaaattctgaaatccctgtgtcattctctggttccat

SEQ ID NO: 20359 - DNA, 566 bp, Homo sapiens
  MAP TO AL022067.1; EXPRESSED IN ADULT LIVER, SIGNAL = 2.4; EXPRESSED IN BONE MARROW, SIGNAL = 2.2; EXPRESSED IN LUNG, SIGNAL = 2.6; EXPRESSED IN FETAL LIVER, SIGNAL = 1.9; EXPRESSED IN PLACENTA, SIGNAL = 3.3; EXPRESSED IN HELA, SIGNAL = 0.44; SWISSPROT HIT: P10272, EVALUE 1.00e-38; NT HIT: AB026898.1, EVALUE 0.00e+00; EST_HUMAN HIT: BF989696.1, EVALUE 1.00e-92
gaaggaattaatcttgaagactgggcaacagaaggacaatatggacgagcaaagaatgcccgtcctgttcaagttaaactaaaggattctgcctcctttccccaccaaaggcagtacccccttagacccgaggctcaacaaggactccaaaagattaaggacctaaaagcccaaggcctagtaaaagcatgcaatagcccctacaataatccaactttaggagtacagaaacccagtggacagtggaggttagtgcaagatctcaggattatcaatgaggtcactgtccctctatacctagctgtacctaacccttatattctgctttcccaaataccagaggaagcagagtggtttacagacctggaccttaaggatgcctttttctgcatccctgtacatcctgactctcaattcttatttgcctttgaagatccttcaaacccaatgtctcaactcacctggactgtttcaccccaagggttcagggatagcccccatctatttggccaggcattagcccaagacttgagccggttctcatacctgggcactcttgtcctttg

SEQ ID NO: 20360 - DNA, 562 bp, Homo sapiens
  MAP TO AC006357.2; EXPRESSED IN LUNG, SIGNAL = 1.3; EXPRESSED IN ADULT LIVER, SIGNAL = 1.3; EXPRESSED IN HELA, SIGNAL = 1.7; EXPRESSED IN PLACENTA, SIGNAL = 1.5; EXPRESSED IN BRAIN, SIGNAL = 1.3; EXPRESSED IN HEART, SIGNAL = 1.3; EXPRESSED IN FETAL LIVER, SIGNAL = 1.3; SWISSPROT HIT: P51521, EVALUE 7.00e+00; NT HIT: U37272.1, EVALUE 8.40e+00; EST_HUMAN HIT: BG575410.1, EVALUE 0.00e+00
cttatccgttatgtcaccgtcctccgaggaattttcactcttttcttcatcttctgcaaaacggactctcttccccctccttttctcctgcgctcccttttccttttcttccccctgttcctcttctgtatcctcgtcgtcgtcctcgctctgcgcttctgcttcctgcgccttcttttccttttctacgtctccctcctcctcctcctcactttcgtcctgggagtcactctctaagtcactttcggggagtgtctgtccggcatcttcctcctcctcaccactgctgtcgtacaagccgctatttttcccagactccagggctcccagaatatagtcaagaccgtcgcgtgcaaagctcagcggcacggagctgctgccgtccttctttttgcgcttgttcaaaccgaggcaacgctccagctttcggatctctcggtcctcctcctcgttcgccgctaaaagcgcccgtttccgggcagcggcggtggcggctgcggagggtctggtctttgcggtggcggccgtggccttggccttgacccgggacggccgcggcttc

SEQ ID NO: 20361 - DNA, 612 bp, Homo sapiens
  MAP TO AC025249.2; EXPRESSED IN FETAL LIVER, SIGNAL = 3.5; EXPRESSED IN BRAIN, SIGNAL = 3.9; EXPRESSED IN ADULT LIVER, SIGNAL = 4.5; EXPRESSED IN PLACENTA, SIGNAL = 3.5; EXPRESSED IN LUNG, SIGNAL = 4.4; EXPRESSED IN BONE MARROW, SIGNAL = 4.3; NT HIT: X89685.1, EVALUE 2.00e-13; EST_HUMAN HIT: AA069994.1, EVALUE 2.20e-01; SWISSPROT HIT: Q9H344, EVALUE 1.00e-29
atgaatgtctttctactgacaggcatcctggcaatgtcctcctatctactcagattgaagaactcacatctctccagagccttcggctgcctccctaggatgctcccttcccagacctatgtcaacatctccttcttccaaccgcctgctcttctcatgattggcatcccagggctggaggcggttcatggctggctcgccatccccttctcctccatgtacactgtggccctccctgggaactgcctgatcctcctggctgtgaagaggaaccccagcctgcaccagcccatgtgctacttcctgtccatgctggcgctccccaaagcgggcctcaccttgtccacactgcccatcaccttggctgtgctctggtttgaccaccggctcatgggcttcaatgcctgcctggtccagatgttcttcctgcactcctctgtggtggagtcctcagtgctcctggccatatcctttgaccactttgtggccatctccaaccccctgcactatgcagctgtcctcacaaatagtgtcatcatcaggattgggctggccattgtggctcaagttaccttgtgcctcttcctgtgccatttccggttaagagtctaa

SEQ ID NO: 20362 - DNA, 641 bp, Homo sapiens
  MAP TO AC002994.2; EXPRESSED IN PLACENTA, SIGNAL = 3.5; EXPRESSED IN BRAIN, SIGNAL = 2.4; EXPRESSED IN ADULT LIVER, SIGNAL = 2.1; EXPRESSED IN HELA, SIGNAL = 5.8; EXPRESSED IN LUNG, SIGNAL = 3.4; EXPRESSED IN HEART, SIGNAL = 3.1; EXPRESSED IN FETAL LIVER, SIGNAL = 1.4; SWISSPROT HIT: P38879, EVALUE 5.00e-13; EST_HUMAN HIT: BE275217.1, EVALUE 0.00e+00; NT HIT: AJ278883.1, EVALUE 0.00e+00
agaaaccgtccctgctacagagcaggagttgccgcagtcccaggctgagacagggtctggaacagcatctgatagtggtgaatcagtaccagggattgaagaacaggattccacccagaccaccacacaaaaagcctggctggtggcagcagctgaaattgatgaagaaccagtcggtaaagcaaaacagagtcggagtgaaaagagggcacggaaggctatgtccaaactgggtcttctacaggttacaggagttactagagtcactatctggaaatctaagaatatcctctttgtcatcacaaaactggacgtctacaagagccctgcttcggatgcctacatagtttttggggaagccaagatccaagatttatctcagcaagcacaactagcagctgcggagaaattcagagttcaaggtgaagctgtcggaaacattcaagaaaacacacagactccaactgtacaagaggagagtgaagaggaagaggtcgatgaaacaggtgtagaagttaaagacgtgaaattggtcatgtcacaagcaaatgtgtcgagagcaaaggcagtccgagctctgaagaacaacagtaatgatattgtaaatgcgattatggaattaacagtgtaaccatctgaaa

SEQ ID NO: 20363 - DNA, 710 bp, Homo sapiens
  MAP TO Z98050.1; EXPRESSED IN LUNG, SIGNAL = 3.5; EXPRESSED IN ADULT LIVER, SIGNAL = 3.2; EXPRESSED IN PLACENTA, SIGNAL = 4.6; EXPRESSED IN HEART, SIGNAL = 2.9; EXPRESSED IN BRAIN, SIGNAL = 3.3; EXPRESSED IN BONE MARROW, SIGNAL = 3.5; EXPRESSED IN FETAL LIVER, SIGNAL = 3.3; SWISSPROT HIT: P15822, EVALUE 1.00e-127; NT HIT: gi14783193, EVALUE 0.00e+00; EST_HUMAN HIT: AW378480.1, EVALUE 0.00e+00
agcccatcatctgtaagacttcctcctgctgcagctgagcacagcccccagacagcagcggggatgccttctgtggcctcaccacatcctgaccctcaagaacagaagcagcaaataactctacagccgactccaggcttgccttctccccacactcatttgtttagccaccttcctttgcattcccagcagcaatcgaggacaccttataatatggttccagttggggggatccatgtggtacctgctggcctcacatactccacgtttgtgccccttcaggctggaccagtgcagctcacgatccctgctgtcagtgtcgttcacagaactttgggtactcataggaatacggtcacagaagtgtctggcactacaaaccctgctggagtggctgaattaagcagtgttgtgccatgtattcctatcggccaaatccgcgtgccaggccttcagaacctaagtaccccaggcttgcagtcactcccctcgttaagcatggaaaccgtcaatattgtaggcctagccaatacaaatatggccccacaagtccatccaccaggactggctctgaatgctgtcggactgcaggttctgactgcaaacccttcatcacaaagcagccccgcccctcaggcacacattccaggtctccagatcttgaacatagcattgcccaccttaatcccctcagtcagtcaagtagccgt

SEQ ID NO: 20364 - DNA, 471 bp, Homo sapiens
  MAP TO AC006256.1; EXPRESSED IN PLACENTA, SIGNAL = 5.3; EXPRESSED IN BRAIN, SIGNAL = 4.7; EXPRESSED IN HELA, SIGNAL =   9; EXPRESSED IN ADULT LIVER, SIGNAL = 4.6; EXPRESSED IN FETAL LIVER, SIGNAL = 6.3; EXPRESSED IN LUNG, SIGNAL = 4.8; EXPRESSED IN HEART, SIGNAL = 4.9; NT HIT: D10083.1, EVALUE 1.00e-126; EST_HUMAN HIT: BI861466.1, EVALUE 1.00e-115; SWISSPROT HIT: P10272, EVALUE 2.00e-04
gctggccatcatgtctccgtgcagcggctgctgccgccttaataattttagaggccccaaaattacaaactatgctcaactcactctctacagctctcataacttccaaaatctattttcttcctcacacctgaggcatatacggtctgcttcctggctccttcagctgtactcactctttgttgagtctcccacaattactattgttcctggcccagacttcaatccggcctcccacattattccggataccacacctgaccctcatgaccacatctctctgatccacctgacattcacccgatttccccatatttgcttcttccctggtcctcacactgatcacactgagtttactgatggcagttccaactttcctacacatcaagctcaaggatttgcacctgcccaggactggcaaattgactttactcacatgccccaagtcagaaaacaaaaatacctcttagt

SEQ ID NO: 20365 - DNA, 645 bp, Homo sapiens
  MAP TO AC008403.3; EXPRESSED IN ADULT LIVER, SIGNAL = 1.9; EXPRESSED IN LUNG, SIGNAL = 1.5; EXPRESSED IN FETAL LIVER, SIGNAL = 1.3; EST_HUMAN HIT: BF172387.1, EVALUE 3.00e-96; NT HIT: AF181988.1, EVALUE 0.00e+00; SWISSPROT HIT: P52186, EVALUE 5.00e-76
ctacatctcccacaatcccccagggctcacggaagtccccgcctctcctcccgggcgcacctgcagcagctgggcacgcacgtgggcctcgaccaggtggctgcggcgcaggttgccgacgcgccacatgaggcagaggcggtggtcgcgcagcgccacgacggcgttctcgctgaagaccagcgtctcgttgcgcttcttgggtttggccatcttggccatgacagcacccacgacgaaggcgtcgagcacgcagccggcaatgcactgcagcaccacggcggccacagcggccgggcactcctcggtgacgctgcgcacgccgtagccgatggacgtctgcgtctccagcgcgaagaggaaggcggccaggaagctggccacgtgtgagaagcagggcgcgggcggtggcggggcggccaggtcgccgtgcagcgaggcaatgagccagaaggccaggccgaagagcagccaggaggcgaggaaggagcaggagaagagcaggcacatccagcgccagcgcacgtccacgcatgtggtgaacaggtcgctcaggtagcgcgcgccctggccacccaggtttacgaaacgcacgttgcagtgcccgtctttcttgacgaagcgaccgcggcgccggcccacggg

SEQ ID NO: 20366 - DNA, 592 bp, Homo sapiens
  MAP TO AP000346.1; EXPRESSED IN LUNG, SIGNAL = 2.6; EXPRESSED IN HELA, SIGNAL = 5.2; EXPRESSED IN ADULT LIVER, SIGNAL = 1.9; EXPRESSED IN BRAIN, SIGNAL =   3; EXPRESSED IN PLACENTA, SIGNAL = 2.4; EXPRESSED IN HEART, SIGNAL = 1.9; EXPRESSED IN BONE MARROW, SIGNAL =   3; EST_HUMAN HIT: BF679096.1, EVALUE 1.00e-130; NT HIT: Z21852.1, EVALUE 9.00e-74
gccctctccccactattaccctattgtcctgccacatccccctctccgagatggtagagataatgatcaataaatactgagggaactcagagaccggtgcggcgcgggtcctccatatgctgagcgccggtcccctgggcccacttttctttctctatactttgtctctgttgtctttcttttctcaagtctctcgttccacctgaggagaaatgcccacagctgtggaggcgcaggccactccatctggtgcccaacgtggatgcttttctctagggtgaagggactctcgagtgtggtcattgaggacaagtcaacgagagattcccgagtacgtctacagtgagccttgtggtaagcttgggcgcttggaagaagccagggttaatggggcaaactaaaagtaaagtctctcattccacctgatgagaaacacccagaggtgtggaggggcaggccaccccttcagggtagggtcccctccatgcagaccatagagcacaggtgtgccccaaagaggagcagagagaaggagggagagggcccacgagagacttggaaatgaatggcaggattttaggcgctggacttg

SEQ ID NO: 20367 - DNA, 1727 bp, Homo sapiens
  MAP TO AC021090.5; EXPRESSED IN HEART, SIGNAL = 1.9; EXPRESSED IN FETAL LIVER, SIGNAL = 1.9; EXPRESSED IN HELA, SIGNAL = 4.1; EXPRESSED IN ADULT LIVER, SIGNAL = 1.7; EXPRESSED IN BONE MARROW, SIGNAL = 1.9; SWISSPROT HIT: Q05481, EVALUE 0.00e+00; EST_HUMAN HIT: BG617080.1, EVALUE 0.00e+00; NT HIT: gi4758513, EVALUE 0.00e+00
tcatacttgtaagatttctctccaatgagttatcttatctgtggtgaggtgcgaggaccgattaaaggctttgccaaatttttcccatttgtagggttgctctccagtatgaattctcttatgtttagttagggttgaggaccagaaaaatgctttgccacattcttcacatttgtagggttttactccagtatgaattaccttatgtttagtaaaagttgaagaccggttaaaagatttgccacattcttcacatttatagggtttctctccagtatgaattctcttatggttagtaaggattgaagactgcttaaaggctttgccacatttttcacatttgtagggtttctcttcagtatgaattatcttatgtttagtaagagttgaggaccagttaaaggctttgccacattcttcacatttgtagggtttctctccagtatgaattatcttatgtgtagtaagggttgaggattggctaaaagatttgccacattcttcacatttgtagggtttctctccagtgtgcatcctcttatgtctagttagggttgaggaccatataaatgccttgccacattcttcacatttgtagggtttctctctagcatgaattctcttatgtttagtaagggttgaggaccagataaatgctttgccacattcttcacacttgtaaggtttctctccagtatgaattatcttatgtgtagtaagatttgaagatcgattaaaacctttgccgcattcttcacatttgtagagtttctctccaacatgaattattttatgtgtagtaagagttgagagttgcttaaaagctttgccacattctaagcatttgtagcgtttctctccagtatgaattatcttatgtgtagtaagggttgaggactggctaaaagctttgccacattcttcacatttgtagggtttctctccagtgtgcatcctcttatgtctagttagtgttgaggaccatataaatgctttgccacattcttcacacttgtagggtttctttctagtatgaattttcttatgctcagtaagggttgaggaccagataaatgctttgccacattcttcacacttgtaaggtttctctccagtatgaattatcttatgtgtagtaagatttgaggatcgattaaaagcttcaccacattcttcacatttgtagagtttctctccagcatgaattatttcatgtgtagtaagggttgagagttgcttaggagatttgttatattcttcacatttgtaaggtttctcttcagtataaattttcctatgattagtaagggttgaggaccaattaaaggtttttccacattctttacatttgtaggacttctctctatgataaatgcttttgtgttgggttttatgtgaaagcatgcaaaataatttgacacgttttttacatttgaaagatttcttttcagtatgtcttatcttaggtctgtttgaatttaaaaatttatagaagactttcaaatatttatcacattgaaatactttgctctgggcagttgtgaaacactggttaagtccattataaccttctttgttcaccttatactcatccacacttttacagccttttcttaactgtaaattctcatgtccatattttccatatcttctcagtattgctttttgaaaagaatcttccatgccctgctctggccaaaggtcttgagcaaaatgaggacacatac

SEQ ID NO: 20368 - DNA, 462 bp, Homo sapiens
  MAP TO AC006477.2; EXPRESSED IN FETAL LIVER, SIGNAL =  11; EXPRESSED IN LUNG, SIGNAL = 9.3; EXPRESSED IN PLACENTA, SIGNAL =  15; EXPRESSED IN HELA, SIGNAL =  22; EXPRESSED IN ADULT LIVER, SIGNAL = 9.7; SWISSPROT HIT: P32429, EVALUE 2.00e-52; EST_HUMAN HIT: BF974407.1, EVALUE 0.00e+00; NT HIT: gi4506660, EVALUE 0.00e+00
gggaagaagttggctctggcccctgcttttgtgaagaagcaggaggccaagaaagtggtgaatcccctgtttgagaaaaggcctaagaattttggcattggacaggacatccagcccaaaagagacctcacctgctttgtgaaatggccccgctatatcaggttgcaatggcagagatccatactctataagcagctgaaagtgcctcctgcgattaaccagttcacccaggccctggaaggccaaacagctactcagctgcttaagctggcccacaaatacagaccagagacaaagcaagagaagaagcggaggctgttggcccaggcagagttgtgggcaaaggggacctccccattaagagaccacctgtctttcgagcaggagttaacaccatcaccacctttgtggataacaagaaagctctgctggtggtgactgcacacgacatggatcccattg

SEQ ID NO: 20369 - DNA, 1185 bp, Homo sapiens
  MAP TO AC022216.3; EXPRESSED IN HELA, SIGNAL = 1.3; EXPRESSED IN ADULT LIVER, SIGNAL = 1.2; EXPRESSED IN LUNG, SIGNAL = 1.5; EXPRESSED IN BONE MARROW, SIGNAL = 0.96; SWISSPROT HIT: P36894, EVALUE 0.00e+00; NT HIT: gi13642387, EVALUE 0.00e+00; EST_HUMAN HIT: AU124197.1, EVALUE 0.00e+00
atgccccctgttgtcataggtccgttttttgatggcagcattcgatggctggttttgctcatttctatggctgtctgcataattgctatgatcatcttctccagctgcttttgttacaaacattattgcaagagcatctcaagcagacgtcgttacaatcgtgatttggaacaggatgaagcatttattccagttggaaaatcactaaaagaccttattgaccagtcacaaagttctggtagtgggtctggactacctttattggttcagcgaactattgccaaacagattcagatggtccggcaagttggtaaaggccgatatggagaagtacggatgggcaaatggcatggcgaaagagtggcggtgaaagtattctttaccactgaagaagccagctggtttcgagaaacagaaatctaccaaactgtgctaatgcgccatgaaaacatacttggtttcatagcggcagatattaaaggtacaggttcctggactcagctctatttgattactgattaccatgaaaatggatctctctatgacttcctgaaatgtgctacgctggacaccagagccctgcttaaattggcttattcagctgcctgtggtctgtgccacctgcacacagaaacgtatggcacccaaggaaagcccgcaattgctcatcgagacctaaagagcaaaaacatcctcatcaagaaaaatgggagttgctgcattgctgacctgggccttgctgttaaattcaacagtgacacaaatgaagttgatgtgcccttgaataccagggtgggcaccaaacgctacctggctccagaagtgctggacgaaagcctgaacaaaaaccacttccagccctacatcatggctgatatctacagcttcggcctaatcatttgggagatggctcgtcgttgtatcacaggagggatcgtggaagactaccaattgccatattataacatggtaccgagtgatccgtcatacgaagatatgcgtgaggttgtgtgtgtcaaacgtttgcggccaattgtgtctaatcggtggaacagtgatgaatgtctacgagcagttttgaagctaatgtcagaatgctgggcccacaatccagcccccagactcacagcgttgagaattaagaagacgcttgccaagatggttgaatcccaagatgtaaaaatc

SEQ ID NO: 20370 - DNA, 817 bp, Homo sapiens
  MAP TO AC007029.2; EXPRESSED IN ADULT LIVER, SIGNAL = 1.3; EXPRESSED IN BRAIN, SIGNAL = 1.3; EXPRESSED IN HELA, SIGNAL = 1.4; EXPRESSED IN HEART, SIGNAL = 1.4; EXPRESSED IN FETAL LIVER, SIGNAL =   1; NT HIT: gi7662303, EVALUE 0.00e+00; EST_HUMAN HIT: BG106743.1, EVALUE 0.00e+00; SWISSPROT HIT: O75690, EVALUE 3.80e+00
tctacctcattactcttgctttgagatagggtcaggctatcattggtcagttcctcatcatcagcactgtttctgctaagaactttactcttcttcttcttgcaacccccttcactggcagggctactatgatcttcatcattgccttcatcattctcgtcttcatcactcccgcttccctcatcttcatcatcctcattgtctccatcacttccctctttctgagacgcagatctcccttttctctttactacagtaggtcgccaatcattgtcatcctcactgtcatagtcatccatgtcattcagctcttccatggacacaaaatccagaagtggtcggtttcgtcgaaggttccatttttttggctcgctgacttgttcctctgtagcggttgtcgtagtgggaacagaaggggatgtgttaacagcaggaggacttgtggctggtgtggtggcagcagcagaagcagccacattctcagatactgttgctttttctttttccttctctctttccttctctttctccttttccttttctttttccttctctttctcctttttctttctaggtctttctccattttcttcttcttccttcttttccattttaattaattgtttttctgatgatagtacttcttcctctgcagaatttttaagttgttcttcttttactttaatatcttcattcagttcttcttctaaaatattttcttcagaatcactacaggaaccttctccactgtcctttgaagcatcttcacttccattaccactcccttcagaatctgttgaaaatatgagaaaaaaaa

SEQ ID NO: 20371 - DNA, 1215 bp, Homo sapiens
  MAP TO AC003005.1; EXPRESSED IN HELA, SIGNAL = 3.9; EXPRESSED IN FETAL LIVER, SIGNAL = 2.8; EXPRESSED IN LUNG, SIGNAL = 2.6; EXPRESSED IN HEART, SIGNAL = 3.3; EXPRESSED IN PLACENTA, SIGNAL = 4.2; EXPRESSED IN ADULT LIVER, SIGNAL = 2.5; EXPRESSED IN BRAIN, SIGNAL = 2.6; NT HIT: U09412.1, EVALUE 2.00e-82; EST_HUMAN HIT: BG717450.1, EVALUE 0.00e+00; SWISSPROT HIT: P52741, EVALUE 1.00e-114
ctatgcttggagcttctctctgatgtcagttattatgttgaacaaggaaacggaattatctcccatcctaaggcctttctccagtgtgaattttccagtggcggatgagggaagccctctgcctgaaggccttcccacattcactgcacttatatggcctttctccagtgtgaattctatgatgctgaacaagtacatgtttgtggctaaaggcttttccacattcactgcacacataaggcttttcaccattatgaactctttgatgtgcaataaggtcagagctttggctaaagaacttcccacatgcgatgcactcataaggccttgctccagtatgaacactccaatgtttaatgagtctgtatttgtgaccaaagtattttccacattcgctgcactcatatggcctttctccagtatggatactctcatgctgaacaagtgtagatttgtgactataggctttcccacattcactgcacttgtaaggccttgctccagtgtgtactctttgatgtacaataaggttagagctatgattaaaaactttcccacatatgccacactcataaggcatttctccagtgtggattctctggtgctgagcaagtatgggtttgcggctaaaggttttcccacattcaccgcactcataaggcctttctccagtgtggactctctggtgttgaacaagtgagtctttgcggctgaaggttttcccacattcactgcatttgtaatgcctttttccacagtgagaggcctcctcacacttggtgttgctgtgtggcttccactcattgtgaggggcatggtgctcgaaaatgcttgagctggctaggaagtccttacaagcctcccctgtcacaaaagacatctccattgattgcacagcacagttgttcagaagaaagggcctgctcttatcacttctaaagggtttctctccactgtgctgcttctggtgctggtgaaggtttgcactgaagcagaactgtttcccacacagcacacacatgtatggtttctgccctgggtgtgtttcctggtgctcagccaagtgcaaaatgtcttttaagaccaggccacatgtcccacaggggtaagccttctgagtagaaggacctcccttgggaatcctgatctgtgacattcctatagaaaagctctgctcaaaaggtatctcttcatcctccattccatgccaacaac

SEQ ID NO: 20372 - DNA, 667 bp, Homo sapiens
  MAP TO AC005768.15; EXPRESSED IN HEART, SIGNAL = 1.3; EXPRESSED IN FETAL LIVER, SIGNAL = 1.4; EXPRESSED IN LUNG, SIGNAL = 1.2; EXPRESSED IN ADULT LIVER, SIGNAL = 1.2; EXPRESSED IN HELA, SIGNAL = 1.6; EXPRESSED IN BONE MARROW, SIGNAL = 1.3; SWISSPROT HIT: Q85437, EVALUE 2.30e+00; EST_HUMAN HIT: AI949513.1, EVALUE 9.40e-01; NT HIT: M58833.1, EVALUE 1.00e-02
aagttctattaatagtcacagatatgccagagattttcacttttgccggtctaccaggcttcctacttattgccaaaggcttctgatttggtcgaataatgttcttggaaggctgaggtatcacagatttgttcttgatgggtctcacatattcaaagccagaccccaagatctcactttcagtagtcaagcttgctacagcacttattctttcacccaagtcaattttgtcttcactaatatttctgggactattatattcagttggaaaatcaccagcattattgtttaaagacataaggttgcttatgtttacccttccttcagaaacatgccttttagttcttcttgaccttccgtaaataacagttactgtaatactctttttataaataccttcttttacttctgatatgagacattctgggcttttccttccagcactaaagggctcattctggcaaacagtgatgtttgtttgatcaattttaggctttggtggtcttccaattggtcgcttaatctgtttcacaacttggggacctattttttttggtctacctggttttcttttaaaagatggatcagtagcactgcttgaattgtccttaggttcttcttgtggcttatcactatttatatcacctataaacattgtagaggatcc

SEQ ID NO: 20373 - DNA, 648 bp, Homo sapiens
  MAP TO AC003112.1; EXPRESSED IN ADULT LIVER, SIGNAL = 1.8; EXPRESSED IN HELA, SIGNAL = 2.7; EXPRESSED IN LUNG, SIGNAL = 1.7; EXPRESSED IN HEART, SIGNAL = 1.8; EXPRESSED IN BONE MARROW, SIGNAL = 1.9; EXPRESSED IN BRAIN, SIGNAL = 1.9; SWISSPROT HIT: P03360, EVALUE 5.00e-25; EST_HUMAN HIT: BF992535.1, EVALUE 2.00e-05; NT HIT: Z78766.1, EVALUE 8.00e-22
atgaaattattacaggcagtgcagaaacccaaggaagtggtagtggccttgcactgcaaaggccatcagaaaggcaaaggaaaggaggcaaaaggaaatcgctgcacagacgctgaggccaaagttgccgcaagacgggacctcccattagaaacacctatggagggacccttggtatgggataacccccttcaggagaccaggccccagtattcccctgcagaaatggaatggggactttcatggggacatagttttctcccctcggggtggctagctactcaggagggaaaggtgcccatacccgcagctaatcaatggaaaatacttaaaaccgttcaccaaacattccataggggtattgagaatacccatcaaatggtcaaatctctgttcactggacgagacctccttaaaaccatccggcagacagtcaaggcctgcgaagtgtgccaaaggaataaccccttggtccattgccaagcccctcatggagaacaaaggacagggcactaccctggagaggactggcagttagatttcacttatatgcctaagtcacggggacttcaatacttactagcctgtgttgataccttcacgaattgggttgaagccttcccctgtaagacagaaaaggcccaggag

SEQ ID NO: 20374 - DNA, 758 bp, Homo sapiens
  MAP TO AC000029.17; EXPRESSED IN LUNG, SIGNAL =   2; EXPRESSED IN FETAL LIVER, SIGNAL = 1.6; EXPRESSED IN PLACENTA, SIGNAL = 2.3; EXPRESSED IN ADULT LIVER, SIGNAL = 1.9; EXPRESSED IN HELA, SIGNAL = 0.36; SWISSPROT HIT: P19086, EVALUE 1.00e-123; EST_HUMAN HIT: BI914398.1, EVALUE 0.00e+00; NT HIT: D90150.1, EVALUE 0.00e+00
ccgtgctccttgtctgggcccgctgctgccagaccatgggatgtcggcaaagctcagaggaaaaagaagcagcccggcggtcccggagaattgaccgccacctgcgctcagagagccagcggcaacgccgcgaaatcaagctgctcctgctgggcaccagcaactcaggcaagagcaccatcgtcaaacagatgaagatcatccacagcggcggcttcaacctggaggcctgcaaggagtacaagcccctcatcatctacaatgccatcgactcgctgacccgcatcatccgggccctggccgccctcaggatcgacttccacaaccccgaccgcgcctacgacgctgtgcagctctttgcgctgacgggccccgctgagagcaagggcgagatcacacccgagctgctgggtgtcatgcgacggctctgggccgacccaggggcacaggcctgcttcagccgctccagcgagtaccacctggaggacaacgcggcctactacctgaacgacctggagcgcatcgccgcagctgactatatccccactgtcgaggacatcctgcgctcccgggacatgaccacgggcattgtggagaacaagttcaccttcaaggagctcaccttcaagatggtggacgtgggggggcagaggtcagagcgcaaaaagtggatccactgcttcgagggcgtcacagccatcatcttctgtgtggagctcagcggctacgacctgaaactctacgaggataaccagaca

SEQ ID NO: 20375 - DNA, 544 bp, Homo sapiens
  MAP TO AP001687.1; EXPRESSED IN PLACENTA, SIGNAL = 3.7; EXPRESSED IN ADULT LIVER, SIGNAL = 2.3; EXPRESSED IN BRAIN, SIGNAL = 4.3; EXPRESSED IN BONE MARROW, SIGNAL = 5.3; EXPRESSED IN LUNG, SIGNAL = 2.8; SWISSPROT HIT: P02551, EVALUE 3.00e-71; NT HIT: AF081484.1, EVALUE 0.00e+00; EST_HUMAN HIT: AL539946.1, EVALUE 0.00e+00
ctcagcaatggctgtgatgttgctcagtatgcacacagctctctgtcctttggctgggtctccaacaggtaccacagtgggaagttggtaactaatgccaaccttgaagctagagggacagcaatccacaaactggatgctgcatttgtttttgatggtgtcagtggcagcactgaagtctttgggaaccacgtcaccagggtacaataggctgcaagttatgtatttaccatggtgtggatcacatcttaccatctggttggctggctcaaaataagcattggtgatctctactacagaaaaccgttcatggtaggctttttcagcagagatgacaggggcacacatggccagagggaagtggatgtgggtatatggcactagattggtctggaattctgtcagatcaatattcagggctccatcaaatctgagggaagcagtgatagaggacacaatatggccaatgagatggttaaggttagtgtagtttggacactcaatattgagctttccaaaagtcatccaaatcacttttggaaaa

SEQ ID NO: 20376 - DNA, 559 bp, Homo sapiens
  MAP TO AC006205.7; EXPRESSED IN ADULT LIVER, SIGNAL = 1.2; EXPRESSED IN BRAIN, SIGNAL = 0.89; EXPRESSED IN HELA, SIGNAL = 0.53; EXPRESSED IN LUNG, SIGNAL = 1.2; EXPRESSED IN HEART, SIGNAL = 1.6; EXPRESSED IN BONE MARROW, SIGNAL = 1.3; EST_HUMAN HIT: AI695127.1, EVALUE 0.00e+00; SWISSPROT HIT: P48998, EVALUE 2.70e-01; NT HIT: AL163301.2, EVALUE 3.40e-02
ggaggaccagccacattccagtgcagcagccagagaagaggaagcaaaaacccagccctgagcccagccaagattcacctcattccgacaagtggcctcctgggcaccctgtgaagaacctgcctcagatgagggggcccaggcccaggcccgctggtgacagccccaggaagactcagtggctgaaccaggtggagtcgtacatcgcagagcagagacggggtgacaggatgcggcctcaggcccctggaaggggctggcatggggaggaggaagtggtggcggccgcaggccaggaaggacaagtggagggagaggaagagggggaagaagaggaggaggaagaggatatgagtgaggtgttcgagtacgtacctgtgtttgacccggtagtaaactgggaccagaccttcagtgcccggaatctcgacttccaagccctgaggactgactggatcgatctgagctgtaacacatctggcaacctgctgcttccagagcaggaagctctggaggtcacgcgagtcttcttgaagaagctcaaccagaggagccgggg

SEQ ID NO: 20377 - DNA, 615 bp, Homo sapiens
  MAP TO AC006445.10; EXPRESSED IN BRAIN, SIGNAL = 1.6; EXPRESSED IN HELA, SIGNAL = 2.8; EXPRESSED IN ADULT LIVER, SIGNAL = 1.3; EXPRESSED IN LUNG, SIGNAL = 1.5; EXPRESSED IN FETAL LIVER, SIGNAL = 1.4; NT HIT: M95520.1, EVALUE 2.00e-03; EST_HUMAN HIT: AI799027.1, EVALUE 0.00e+00; SWISSPROT HIT: P27476, EVALUE 1.60e-02
gtgttcctactcctgggcccagtgctaatgtagccaatgatgccatgtcgatattggaaaccataacttctcttaaccaagaagccagtgctgctagggcttcaacagaaacatcaaatgccaagaccagtgagagagcgtcaaaaaaacttccatctcagccaaccactgatactagtactgacaaagaaagaacttcagaggacatggctgataaagaaaaatctacagctgactctggaggtgaaggactggaaacagccccaaagtctgaagagttcagcgacctcccctgtccagtcgaagaaattaaaaattacacaaaagagcataataatttaattctgctaaataaggatgttcaacaggaaagcagtgagcaaaaaaataaatcaacagacaaaggtgaaaagaagccagacagcaatgagaaaggagaaagaaagaaagaaaagaaggaaaagactgaaaagaaatttgatcactcaaaaaagagtgaagatacacagaaagttaaagatgaaaaacaagcaaaggaaaaagaagtagagagtttaaaacttccttcagaaaagaacagtaataaagctaaaactgttgaagggacaaaagaag

SEQ ID NO: 20378 - DNA, 546 bp, Homo sapiens
  MAP TO AC003006.1; EXPRESSED IN ADULT LIVER, SIGNAL = 2.1; EXPRESSED IN BRAIN, SIGNAL = 2.3; EXPRESSED IN PLACENTA, SIGNAL =   3; EXPRESSED IN HELA, SIGNAL = 2.4; EXPRESSED IN BONE MARROW, SIGNAL = 2.6; EXPRESSED IN FETAL LIVER, SIGNAL = 2.1; EXPRESSED IN LUNG, SIGNAL = 2.1; EXPRESSED IN HEART, SIGNAL =   2; NT HIT: gi14755455, EVALUE 3.00e-70; EST_HUMAN HIT: BE790712.1, EVALUE 7.00e-35; SWISSPROT HIT: Q9Y2P7, EVALUE 5.00e-70
ggatccactgtgaactttctggtgttttatgagactggaatgatatgtaaaaaacttcccacattcactgcactcataaggcctctccccagtgtgaactccccgatgttgaaggagtgcagacctttggctaaaggatttcccacattcactgcactcatatggcctttccccagtgtgaactctccgatgtttaatgaggttagacttgttgctaaataattttccacattcatcacattcatgaggtcgtactgcagtgtgaactctccggtgctgaatgagactagagctttgcctaaaggacttcccacactctcgacattcataaggcttttctccagtgtgaagtctccaatggtcattgagactgtagcttttgctaaaggatttcccacattcactgcatatgtaacatctttctgtagtgagggttctctgctgctgaacaagtgtgtgtttaccgctgaatgcttttgtgtgttctccacagttgtaatgagtttttcctctgtgactgatggccccaccgtcgcttttgctatt

SEQ ID NO: 20379 - DNA, 627 bp, Homo sapiens
  MAP TO AL136295.2; EXPRESSED IN PLACENTA, SIGNAL = 2.6; EXPRESSED IN ADULT LIVER, SIGNAL = 2.1; EXPRESSED IN BRAIN, SIGNAL = 1.6; EXPRESSED IN HELA, SIGNAL = 1.8; EXPRESSED IN BONE MARROW, SIGNAL = 2.1; EXPRESSED IN LUNG, SIGNAL = 2.2; EXPRESSED IN HEART, SIGNAL = 2.1; NT HIT: gi14750854, EVALUE 0.00e+00; EST_HUMAN HIT: BI823379.1, EVALUE 0.00e+00; SWISSPROT HIT: O15321, EVALUE 1.00e-104
gtggagcagctgcgccaggccattgaagaactgtactactttgaatttgtggtagatgacttgccaatccggggctttgtgggctacatggaggagagtggtttcctgccacacagccacaagataggactctggacccatttggacttccacctagaattccatggagaccgaattatatttgccaatgtttcagtgcgggacgtcaagccccacagcttggatgggttacgacctgacgagttcctaggccttacccacacttatagcgtgcgctggtctgagacttcagtggagcgtcggagtgacaggcgccgtggtgacgatggtggtttctttcctcgaacactggaaatccattggttgtccatcatcaactccatggtgcttgtgtttttactggtgggttttgtggctgtcattctaatgcgtgtgcttcggaatgacctggctcggtacaacttagatgaggagaccacctctgcaggttctggtgatgactttgaccagggtgacaatggctggaaaattatccatacagatgtcttccgcttccccccataccgtggtctgctctgtgctgtgcttggcgtgggtgcccagttcctggcccttggcactggtgag

SEQ ID NO: 20380 - DNA, 579 bp, Homo sapiens
  MAP TO AC004172.1; EXPRESSED IN FETAL LIVER, SIGNAL = 2.1; EXPRESSED IN BRAIN, SIGNAL = 2.4; EXPRESSED IN ADULT LIVER, SIGNAL = 2.4; EXPRESSED IN HELA, SIGNAL = 7.5; EXPRESSED IN LUNG, SIGNAL = 2.4; EXPRESSED IN HEART, SIGNAL =   2; SWISSPROT HIT: P32429, EVALUE 4.00e-60; NT HIT: AF055066.1, EVALUE 0.00e+00; EST_HUMAN HIT: BG706500.1, EVALUE 0.00e+00
atgccaaaaggaaagaaggccaaggagaagaaggtggctccagcccctgctgtcgtgaagaagcaggaggccaagaaagtggtaaatcccttgtttgagaaaaggcctaagaattttggcactggacaggatatccagcccaaaagagacctcacccactttgtgaaatggccctgctatatcaggttgcagcagcagagaaccatcctctataagtggctgaaagtgcctcctgagattaaccagttcacccaggcaccagacagccaaacagctactctgctgcttaagctggcccacaatacagaccagagacaaaccaagagaagaagcagaggctgttggcccgggccaagaagaaagctgctggcaaaggggacattccccactaagagtccacctgtccttcgagcaggagttaacaccatcaccaccttggtggagaacaagaaagctcagctggtggtgatagcacatgatgtagatcccatcaagctggttgtcttcttgcctgtcctgtgtcataaaatggggtcccttactgcattatcaaagggaaggcaagactgggacatctag

SEQ ID NO: 20381 - DNA, 456 bp, Homo sapiens
  MAP TO AL163636.2; EXPRESSED IN ADULT LIVER, SIGNAL = 1.6; EXPRESSED IN HELA, SIGNAL = 0.73; SWISSPROT HIT: P34096, EVALUE 8.00e-77; NT HIT: gi13649656, EVALUE 0.00e+00; EST_HUMAN HIT: BG616902.1, EVALUE 0.00e+00
gcacctctaagatactgatggctctgcagaggacccattcattgcttctgcttttgctgctgaccctgctggggctggggctggtccagccctcctatggccaggatggcatgtaccagcgattcctgcggcaacacgtgcaccctgaggagacaggtggcagtgatcgctactgcaacttgatgatgcaaagacggaagatgactttgtatcactgcaagcgcttcaacaccttcatccatgaagatatctggaacattcgtagtatctgcagcaccaccaatatccaatgcaagaacggcaagatgaactgccatgagggtgtagtgaaggtcacagattgcagggacacaggaagttccagggcacccaactgcagatatcgggccatagcgagcactagacgtgttgtcattgcctgtgagggtaacccacaggtgcctgtgcactttgacg

SEQ ID NO: 20382 - DNA, 564 bp, Homo sapiens
  MAP TO AL163202.2; EXPRESSED IN PLACENTA, SIGNAL = 3.1; EXPRESSED IN BONE MARROW, SIGNAL = 2.5; EXPRESSED IN LUNG, SIGNAL = 1.7; EXPRESSED IN HEART, SIGNAL = 1.9; EXPRESSED IN BRAIN, SIGNAL = 2.4; EXPRESSED IN ADULT LIVER, SIGNAL = 1.7; EXPRESSED IN HELA, SIGNAL = 2.5; SWISSPROT HIT: P17038, EVALUE 4.00e-77; NT HIT: AL163202.2, EVALUE 0.00e+00; EST_HUMAN HIT: BF817669.1, EVALUE 0.00e+00
cacattcttcacatttgtagggtttctcttcagtatgaattctcttttgaatagtaagccccaaagactgcttacaagctttgccacattcttcacatttgcagggtttctctcccgtatgaattctcttgtgtatagtaaggtttgaagaccacttaaaagctttgccacattcttgatatttgtagggtttctctcccctatgaattatcatatgtttagtaaagcttaaaacccaataaaaggctttatcacattcttcgaatttgtaagggttctctccagtatgaattctcttatgtagagtaaggcctgaagggtgcttaaaagctttgccacattcttcacatttgtagaatttctctccagtatgagctctcatatgttcattcagttttgaagattgcttaaaggctttgccacattcttcacatttgtagggtttctctccactatgaattctctgatgtatagtaaggttcgaagaccacttaaaaattttgccacaatctttacatttgtagggtttgtctccagtatgaactatgttatgttgagtaaggc

SEQ ID NO: 20383 - DNA, 1055 bp, Homo sapiens
  MAP TO L39891.1; EXPRESSED IN ADULT LIVER, SIGNAL = 2.2; EXPRESSED IN PLACENTA, SIGNAL = 4.4; EXPRESSED IN BRAIN, SIGNAL =  11; EXPRESSED IN HEART, SIGNAL = 4.4; EXPRESSED IN BONE MARROW, SIGNAL = 2.6; EXPRESSED IN LUNG, SIGNAL = 3.9; EST_HUMAN HIT: AI124816.1, EVALUE 5.00e-93; SWISSPROT HIT: P98161, EVALUE 1.00e-100; NT HIT: L39891.1, EVALUE 0.00e+00
aaacctgagtgggaacccgtttgagtgtgactgtggcctggcgtggctgccgcgatgggcggaggagcagcaggtgcgggtggtgcagcccgaggcagccacgtgtgctgggcctggctccctggctggccagcctctgcttggcatccccttgctggacagtggctgtggtgagtgccggtgggtggggccagctctgtccttcccagccaggtgggacctgggccctgcagacactgggcagggctcaggaaggcctctctggggggggcctccgggccaagggaacagcatgggagcctgtgagtgcggcgggcggatgtgggggcgtggggtggagccaggaggagcagaacccggggtccagtggctgcctcttctaggtgaggagtatgtcgcctgcctccctgacaacagctcaggcaccgtggcagcagtgtccttttcagctgcccacgaaggcctgcttcagccagaggcctgcagcgccttctgcttctccaccggccagggcctcgcagccctctcggagcagggctggtgcctgtgtggggcggcccagccctccagtgcctcctttgcctgcctgtccctctgctccggccccccgccacctcctgcccccacctgtaggggccccaccctcctccagcacgtcttccctgcctccccaggggccaccctggtggggccccacggacctctggcctctggccagctagcagccttccacatcgctgccccgctccctgtcactgccacacgctgggacttcggagacggctccgccgaggtggatgccgctgggccggctgcctcgcatcgctatgtgctgcctgggcgctatcacgtgacggccgtgctggccctgggggccggctcagccctgctggggacagacgtgcaggtggaagcggcacctgccgccctggagctcgtgtgcccgtcctcggtgcagagtgacgagagcctcgacctcagcatccagaaccgcggtggttcaggcctggaggccgcctacagcatcgtggccctgggcgaggagccggcccgag

SEQ ID NO: 20384 - DNA, 1058 bp, Homo sapiens
  MAP TO AC010503.3; EXPRESSED IN HELA, SIGNAL = 8.1; EXPRESSED IN ADULT LIVER, SIGNAL = 1.9; EXPRESSED IN PLACENTA, SIGNAL =   2; EXPRESSED IN BRAIN, SIGNAL =  33; EXPRESSED IN HEART, SIGNAL = 4.1; EXPRESSED IN LUNG, SIGNAL = 2.2; NT HIT: gi16175554, EVALUE 0.00e+00; EST_HUMAN HIT: BG770689.1, EVALUE 0.00e+00; SWISSPROT HIT: P05217, EVALUE 0.00e+00
ctaggccacctcctcctccgcctcctcctcgaactcgccctcctcggccgtggcgtcctggtactgctggtactcagataccaggtcattcatgttgctctcggcctcggtgaactccatctcgtccatgccctcgcccgtgtaccagtgcaagaaggccttgcgccggaacatggccgtgaactgctcggagatgcgcttgaacagctcctggatggccgtgctgttgccgatgaaggtcgcggccatcttcaggccgcggggcgggatgtcgcacacggccgtcttcacgttgttggggatccactccacgaagtagctgctgttcttgctctgcacgctcagcatctgctcgtccacctccttcatggacatgcggccccggaacacggcggccacggtcaggtagcggccgtggcgcgggtcgcacgccgccatcatgttcttggcatcgaacatctgctgggtgagctcgggcaccgtcagggcccggtactgctggctgccccggctggtcaggggtgcgaagccgggcatgaagaagtgcaggcgaggaaagggaaccatgttgacggccagcttgcgcaggtcggcgttcagctggcccgggaagcgcaggcaggtggtgaccccgctcatggtggccgacaccaggtggttgaggtccccgtaggtgggggtggtcagcttgagggtgcggaaacagatgtcgtagagtgcctcgttgtcgatgcagtaggtctcatccgtattctccaccagctggtgcacagacagcgtggcgttgtagggctccaccaccgtgtctgacactttgggcgagggcaccacgctgaaggtgttcatgatgcggtctgggaactcctcgcggatcttactgatgagcagcgtgcccattccggaccccgtgccaccccccagcgagtgggtcagctggaagccctgaaggcagtcgcagctctcggcctccttccggactacgtccaggacagcgtccaccagctctgcgccctccgtgtagtgcccctttgcccagttgttgccggctccggattggc

SEQ ID NO: 20385 - DNA, 1796 bp, Homo sapiens
  MAP TO AL022345.2; EXPRESSED IN ADULT LIVER, SIGNAL = 3.6; EXPRESSED IN PLACENTA, SIGNAL = 3.7; EXPRESSED IN HELA, SIGNAL = 4.4; EXPRESSED IN BRAIN, SIGNAL = 3.7; EXPRESSED IN HEART, SIGNAL = 3.7; EXPRESSED IN BONE MARROW, SIGNAL = 3.7; NT HIT: gi15299300, EVALUE 0.00e+00; EST_HUMAN HIT: AL539492.1, EVALUE 0.00e+00; SWISSPROT HIT: Q06730, EVALUE 0.00e+00
tcattcataaggtttttctcctatgtgtgttctctgatgtacaatgagatttgacttttgagagaaggttttcctgcatgtgttacattcatagggcttttcccctgtatgtgatctctgatgtttagcaaggtctgatttacggtaaaagatttttccacattcattacactgacaagatttctctcctgtgtgagccctgtgatgtactgtgagtgatgatttgtgactgaaggatttcccacattcattgcattcatagggtttctcccccgtgtgctttctctcatgtaaaataagtcctgacttcacacagaaagattttccacattcgttacatttataaggcttttcttgtgtatgggttctctgatgtacaattagagctgacttatggcagaaagcttttccacactcattacattcatagggtttctcccctatgtgaattctctgatgctgagtgagttgtgacttctggcagaaggtttttccacattcattacattcatagggtttctcccctgtatgtgttctattatgttttgttaggtatgatttattgtaaaagatttttccacattcatgacattcatagggtttctcccccgtgtgtgttctataatgttgagagagggttgacttatggctaaagaatttcccacattcaggacatgcaaagggtttctcccctgtgtgcgttctctgatgtattgtgaggtctgacttcaagcagaaggttttcccacattcataacattcataaggtttcaaccctgtatgaattatctgatgcctggtgagtactgacttgtggtagaaagttttcccacatgcattacattcataaggtttatctcctatgtgagttctctgatgctgtgtaagatgtgacttttgacaaaaggatttcccacactcaagacattcaaaaggtttctcacctgtgtgagttctctggtgtactgtaaggtgtgaattcatacagaaggattttccacattcataacattcatagggtttctgccctgtgtgtgttctctgatgtttagtgaggtcagatttctggtaaaaagttttcccacatgcattacactgatagggtttctcccctgtatgtgttctctggtgtaatgtgagggctgacttatggctaaaggctttcccacattcattgcattcaaaaggtttctcccctgtgtgtgatctctgatgtttagtgaggtttgacttctcccagaaagtttttccacattgattacattgaaagtgtttctctcctgtgtgcaccctctgatgtcgagtgagatgtgacttctcccagaaagctttcccacattcattacattcaaagtgtttctctcctttatcacctttctgaagctgtgacagacacaatttcctcctgaaattattcccactttcaccacaatcatagtgtttcacaggtaccccatcatgtttagaaagggtggacttcacacataagaacttctcacaatcactaaattcatagtgactgtcctttgatggaggtatctgatggaacaagagggatgaactatcacagaaagttctcccaaattcattatagtcacagttattctcttctgcattctctctcttccgtgtattgaatactgccttttcaaggagggtttcctgacatatactgtattcaaaattgtggtctaaagtttgaatcttctcatgctgcaaagtgttctcacgatgactcagagtgttcctatttttcaaaacttcatttttctctcgagtatgagtttcatcatgct

SEQ ID NO: 20386 - DNA, 930 bp, Homo sapiens
  MAP TO AL121907.2; EXPRESSED IN ADULT LIVER, SIGNAL =   2; EXPRESSED IN BONE MARROW, SIGNAL = 1.9; EXPRESSED IN FETAL LIVER, SIGNAL = 1.3; EXPRESSED IN LUNG, SIGNAL = 1.9; NT HIT: gi14769949, EVALUE 0.00e+00; EST_HUMAN HIT: BF515946.1, EVALUE 0.00e+00; SWISSPROT HIT: P42694, EVALUE 2.00e-48
gacaagggctgtgctcaggggcagctcggctgggcacacagtaggtgctttagcggacagcactgaggcccccagcaagaagcccatgagctcctccccctcccgcagtgccgccgacatctacatccgggagtatttccacagccacgtcagcggcggccaccccgaggccactcctctccgtgtgatgtacacggaccggccgctgagccagacggacccagtcacgctgcagtactgttgcctgaccgacgaccgccaggctttccgcccgcccacacgggcagagctggcgcggcaccgcgtggtggtcaccaccacctcccaggcccgtgagctcagggtgccggtcggcttcttctcccacattctcatcgatgaggcggcccagatgctggagtgcgaggccctcaccccgctggcctatgcctcgcacggcacccgcctcgtgctggcgggcgaccacatgcaggtcacaccccggctgttcagtgtggccagggcccgggcggccgagcacacgctgctgcaccgcctcttcctgtgctaccagcaggagactcacgaggtggcgcggcagagccgcctggtcttccacgagaactaccgctgcacggacgccattgtcagcttcatctcgcggcacttctacgtggccaagggcaaccccatccacgccaggggcaaggttccgccccacccccggcactacccgctcatgttctgccacgtggcgggcagcccagaccgggacatgtccatggcgtcctggctgaatctggctgagattgcgcaggtcgtcgagaaggtgcaggaggcctacaacacctggcccagctgctggggcggccgcgagcagaggtgcatctgtgtcgtttcccacggtgcccaggtgagcccggccagcccgggacagcccccgaccgcacc

SEQ ID NO: 20387 - DNA, 1380 bp, Homo sapiens
  MAP TO AC008554.6; EXPRESSED IN ADULT LIVER, SIGNAL = 1.4; EXPRESSED IN PLACENTA, SIGNAL = 2.8; EXPRESSED IN HEART, SIGNAL = 1.2; EXPRESSED IN BONE MARROW, SIGNAL = 3.7; EXPRESSED IN LUNG, SIGNAL = 1.3; EXPRESSED IN BRAIN, SIGNAL = 3.8; EXPRESSED IN HELA, SIGNAL = 3.6; SWISSPROT HIT: P35789, EVALUE 0.00e+00; NT HIT: gi16163579, EVALUE 0.00e+00; EST_HUMAN HIT: AV704018.1, EVALUE 0.00e+00
gtttctctccagtatgaattaccttatgtgtagtaagggtagaggggcacttaaagcctttgccacattcttcacatttgtagggtttctctccagtatgaattctcttatgtctagtaaggataaaggagcgcttaaaagccttgccacatcgttcacatttgtagggtttctctccagtatgaattctcttatgtgcagtaaggtgtgaggacgagttgaaggctttgccacattcttcacatttgtagggtttctctccagtatgaattctcttatgtgtagtaaggatagagaagcacttaaaggccttgccacattcttcacacttgaagggttgctgtccagtatggattatcttatgtgtagtaagggaagaggagtacttaaaggcttcgccacattcttcacatttgtagggtttctctccagtatgaattctcttatgtgtagtaaggtgtgaggaccagttgaaggctttgccacattcttcacatttgtagggtttctctccactatgaattatcttgtgtgtagtaagggatgagaagtacttaaaggctctgccacattcttcacatttgtagggtttctctccagtatgaattcttttatgtgtagtaaggacagaggggtgcttaaaggctttgccacattcttcacatttgtagggtttctctccgctatgaattatcttatgcgcagtaaggatagaggagcgcttaaaggccttgccacattcttcacatttgtagggtttctctccagtatgaattatcttatgtgtagtaaggttagaggagcgcttaaaggccttgccacattcttcacatttgtagggtttctctccactatgaattatcttatgtgcagtaaggtatgaaaaccggctaaaggctttgccacagtcttcacatttgtaccgtttctctccagtatgaattctcttatgtgtagtaaggtgtgaggaccagttgaaggctttgccacattcttcacatttgaagggtttctccccagtatgaattttcttatgtgtagtaagggttgaagactggttaaaagctttgccacattctatacatttgaaaggtttttttccagtatgtcttatcttatgtctgtttgaatttgaaaatttatgaatgactttcacatatttatcacactgaaatattttgctttgagtagttgtcaaatattggttaagtccattataacctcttttgtgcaccttacactcatctacactttcacagccctttttaaactgtaaattgtcatgtccatagttttcatatcttctcagtgtcactttttggaaagaatcttttatgctctgctctggccaaagatctcgggcaaaatgagaacacgtaa

SEQ ID NO: 20388 - DNA, 461 bp, Homo sapiens
  MAP TO AC007263.3; EXPRESSED IN ADULT LIVER, SIGNAL = 2.3; EXPRESSED IN HELA, SIGNAL = 1.7; EXPRESSED IN LUNG, SIGNAL = 3.1; EXPRESSED IN FETAL LIVER, SIGNAL = 1.9
ggtggtggagatggtggtggaggtggtggtggagatggtggtggtggtggtggtggtggtggtggtggtggagatggtggtggaggtggtggtggagatggtggtggtggtggtggagatggtggtggaggtggtggtggtcgtagagatggtggtggtggtggtggtcgtagagatggtggtggtggtggtggtggaggtggtggtggagatggtggtggtggtggtcgtagagatggtggtggtggtggtggagatggtggtggtggtggtggtggtggtggaggaggaggtggtggagctggtgctggaggtggtggtggtggtggtggaggaggaggaggtggtggtggtgctggaggtggtggtggtggaggtggtggtggaggaggaggaggaggtggtggtggtgctggaggtggtggtggtagaggtggtgctggaggtggtggtggtggtgg

SEQ ID NO: 20389 - DNA, 452 bp, Homo sapiens; identical to SEQ ID NO: 18380
  MAP TO AC016603.5; EXPRESSED IN FETAL LIVER, SIGNAL =   2; EXPRESSED IN BONE MARROW, SIGNAL = 2.1; EXPRESSED IN BRAIN, SIGNAL = 2.5; EXPRESSED IN ADULT LIVER, SIGNAL = 2.2; EXPRESSED IN PLACENTA, SIGNAL = 1.8; EXPRESSED IN LUNG, SIGNAL = 2.2; EXPRESSED IN HEART, SIGNAL =   2; SWISSPROT HIT: P32900, EVALUE 2.70e-01; NT HIT: AB033051.1, EVALUE 0.00e+00; EST_HUMAN HIT: AL138373.1, EVALUE 0.00e+00

SEQ ID NO: 20390 - DNA, 490 bp, Homo sapiens
  MAP TO AL022067.1; EXPRESSED IN ADULT LIVER, SIGNAL = 2.2; EXPRESSED IN PLACENTA, SIGNAL = 2.1; EXPRESSED IN BRAIN, SIGNAL = 1.9; EXPRESSED IN HELA, SIGNAL = 0.35; EXPRESSED IN BONE MARROW, SIGNAL = 2.1; EXPRESSED IN LUNG, SIGNAL = 2.7; EXPRESSED IN HEART, SIGNAL = 2.6; NT HIT: gi14756695, EVALUE 0.00e+00; EST_HUMAN HIT: AW372001.1, EVALUE 0.00e+00; SWISSPROT HIT: Q13191, EVALUE 3.00e-01
acccctccaaaggaaaggacctctaccgttctaacatttcacccctcacatcagaaaaggacctcgatgactttagaagacgtgggagccccgaaatgcccttctaccctcgggtcgtttaccccatccgggcccctctgccagaagactttttgaaagcttccctggcctacgggatcgagagacccacgtacatcactcgctcccccattccatcctccaccactccaagcccctctgcaagaagcagccccgaccaaagcctcaagagctccagccctcacagcagccctgggaatacggtgtcccctgtgggccccggctctcaagagcaccgggactcctacgcttacttgaacgcgtcctacggcacggaaggtttgggctcctaccctggctacgcacccctgccccacctcccgccagctttcatcccctcgtacaacgctcactaccccaagttcctcttgcccccctacggcatgaattg

SEQ ID NO: 20391 - DNA, 713 bp, Homo sapiens
  MAP TO AC020757.2; EXPRESSED IN ADULT LIVER, SIGNAL = 1.6; EXPRESSED IN BRAIN, SIGNAL = 1.1; EXPRESSED IN BONE MARROW, SIGNAL = 1.2; EXPRESSED IN PLACENTA, SIGNAL = 1.6; EXPRESSED IN HELA, SIGNAL = 0.51; NT HIT: gi15808993, EVALUE 1.00e-30; EST_HUMAN HIT: AL558375.1, EVALUE 3.00e-99; SWISSPROT HIT: P39210, EVALUE 9.00e-07
ctggagggggcagatgcaggtgccggctgctgcagtgcagtagctgctggaggctgaggaggcccggacccggtgcaggaagacgccgaccacgcgggctcctgatcgcgggcgcccacagcgcggacatggcgggctggtggccggcgttgtcgcgcgcggcccggcgccacccgtggcccaccaacgtgctgctttacggctcgctcgtctcggccggggacgcgctgcaacagcggctgcagggccgcgaggccaactggcgccagacgcggcgcgtggccacgttggtggtgaccttccacgccaacttcaactacgtgtggctgcgcctgctggagcgcgcgctcccgggccgagcgccgcacgccctgctggccaagttgctgtgcgaccaggtggtcggtgcgcccatcgcggtctcggccttctatgtcggtgaggggccgggaggggacctggggggtgggacccagtattgggggactggaggctgggactcggggatcaagcggctggagggagggcgctgcaggagcctggggacccgggcaggagccggggctctgagaccggagctgcttcagaggcctgaagggccagggcaaaggctagaggctggggtgtttgattgcgaaaatttgcaggaggcactggctggggagccgagaaattggggagccagaggtccaccaggtcaggaatttagagga

SEQ ID NO: 20392 - DNA, 659 bp, Homo sapiens
  MAP TO AH005332.1; EXPRESSED IN ADULT LIVER, SIGNAL = 2.2; EXPRESSED IN HELA, SIGNAL =   2; EXPRESSED IN LUNG, SIGNAL = 2.4; NT HIT: U07563.1, EVALUE 0.00e+00; EST_HUMAN HIT: BG393922.1, EVALUE 0.00e+00; SWISSPROT HIT: P00519, EVALUE 2.00e-84
gtgcagcagtggcactctgcctcccgggttcaagcgattctcctctgtcagcctctagagttgtctggagttgtcagctcttccccttgcgtttcagatcctctggaccatgagcctgccgtgtctccattgctccctcgaaaagagcgaggtcccccggagggcggcctgaatgaagatgagcgccttctccccaaagacaaaaagaccaacttgttcagcgccttgatcaagaagaagaagaagacagccccaacccctcccaaacgcagcagctccttccgggagatggacggccagccggagcgcagaggggccggcgaggaagagggccgagacatcagcaacggggcactggctttcacccccttggacacagctgacccagccaagtccccaaagcccagcaatggggctggggtccccaatggagccctccgggagtccgggggctcaggcttccggtctccccacctgtggaagaagtccagcacgctgaccagcagccgcctagccaccggcgaggaggagggcggtggcagctccagcaagcgcttcctgcgctcttgctccgcctcctgcgttccccatggggccaaggacacggagtggaggtcagtcacgctgcctcgggacttgcagtccacgggaagacagtt

SEQ ID NO: 20393 - DNA, 667 bp, Homo sapiens
  MAP TO AC018702.2; EXPRESSED IN PLACENTA, SIGNAL = 2.4; EXPRESSED IN HELA, SIGNAL = 7.5; EXPRESSED IN ADULT LIVER, SIGNAL = 2.7; EXPRESSED IN LUNG, SIGNAL = 2.5; EXPRESSED IN FETAL LIVER, SIGNAL = 2.6; SWISSPROT HIT: P25980, EVALUE 1.80e-02; NT HIT: gi14768588, EVALUE 0.00e+00; EST_HUMAN HIT: AL552045.1, EVALUE 0.00e+00
ctcaaaatctctaccactactgcgtctctgacgagatctttgttttgagagttctttgagcttctgaagtttttctcgcttttgtgcagctaatgttttttcaggagtcttttgctccatttccactgaagaaccttcatcttcaaccactctacggggacgtttaacacctacttttctaactaggatatcgctgtcatcactctcatcactgtcacacatcacagaggatagcctttttctttttcctcgcttgatgtcttcttcttctaaatcatcctctattatttgtccagtttgtttgttgagatcattatcctcttgacttaaatgtttttcctgatcatcctctattatttgtccagtttgtttgttgagatcattatcctcttgacttaaatgtttttcctgatcttgtaagtcaatattcctatgtttgattttgttcgtttcttcttcatatgttgaaccgttgccagagttaatgagacacttactgtcatttccttcactttgaattttacttaagttgagctctctttcacttcctggtgttttattacaatcaggtcccttgttactatcaagctcttcatcattttcaaaactttcatcactatcaagctcttcatcactatcaaattcttcactatcaagctcttcatca

SEQ ID NO: 20394 - DNA, 675 bp, Homo sapiens
  MAP TO AL121966.2; EXPRESSED IN ADULT LIVER, SIGNAL = 2.4; EXPRESSED IN HELA, SIGNAL = 3.7; EXPRESSED IN BONE MARROW, SIGNAL = 2.4; EXPRESSED IN LUNG, SIGNAL = 2.1; EXPRESSED IN FETAL LIVER, SIGNAL = 2.3; EXPRESSED IN BRAIN, SIGNAL = 2.4; SWISSPROT HIT: Q15375, EVALUE 0.00e+00; NT HIT: gi15300484, EVALUE 0.00e+00; EST_HUMAN HIT: BI769431.1, EVALUE 0.00e+00
tgggaagaaattagtggtttggatgagaactataccccgatacgaacataccaggtgtgccaagtcatggagcccaaccaaaacaactggctgcggactaactggatttccaaaggcaatgcacaaaggatttttgtagaattgaaattcaccctgagggattgtaacagtcttcctggagtactgggaacttgcaaggaaacatttaatttgtactattatgaaacagactatgacactggcaggaatataagagaaaacctctatgtaaaaatagacaccattgctgcagatgaaagttttacccaaggtgaccttggtgaaagaaagatgaagcttaacactgaggtgagagagattggacctttgtccaaaaagggattctatcttgcctttcaggatgtaggggcttgcatagctttggtttctgtcaaagtgtactacaagaagtgctggtccattattgagaacttagctatctttccagatacagtgactggttcagaattttcctctttagtcgaggttcgagggacatgtgtcagcagtgcagaggaagaagcggaaaacgcccccaggatgcactgcagtgcagaaggagaatggttagtgcccattggaaaatgtatctgcaaagcaggctaccagcaaaaaggagacacttgtgaacgtaag

SEQ ID NO: 20395 - DNA, 723 bp, Homo sapiens
  MAP TO AC005604.1; EXPRESSED IN PLACENTA, SIGNAL = 3.5; EXPRESSED IN BRAIN, SIGNAL = 1.6; EXPRESSED IN FETAL LIVER, SIGNAL = 2.2; EXPRESSED IN LUNG, SIGNAL = 1.5; EXPRESSED IN HEART, SIGNAL =   2; EXPRESSED IN BONE MARROW, SIGNAL = 1.9; EXPRESSED IN ADULT LIVER, SIGNAL = 1.6; SWISSPROT HIT: O95013, EVALUE 9.00e-68; NT HIT: X64985.1, EVALUE 6.90e-01; EST_HUMAN HIT: BG218617.1, EVALUE 4.00e-03
gtaactgcagaggctatttcctggaatgaatcaacgagtgaaacgaataactctatggtgactgaattcatttttctgggtctctctgattctcaggaactccagaccttcctatttatgttgttttttgtattctatggaggaatcgtgtttggaaaccttcttattgtcataacagtggtatctgactcccaccttcactctcccatgtacttcctgctagccaacctctcactcattgatctgtctctgtcttcagtcacagcccccaagatgattactgactttttcagccagcgcaaagtcatctctttcaagggctgccttgttcagatatttctccttcacttctttggtgggagtgagatggtgatcctcatagccatgggctttgacagatatatagcaatatgcaaacccctacactacactacaattatgtgtggcaacgcatgtgtcggcattatggctgtcgcatggggaattggctttctccattcggtgagccagttggcctttgccgtgcacttacccttctgtggtcccaatgaggtcgatagtttttattgtgaccttcctagggtaatcaaacttgcctgtacagatacctacaggctagatattatggtcattgctaacagtggtgtgctcactgtgtgttcttttgttcttctaatcatctcatacactatcatcctaatgaccatccagcattgcccttta

SEQ ID NO: 20396 - DNA, 495 bp, Homo sapiens
  MAP TO AC007101.1; EXPRESSED IN BRAIN, SIGNAL = 1.2; EXPRESSED IN LUNG, SIGNAL = 1.2; EXPRESSED IN BONE MARROW, SIGNAL = 1.2; EXPRESSED IN ADULT LIVER, SIGNAL = 1.2; EXPRESSED IN PLACENTA, SIGNAL = 1.5; EXPRESSED IN HELA, SIGNAL = 0.8; NT HIT: Y19216.1, EVALUE 0.00e+00; EST_HUMAN HIT: BI829625.1, EVALUE 0.00e+00; SWISSPROT HIT: P15241, EVALUE 2.00e-64
atgtcctgcctctactcccgcctcagcgccccctgcggggtccgcgccttcagctgcatctcggcctgcgggccccggcccggccgctgctgcatcaccgccgccccctaccgcggcgtctcctgcttccgcggcctcaccggaggcttcggcagccacagcgtgtgcgggggcttccgcgccggctcctgcggacgcagcttcggctaccgctccgggggcgtgtgcggacccagccccccatgcatcgccaccgtgtcggtcaacgagagcctcctcacgcccctcaacctggagatcgaccccaacgcacagtgcgtgaagcaggaggagaaggagcagatcaagtccctcaacagcaggttcgcggccttcatggacaaggtgggtgtcctggatcacacctttcctgaacctggaagtcctggaaggagatggaaattcccagtggtctctctagaaatggggaatgaggatggctgatattttatataa

SEQ ID NO: 20397 - DNA, 1578 bp, Homo sapiens
  MAP TO AC004476.1; EXPRESSED IN ADULT LIVER, SIGNAL = 1.2; EXPRESSED IN HELA, SIGNAL = 1.9; EXPRESSED IN LUNG, SIGNAL = 1.2; NT HIT: gi13633548, EVALUE 0.00e+00; EST_HUMAN HIT: BG683339.1, EVALUE 0.00e+00; SWISSPROT HIT: Q9P2N7, EVALUE 1.00e-121
ggccatgttcaccggcggcatgcgggaggcaagccaggacgtcatcgagctgaagggcgtgtcggcccgtggcctgcggcacatcatcgacttcgcctacagcgccgaggtgacactggacctggactgcgtgcaggacgtgctgggcgcggccgtgttcttgcagatgctgcccgtggtggagctgtgcgaggagttcctgaaggcggccatgagcgtggagacctgcctcaacatcggccagatggccaccaccttcagcctggcctcgctgcgagagtcggtggatgccttcaccttccggcacttcctgcagatcgccgaggaggaggatttcctgcgcctgccactggagcgcctggtcttcttcctgcagagcaaccggctgcagagctgtgccgagatcgacctgttccgcgcggccgtccgctggctgcagcatgacccggcccggcggccgcgcgccagccacgtgctctgccacattcgcttcccgctcatgcagtcgtccgagctggtggacagcgtgcagacgctggacatcatggtggaggacgtgctgtgccgccagtatctgctggaggccttcaactaccaggtgctgcccttccggcagcacgagatgcagtctccgcgcaccgccgtgcgctcggatgtgccctcgctcgtcaccttcggcggcacgccctacaccgacagcgaccgctcggtcagcagcaaggtctaccagctgcctgagccgggagcccgccacttccgcgagctcacggagatggaggtaggctgcagccacacgtgcgtggccgtgctggacaattttgtgtacgtggccggggggcagcacctgcagtaccgcagcggcgagggcgcagtggacgcctgctaccgctacgacccccacctgaatcgctggctgcgcctgcaggccatgcaggaaagccgcatccagttccagctgaacgtgctgtgcggcatggtgtacgccacgggcggccgcaaccgagccggcagcctggcctccgtggagcggtactgcccccggcgcaatgagtggggctacgcctgctcgctgaagcgccgtacctggggccatgctggggccgcctcagggggccgcctctacatctcgggtggctacgggatctcagtggaggacaagaaggccctgcactgctacgaccccgtggccgaccagtgggagttcaaggcgcccatgagcgaaccccgcgtgctacacgccatggtgggtgccggcggccgcatctatgccctcgggggccgcatggaccacgtggaccgctgcttcgacgtgctggctgtggagtactatgtgccggagacggaccagtggaccagcgtgagccccatgcgggccggccagtcagaggccggctgctgcctgctggagaggaagatctacatcgtcgggggctacaactggcgtctcaacaacgtcacgggcatcgtacaggtgtacaacacggacaccgacgagtgggagcgggacctgcacttcccggagtccttcgcaggcatagcctgcgcccccgtcctgctgccccgggccgggaccaggag

SEQ ID NO: 20398 - DNA, 1026 bp, Homo sapiens
  MAP TO AL121829.12; EXPRESSED IN ADULT LIVER, SIGNAL = 3.4; EXPRESSED IN PLACENTA, SIGNAL = 3.2; EXPRESSED IN HEART, SIGNAL = 3.5; EXPRESSED IN LUNG, SIGNAL = 3.5; EXPRESSED IN HELA, SIGNAL = 3.9; EXPRESSED IN BRAIN, SIGNAL =   3; EXPRESSED IN BONE MARROW, SIGNAL = 4.2; EXPRESSED IN FETAL LIVER, SIGNAL = 3.4; NT HIT: gi15011885, EVALUE 0.00e+00; EST_HUMAN HIT: BI828873.1, EVALUE 0.00e+00; SWISSPROT HIT: P10158, EVALUE 5.80e-01
atgccacagcccaggggaggccagcctgcctggcagctgacacccagccctccccccagctcccggataatgagcacccatgtggcaggcctgggcctggacaagatgaagctgggcaatccccagtccttcctggaccaggaggaggcagatgaccagcagctgctggaaccagaggcgtggaagacctacaccgagcgccgcaatgccctgcgtgagttcctgacctcggacctgagtccgcacctgctcaagcgccaccacgcccgcatgcagctgctgcgtaagtgctcctactacatcgaggtcctgcccaagcacctggccctgggcgaccagaacccgctggtgctgcctagcgccttgttccagctcatcgacccctggaagttccagcgcatgaagaaggtgggcacagctcagaccaagatccagctcctgctgctcggggacctgttggaacagctcgaccatggccgtgctgagctggatgccctgctccggtcgccagacccacggcccttcctggccgactgggcgctggtggagcggcggctggcggacgtgtcggccgtcatggacagcttcctgaccatgatggtgccggggcggctacacgtcaagcaccgcctggtgtctgatgtcagtgccaccaagatcccgcacatctggctcatgctgagcaccaagatgcctgtcgtgtttgaccgaaaggcgtcggcggctcaccaggactgggcccggctgcgctggttcgtcaccatccagccagccacatcggagcagtatgagttgcgcttcaggctgctggacccgcggacacagcaggagtgcgcccagtgtggcgtcatccccgtggctgcctgcaccttcgacgtccgaaacctgctgcccaaccgatcctataagttcaccatcaagagggccgagacctccacgctggtgtacgagccctggagggacagcctcaccctgcacaccaagccggagcccctggaggggcccgccctcagccactctgtctga

SEQ ID NO: 20399 - DNA, 556 bp, Homo sapiens
  MAP TO AC002472.3; EXPRESSED IN BRAIN, SIGNAL = 1.2; EXPRESSED IN HELA, SIGNAL =   2; EXPRESSED IN BONE MARROW, SIGNAL = 1.6; EXPRESSED IN LUNG, SIGNAL = 1.4; EXPRESSED IN HEART, SIGNAL = 1.2; EXPRESSED IN ADULT LIVER, SIGNAL = 1.3; EXPRESSED IN PLACENTA, SIGNAL = 1.6; NT HIT: AB002059.1, EVALUE 0.00e+00; EST_HUMAN HIT: BG912438.1, EVALUE 5.00e-45; SWISSPROT HIT: O15547, EVALUE 1.00e-15
gaatgtagggagggtgggaggtgcagggcagctggggttaggggctgaaggctgggtgttggaggctggatcctgctttagtggaagtgtccctttaacagcggctggcgtggcctggctcgggccctgctttgcctcctgttcagctgcggctgcagctgccatgctgactcatgtgcccgcagctagcaggagctggcagcatgggctccccaggggccacagcagactaggggcttctggattataaaacggagaagtatgtgatgaccaggaactggtgggggggcgccctgcagaggctgctgcagtttgggatcgtcgtctatgtggtagggtaagagagaagagcttttggccaggctggaggggcaagggaagaggtcgggggtggggcttggtcctgctgggttgaagttgagggttgggctgtttaggggctggaggggaaggggccataatgggacggggtgggaggtaggcaatacaagacaggagagcaagaacaagctgtgtgtttgtcctgtgtgtccacctgcctgcttcccagtccctc

SEQ ID NO: 20400 - DNA, 954 bp, Homo sapiens
  MAP TO AC004409.1; EXPRESSED IN BRAIN, SIGNAL =  18; EXPRESSED IN HELA, SIGNAL =  14; EXPRESSED IN ADULT LIVER, SIGNAL =  17; EXPRESSED IN PLACENTA, SIGNAL =  23; EXPRESSED IN BONE MARROW, SIGNAL =  22; EXPRESSED IN LUNG, SIGNAL =  19; EXPRESSED IN HEART, SIGNAL =  21; EXPRESSED IN FETAL LIVER, SIGNAL =  20; SWISSPROT HIT: Q02440, EVALUE 2.00e-03; NT HIT: gi12044850, EVALUE 3.60e+00; EST_HUMAN HIT: BG426610.1, EVALUE 7.00e-58
atattggaagaggtgcctggagaaatggatgctagaagaaaacactggaaggagaatatgtttactcctttttttagtgcacaagatgttctagaagagacttctgagcctgaatcttcttctgaacaaacgactgcagatagcagcaagggaatggaagaaatttataatttgtccagtagaaagtttcaggaagaaagtaaatttaagaggaaaaaatatattttccaactaaatgaaatagaacaagaacaaaatttaagagagaacaagagaaacatttcaaagaatgaaacagacacaaattctgcatcctatgaatcatctaatgtggatgttacaacagaagaaagctttaacagcacagaagataactctacctgcagtacagataacttaccagctctactaagacaagacataagaaagaaatttatggaaagaatgtctccaaaactttgcctgaatcttttgaatgaagaactggaagaacttaatatgaaatacagaaaaatagaagaggaatttgaaaatgctgaaaaagaacttttgcactacaaaaaagaaatattcacaaaacccctaaattttcaagaaacagagacggatgcttcaaaaagtgactatgaacttcaagctttaagaaatgacctgtctgaaaaagcaacaaatgtaaaaaacttaagtgaacagctccagcaagccaaagaagtcatccacaaattgaacctagagaacagaaatctaaaagaagctgttaggaagttaaagcatcaaaccgaggttggaaatgtgctcctaaaagaagaaatgaaatcatattatgaattagaaatggcaaagatccgcggagagctcagtgtcatcaagaatgaactgagaactgagaagaccctacaagcaagaaataacagagccttggagttgcttagaaaatactatgcttcttcaatg

SEQ ID NO: 20401 - DNA, 963 bp, Homo sapiens
  MAP TO AC008132.26; EXPRESSED IN ADULT LIVER, SIGNAL = 1.4; EXPRESSED IN HELA, SIGNAL = 0.33; EXPRESSED IN HEART, SIGNAL = 1.6; SWISSPROT HIT: Q15059, EVALUE 9.00e-03; NT HIT: gi11427757, EVALUE 0.00e+00; EST_HUMAN HIT: BE531263.1, EVALUE 0.00e+00
ttccagggctgcgggcggaggcagtagatgtaagcgggaactggctcacagcagtgcccaactgccctgtgttccccaaaacttgtacctggctcaggtggtgtggccctggcagccaggtgggatccagcaaggaccagggctctgcctccccagtcagcatgagcagagcagactcctttgagcagagcatcagggcagaaatagaacagtttctgaatgagaaaagacagcatgagacccaaaaatgtgatgggtcagtggagaagaaaccagacacacatgaaaattcggcgaagtcactctcgaaatcccaccaagagccggctacaaaggtggtgcaccggcagggcctgatgggcgtccagaaggagttcgccttctgcagacctcccccggttagcaaagacaaacgtgcagcccagaagcctcaggtccaaggtcacgaccacgaccacgcaggagaaggagggcagcacaaagccagcaacccccaccgcccttcagaagcagtacagaataaaagtgggattaaaaggagcgccagcaccgcaaggaggggaaagcgagtcacgagcgccgtacaggctcccgaggcgtccgactccagcagcgacgacggcattgaggaggccatccagctgtaccaggtgcagaaaacacacaaggaggccgacggggacccgccccagagggtccagctccaagaggaaagagcacctgcccctcccgcacacagcacaagcagcgccacaaaaagtgccttgccagagacccacaggaaaacacccagcaagaagaagccagtgcccaccaagaccacggaccctggtccaggggatctggacgctgaccattcccccaagatcccaaaggaaaccaaagctccacctccaacgagcccggcttccaggagcaagtttgtggaatggtcctcttgccaggcagacacctccgctgagc

SEQ ID NO: 20402 - DNA, 944 bp, Homo sapiens
  MAP TO AC000088.2; EXPRESSED IN ADULT LIVER, SIGNAL = 1.3; EXPRESSED IN HELA, SIGNAL = 0.56; EXPRESSED IN HEART, SIGNAL = 1.6; EXPRESSED IN BONE MARROW, SIGNAL = 1.2; EXPRESSED IN LUNG, SIGNAL = 1.9; NT HIT: gi14777026, EVALUE 0.00e+00; EST_HUMAN HIT: BI838208.1, EVALUE 0.00e+00; SWISSPROT HIT: O00501, EVALUE 4.00e-95
tcagacgtagttcttcttgtcgtagtcgccggtggccgtgggccgccgcggcgctgagtacttcacggggaagctgaggtcgggacggccggtgcagacccaggcgccgcagcacaagaggcagccgcctaccatgagcagcgcggtggccgcccagccgatgtacagcgctgcgcccagctcgtacttctgcgacacgggcacagacgggtcgtaaaactcgcggacgacaatgttggcgaaccagcagagtggcacgagcgccagcagcccgcaaaacaggtagagcacgcctcccgtgagggccacacgcgccttggccgggcccggggccacgcaggtggtgcactgcgcgcccgccagggtcacgaagagcgcaacgaacgccagcagcacggcgctcacggtgagcgcccgcgccgcctgcacctcggtgctcagagccagcaccgagtcgtacactttgcactgcatgtgcccggtgctctgcaccacgcacgacatccacagccccttccaggtggtctgcgccgtcacgatgttgtggtccaggaaggcggtcacctgccacatgggcagcccgcacgccaggatcagacccccccagcccaccaggcacagcaccaggcccaggatctccaacgctgcggaccccatggctagaggcgagacgcgcacccgaaggcccgcagaacccccaaggccgtgctgcgcggcgccctgggcgggccctggtgcctttgcgcccgcgctcccggctcttggccccagtccgtttgccccgcgggtctgtcgcacctcctgggtctgccagctcctgccggggggtaccctctttgaaggttcgggggcggattctgtcccccgggcccggccccccggcccgaagcagccaatccgtgcgcgggtcatcgtgccgcagccaatcacagagcctctggcag

SEQ ID NO: 20403 - DNA, 679 bp, Homo sapiens
  MAP TO AL121907.2; EXPRESSED IN ADULT LIVER, SIGNAL = 1.6; EXPRESSED IN PLACENTA, SIGNAL = 1.8; EXPRESSED IN HELA, SIGNAL = 0.33; EXPRESSED IN BRAIN, SIGNAL = 1.8; EXPRESSED IN BONE MARROW, SIGNAL = 2.1; EXPRESSED IN FETAL LIVER, SIGNAL = 1.6; NT HIT: gi15302862, EVALUE 0.00e+00; EST_HUMAN HIT: AA837109.1, EVALUE 0.00e+00; SWISSPROT HIT: P18871, EVALUE 5.30e-02
ccctggagcagcagtgtgatgagcatcgtcgccgagccaaggagctgaagcacaagtcccagcacctcagcaacgtgctcatgacgctgacgccggtctccctgccaccgcctgtgaagcggccccggcttgcacgtgccacatcaggaccggccgccatggcctcgcaggtgctcacccagtctgcccagctggcgcttggcccgggcgtgcccgtcccccagctgaccagcgtgccccttggtaaagtggtgtccaccctgccgtccaccgtcctgggcaagggttcccttcaggcgccccccgccagctccccggcctccccgctgctcgggggatacacagtcttggcctcttccggctccacctaccccagcacagtggagatccacccggacgcgtccagcctcacggtcctgagcacggccgccgtgcaggacggtagcacggtgttcaaggtggtcagcccgctacagctgctcacgttgcctggcctgggccccaccctgcagaacgtggcccaggcctcgcctggctccagcacaattgtgacagtgcccgcaggggctgcccccgggcctgaggagcacacggccaccattgaggtggctgccatggcagaggaccacgagcggaagtagccgacaggagggcgaggcccctgggacggacagggctg

SEQ ID NO: 20404 - DNA, 769 bp, Homo sapiens
  MAP TO AL034419.12; EXPRESSED IN HEART, SIGNAL = 1.7; EXPRESSED IN BONE MARROW, SIGNAL = 1.9; EXPRESSED IN FETAL LIVER, SIGNAL = 1.6; EXPRESSED IN LUNG, SIGNAL = 2.2; EXPRESSED IN BRAIN, SIGNAL = 1.7; EXPRESSED IN ADULT LIVER, SIGNAL = 2.1; NT HIT: AB024444.1, EVALUE 0.00e+00; EST_HUMAN HIT: BI559806.1, EVALUE 0.00e+00
ctggaggcggcaatctcggccttctggcgcgcgatagcagcggcgcgctgggcaccctccacactgtgctccactttctggcggaccttgttgctcttgagctgcagcatgcggcgcttggtgtccttgaccagcacgttgtggcggtacttgccctcctcgcggtggccgtcgggcagcgtggtgcagccatagccgtggcgcaggttgtccagccactcgccctcgtagcggaggccactggagcgttcgctcacgccgaagcccgagcgtttgtcgttcttccactcgcccatgtaggtctcggtggtggtggcgtcgatatcggcctcgaagggtgcggcctcgtcggcgccctcggcggcctctcccaggctggcggtggacgcggcgtcgctggcgcccgagctgaggtcgctcttaaggaagctgacacggctgcgctggctacccacggacgtgcgcgactctgcgcgccgcagcttgcccagcagcgcgccccgctggaagaggccgccgcccttgggcgcccgcgcggccgcctcggcattggccaggaggctgagcgcgaagccgccacgcgggatggcgggcgagggcagcgcggggccgtcggaggccggcgaggcgggagagtccggggccaccgtgccgttgctgtgctcgctgcgcagggacgacagcgacgtgcgcagcggcgagcgcaccaccacggccatcccgtagggcacgctctggcgtactccgtagccatggcgcatgccgttgg

SEQ ID NO: 20405 - DNA, 644 bp, Homo sapiens
  MAP TO AC002428.1; EXPRESSED IN BRAIN, SIGNAL = 1.1; EXPRESSED IN HELA, SIGNAL = 0.87; EXPRESSED IN ADULT LIVER, SIGNAL = 1.3; EXPRESSED IN FETAL LIVER, SIGNAL = 1.2; EXPRESSED IN HEART, SIGNAL = 1.4; EXPRESSED IN LUNG, SIGNAL = 1.2; SWISSPROT HIT: Q9Z507, EVALUE 6.40e+00; NT HIT: gi16306585, EVALUE 0.00e+00; EST_HUMAN HIT: W88455.1, EVALUE 1.00e-09
gaggcatcacatcagggaaccatactcttcccaggtatttggagacttcagtgtgaatttcatctaggctataatcctcatcagggatcaaaacttcctccattacagagagctgtgttaaccttctctcacacagtcttacaaacctgatgaaggcactgcagctaacttcacatttgctgaggcccaaggctgttaggtttgtacagtgttcagcaatacaaataagttcattatcaagaggctgaagatcattagcacacaccactaactcaatcagtcgaggacagttgagacctacccgtcctaaaaccactttgctgactgaacgaccaaaataaaggtgagtaacaggggtttcttctttgaagaacgtctcgaattcctcttcatatagaaagaagtgcataacaacattaactctaggggaatgtttaataagtgcatcccaactgtgttttttaacagcatgaaatttaatctgtccaggattttcactcacaacatcaattcgaagatgttcaaggttaacatgagtctcgcttgagagtgcaaggaaaagttcatcagttaggatgtaataattcaacgccagttctctaaggccttgacaacggtcagctacacaaagaattcctgtggga

SEQ ID NO: 20406 - DNA, 538 bp, Homo sapiens
  MAP TO AF131215.1; EXPRESSED IN BONE MARROW, SIGNAL = 3.5; EXPRESSED IN FETAL LIVER, SIGNAL = 3.7; EXPRESSED IN BRAIN, SIGNAL = 3.1; EXPRESSED IN ADULT LIVER, SIGNAL = 4.2; EXPRESSED IN HELA, SIGNAL = 6.9; EXPRESSED IN PLACENTA, SIGNAL = 3.2; EXPRESSED IN LUNG, SIGNAL = 3.2; EXPRESSED IN HEART, SIGNAL = 3.6; NT HIT: AB021651.1, EVALUE 2.00e+00; EST_HUMAN HIT: BI039161.1, EVALUE 1.00e-08
atggtgattgtagtggtgataatggtgatggttgtgatgatgaaaacgatgatcaggatggtaaggatgatgatggtaataatgatgaagatgatgatgatggtaatgtggtggtgacgatggtaatggtgataatgatgatgatgaagaggatgaagattatcacgatggtaatgatgatgatggtaatggtgatgaaggggttgatgatgatggtaatggtggtgaggatgatggtgatgaggatggtggtgctaaggatggttacgatggtgatggtggtggtgacagtggagatgctaatgatgatgatggcgatgatgacgatagtgatggtgatggtggtggtgatgatgatgatgacgatagtgatggtgatggtggtggtgatgatgatgatgacgatagtgatggtgatggtggtggtgatgatgatgatgacgatagtgatggtgatgatgatgatgatgatggtgatgatgatggtcgtaatgatgatgatggtaatgatggtgatgatgatgatggtggtaatgac

SEQ ID NO: 20407 - DNA, 523 bp, Homo sapiens
  MAP TO AP000885.1; EXPRESSED IN ADULT LIVER, SIGNAL = 1.7; EXPRESSED IN PLACENTA, SIGNAL = 2.2; EXPRESSED IN BRAIN, SIGNAL = 1.8; EXPRESSED IN HELA, SIGNAL = 0.51; EXPRESSED IN BONE MARROW, SIGNAL = 2.4; EXPRESSED IN LUNG, SIGNAL = 1.8; EXPRESSED IN FETAL LIVER, SIGNAL = 2.2; NT HIT: gi6754491, EVALUE 6.00e-16; EST_HUMAN HIT: W76571.1, EVALUE 0.00e+00; SWISSPROT HIT: P02438, EVALUE 3.00e-05
attgctggaaatgcctatgataacagctctacgtagagactgagacactttgcttaaaaggtctggaaattcagcaagttgatctgcagaaggttgatccataggctggtctgtaacaaggagactggcagctcctagaagccaagtaggttgggcggcagaatccagatccatagccgagggaagggaagccacagcttccataacccagggatctgacaccactggacccacagcccactgagtagcagctcctcgatccatagcccagggagcggcagctgctggatccaaagcctagagacccagagtaagtcgtcttgcaaggactgcagagcaaggaggttctggggcggtagcaggaggtctggcaggggctggactccacataggacgtctggcagctggtgggctcccagcagatctcctgacagcccctatagagagaggaacccagctggcaggtgctgggagagcagaggtcagtgctgtagaccagattgctggggtaggaaaagccacg

SEQ ID NO: 20408 - DNA, 1706 bp, Homo sapiens
  MAP TO AL033527.26; EXPRESSED IN ADULT LIVER, SIGNAL = 1.2; EXPRESSED IN BRAIN, SIGNAL = 1.1; EXPRESSED IN LUNG, SIGNAL = 1.3; EXPRESSED IN HEART, SIGNAL = 1.5; EXPRESSED IN FETAL LIVER, SIGNAL = 1.2; NT HIT: gi16168538, EVALUE 0.00e+00; EST_HUMAN HIT: BG719303.1, EVALUE 0.00e+00; SWISSPROT HIT: Q29551, EVALUE 0.00e+00
tcagggtgccacctgctgcatgggcctgaggttcggggacacagcaaaggcacaccccgtgctctttttgatgtcgtccaccgtcaggccctcccagagctccctcagcgtcagctctttcttcctgtgcacgtcaaacacggccttctcggtgatgatgcggtccacgcaccgcttcccggtcagcggcatggtgcatttctccatgatcttgggggtgttgtcctttgtgcagtgctgcatggtgaccaccactctggtcttctgactggacaccaagtccatggcaccgcccatgcctttcaccttcttgccagggatcatccagttcgccaggtcgccgtatttggaaacctgcatggctccaagcatggttagttggatgtgtccccctcggatcatggcgaaggagtcgtcgctggcgaagaagcagcccccgggaagcaccgtgaccgtctgcttgcctgcattgatgaggtcggcatccacctcatcttccgtgggaaacgggcccaggcccaggatcccgttctcactgtgaagatggacagtcatgctgggactgatgaagttgctggccagcagggggatgcctatgcccagattggcgtacatgccgtcctcaaattccagagctgcgcgtctgatgatgcgcgtcctggcgtcctcttcctttccagcgtctccatcttcctctttcaggatcgttaagcgctcaattcgtttctcgtatttctgcccctttatcacgcgatctacataaatgttaggaacgtggatgtcttctggggggaaagcccccacctccacgatctcttccacctccaccgccgtgacgtctgcagctttgcacatgggcacgttgaaattgcgggcgcttctcctgaagaccacgtttcctgcccggtcggccttccaccctttcaccagggcgaagtctgcccggatggcgcgctccaaaaggaagtggtcgccgttgaactccctcacctctcggggctggctcatgagcgccaggtggccgtccggggtgtagcggatgggggcgcccccttcctggaccagggtcccgtagcccgtgggggtgtagaaggcgggcaccccggcgccccccgcgcggatgcgctcggccagggtgccctggggcgtgagctccagctccagctctcctgccaggtactggctctcgcacagggtgttctcgcccacgtaggaacagacgatgcgacggacctgcctggcggccagcaggaggcccaggccgaagtcctccacgcccacgttgctgctgaccacctgcaggtctttcacgcgggtcctgagcagcgcggcgatcaggttctcggggatcccgcagagcccgaagcccccgatcatgacggtcgccccgtcagagatgtccttcaccatctccaccgggtccgcgtagaacttggcacggagccggggactggtggcaaagcagcgggcgcagccctgggacagcgcgagccctgagccgccggcggggaccccgcgcccgagcactgacgccaggagccgcagcgccgccatagtcggcccgggtcggaggccaggacaggtggtgtgagccctgcgtgcgcctcgggccgcgcgtcacagagcagggcgggcgcccgcgccctgacgcactccctcccagcaggtctccccggccaggcgcaggctctaggctaggcccgcga

SEQ ID NO: 20409 - DNA, 686 bp, Homo sapiens
  MAP TO AF019413.1; EXPRESSED IN HEART, SIGNAL =  16; EXPRESSED IN LUNG, SIGNAL = 9.6; EXPRESSED IN BONE MARROW, SIGNAL = 3.4; EXPRESSED IN PLACENTA, SIGNAL = 3.3; EXPRESSED IN HELA, SIGNAL = 0.85; EXPRESSED IN ADULT LIVER, SIGNAL = 2.3; EXPRESSED IN BRAIN, SIGNAL = 2.3; NT HIT: gi15208634, EVALUE 0.00e+00; EST_HUMAN HIT: BF847439.1, EVALUE 8.00e-57; SWISSPROT HIT: P22105, EVALUE 7.00e-45
gctgtcagctgagcaggaccacccagccccaagaatggacttctctgaaatgacctcaggtcccccagtcatagccttggcttctccctccttttccccaggacccaaggacatccccctcactctctctccctccttctccactgcagaggaagagacccccagccccacagaacccagcactgaggccccggaggcccctgaggagccgctcctgggggagttgacagtgacaggatcctcccctgactcgctgagcctctcctggaccgtcccccagggccgcttcgactccttcaccgtgcagtacaaggacagggacgggcagccccaggtggtgcgtgtcaggggcgaggagagcgaggtcaccgtggggggcctggagcccgggcgcaaatacaagatgcatctgtacggcctccacgaggggcagcgcgtgggcccagtgtccaccgtgggcatcacgggtgagtggggggacaggccctcgtccccaggtttacctctgcagcccccttgtgtttctcctttggatcttggcacctcttttgactgggcctctaggtttctgtcttttctcccatgttgctaatgatcctgcctcatccttggattcatggagactgtgtggagtcagatgggcaggtagtccatgccctgtttgttgtagcttccttctcccattg

SEQ ID NO: 20410 - DNA, 2711 bp, Homo sapiens
  MAP TO AC022515.2; EXPRESSED IN BONE MARROW, SIGNAL = 2.2; EXPRESSED IN LUNG, SIGNAL =   2; EXPRESSED IN HEART, SIGNAL = 2.5; EXPRESSED IN FETAL LIVER, SIGNAL = 2.5; EXPRESSED IN ADULT LIVER, SIGNAL = 2.2; EXPRESSED IN PLACENTA, SIGNAL = 2.5; EXPRESSED IN BRAIN, SIGNAL = 2.1; SWISSPROT HIT: P08045, EVALUE 3.00e-74; NT HIT: gi14756311, EVALUE 0.00e+00; EST_HUMAN HIT: AL558191.1, EVALUE 0.00e+00
cccagggccttgctgccgccatgactgaggaatcagaggagacagtcctgtacattgagcaccgctatgtctgctctgagtgcaaccagctgtatggatcactggaagaggtgcttatgcaccaaaactcccacgtgccccagcagcactttgagctggtgggcgtggctgatcccggagtcactgtggccacagacacagcttcaggcacgggcctctatcagacccttgtgcaggagagccagtaccagtgcctggagtgtggtcaactgctgatgtcacccagccagctcctggagcaccaggagctgcacctgaagatgatggcaccccaggaggcagtgccagctgagccatcacctaaggcaccacccctgagctccagcaccatccactacgagtgtgtggattgcaaggctctctttgccagccaggagctctggctgaaccaccggcagacgcacctccgggccacacccaccaaggctcctgcccctgttgtcctggggtccccagttgttctagggcctcctgtgggccaggcccgagtggctgtggagcactcataccgaaaggcagaagagggtggggaaggggcgactgtcccatctgccgctgccaccaccactgaggtagtgactgaggtggagctgctcctctacaagtgctctgagtgctcccagctcttccagctgccggcggatttcctggagcaccaggccactcacttccctgctcctgtacccgagtctcaggagcctgccttacagcaggaggtgcaggcctcgtcacctgcagaggtgcctgtgtctcagcctgaccccttgccagcttctgaccacagttacgagctgcgcaatggtgaagccattgggcgggatcgccgggggcgcagggcccggaggaacaacagtggagaagcaggcggggcagccacacaggagctcttctgctcagcctgtgaccagctctttctctcaccccaccagctacagcagcacctgcggagtcaccgggagggcgtctttaagtgccccctgtgcagtcgtgtcttccctagcccttccagtctggaccagcaccttggagaccatagcagcgagtcacacttcctgtgtgtagactgtggcctggccttcggcacagaggccctcctcctggcccaccggcgagcccacaccccgaatcctctgcattcatgtccatgtgggaagacctttgtcaaccttaccaagttcctttatcaccggcgtactcatggggtagggggtgtccctctgcccacaacaccagtcccaccagaggaacctgtcattggtttccctgagccagccccagcagagactggagagccagaggcccctgagccccctgtgtctgaggagacctcagcagggcccgctgccccaggcacctaccgctgcctcctgtgcagccgtgaatttggaaaggccttgcagctgacccggcaccaacgttttgtgcatcggctggagcggcgccataaatgcagcatttgtggcaagatgttcaagaagaagtctcacgtgcgtaaccacctgcgcacacacacaggggagcggcccttcccctgccctgactgctccaagcccttcaactcacctgccaacctggcccgccaccggctcacacacacaggagagcggccctaccggtgtggggactgtggcaaggctttcacgcaaagctccacactgaggcagcaccgcttggtgcatgcccagcacttcccctaccgctgccaggaatgtggggtgcgttttcaccgtccttaccgcctgctcatgcaccgctaccatcacacaggtgaatacccctacaagtgtcgcgagtgcccccgctccttcttgctgcgtcggctgctggaggtgcaccagctcgtggtccatgccgggcgccagccccaccgctgcccatcctgtggggctgccttcccctcctcactgcggctccgggagcaccgctgtgcagccgctgctgcccaggccccacggcgctttgagtgtggcacctgtggcaagaaagtgggctcagctgctcgactgcaggcacacgaggcggcccatgcagctgctgggcctggagaggtcctggctaaggagccccctgcccctcgagccccacgggccactcgtgcaccagttgcctctccagcagcccttggaagcactgctacagcatcccctgcggcccctgcccgccgccggggtctagagtgcagcgagtgcaagaagctgttcagcacagagacgtcactgcaggtgcaccggcgcatccacacaggtgagcggccatacccatgtccagactgtggcaaagcgttccgtcagagtacccacctgaaagaccaccggcgcctgcacacaggtgagcggccctttgcctgtgaagtgtgtggcaaggcctttgccatctccatgcgcctggcagaacatcgccgcatccacacaggcgaacgaccctactcctgccctgactgtggcaagagctaccgctccttctccaacctctggaagcaccgcaagacccatcagcagcagcatcaggcagctgtgcggcagcagctggcagaggcggaggctgccgttggcctggccgtcatggagactgctgtggaggcgctacccctggtggaagccattgagatctaccctctggccgaggctgagggggtccagatcagtggctga

SEQ ID NO: 20411 - DNA, 472 bp, Homo sapiens
  MAP TO AL031282.1; EXPRESSED IN HELA, SIGNAL = 1.2; EXPRESSED IN ADULT LIVER, SIGNAL = 2.3; EXPRESSED IN LUNG, SIGNAL = 1.8; EXPRESSED IN HEART, SIGNAL = 1.7; EXPRESSED IN FETAL LIVER, SIGNAL = 1.8; NT HIT: gi14726553, EVALUE 5.00e-50; EST_HUMAN HIT: BI832764.1, EVALUE 8.00e-87; SWISSPROT HIT: O95544, EVALUE 4.00e-12
gctccctctcaggaattgactaaggctgttatttcaggagtggctttcctgggcgccgcaacccccacgcctgctcttctgaagagaagacacagcaggaaggcccacgtcagatgtggccccttgatctcggacttcccggcctccagggccacgagcccaccagctcattgttggtcacccagtctggtgcttgccatggcggcacacacaaacccagacacccggcagatccccactcagtccccagttccagacaagcagccgttgcccagcacttgaggtggttcccatggtctcacggggcggtgatgtggatggaggcccccccaactccatgtgcaccccaggcccccttcccccctgccccgcgtgcctccatgaggtgcgtgcagagctccttgaacggctgcagtaggctggcatctctcatcttcttgatgacaaggacgctctttggggacttgttcca

SEQ ID NO: 20412 - DNA, 756 bp, Homo sapiens
  MAP TO AC010958.2; EXPRESSED IN HEART, SIGNAL = 2.3; EXPRESSED IN FETAL LIVER, SIGNAL =   2; EXPRESSED IN BRAIN, SIGNAL =   2; EXPRESSED IN ADULT LIVER, SIGNAL = 2.4; EXPRESSED IN BONE MARROW, SIGNAL = 2.2; EXPRESSED IN LUNG, SIGNAL = 2.2; EXPRESSED IN HELA, SIGNAL = 0.91; EXPRESSED IN PLACENTA, SIGNAL = 1.8; SWISSPROT HIT: Q92953, EVALUE 3.00e-32; NT HIT: gi13645912, EVALUE 0.00e+00; EST_HUMAN HIT: BG029104.1, EVALUE 1.00e-34
cagcgcatccgcggagtcgtcggccaggcccgcgctgtcggggccctgcgagctgtcctcggtggctgtggccgagtgcgtgctgtcctcctgcagggccggctcggggctggccgcgcgctgctgctgctccttgagctcggagtaggagcgcgaaaaggtgtggaagatggaggtgaccgggaaggccatgagcaggatgccgctgaggatgctgctgagcgccaccacctgcccgggcaggctgcgcgggaccatgtcgccgtagcccacggtggtcatggagatgacggcccaccaatagctggcgggcacgctggagaagtcgcggcgcgcgcccagctcgcgctcggccaggtgcaccagtggcgcgaagagcgccatggccacgcagaggaacagcagcagcagcccgaactcgcgcgcgcagcggcgcatggtcaggcccagcgaacgcagccccagcgagtggcgcgccaggcgcatcacgtagagcacgcgcagcgcacgcagcagccgcagcaccagccccgcgcgctccaggagcttggtcccgcccgggcctgccgccagccccagcagcagcgacacgtagaacggcaggagcgccaggatgtcaatgatgttgagtggcgcgcgcaggaaggcgcacttgctctcggcctgcagggagcgcagcaggaactcgaaggagaaccaggccacgcacacggtctccagcacgaacaggctgcggcacttgggggagcactcgcc

SEQ ID NO: 20413 - DNA, 879 bp, Homo sapiens
  MAP TO AP000503.1; EXPRESSED IN LUNG, SIGNAL = 1.6e+02; EXPRESSED IN HEART, SIGNAL =  25; EXPRESSED IN BONE MARROW, SIGNAL =  42; EXPRESSED IN ADULT LIVER, SIGNAL =  16; EST_HUMAN HIT: BI711580.1, EVALUE 0.00e+00; SWISSPROT HIT: P08107, EVALUE 0.00e+00; NT HIT: gi11417761, EVALUE 0.00e+00
gaagtcgatgccctcaaacagggagtcgatctccaggctggcctgggtgctggacgacagggtcctcttggccctctcgcaggcggtgcgcagccgcctcacggctcgcttgttctggctgatgtccttcttgtgttttctcttgaactcctccacgaagtggttcaccagcctgttgtcaaagtcctccccacccaggtgggtgtccccggccgtggccttcacctcgaagatgccgtcgtcgatcgtcaggatggacacgtcgaaggtgcccccgcccaggtcaaagatgagcacgttgcgctcccccttgcccgttctgtccaggccgtaggcgatggcggcggccgtgggctcgttgatgatccgcagcacgttgagccccgcgatcacacccgcatccttggtggcctggcgctgcgagtcgttgaagtaggccggcacggtgatcaccgcgttggtcaccgggtagcccaggtacgcctcggcgatctccttcatcttggtcagcaccatggacgagatctcctcggggtagaatgccttggtctcccccttgtagctcacctgcaccttgggcttgtctccgtcgttgatcacctggaaaggccagtgcttcatgtccgactgcaccaccgggtcgccgaacttgcggccgatcagccgcttcgcgtcaaacacggtgttctgcgggttcagcgccacctggttcttggccgcatccccgatgagccgctcggtgtccgtgaaggccacgtagctgggggtggtgcggttgccctggtcgttggcgatgatctccaccttgccgtgttggaacacccccacgcaggagtaggtggtgcccaggtcgatgccgatcgccgcggctttggccat

SEQ ID NO: 20414 - DNA, 595 bp, Homo sapiens
  MAP TO AL133551.4; EXPRESSED IN ADULT LIVER, SIGNAL = 3.6; EXPRESSED IN BRAIN, SIGNAL = 6.3; EXPRESSED IN HEART, SIGNAL =   7; EXPRESSED IN LUNG, SIGNAL =   3; EXPRESSED IN BONE MARROW, SIGNAL = 4.5; EST_HUMAN HIT: BG757667.1, EVALUE 2.00e-32; NT HIT: gi14748204, EVALUE 1.00e-35
aagcgactgcgagagtctcccgacctggctgctgcggaaagaacaaggccgcccaggcgggccacggacggaggaaaagagcgaatccactggcagctcgcgcagtaggaaccgcagccccggaggagcgcggctgaacggagggccggggtggggaggggaacgccgcggagcctgccccgagcccccagccgccctcaacctcaggccagtaggagcccggggagagggaggaggagatgcgcagttccggccgcccgcaccctgcgcacctcggtacccaatcgccgccgccgccgcctcttcctcctcctcgccctcgtcgtcgtcgtcttcgtcgtacaagttgtcggccagcggtggctcccgagatgggccctgcaggcccggcccattgtctccttccccagccgccgcagtcgcctgggcctcttgctccccgcctgccgccgccgcctctgcctccgcctcccgccacagcgccgccgccgccgcacccgggcagcccctggccgccgccggcacctcacgctctggggccgccccaccgggctcgcccgggctccgctcgaggccgggaccatctctccgcggc

SEQ ID NO: 20415 - DNA, 593 bp, Homo sapiens
  MAP TO AC005020.1; EXPRESSED IN ADULT LIVER, SIGNAL = 2.8; EXPRESSED IN PLACENTA, SIGNAL = 2.9; EXPRESSED IN HELA, SIGNAL = 3.2; EXPRESSED IN LUNG, SIGNAL = 3.2; EXPRESSED IN BRAIN, SIGNAL = 2.8; EXPRESSED IN BONE MARROW, SIGNAL = 3.6; EXPRESSED IN HEART, SIGNAL = 3.1; EXPRESSED IN FETAL LIVER, SIGNAL =   3; EST_HUMAN HIT: BE540085.1, EVALUE 3.00e-74; NT HIT: gi13937343, EVALUE 0.00e+00; SWISSPROT HIT: P51814, EVALUE 9.00e-62
ggcaggacagtggtagggcttctcccctgtatggattctctggtgtcggaccagccgctcccctttgctgaaccgcttcccgcacacctggcacccatatggcttctcgccagtgtgggcacgccggtgcaccgccagattggcattcctgctgaagctcttgccacactcgcaggtgtagggcttctccccggtgtgcgtcctccggtgcacctgcaggtgctgcctgcggctgaagctcttccagcagtccccgcacttgtagggcttctccccagtgtggctgcgctggtgcacctccaggtggtgtctctggctgaaggttttccagcactcgctgcacacgtagggcctctttcccaggtgggttctctggtgcttcatcaggtattctctcagggtaaagcccttcccacactccacacagccataagacttctcttcgtgggttcgctggtgcctgacgagattggagctccgactgaatcctttcccacactcagggcactggaaaggcttccagaaggagctgtgggttttgacttcgtcaggcagggggatggcaccgtgctggggaggaggaagcccaggcg

SEQ ID NO: 20416 - DNA, 710 bp, Homo sapiens
  MAP TO M63544.1; EXPRESSED IN ADULT LIVER, SIGNAL = 1.3; EXPRESSED IN HELA, SIGNAL = 2.3; EXPRESSED IN LUNG, SIGNAL = 1.3; EXPRESSED IN HEART, SIGNAL = 1.5; NT HIT: gi14729302, EVALUE 0.00e+00; EST_HUMAN HIT: BI226459.1, EVALUE 0.00e+00; SWISSPROT HIT: Q9Y6A5, EVALUE 0.00e+00
gctcctccgtggcaggcccagcatgcaactgttcagccgctggctggcccagcctggtctcagggctttctgggggctgggcctcactgcaaccagacttggtgtcacctccgaacgggatgaagtttgggtcatccattttgtcccagtcgaggtggtaagagccccgagaagctggcatgggggggtcctctcccgctccgctcctaccgtcgtcctcctccacctcctgcggggccttctgctgcctcactgctgctttcctcaagggaggcttgagcccggacctctctcccagtctccttggtgggggtgcccttttgctggtggcgccatcagatacatcaaattctagttttacaggtccgctcctcgaggagctggccatttggcctgcagccacttcttcctgaggactcagggtcatggccctgccagccaccaggtggttggttggggctgtgctctcaggagcagaggtgtgtgcacaggtaagggtctgagtgccatctgctggcacgggggtgcccacacccgcagggcagcccagggcttcgccaggcagaccctgcaggggtgctcctccgcaggcttccttagggattgcaccaggaggcgaagtggccactgctgcgggagcacagaccccaccgtgccggcattcctcctcggctccgtgcggagtctccgctttgtgctgggactctgtc

SEQ ID NO: 20417 - DNA, 552 bp, Homo sapiens
  MAP TO AC007059.1; EXPRESSED IN ADULT LIVER, SIGNAL = 1.8; EXPRESSED IN PLACENTA, SIGNAL = 1.7; EXPRESSED IN HELA, SIGNAL = 3.8; EXPRESSED IN BONE MARROW, SIGNAL = 1.6; SWISSPROT HIT: O15015, EVALUE 4.60e-01; NT HIT: gi14761720, EVALUE 0.00e+00; EST_HUMAN HIT: BE882348.1, EVALUE 0.00e+00
acaggttcaggggtgtcatgtcttcccgtggtgccccccagggaccctcagatgggtgcagttccccatgaagggcccccggcagcatctcccgcttgatctccacccgtatttgttcaggcttcagcttcttgggcaaggagggtgcagccaggcctgggaacatctttcgggccgtaggaggaggagaggcagttggtgagtggcccagggggctgcccggtggtggtggcaacttcttggccaagggtgagatgtgaaggtccgaggggctgcgggcttccagtgagctgccaggacctgcgccgcccatcatcttggccagggcttttgggcttggccctggtgggttgggaggtccaccaggccgagactgggtccgtctcttcaggatctcccgcagcgtgtcgatgggcgagccattgacgtaccactcggtcacgcccatttgccgcagatgggagcgcgcgtggctcgagaggcccttgcggttctcgaagaactcaccacagaactcgcagcggatgtctcgtgctggctctgggcctgagg

SEQ ID NO: 20418 - DNA, 2067 bp, Homo sapiens
  MAP TO AC010680.2; EXPRESSED IN ADULT LIVER, SIGNAL = 1.2; EXPRESSED IN PLACENTA, SIGNAL = 1.7; EXPRESSED IN BRAIN, SIGNAL = 1.1; EXPRESSED IN HEART, SIGNAL = 9.9; EXPRESSED IN LUNG, SIGNAL = 1.1; EXPRESSED IN BONE MARROW, SIGNAL = 1.3; NT HIT: gi16157781, EVALUE 0.00e+00; EST_HUMAN HIT: AW293420.1, EVALUE 0.00e+00; SWISSPROT HIT: Q14324, EVALUE 8.00e-60
caaatggatgttcagcaattattggtgctgattctagaggtttgctgacaccaaatctgttctctgaactgacacggaaagaatattccatgtattttgtgagatgagtgactttaatttgagtgcgcttgacactggaattgacaagctgccaagctgttgtacccgattcacgcttttcaactatgtaattagtaatttcagtgcctcctccatctttaggttctccccatgacaggacacacgattcagctgagacagatgagacctcaatggggccggttactggacctggccttccaatgaccacaactgtgacgctaaatgttttaacaccagctgtattttccagggtcaagaagtatcttccagagtcacctctcatgctgtcctttacagtcagtgtggttctgtcttttgttgttgtaatgctcactcgatctgtctctttaagtctcatttcttccagtttccatgttactttgggggcaggacgaccactgattggtacgtcaatggtaaatgggcttcctgctttgcaagttataagctgattggtaattccagtgaggtcagcagtgggctcgatttgaggctccttaatgatgacagaagagaaggcttctctgggttcactatagccagcatcattcttggccttcacacggaattcatattcagttttctcaacaagacgctctactgtgaaagttagctgtttggtgtgaccagcttcaacccagaagtcagatcccttttgtctcatttcaagcaggtagccagtgatccggctgcctccatcgtggtcaggtttaagccaagctaagactgcggaggatttgctagtatcaacaacatcaagtctcctaggtggagcaggctgttctgtggctacaattggttctggcatttcatagggctcaccaacaccatactcatttactgcagaaacacggaaatagtacggaacaccttcggccaggtcattgaccttgaagatctgacgagtgcatttttcactgataacctgccaactacggcgacttgcctctcgtttctctaccacataatgatggattcgggcaccaccgtcaagaagaggggcatcccacatcaatgtagcagatccccgggtcacatctttgaaggtaattgggccaggtgggcctggagtgtctagcactttcacggtgaatgtgattgacttactaccactgttgttttccacagtaagggtatatttccctgcatcatttctgttgcagttttccacagtgagggtgctgaaggaatctgttgtatggatatcagcccgaaggctaaggttagagtctggtttgctccacacagctgtaggagtaggtctaccttggtaggcaatgaagaggcgaatactggccccagctctaacaacatgagtctgtttgaagtttgcatctatgtctaactcaggagctgttaaccggtcaactgctttaattgtgccagtcacttcacagctgtcgccttttccagcaccattgatagcactaactcggaatttgtattcttcacctgcttgtagatcagtgactgtatatcttgttttcacacatgcctctgcattcaccttgtgccagtctcctaagtcggccttacacatttcaataatatacccaattatttccctgccaccatcaaacactggtttggaccattctaagctcacagttgtctttgatgtgtctgttactttgaccactgtgggaggacctggtgggttgacgggctctctacatttaatgagtcttgagatgccacttgcaggtccaactcctgcagcattttcagccatgacatggaattcatactcattgccttctgtcagaccagtgactttgaatcttgtttcagagattggtcgtttgctgatcacttttacccatcttgtgcttttcttttctcttctttcaaggatatactgttgaatttcactgccaccatctgattctggccttgcccatgtcagggtaatgctgttgcctgttatgttgctaggttctggaatgccaggggcatcaggaacag

SEQ ID NO: 20419 - DNA, 664 bp, Homo sapiens
  MAP TO AL122002.16; EXPRESSED IN ADULT LIVER, SIGNAL = 1.3; EXPRESSED IN HELA, SIGNAL = 1.1; EXPRESSED IN BRAIN, SIGNAL = 1.1; EXPRESSED IN HEART, SIGNAL = 1.4; EXPRESSED IN LUNG, SIGNAL = 1.2; EXPRESSED IN BONE MARROW, SIGNAL = 1.3; EST_HUMAN HIT: AI446581.1, EVALUE 7.00e-51; NT HIT: gi16179480, EVALUE 4.10e-02; SWISSPROT HIT: P51517, EVALUE 1.00e-19
caaggaacaatttcatactctcttagctcgtgatcttgattggcaagtagcaatggctgactttattcgtaatatcagcttcaatttaccagcctctaagctcctgaactttttacaaactatgcctgtgaagtttgtatctattgttgtctctgagcctttacttcatgccatcactctctttacagatggttcaggaaaaactggaaaagcagctatagtgtggcaagatgccatgcaaaactggcagtacagaatccaggagcattttaaaaactacacaacaggcagagttaggtgccttgatattggccttacaaattttcctcaccaagacgtaaatatacttagtgattccacttatgcggtgtatagtattactcatttagatcttgcacatgtgaagggcattactaatgaacccctactagctttgtctcttgcagcgcaagactcctccttgccagtcatcaccctctttacatcacacatattcgctctcattctgggctatctggtcccttgtcagaaaggaatgcttgagctgatgctctggtacgaccacagatgtggtttgcagattctcctgcttttttgcgagctcaagctgatcatgctgtttttcatcagaacgcctgcagtcttaaacaacagtttcatttga

SEQ ID NO: 20420 - DNA, 574 bp, Homo sapiens
  MAP TO AC003038.1; EXPRESSED IN ADULT LIVER, SIGNAL = 1.2; EXPRESSED IN BRAIN, SIGNAL = 1.2; EXPRESSED IN HELA, SIGNAL = 1.4; EXPRESSED IN BONE MARROW, SIGNAL = 1.4; EXPRESSED IN HEART, SIGNAL = 1.2; EST_HUMAN HIT: AL556156.1, EVALUE 0.00e+00; NT HIT: gi15529983, EVALUE 0.00e+00; SWISSPROT HIT: P22462, EVALUE 2.20e-01
atgctcagtgacctccaggagtctgtggccagctctcgcccccaggaggtgtcagcatacctcacccgcttctgcgaccagtgcaaacaggacaaggcctgccgcttcctcgcggcccagaagggggcctaccccatcatcttcactgcctggaagctggccactgcaggtgaccagggccttctgctccagtccctcaatgccctgtcggtgctgactgatggacagccagacctcctggatgcccagggcctgcagctcctagtggccacgctgacccagaatgctgatgaggctgacctgacctgctctgggatccgctgtgtgcgtcacgcttgcctgaaacatgaacagaatcggcaagacctggtgaaagctggcgtgctgcctctgctgactggtgccatcacccatcatggccaccacactgacgtggtcagggaagcctgctgggccctgcgtgtcatgaccttcgatgacgacatccgtgtgccctttggccatgcccacaaccatgccaagatgattgtgcaggagaacaaaggcttgaaggtgctcatcgaagccaccaaag

SEQ ID NO: 20421 - DNA, 992 bp, Homo sapiens
  MAP TO AC008543.4; EXPRESSED IN LUNG, SIGNAL = 1.9; EXPRESSED IN BONE MARROW, SIGNAL = 2.3; EXPRESSED IN ADULT LIVER, SIGNAL = 1.9; EXPRESSED IN PLACENTA, SIGNAL = 2.5; EXPRESSED IN HELA, SIGNAL = 2.4; EXPRESSED IN BRAIN, SIGNAL = 1.8; EXPRESSED IN HEART, SIGNAL =   2; EST_HUMAN HIT: AA083811.1, EVALUE 0.00e+00; NT HIT: gi15304226, EVALUE 2.00e-91; SWISSPROT HIT: P16415, EVALUE 1.00e-129
gaacatcagaactgacactggacaccaaccacataagtgtcagaaatttttagagaagccatataaacataaacaacgtaggaaagccttgagccatagccactgctttcgaacacatgaaaggcctcacactagagagaaaccttttgattgtaaggaatgtgaaaaatctttcatttctcctgcaagcattcgaagatatatggtaacgcacagtggagatggaccttataaatgtaagttttgtgggaaagccttggattgtctcagtttataccttacccatgaacgaactcacactggagagaaacgatatgaatgtaaacaatgtggtaaagccttcagttggcacagttctgttcgaatccatgaaagaactcacactggggagaagccatatgaatgtaaggagtgtgggaaatcattcaatttttccagttcctttcgcagacatgaaaggacacacacaggagagaagccgtacaaatgtaaggaatgtgggaaagccttcaattgtcccagttcttttcacaggcatgaaaggactcacacaggagaaaaaccctatgaatgtaaactatatgggaaagcattatctcgccttataagctttcgaagacacatgagaatgcacactggagagaggcctcataaatgtaagatatgtgggaaagccttttactctcccagttcatttcaaaggcatgaaagaagtcacactggagagaaaccctacaaatgcaagcaatgtgggaaagccttcacttgttccacttcgtttcaatatcatgaaaggactcacactggagagaaacccgatgggtgtaagcaatgtgggaaagccttcagatctgccaagtacattcgaatacatggaaggactcacactggtgagaaaccctatgaatgtaagcaatgtgggaaagcatttcattgtgtcagctcctttcatagacatgaaaggactcacgctggagaaaaaccttatgaat

SEQ ID NO: 20422 - DNA, 871 bp, Homo sapiens
  MAP TO AC007708.13; EXPRESSED IN PLACENTA, SIGNAL = 2.3; EXPRESSED IN BRAIN, SIGNAL = 1.6; EXPRESSED IN HELA, SIGNAL = 1.4; EXPRESSED IN ADULT LIVER, SIGNAL = 1.9; EXPRESSED IN BONE MARROW, SIGNAL = 1.8; EXPRESSED IN FETAL LIVER, SIGNAL = 1.9; EXPRESSED IN LUNG, SIGNAL = 1.5; EXPRESSED IN HEART, SIGNAL = 1.9; SWISSPROT HIT: P29720, EVALUE 5.00e-11; NT HIT: gi14756466, EVALUE 0.00e+00; EST_HUMAN HIT: AL110383.1, EVALUE 0.00e+00
gcgtccacgttagcgtgccttgtcggtgccattagcaatgtcgtataaagcgccctcattggtgatgtcttgtacagtgccctcattagcgatgttgtgtacagtgtacttgttagcgacggcttgtagggtgtcctcgttagcgatgtcgtatacagctcgttggcgatgccgtgggcggcgtcctctttggcgatgccctgggcggcgtcctcgttggcgatgccctgggcggcgtcctcgttggcgatgccctgggcggcgtcctctttggcgatgccgtgggcggcgtcctcgctggcgatgccctgggcggcgtcctcgctggcgatgccctgggcggcatcctcgttggcgatgcccttgtcggcggcctcgttagcgatgccctgggcggcgtcctccttggcgatgccctgggcggcgtcctctttggcgatgccctgggcggcgtcctcgttggcgatgccctgggcggcgtcctccttggcgatgccctgggcggcgtcctcgttggcgatgccctgggcggcgtcctcgttggcgatgccgtggacggcgtactccttggcgatgccctggatggcgtcctcgttggcgatgccctgggcggcgtcctcgctggcgatgccgtgggcggcgtcctctctggcgatgccgtgggcggcgtcctcactggcgatgccgtgggcggcgtcctcgctggcgatgccgtgggcggcgtcctcgttggcgatgccgtgggcggcgtcctcgttggcgatgcccttgtcggcggcctcgttagcgatgtcgtgtacagtatcctcgttagcgatgtcgtgtgtggcgtcctcgttagtgatgtcgtgtacggtgtcctcatggggag

SEQ ID NO: 20423 - DNA, 2397 bp, Homo sapiens
  MAP TO AC025436.2; EXPRESSED IN ADULT LIVER, SIGNAL = 3.7; EXPRESSED IN HELA, SIGNAL =   2; EXPRESSED IN LUNG, SIGNAL = 3.6; EXPRESSED IN BONE MARROW, SIGNAL = 3.6; EXPRESSED IN FETAL LIVER, SIGNAL = 3.1; SWISSPROT HIT: Q9Y5E7, EVALUE 0.00e+00; NT HIT: gi15295804, EVALUE 0.00e+00; EST_HUMAN HIT: BG722685.1, EVALUE 0.00e+00
atggaggccggagaggggaaggagcgcgttccgaaacaaaggcaagtcctgatattctttgttttgctgggcatagctcaggctagttgccagcctaggcactattcagtggccgaggaaacggagagtggctcctttgtggccaatttgttaaaagacctggggctggagataggagaacttgctgtgaggggggccagggtcgtttccaaaggaaaaaaaatgcatttgcagttcgataggcagaccggggatttgttgttaaatgagaaattggaccgggaggagctgtgcggccccacagagccctgtgtcctacctttccaggtgttactagaaaatcccttgcagttttttcaggcggagctacggattagggacataaatgatcattccccagttttcctagacaaagaaatacttttgaaaattccagaaagtatcactcctggaactactttcttaatagaacgtgcccaggacttggatgtaggaaccaacagtctccaaaattacacaatcagtcccaatttccactttcatcttaatttacaagacagtctcgatggcataatattaccacagctggtgctgaacagagccctggatcgcgaggagcagcctgagatcaggttaaccctcacagcgctagatggcgggagtccacccaggtccggcacggccctggtacggattgaagttgtggacatcaatgacaacgtcccagagtttgcaaagctgctctatgaggtgcagatcccggaggacagccccgttggatcccaggttgccatcgtctctgccagggatttagacattggaactaatggagaaatatcttatgcattttcccaagcatctgaagacattcgcaaaacgtttcgattaagtgcaaaatcgggagaactgcttttaagacagaaactggatttcgaatccatccagacatacacagtaaatattcaggcgacagatggtgggggcctatctggaacttgtgtggtatttgtccaagtgatggatttgaatgacaatcctccggaactaactatgtcgacacttatcaatcagatcccagaaaacttgcaggacaccctcattgctgtattcagcgtttcagatcctgactccggagacaacggaaggatggtgtgctccatccaagatgatcttccttttttcttgaaaccttctgttgagaacttttacactctggtgataagcacggccctggaccgggagaccagatccgaatacaacatcaccatcaccgtcaccgacttcgggacacccaggctgaaaaccgagcacaacataacagtgctggtctccgacgtcaatgacaacgcccccgccttcacccaaacctcctacaccctgttcgtccgcgagaacaacagccccgccctgcacatcggcagcgtcagcgccacagacagagactcgggcaccaacgcccaggtcacctactcgctgctgccgccccaggacccgcacctgcccctcgcctccctggtctccatcaacgcggacaacggccacctgttcgctctccagtcgctggactacgaggccctgcaggcgttcgagttccgcgtgggcgccgcagaccgcggctccccggcgttgagcagcgaggcgctggtgcgcgtgctggtgctggacgccaacgacaactcgcccttcgtgctgtacccgctgcagaacggctccgcgccctgcaccgagctggtgccccgggcggccgagccgggctacctggtgaccaaggtggtggcggtggacggcgactcgggccagaacgcctggctgtcgtaccagctgctcaaggccacggagcccgggctgttcggcgtgtgggcgcacaatggcgaggtgcgcaccgccaggctgctgagggagcgcgacgctgccaagcagaggctggtggtgctggtcaaggacaatggcgagcctccgcgctcggccaccgccacgctgcacgtgctcctggtggacggcttctcccagccctacctgctgctcccggaggcggcaccggcccaggcccaggccgacttgctcaccgtctacctggtggtggcgttggcctcggtgtcttcgctcttcctcttctcggtgctcctgttcgtggcggtgcggctgtgcaggaggagcagggcggcctcggtgggtcgctgctcggtgcccgagggcccctttccagggcagatggtggacgtgagcggcaccgggaccctgtcccagagctaccagtacgaggtgtgtctgactggaggctccgggacaaatgagttcaagttcctgaagccaattatccccaacttcgttgctcagggtgcagagagggttagcgaggcaaatcccagtttcaggaagagctttgaattcacttaa

SEQ ID NO: 20424 - DNA, 901 bp, Homo sapiens
  MAP TO AL031711.17; EXPRESSED IN ADULT LIVER, SIGNAL = 2.1; EXPRESSED IN LUNG, SIGNAL = 1.5; EXPRESSED IN HEART, SIGNAL = 2.1; EXPRESSED IN FETAL LIVER, SIGNAL = 3.3; SWISSPROT HIT: Q01033, EVALUE 4.00e-11
tcacagcgttgagatgacccagggacaggtacaggacgcatccgtgggcctgcatcctctatgagcggggggggggggggcgacgtcagtgagattcctgtccctcatcagggtggcccctttgtccctgtggcagggcctgagaacagctatcgtgtagcaggtgacatgggtgatgggcctggggacggccatcgtgtagcaggtgacgtgggtgagggtgctggggatggccgtcgtgtagcaggtggcgtggttgaaggcctggggatggccatcgtgtagcaggtgatgtgggtgaagggcctggggatggccgtcgggtggcaggtgacgtgggtaagggtgctggggacagccattgggtagcaggtgatgtgggtaaagggcctggggacggccatcatgtagcaggtgatgtgggtgagggtgctggggacagccatcaggtagcaggtgacatgggtgaagggcctggggacggccgtcgggtagcaggtgacgtgggtgagggtgctggggacagccatcaggtagcaggtgacatgggtgaagggcctggggatggccgtcgggtagcaggtgacgtgggtgaagggcctgcagacccactcctggccctggcccatgtctctgggcctctgcatggttggcaccctgccagctggtctctgggcgtctgcatggttggcaccctgccagctggtctctgggcgtctgcatggttggcaccctgccagctggtctctgggcctctgcatggttggcaccctgccagctggtcctgggcctctgcatggttggcaccctgccagctggtctctgggcctctgcatggttggcacactgccagctgccgcagcgcccaccccagcacctgcccaggtctgcctccaactgc

SEQ ID NO: 20425 - DNA, 636 bp, Homo sapiens
  MAP TO AL096710.8; EXPRESSED IN BONE MARROW, SIGNAL = 2.4; EXPRESSED IN FETAL LIVER, SIGNAL = 2.8; EXPRESSED IN LUNG, SIGNAL = 2.1; EXPRESSED IN HEART, SIGNAL = 2.3; EXPRESSED IN PLACENTA, SIGNAL = 2.1; EXPRESSED IN ADULT LIVER, SIGNAL =   2; EXPRESSED IN BRAIN, SIGNAL = 1.8; EXPRESSED IN HELA, SIGNAL = 2.3; NT HIT: AF396879.1, EVALUE 1.00e-112; SWISSPROT HIT: P58107, EVALUE 2.00e-18
agctgctcttaaaatgcttatgtttcttccacattttaatgttattctacctccttcttgtggtctcacaggtagaagccacatccctgtgttttcctgtaaagtacttctttgtaccatatctattaaagaaaccttctcagaggtgcaggggtcaataagatctttgcacatattttgcctttccagaactttagaaaataatgctgaggaaaccaagttctgttggaaagccttctgtagggtcaactgttctcctgtggctggaataaccagagagcctgtagaaagcagtatctcaagaactttgatggccatggattctgttatcatgctttgagctagagcatccagtactggaattgtggtaggtgacgcagcagaaataatctccttagctttacttagttctttgagttggcacagaatttgttcatcaataaggccatgacttttggcatctttaaggtcaaagcactttcttaattctggtgaaattagaccagaaatcattagctgtgtctcaagcaacctaattcctgtgtcatagtcaatgaggcctcttaaaactgcttgaaagactgaaaggacttctccagttgtctgatcaatggtgcctgcaatcactttatccag

SEQ ID NO: 20426 - DNA, 783 bp, Homo sapiens
  MAP TO AC009567.8; EXPRESSED IN BONE MARROW, SIGNAL = 2.2; EXPRESSED IN FETAL LIVER, SIGNAL = 2.2; EXPRESSED IN LUNG, SIGNAL = 1.9; EXPRESSED IN BRAIN, SIGNAL =   2; EXPRESSED IN ADULT LIVER, SIGNAL = 1.8; EXPRESSED IN PLACENTA, SIGNAL = 1.8; EXPRESSED IN HELA, SIGNAL = 2.9; EST_HUMAN HIT: X85679.1, EVALUE 0.00e+00; NT HIT: gi14738100, EVALUE 4.80e-02; SWISSPROT HIT: O43390, EVALUE 3.00e-26
ccaaatgaagtaatgtaaactgggctgccagttcctttgcatcttctaacgtagtacagagtttgtctggcatgaagtaactctgggatccatttgcaatagcaggaataactatcttatacaccaagagtactttcccatcttgacttgttgttgaatataaataatattctggtggtgcccagttatttttgttgcagtaataatccaaatgcattactgcagaattaaaatgattggattttaaagaatacatactaattggagtaagctttgttccaggataaaaagggtaagtgcatctttcaacttcaggcggacttgggctatgctgaccattgagacgagcaggaagagttggcagcttgcctagagtttttgggtggctctcttctttgttagcaaacacaatcagattttcagaatttggactaatctgaccattaagatgctgtctccaagtgttttctttatttactggtttagctagtgttacctcaatacttgctccatcaatgcattttccattcataacagacatggcagccactgcatcttctcggttgaaaaagtgaacaaaagcataatctctaagtttctttacccgttcaactgcaccaggcttaaatttattgaattctgctttaattgtttcctctgtagttgagatcattaaatttcttacataaagaactttaactctctgcatggtttcctcatccacctctttctctgggtcagcccaatctacctgaatggtgtggccccatagttggaatgttc

SEQ ID NO: 20427 - DNA, 1872 bp, Homo sapiens
  MAP TO AC000025.2; EXPRESSED IN LUNG, SIGNAL = 1.1; EXPRESSED IN BONE MARROW, SIGNAL = 1.6; EXPRESSED IN HELA, SIGNAL = 1.2; EXPRESSED IN ADULT LIVER, SIGNAL = 1.2; EXPRESSED IN FETAL LIVER, SIGNAL = 1.2; SWISSPROT HIT: P12036, EVALUE 2.00e-33; EST_HUMAN HIT: BE782873.1, EVALUE 0.00e+00; NT HIT: gi16167928, EVALUE 0.00e+00
aaaactcctggaaggtgaagagtgtcggattggctttggcccaattcctttctcgcttccagaaggactccccaaaattccctctgtgtccactcacataaaggtgaaaagcgaagagaagatcaaagtggtggagaagtctgagaaagaaactgtgattgtggaggaacagacagaggagacccaagtgactgaagaagtgactgaagaagaggagaaagaggccaaagaggaggagggcaaggaggaagaagggggtgaagaagaggaggcagaagggggagaagaagaaacaaagtctcccccagcagaagaggctgcatccccagagaaggaagccaagtcaccagtaaaggaagaggcaaagtcaccggctgaggccaagtccccagagaaggaggaagcaaaatccccagccgaagtcaagtcccctgagaaggccaagtctccagcaaaggaagaggcaaagtcaccgcctgaggccaagtccccagagaaggaggaagcaaaatctccagctgaggtcaagtcccccgagaaggccaagtccccagcaaaggaagaggcaaagtcaccggctgaggccaagtctccagagaaggccaagtccccagtgaaggaagaagcaaagtcaccggctgaggccaagtccccagtgaaggaagaagcaaaatctccagctgaggtcaagtccccggaaaaggccaagtctccaacgaaggaggaagcaaagtcccctgagaaggccaagtccccagagaaggaagaggccaagtcccctgagaaggccaagtccccagtgaaggcagaagcaaagtcccctgagaaggccaagtccccagtgaaggcagaagcaaagtcccctgagaaggccaagtccccagtgaaggaagaagcaaagtcccctgagaaggccaagtccccagtgaaggaagaagcaaagtcccctgagaaggccaagtccccagtgaaggaagaagcaaagacccccgagaaggccaagtccccagtgaaggaagaagccaagtccccagagaaggccaagtccccagagaaggccaagactcttgatgtgaagtctccagaagccaagactccagcgaaggaggaagcaaggtcccctgcagacaaattccctgaaaaggccaaaagccctgtcaaggaggaggtcaagtccccagagaaggcgaaatctcccctgaaggcggatgccaaggcccctgagaaggagatcccaaaaaaggaagaggtgaagtccccagtgaaggaggaggagaagccccaggaggtgaaagtcaaagagcccccaaagaaggcagaggaagagaaagcccctgccacaccaaaaacagaggagaagaaggacagcaagaaagaggaggcacccaagaaggaggctccaaagcccaaggtggaggagaagaaggaacctgctgtcgaaaagcccaaagaatccaaagttgaagccaagaaggaagaggctgaagataagaaaaaagtccccaccccagagaaggaggctcctgccaaggtggaggtgaaggaagacgctaaacccaaagaaaagacagaggtggccaagaaggaaccagatgatgccaaggccaaggaacccagcaaaccagcagagaagaaggaggcagcaccggagaaaaaagacaccaaggaggagaaggccaagaagcctgaggagaaacccaagacagaggccaaagccaaggaagatgacaagaccctctcaaaagagcctagcaagcctaaggcagaaaaggctgaaaaatcctccagcacagaccaaaaagacagcaagcctccagagaaggccacagaagacaaggccgccaaggggaagtaaggcagggagaaaggaac

SEQ ID NO: 20428 - DNA, 669 bp, Homo sapiens
  MAP TO AC018720.2; EXPRESSED IN HEART, SIGNAL = 2.7; EXPRESSED IN BONE MARROW, SIGNAL = 6.4; EXPRESSED IN FETAL LIVER, SIGNAL = 1.4; EXPRESSED IN ADULT LIVER, SIGNAL = 3.3; EXPRESSED IN LUNG, SIGNAL = 4.1; SWISSPROT HIT: Q09511, EVALUE 1.80e-02; EST_HUMAN HIT: BF341828.1, EVALUE 0.00e+00; NT HIT: gi14746079, EVALUE 1.00e-124
tcatccagcctccagcccacccgattcctccccacctcctccacctccccaggccccacctacctcctccaactcctccggggaaacccaagccctgccgctcatggaacagaagaactggaaccgacgtttctggaacaggactatctgagagcggttcttcctggccctcaggttcatggaacggcctaactggaaccgacgcttacggagcaagggtatgcgagagcggttcttcctggccctcgggttcatggaacggcctaactggaaccgacgcttacggagcaagggtatgcgagagcggttcttcctggccctcgggttcatggaacggcctaactggaaccaacgcttacggagcaagggtatgcgagagcggttcttcccatacaggaagtggaagatgttttgtttggagtcctcgtcgtcctcctccatgtcattggccaggtagctgaggacagaaatcaggttgctgctcaggggcaccaccaagagaggcctccggctgaggtcagcttcccagagaggaaggtaagggaccgtccctagctcaggactggcacccaccctgcagagagccacgccttcctcaggagggctctgctggacagagacctgatcaagggcgtctcccactccttcaggatggagacaaaaacccaa

SEQ ID NO: 20429 - DNA, 482 bp, Homo sapiens
  MAP TO AL356020.2; EXPRESSED IN PLACENTA, SIGNAL = 1.7; EXPRESSED IN LUNG, SIGNAL = 1.9; EXPRESSED IN HEART, SIGNAL = 2.4; EXPRESSED IN FETAL LIVER, SIGNAL = 1.7; EXPRESSED IN ADULT LIVER, SIGNAL = 1.9; EXPRESSED IN HELA, SIGNAL = 2.1; EST_HUMAN HIT: BE150340.1, EVALUE 1.00e-122; NT HIT: gi9635487, EVALUE 1.00e-123; SWISSPROT HIT: P26810, EVALUE 2.00e-23
cttatcagcagaagcgttgccctgagcactgggatgtgatgccttttgatggcccttgcagtgaatgattccagcttccttttgaagtaaagtggcctttggaagtaaagcggccttgagaagagtttttattaaagaggcattaataatggaggatccttgtgtagtgaggaaacctctttctgcccatgtaacagcatggtggtgcaggatatggaaggcatatttagagtcaacataaatattgacgcacagttcttttgcaagagtgagggcctgagttaagacagtgagttcggcttgctgagaggtagtggaggggggcagagcggtagactcagtgatagatggggaagacactatagcatagcctgcctttgccagtgattggcgattgggcctggaagaactaccatcaataaaccaagtgtgatcagggtgaggaacaggaaagaaggaaatatggggaaatgaagtgaatg

SEQ ID NO: 20430 - DNA, 549 bp, Homo sapiens
  MAP TO AL031033.5; EXPRESSED IN LUNG, SIGNAL = 1.6; EXPRESSED IN BONE MARROW, SIGNAL =   2; EXPRESSED IN ADULT LIVER, SIGNAL = 1.6; EST_HUMAN HIT: BI916231.1, EVALUE 7.00e-66; NT HIT: gi14777086, EVALUE 3.00e-55; SWISSPROT HIT: Q01167, EVALUE 3.00e+00
cccgcgcccacgcccacgccaagaccaacctgctgccgggccgtgcagtccaggcccccgatgccgtgcccggcgccggctccagccgcgcgcccgcgcgctggcgacccagagaccctggaagctccgctccggacgcctggcagcgcttccgccctgcaccgctgcgcgcgcagccccgcccccccccccggcccgcccccggcccgcccccgccgcggaagggcggctgcggcggccaatggcgagctccccaggacaggacgcgggggctgcggagcaggaactcgccccgcccacccctcgcgcagccccgcctccgccacgccaaccaatggcgcgcgccgccgggcacgccggctgctgattggcggcgcccggcacgctcggggcgggcagtgcgcgacggcggcggcggcgcgggaggttcggagcgggagctcgggctcgcggacggtatggaggactacgagcaggagctgtgcggcgtcgaggatgatttccacaaccagttcgcggccgagctggaggtgctggcagagctggaag

SEQ ID NO: 20431 - DNA, 819 bp, Homo sapiens
  MAP TO AC006285.9; EXPRESSED IN ADULT LIVER, SIGNAL = 1.5; EXPRESSED IN HELA, SIGNAL = 1.7; EXPRESSED IN FETAL LIVER, SIGNAL = 1.2; EST_HUMAN HIT: BG478377.1, EVALUE 0.00e+00; NT HIT: gi14776852, EVALUE 0.00e+00; SWISSPROT HIT: P34926, EVALUE 2.60e-01
tgccaggatggcaacagcagcagcccctccaaacagcagtatagacttgccctcagacagcggcatgggcttcatctcaccggcgggggacagtctagacttgccctcagacggcggcacgggcttcttctcgctggcaggggacagctcttccacaaggctctcttcccttgcgtttatctccttctcactcagcagcgtttctgtgggttccagtgcggggaccacctcctccacttcagtaggttcagttgttgctgctttcacctcttcttcatcaagttctacaaacagagatgtagcagggctggatttctcaactgtgatcacttctgtgtcaggttcccttgtccccagcagggaggtggcagtgatatgtggaagcaagggagctggggcttcaggaagtgcctcttgcagctcccgcgctggcaagaccacagaagccacagcagcctcttccatgccctcgggcacctcttctttctccacgtgcacaatgtcagaattagaggagttgttctcactcttctctccagctccgttgctgtctaagcttttcacttcttcaggatccattgcaatctgctgccaggactcagggcctagtgacactggcaggctttctgtgtgccaactctggctagctgacagtgacacaggtaagctctcagactgccaggaagtggtcacagttggagactctgggggactgacttgtccagagttgtcgctgggcaggatgtaaatgtcattgctatcttctgcagtgattccagggtattcctcctcctctgactcaagactaaacacagtgcc

SEQ ID NO: 20432 - DNA, 756 bp, Homo sapiens
  MAP TO Z83732.1; EXPRESSED IN HELA, SIGNAL = 1.8; EXPRESSED IN ADULT LIVER, SIGNAL = 1.7; EXPRESSED IN PLACENTA, SIGNAL = 2.7; EXPRESSED IN BRAIN, SIGNAL = 1.9; EXPRESSED IN LUNG, SIGNAL = 1.5; EXPRESSED IN FETAL LIVER, SIGNAL =   2; EXPRESSED IN HEART, SIGNAL =   2; EXPRESSED IN BONE MARROW, SIGNAL = 2.2; EST_HUMAN HIT: BE392128.1, EVALUE 1.10e+00; NT HIT: AF109905.1, EVALUE 2.90e+00
ttagtggtggtgatggtggtagtaattatagccatgatgcaggtggtggtgatcatgaaggtggtgctgatggtggtggtagtaattgtaaccatgatgcaggtggcagtgatcatgaaggtggtgatgattgatggtggtaataatgactgtgataaagatggtggtgatgaaagtggtgatggtgatggtggtgatggtggtggtggtgatgatggtgatgatggtggtagtgatggtggcagtgatggtggtggtaatggtgatgatggtgatgatggtggtagtgatgatggtgatggcggtggtaattatagccatgatgcaggtggcagtgatcatgaaggtggtggtgatggtggtgatggtggtggtgttgatgatggtgatggtggtggtgatgatggtggtggtagtggtggtgacagtgatggtggtggtagtgatggtggtggtaatggtggtgacggtgatggtggtggtagtgatggtggtgatggtggtggtaattatagccatgatgcaggtggcagtgatcctgaaggtggcggtgatggtggtgataatgatggtggtggtagtgatgctgatggtggtggtagtaattatagccatggtgcaggtggtggtgatcatgaaggtggtggtgatggtgatgataatgattgtgatgcaggtggtgatgatgaaggtggtggcagcagagatggtgcttgtgatgataacagggattgttatcatccgaataactaccat

SEQ ID NO: 20433 - DNA, 593 bp, Homo sapiens
  MAP TO AP000503.1; EXPRESSED IN ADULT LIVER, SIGNAL =   2; EXPRESSED IN HELA, SIGNAL = 3.9; EXPRESSED IN BRAIN, SIGNAL = 2.1; EXPRESSED IN HEART, SIGNAL =   2; EXPRESSED IN BONE MARROW, SIGNAL = 2.3; EXPRESSED IN LUNG, SIGNAL = 1.8; SWISSPROT HIT: P26640, EVALUE 5.00e-40; EST_HUMAN HIT: BG285562.1, EVALUE 0.00e+00; NT HIT: gi16174850, EVALUE 0.00e+00
tgctcctggaaggaccccgaggcagaagccgcccttgagctggcgctaagcatcacgcgagccgtgcgctccctgcgggccgactacaacctcacccggatccggcctgactgtgagcctcaggcccccatgtccgccccatcccactgtcccctcagcctactctgggacccagtgtccggcagtgactgcttggtttcctgtctccatggagctaggcctcacctttctccctccctggcaggtttcctggaagtggcggatgaggccacgggcgccctggcatcggcggtgtcgggctacgtgcaggccctggccagcgcaggtgtggtggctgttctggccctgggggctcccgccccccagggttgcgctgtggctctggcttctgatcgctgctccatccacctgcagcttcaggggctggtggaccctgcacgggagctgggcaagctgcaagccaagcgagttgaggcccagcggcaggcccagcgtctgcgggaacgccgtgctgcctcgggctatcctgtcaaggtgccgctcgaagtccaggaggcagatgaagccaaggtgtgtggcctgggtgggcattt

SEQ ID NO: 20434 - DNA, 1110 bp, Homo sapiens
  MAP TO AJ003147.1; EXPRESSED IN ADULT LIVER, SIGNAL = 1.8; EXPRESSED IN PLACENTA, SIGNAL = 2.3; EXPRESSED IN HELA, SIGNAL = 2.7; EXPRESSED IN BRAIN, SIGNAL = 1.8; EXPRESSED IN HEART, SIGNAL = 2.4; EXPRESSED IN BONE MARROW, SIGNAL = 1.6; EXPRESSED IN FETAL LIVER, SIGNAL = 1.5; SWISSPROT HIT: O95201, EVALUE 0.00e+00; EST_HUMAN HIT: BI194439.1, EVALUE 0.00e+00; NT HIT: gi14777845, EVALUE 0.00e+00
ggaagctcgtccctagctggaaacgactttctttttccaggagccgtcgaggtggggcagagggtgcagacctcatccgtggcagcccttgggaatgtgaagcccttcagaaccagggcagggagagtccagtggggcgtcccgcagtgcgcgcaggaagcagcctgcggccggagctcagggccggccaaagactccgggcagccggctgagccagatcgcaccccggatgcagctccgccagaccccagtcccacggagccccaggagtaccgcgtcccggagaagcccaacgaggaggagaagggcgccccggagagtggcgaggagggcctggcccctgacagtgaggtgggcaggaagagctaccggtgcgagcagtgcggcaagggcttcagctggcactcgcacctggtgacgcaccggcgcacgcacacgggcgagaagccctacgcctgcactgactgcgggaagcgcttcggccgcagctcgcacctcatccagcaccagatcatccacacgggcgagaagccctacacctgccccgcctgccggaagagcttcagccaccactccacgctgattcagcaccagcgcatccacaccggagagaagccctacgtgtgcgaccgctgcgccaagcgcttcacccgccgctcggacttggtcacccaccagggcacccacacgggcgccaagccgcacaagtgccccatctgcgccaagtgcttcacgcagagctcggcgctagtcacccaccagcgcacccacactggggtcaagccctatccgtgccccgagtgcggcaagtgcttcagccagcgttccaacctcatcgcgcacaaccgcacacacacaggcgagaagccctaccactgcctcgactgcggcaagagcttcagccacagctcgcacctcaccgcgcaccagcgcacccaccgtggcgtgcggccctacgcctgcccgttgtgtggcaagagcttcagccggcgctccaacctgcaccggcacgagaagatccacaccaccgggcccaaggccctggccatgctgatgctgggggcggcggcggcgggggctctggccacacccccacccgctcccacctag

SEQ ID NO: 20435 - DNA, 971 bp, Homo sapiens
  MAP TO AC008753.5; EXPRESSED IN LUNG, SIGNAL = 3.7; EXPRESSED IN HEART, SIGNAL = 3.4; EXPRESSED IN BRAIN, SIGNAL = 2.3; EXPRESSED IN HELA, SIGNAL = 2.4; EXPRESSED IN ADULT LIVER, SIGNAL = 1.6; EXPRESSED IN PLACENTA, SIGNAL = 2.2; EST_HUMAN HIT: AL540633.1, EVALUE 0.00e+00; SWISSPROT HIT: O35682, EVALUE 4.00e-95; NT HIT: gi16162963, EVALUE 0.00e+00
ttagaccttgacaaaaaccaggtgggcagagtgcaccaggtcagccacatacgccagtaggttgatggccgtcaggatggccacagccagtcggcggtcccaggcacacacgtagtaggcatggctgcggctgcagcttacatctctcgagcgccgaggctggccgccatacttctcatcgaactggtagaggggccagagaacaagggcggtggcatagaggaggacagacagcaaggccagccccgacaggaagctggggaaggggatgggtagcacgttggtgcactcccccaggttcagcaggatggcgatggccgctaggatgaagcagatggcgtacaccgccacgcaccactccagggccggctggtgctggtacaggttggggtcgctgatgaacgcgaagatgatgcaggcaacgaaggtctccagcaccttcagcagcccgggtacggtggccatatagccagtgatctcgccgggccgggcccgggtccaggccacttcggtggcgtaagccacacacgcgatgcaggagaagaaggtggcggcgatggcgtggtcccgcgaacggccgtgggacaggaactggacataggtggtggggtagatgatggaggccgagaggcagaagagggccgcatagcaggcgaaggtgatggggaagttgcgccaagacagggggaagcgggcctggagcccgcacagctccacgatgaggatgatcagggtcacggagaagcagaagcaccaggtgaacatggaccagttgcccatggaccccgtccaggcgcccacgctagccaccagcgagaaggccacgcaggtagacaccagctgcagcaggcgaaggagacccaggggctgtgtcagggcccgaggggaccccacgatcatgggggaccccaggcccgaagatgacgtcgtggtggttgtgatggtggtgcgggttaccgtcactggcatgg

SEQ ID NO: 20436 - DNA, 490 bp, Homo sapiens
  MAP TO AL109612.7; EXPRESSED IN BONE MARROW, SIGNAL = 1.2; EXPRESSED IN FETAL LIVER, SIGNAL = 1.1; EXPRESSED IN ADULT LIVER, SIGNAL = 1.5; EXPRESSED IN HELA, SIGNAL = 0.94; EST_HUMAN HIT: BG341209.1, EVALUE 4.40e-02; SWISSPROT HIT: Q61483, EVALUE 4.00e-10; NT HIT: AJ401980.1, EVALUE 7.30e+00
aaataaatttgatgaatgtttctgaaacatctttcgttggctgtgtgcaaaataccacaacggaagatcagttactttttggctgcagactaaaaggaatgcacactgttaattctaagtggctgagtgttgggacacattattttatcacagttatggcaagtggtccatcaccttgtccactgggacttcgactaaatgtgacagtgaaacagcagttctgccaggaatctctgagttcagaattttgctctggtcatggtaaatgtcttagtgaagcttggagcaagacatatagctgccattgccagcctccattttctggaaaatactgccaggaacttgatgcatgttcttttaaaccatgtaaaaataatggcagttgcattaataaaagagaaaattgggatgagcaagcatatgaatgtgtctgtcacccaccatttacaggtaagattgtttaaaatatataattttattaaaatagaga

SEQ ID NO: 20437 - DNA, 1189 bp, Homo sapiens
  MAP TO AC008688.4; EXPRESSED IN BONE MARROW, SIGNAL =   1; EXPRESSED IN ADULT LIVER, SIGNAL = 1.2; EXPRESSED IN HELA, SIGNAL = 1.1; EST_HUMAN HIT: BG722685.1, EVALUE 0.00e+00; SWISSPROT HIT: Q9Y5E7, EVALUE 0.00e+00; NT HIT: gi15295804, EVALUE 0.00e+00
ttaagtgaattcaaagctcttcctgaaactgggatttgcctcgctaaccctctctgcaccctgagcaacgaagttggggataattggcttcaggaacttgaactcatttgtcccggagcctccagtcagacacacctcgtactggtagctctgggacagggtcccggtgccgctcacgtccaccatctgccctggaaaggggccctcgggcaccgagcagcgacccaccgaggccgccctgctcctcctgcacagccgcaccgccacgaacaggagcaccgagaagaggaagagcgaagacaccgaggccaacgccaccaccaggtagacggtgagcaagtcggcctgggcctgggccggtgccgcctccgggagcagcaggtagggctgggagaagccgtccaccaggagcacgtgcagcgtggcggtggccgagcgcggaggctcgccattgtccttgaccagcaccaccagcctctgcttggcagcgtcgcgctccctcagcagcctggcggtgcgcacctcgccattgtgcgcccacacgccgaacagcccgggctccgtggccttgagcagctggtacgacagccaggcgttctggcccgagtcgccgtccaccgccaccaccttggtcaccaggtagcccggctcggccgcccggggcaccagctcggtgcagggcgcggagccgttctgcagcgggtacagcacgaagggcgagttgtcgttggcgtccagcaccagcacgcgcaccagcgcctcgctgctcaacgccggggagccgcggtctgcggcgcccacgcggaactcgaacgcctgcagggcctcgtagtccagcgactggagagcgaacaggtggccgttgtccgcgttgatggagaccagggaggcgaggggcaggtgcgggtcctggggcggcagcagcgagtaggtgacctgggcgttggtgcccgagtctctgtctgtggcgctgacgctgccgatgtgcagggcggggctgttgttctcgcggacgaacagggtgtaggaggtttgggtgaaggcgggggcgttgtcattgacgtcggagaccagcacggttatgttgtgctcggttttcagcctgggtgtcccgaagtcggtgacggtgatggtgatgttgtattcggatctggtctcccggtccagggccgtgcttatcaccagagtg

SEQ ID NO: 20438 - DNA, 803 bp, Homo sapiens
  MAP TO AL121984.14; EXPRESSED IN ADULT LIVER, SIGNAL = 1.2; EXPRESSED IN PLACENTA, SIGNAL = 1.4; EXPRESSED IN BRAIN, SIGNAL = 1.8; EXPRESSED IN HELA, SIGNAL = 3.3; EXPRESSED IN LUNG, SIGNAL = 1.2; EXPRESSED IN FETAL LIVER, SIGNAL = 3.6; EST_HUMAN HIT: BE512633.1, EVALUE 0.00e+00; SWISSPROT HIT: Q9NRQ2, EVALUE 2.20e-02; NT HIT: AL163227.2, EVALUE 1.00e-122
ttagttacttcctagatacaatgggggtacccactggataaatacacccattccaaatgggagaaattgaccaaaacaaggggataaaggccccatgcaagtctgaaatccagtggggcagtcaaatcttaaagctccaaaatgatctcctttgactccatgtctcacatccaggtcacactgatacaagtgggctcccatggccttgggtagctctgcccctgtggctttgtagggtatagcccccctcctggctgctttcatgggctggcattgggtgtctgtggcttttccaggtgcatagtgcaggctgtcggtggatctaccattctggggtctggtggatggtgaccctcttctcacagcttcactaggcagtgccccagtaagggactctgtgtgagggctctgactccacatttcccttccacactgccccagcagaggttctccatgagggccctgcccctgcagcaaacttctgcctgggcatccaggcatttccatacatcctctgaaatctagacagaggttcccaaacctcaattcttgacttctgtgcccccgcagactcaataccacatggaagctaccagggcttgggacttgcaccctcagaagcaacagcccaagccataccttgcccccttttaaccatgactggagtggctgggatatagggcaccaagtccctaggctgcacagagcagggggatcctgggcccacaaaagcattttttcctcttcagccttcacaactgtgatgggggttggggggctgctgtgaagacctctgaaatgcc

SEQ ID NO: 20439 - DNA, 746 bp, Homo sapiens
  MAP TO AL049779.5; EXPRESSED IN ADULT LIVER, SIGNAL = 1.5; EXPRESSED IN PLACENTA, SIGNAL =   3; EXPRESSED IN BRAIN, SIGNAL = 1.7; EXPRESSED IN HEART, SIGNAL = 1.8; EXPRESSED IN LUNG, SIGNAL = 1.5; EXPRESSED IN BONE MARROW, SIGNAL = 1.7; EXPRESSED IN FETAL LIVER, SIGNAL =   2; EST_HUMAN HIT: T84960.1, EVALUE 0.00e+00; SWISSPROT HIT: P10162, EVALUE 2.70e-02; NT HIT: gi14784246, EVALUE 0.00e+00
cacatgccacagcacagctcaggactgcatcctttatgctgctcaaatcgtccacatctcgcccgtacacttcagtgagctgaagggcccgggaccaatctctggccaccaaggattcctcaaaagcctcactcagtacatctagggcaatgggagaatgtaggcccaggagaacggtagaaagactggcccaaccacagagattcactgccagactctgcccctgctgcaaagaccctcgcaggggctcccaggcagccaggaggaaggcctcaaacagagggaattgttccagaaggcgctcacactcccgggctacctgctctgcagccagaggcacctccctgcggccacgaagttccttccatgacaagctgggtttgctgacctttaacctcggggaagcccccaggcaggccaccgtagctaggagctttgagcgtgacttaagaaaggccaaggcagaggaggtgagggctgggagtgatgagtcccttggggaggagtagggctttctttccaatgtagggttctcagttgtcctcggggagctcggtgtagaaagtgggaggtcatccaggcagtgagaggcgtgtagctgggccagagtacccagacgagtcaggagggaggaggtctgctggctttgccgggatgagcaaagagcaaggggctcacagcagcagctgacgatgacctgtggcacacttaggctgagattctcttgggccagaagggctgccagt

SEQ ID NO: 20440 - DNA, 577 bp, Homo sapiens
  MAP TO AL163284.2; EXPRESSED IN HELA, SIGNAL = 1.5; EXPRESSED IN ADULT LIVER, SIGNAL = 1.9; EXPRESSED IN PLACENTA, SIGNAL = 2.2; EXPRESSED IN BRAIN, SIGNAL = 1.9; EXPRESSED IN HEART, SIGNAL = 2.2; EXPRESSED IN BONE MARROW, SIGNAL =   2; EXPRESSED IN FETAL LIVER, SIGNAL = 1.9; SWISSPROT HIT: Q01955, EVALUE 2.50e+00; NT HIT: AL163284.2, EVALUE 0.00e+00; EST_HUMAN HIT: BI819147.1, EVALUE 8.10e-01
tcactgaaatctttcttaggggattgatgttcattttatgacatccttcaatgagcagaaacataaaagccaccatcacaccaccagcagcaggaccactgccatgcacgaagctctgaaacaaacagggggtactcctgaaaggctaaggaatgaacaggaacagagtgagcttgcctgtccagggagtgggcacactggccaaacccaggctgaccctgtgtgcaggtgggcacccattgctggcctgtatcgcacaggctttcctttgggtagggatggctttgtgcatgtggctgcctgggatgcccagaaaagtgtcagcaattcctggattccccgggtgactaggcacaatatgtttggtgggattggagctgaggaaagtgaactgggagaaatctggcaacaggaggactcaccctttgtcttcccactttttgaaatggagtctcctgacattttcctcctcatctcaactttctctccaagtctttcctgtctcctgggcagagaatcagagctgaccaccaattacgttatacccgaattttatagaatcactttttattgctag

SEQ ID NO: 20441 - DNA, 1179 bp, Homo sapiens
  MAP TO AC021092.1; EXPRESSED IN ADULT LIVER, SIGNAL = 3.2; EXPRESSED IN PLACENTA, SIGNAL = 2.6; EXPRESSED IN HELA, SIGNAL = 6.6; EXPRESSED IN LUNG, SIGNAL = 2.8; EXPRESSED IN BONE MARROW, SIGNAL = 3.2; EXPRESSED IN FETAL LIVER, SIGNAL = 2.8; NT HIT: gi12741365, EVALUE 0.00e+00; SWISSPROT HIT: Q9UK10, EVALUE 0.00e+00; EST_HUMAN HIT: AA746283.1, EVALUE 0.00e+00
gaggcaagatccaaatggagatggagactgtttcagaatcaggaacacatgaaggcttgttcagtcatcaaacctgggaacaaatttcaagtgacttaaccaggtttcaagactccatggtaaacagctttcagttctccaaacaagatgatatgccctgccaggttgatgcaggactatctataattcacgtaagacagaaaccttctgagggtaggacgtgtaaaaagtcctttagtgatgtctccgtccttgatcttcatcaacaactacagtcaagagagaagtctcatacatgtgatgaatgtggaaagagtttctgttatagctcagctcttcgtattcatcagagagttcacatgggggagaaactctataattgtgatgtgtgtggtaaggaattcaatcagagctcacatctgcaaattcatcagagaatccacactggagagaaaccattcaaatgtgagcagtgtgggaaaggctttagtcgtagatcaggactttatgttcatcgtaaattacacacaggagtgaaacctcatatttgtgagaaatgtgggaaggccttcattcatgattcccagcttcaggaacatcaaagaatccatactggggagaagccattcaaatgtgatatatgttgtaagagcttccgtagtagagcaaatcttaataggcattccatggttcacatgcgagagaaaccattcagatgtgatacatgtggtaagagctttggtctgaaatcagcacttaatagtcatcgcatggtccacacaggagagaaacggtacaaatgtgaggaatgtggaaaacgcttcatttataggcaagatctttataagcatcagatagaccacacaggggagaagccatataattgtaaagaatgtggaaagagcttcagatgggcctcaggtctttcaagacatgtgcgagtccacagtggagagacaacattcaaatgtgaagaatgtgggaagggattttatacaaattcacaacgttattctcaccagagagcgcacagtggagaaaagccatatagatgtgaggagtgtgggaagggctacaaaaggaggttggatcttgactttcatcagagggtccacagaggagagaaaccctataattgtaaggaatgtgggaagagctttggctgggcctcgtgtcttt

SEQ ID NO: 20442 - DNA, 654 bp, Homo sapiens
  MAP TO AC004643.1; EXPRESSED IN ADULT LIVER, SIGNAL = 1.6; EXPRESSED IN PLACENTA, SIGNAL = 1.6; EXPRESSED IN LUNG, SIGNAL = 1.4; EST_HUMAN HIT: BE264576.1, EVALUE 0.00e+00; NT HIT: gi12739600, EVALUE 0.00e+00; SWISSPROT HIT: O95484, EVALUE 2.00e-81
tcacacgtagtccctcttgtccagtccagatgcacccgagcgggaggggatggagtagcccagccgaggtccgcggggccgctcgacctggggcggggggcacgtgcagcagaggagccccccgcccagcataagcagtgcagccgccgcccagcccaggtagagggaggcccccagctcccgcttgagggcctcagccaccagggggttgtagaagtcctggatgatggcgtgcgccgtccagcacacagggatgagcaccaggatgccggcgaggaggaggatgacccccgcggtgagcacgatacgggccttggcaccttcgtcctccacacacgtggtacactgggcacctgtgatggccaccaggaggccaagcagggccagcaggagggcaatgacacagagggcacgtgcggcctgcaggtcctgcggcagagccagcagtgagtcgtacaccttgcactgcatctggcccgtgctctgcaccacgcaggacatccacaggccctcccacaccacctgggccaccacgatgctgttgccgatgaaggcggtcaccttccacaggggcagggcgcaggacaccagggtccccagccagcccagcacagccagggtcatgcccagcagttctaagccggtcgaagccat

SEQ ID NO: 20443 - DNA, 471 bp, Homo sapiens
  MAP TO Z83822.1; EXPRESSED IN LUNG, SIGNAL = 1.7; EXPRESSED IN HEART, SIGNAL = 1.6; EXPRESSED IN BONE MARROW, SIGNAL = 1.7; EXPRESSED IN HELA, SIGNAL = 3.5; EXPRESSED IN ADULT LIVER, SIGNAL = 1.6; EXPRESSED IN PLACENTA, SIGNAL = 1.7; EXPRESSED IN BRAIN, SIGNAL = 1.4; EST_HUMAN HIT: BG115535.1, EVALUE 1.00e-05; NT HIT: gi7662005, EVALUE 0.00e+00; SWISSPROT HIT: P55201, EVALUE 4.00e-03
ggcgtagatgcataaacattctcattcgagtgtgaatgctttcctcttttggctgcaccagcccattttcttcatcctcctttggaggaaataatggcttattgaagttacttttccgcttcagtttccagtagttatagataaagtccacagctagcgtgggcatacccagctctgcggccacatcttccactcgtaccaaggaatagaactcctcctccagctcccgaagcttctgtgcccgcaggctggttttctcacttttggcctggctctgctctttagccctgtggtgggggtactcagcttctccaagtttctgcctgttttggctatgcttgaggcaatatgacttgaacttcacttcgtctccctcatctaggatggtcttcatctctaggccgtgctcaaaggcacaggtgacgtggaaggcagtgatgcagctttttatagagcactgtaggaagaaaa

SEQ ID NO: 20444 - DNA, 729 bp, Homo sapiens
  MAP TO Z69720.1; EXPRESSED IN BONE MARROW, SIGNAL = 1.6; EXPRESSED IN HELA, SIGNAL = 0.93; EXPRESSED IN ADULT LIVER, SIGNAL = 1.4; EXPRESSED IN BRAIN, SIGNAL = 1.3; EXPRESSED IN LUNG, SIGNAL = 1.3; EXPRESSED IN HEART, SIGNAL =   2; EST_HUMAN HIT: AW856868.1, EVALUE 1.00e+00; NT HIT: L39062.1, EVALUE 7.00e-01; SWISSPROT HIT: P08775, EVALUE 1.00e-12
atgcctaaggatttctgggcttcccgcccaggcactgaccccttcttcccaccaccctatctccaggaaggcctcctgaatgctccccacactgaccccttcttcccaccaccctatctccgggaaggcctcctgaatgctccccacactgaccccttcttcccaccaccctatctccgggaaggcctcctgaatgctccccacactgaccccttcttcccaccaccctacctccgggaagccctcctgaatgctcccggcgctgaccccttcttcccaccaccctatctccgggaaggcctcctgaatgctcccggcgctgaccccttcttcccaccaccctacctccgggaaggcctcctgaatgctccccgcgctgaccccttcttcccaccaccctacctccaggaagccctcctgaatgctccccgcgctgaccccttcttcccaccaccctatctccgggaagccctcctgaatgctccccacgctggccccttcttcccaccaccctacctccgggaaggcctcctgaatgctccccacgctggccccttcttcccaccaccctacctccgggaagccctcctgaatgctccccacgctggccccttcttcccaccaccctatctccgggaagccctcctgaatgctccccgcgctgaccccttcttcccaccaccctatctccgggaagccctcctgaatgctcccccggcgagcatctaa

SEQ ID NO: 20445 - DNA, 657 bp, Homo sapiens
  MAP TO AL121723.35; EXPRESSED IN HEART, SIGNAL = 2.8; EXPRESSED IN LUNG, SIGNAL = 2.8; EXPRESSED IN HELA, SIGNAL = 2.2; EXPRESSED IN ADULT LIVER, SIGNAL = 3.4; EXPRESSED IN FETAL LIVER, SIGNAL =   2; EST_HUMAN HIT: AL550146.1, EVALUE 0.00e+00; NT HIT: gi14772414, EVALUE 0.00e+00; SWISSPROT HIT: O43426, EVALUE 2.00e-03
ctagtctatcccatcatctccaaggtcctttgagtctgattccgggaagatgccccagtcgattccagcagcctcggcagagatgccagcgtcagtccccccagacactgcctctaccccaaagtcgccccagtcaatcgcgtcttctgccacctgctcaggaagctcctcgaggtggggtcgctccacgacagagggctctgtccctgtcctccactcgtacaccgttgagtttccccgcttctgcacgaaccacagcattggcaacacctgctctgtggggctatcacacacaaaccccacagaggcctggtacacttcgatggcttcccccagggactgctgcgccgctgccccagtctcagccagctgacttggcaggtccttcaccagggccagcagttctcctcgggtattttcgcccatgatgccatactgcttgcaggagtggtagaactgctcccccatctcagcagcccctgcctggcactcctcctccttgcagctgtattcttgctgcagctgctggcacttggcaatctgcttcttcagtgaggggatctcatagttgacattccaaaccaggaggctagagagttccactaagtaggtgttgtccttctcatacagggctataatctcctgccattccttcat

SEQ ID NO: 20446 - DNA, 1249 bp, Homo sapiens
  MAP TO AL035425.11; EXPRESSED IN LUNG, SIGNAL = 2.3; EXPRESSED IN BONE MARROW, SIGNAL = 2.5; EXPRESSED IN FETAL LIVER, SIGNAL = 2.4; EXPRESSED IN ADULT LIVER, SIGNAL = 2.1; EXPRESSED IN PLACENTA, SIGNAL = 2.6; EXPRESSED IN HELA, SIGNAL = 2.6; EXPRESSED IN BRAIN, SIGNAL = 2.3; EST_HUMAN HIT: AI867402.1, EVALUE 8.00e-06; NT HIT: gi13632009, EVALUE 0.00e+00; SWISSPROT HIT: P35570, EVALUE 1.00e-71
gctcgctgggtgttacgaagcgcctggtgaaaagcatctcgtcttccccgtcgccgatggccctgaggtggcaaaactgctcaaagcgggaccttctgagccagcctcccggctcgagcggcaccaagcccaggtgcctcctagcggacagcagggttaacaggtgggcgccgatgctgatgctgtagctgcggcagcgggctctgtattcgtctgcacacaaggctctcatcttctccaaaaacagctcatgcatgttttgggcaaccacacagtcatcgacctgcatccagagctctcccggaccgatgacagtggacctgcctacttccaagaagaaatactgctccgagtgtccacagcgacggatgctcaggagctggacgaccacgctggccacttcggtgttcagcctcacaaacacgacctcctcgtcggttagacacagccggaacacgccgctcagctcttttctgtgccccagccccctgggtttgactattacctgccacacatctttatagaagggtggctccgccgccgctgccgccgccagcgcggccggctctccgtccggctgcgcgccgagcgtgccgcagcggcggcgcttgctctcgaggatgaggcggctgagcagcaagtaccagctttcctgctccgactcgttctcggccaccatcgcgaagtattcgtcttgggtgaaaagagcaatgaggtgtcggtaccttgcatctgctcgctggctcacggaaaagcactggtatagggtgatcacgcgccgcggtggaatgagcggggggatcgcggcgccagaggcggccgccgctgctgcagccgccgcggcgcggacactgtgccggaacttcctggcattttcgtagtattccagccgagctggggcgtcagcagtctcgagtttgagcacgaagtagcgcctgtgcccatgcttctgtttccgcaggtagccgcgtttgcagacttcctccccgacgggcaggtcctcctcttcggactcggagtctgaccgggagccagtggccgtggagagccacatggctcccggacaagacgacccggtcccaatgagtgcggtcggggttcccgaggaaagaagcggggtggtcaccactgctgctagagctgccgctgccgccgctgctgcacctcttagtcttcttgtcgcttggtcgcgagtgaaggagcaactcgccatggtgatgcacgatggttttaaggtgagcgaggagga

SEQ ID NO: 20447 - DNA, 567 bp, Homo sapiens
  MAP TO AP000350.1; EXPRESSED IN ADULT LIVER, SIGNAL = 1.9; EXPRESSED IN PLACENTA, SIGNAL = 1.8; EXPRESSED IN HELA, SIGNAL = 2.1; EXPRESSED IN FETAL LIVER, SIGNAL = 2.2; EXPRESSED IN BRAIN, SIGNAL = 1.6; EXPRESSED IN BONE MARROW, SIGNAL = 2.1; EXPRESSED IN HEART, SIGNAL = 2.1; EXPRESSED IN LUNG, SIGNAL = 1.9; SWISSPROT HIT: P08547, EVALUE 1.00e-30; EST_HUMAN HIT: BE179749.1, EVALUE 9.00e-07; NT HIT: AF240786.1, EVALUE 0.00e+00
aaaacaaacaaaaacaaaaatgaagaaactaaaaggaaaccagaaagaaagaaaatggagacatcacattggtcatagagaaatacaaaagtttagaaagaaatactatgaataattatatgtggacaatttagacaacctagatgaaatgggaaaattttagaaacacacaatctaccaaaactgacttaagaaggaagataaaattgtaatagacctgtaacaaataaagagattaaaatattaattatttttaaaaattccacaaagaaaagcccaggaccagatggttttactggtgaattcaaccaaaagcttgaagaactaacacaaagccttcacaaactcttccaaaaaatagaacaggaagaaatatttttcaactcatactatgaggccagaattactctgataccaaagacagaaaaagacattacaagaaaataaagttacaaagcaatatccttataaatatagatgtaaaaatcctcacaaaatattagcaaatcaaatccagccgcatattaaaaggatcatacaccttgaccaggtaggatttatcccagg

SEQ ID NO: 20448 - DNA, 561 bp, Homo sapiens
  MAP TO L81800.1; EXPRESSED IN ADULT LIVER, SIGNAL =   4; EXPRESSED IN PLACENTA, SIGNAL = 4.1; EXPRESSED IN BRAIN, SIGNAL =   9; EXPRESSED IN HELA, SIGNAL = 4.8; EXPRESSED IN HEART, SIGNAL = 3.1; EXPRESSED IN BONE MARROW, SIGNAL = 4.8; EXPRESSED IN LUNG, SIGNAL = 3.4; NT HIT: AL163227.2, EVALUE 0.00e+00; SWISSPROT HIT: O35787, EVALUE 3.10e+00; EST_HUMAN HIT: BE420422.1, EVALUE 0.00e+00
atgtggaagcaaatttggaactgggtaacaggcagaggctggaacagtttggaggactcagaagaagacaggaaaatgtgggaaagtttggaactccctatcgacttgttgaatggctttgaccaaaatgctgataatgatatgaacaatgaaatccaggctgaagtggtctcagatggagatgagaaacttgttaggaactggagcaaagttgactcttgttatgttttagcaaaaagactggcagcattttgcccctgccctagagatttgtggaattttgaacttgagagagatgatttaggctatctggtgaaagaaatttctaagcagcaaagcattcaagaggtgacttgggtgctgttaaaggcattcagtttaataagggaagcagaatctaaaagtttggaaaatttgcagcctgacaatgagatagaaaagaaaatcccattttctgaggagaaattcaaggcggctatagaaatttgcataagtaacaagaagcccaatgttaatccccaagacaatgaggaaaatgtctccaggacatgtcagaggtct

SEQ ID NO: 20449 - DNA, 825 bp, Homo sapiens
  MAP TO AB003151.1; EXPRESSED IN PLACENTA, SIGNAL = 6.3; EXPRESSED IN HELA, SIGNAL = 9.1; EXPRESSED IN ADULT LIVER, SIGNAL = 5.8; EXPRESSED IN BRAIN, SIGNAL = 5.5; EXPRESSED IN BONE MARROW, SIGNAL = 4.9; EXPRESSED IN LUNG, SIGNAL = 4.7; EXPRESSED IN HEART, SIGNAL = 7.8; EST_HUMAN HIT: BG503885.1, EVALUE 0.00e+00; NT HIT: gi14780334, EVALUE 0.00e+00; SWISSPROT HIT: Q9Y316, EVALUE 0.00e+00
ccgcagctgaatgcacagctagaaggttggctttcacaagtacagtctacaaaaagacctgctagagccattattgccccccatgcaggatatacgtactgtgggtcttgtgctgcccatgcttataaacaagtggatccgtctattacccggagaattttcatccttgggccttctcatcatgtgcccctctctcgatgtgcactttccagtgtggatatatataggacacccctgtatgaccttcgtattgaccaaaagatttacggagaactatggaagacaggaatgtttgaacgcatgtctctgcagacagatgaagatgaacgcagtattgaaatgcatttgccttatacagctaaagccatggaaagccataaggatgagtttaccattattcctttactggttggagctctgagtcaaaagaacaggaattcggaacttttcagtaaatatctagcggatcctagtaatctctttgtggtttcttctgatttctgccattggggtcaaaggttccgtcacagttactatgatgaatcccagggggagatttgtagatccattgaacatctagataaaatgggtatgagtattatagaacaattagaccctgtatcttttagcaattacttgaagaaataccataatactatatgtggaagacatcccattggggtgttattaaatgctatcacagagctccagaagaatggaatgaatatgagtttttcgtttttgaattatgcccagtcgagccagtgtagaaactggcaagacagttcagtgagttatgcagctggagcactcacggtccactga

SEQ ID NO: 20450 - DNA, 554 bp, Homo sapiens
  MAP TO AC008103.7; EXPRESSED IN ADULT LIVER, SIGNAL = 6.2; EXPRESSED IN HELA, SIGNAL =  13; EXPRESSED IN LUNG, SIGNAL = 5.7; EXPRESSED IN BONE MARROW, SIGNAL = 6.7; EXPRESSED IN FETAL LIVER, SIGNAL = 5.8; EST_HUMAN HIT: BE217830.1, EVALUE 0.00e+00; NT HIT: Y10391.1, EVALUE 0.00e+00; SWISSPROT HIT: P10266, EVALUE 1.00e-100
caaaatactgatcttgtggagtggtcattccttcctcacagtacagttaagacttttacattgtacttggatcaaatggctacattaatcggtcagacaagattacgaataataaaattatgtggaaatgaccaagacaaaatagttgtccctttaaccaaggaacaagttagacaagcctttatcaattctggtgcatggcagattggtcttgctaattttgtgggaattattgataatcattacccaaaaacaaagatcttccagttcttaaaattgactacttggattctacctaaaataaccagacgtgaacctttagaaaatgctctaacagtatttactgatggttccagcaatggaaaagcagcttacacagggccgaaagaacgagtaatcaaaactccatatcaatcggctcaaagagcagagttggttgcagtcattacagtgttacaagattttgaccaacctatcaatattatatcagattctgcctatgtagtacaggctacaagggatgttgagacggctctaattaaatatagcatgga

SEQ ID NO: 20451 - DNA, 867 bp, Homo sapiens
  MAP TO AP000190.1; EXPRESSED IN ADULT LIVER, SIGNAL = 2.1; EXPRESSED IN BRAIN, SIGNAL = 2.7; EXPRESSED IN HEART, SIGNAL = 3.1; EXPRESSED IN LUNG, SIGNAL = 2.6; EXPRESSED IN HELA, SIGNAL = 1.7; EST_HUMAN HIT: AA171924.1, EVALUE 0.00e+00; NT HIT: gi15055516, EVALUE 0.00e+00; SWISSPROT HIT: P08121, EVALUE 2.00e-16
ctgcctaagaccacagcgttggagctgcaggagtcgtcggtggcctcagcgatggagttgccggggccacctgcgacctccatgccggagttgcaggggccccctgtgactccagtgctggagttacctgggccctctgctaccccggtgccagagttgccagggcccctttctaccccagtgcctgagttgccagggccccctgcgacagcagtgcctgagttgccagggccctctgtgacaccagtgccacagttgtcgcaggaattgccagggcttccagcaccatccatggggttggagccaccacaggaggtaccagagccatctgtgatggcacaggagttgccagggctgcctttggtgacagcagcagtagagttgccagagcagcctgcggtaacagtagcaatggagttgaccgaacaacctgtgacgacgacagagttggagcagcctgtggggatgacaacggtggaacatcctgggcatcctgaggtgacaacggcaacagggttgctggggcagcctgaggcaacgatggtgctggagttgccaggacagccagtggcaacgacagcgctggagttgccggggcagccttcggtgactggggtgccagagttgccagggctgccttcggcaactagggcactggagttgtcggggcagcctgtggcaactggggcactagagttgcctgggccgctcatggcagctggggcactggagttctcggggcagtctggggcagctggagcactggagcttttggggcagcctctggcaacaggggtgctggagttgccagggcagcctggggcgccagagttgcctgggcagcctgtggcaactgtggcgctggag

SEQ ID NO: 20452 - DNA, 1390 bp, Homo sapiens
  MAP TO AC009464.7; EXPRESSED IN ADULT LIVER, SIGNAL = 1.8; EXPRESSED IN HELA, SIGNAL = 4.5; EXPRESSED IN PLACENTA, SIGNAL = 2.1; EXPRESSED IN BONE MARROW, SIGNAL =   2; EXPRESSED IN FETAL LIVER, SIGNAL =   2; EST_HUMAN HIT: BI088316.1, EVALUE 0.00e+00; NT HIT: gi14768468, EVALUE 0.00e+00; SWISSPROT HIT: P16143, EVALUE 2.00e-03
ctgcgggaccacattctgtacatatgttggtggatgctgttgcttttgctgaacagcactttctattgctactttagctacagtgcttggatctgctcctgctggcacagcaaccattgttgcgctgcagccagcattgttggggtcactgattgtaacaattctaactcctactttatttggaattcctgcgactgtttccctatcagtatcctctgctggcctctttacagttttgcattctgctgtgccatttgtagaccgaacgtcagatgatagggcaggagaatgggatacttttgatcctgagtcgggaactgctatgatttgatgtccctgtataacagaggttgtagaatgtggtgagacaactacacttgggcgttgctgaggcacatctgaattcaaacttgaagctagaggtccattaagcaaatcagtaccactaaattgctgtgttgccgcatttgaagcctcctgtatactgctcacagatgaaccacccaaagttaatacaggtccattagaaattctttctagttgatcacctttggcagtatcttgctgagtgatatctaaagtcccttgtggttccattggagatatctcaccatttcctacatgattggaagttttatgatttggaatgtttttgcttaaatgagaaccatctcctttatcaaaatcacagattccattaactagcggttttctcaaatcacttttgatatcttgcatgtctatttgttctgagttctgtttcccagatgctccattctcacctaattccaatgatggcccattactgattagtgagcactgattagtctcactttgaattttccctgagtttgaaggaggtagacttgagtcactgtactttctcccatttaaaagacttcccacatgcatttcattttcctttgtatccccattgctggtgtttgtggctcctcgtcggcaggacgggttctccatgacttcaattttacgttcatgaacatgtaaacctgttgcttcctttgcttcctcctccttttggcaaattattttatcacctttgaatgggggagtagcagtagtacatgatgattgtccagcaggagatgcttgagtggctggaagcgtttgtactggaagtccaactcctgtctgcgttccgctcatggtaattcctgctggagcaatgagctgagttgcatttccctgactcacagttgcaggtgcaaaactcgtatttggcacaactgttatggttacctggttgccagaagtcccttggaaaatggttgctgggctatttgagatcagtggacctggcaatatttgtaagttcgaaatgggcacagtttgtactccccctgagggtggcattgcacttgggaccaac

SEQ ID NO: 20453 - DNA, 1170 bp, Homo sapiens
  MAP TO AF186193.1; EXPRESSED IN BRAIN, SIGNAL = 1.7; EXPRESSED IN HELA, SIGNAL =   1; EXPRESSED IN ADULT LIVER, SIGNAL = 1.6; EXPRESSED IN BONE MARROW, SIGNAL = 1.9; EXPRESSED IN FETAL LIVER, SIGNAL = 2.3; SWISSPROT HIT: P52742, EVALUE 7.00e-90; EST_HUMAN HIT: BI917324.1, EVALUE 0.00e+00; NT HIT: gi15298475, EVALUE 3.00e-07
tccaggcaggcaggactgccgggcaccgtgtgggggtgcctcccctgggggcaccctgtgggggggcaccctgcaccaccccacccgcatggcggtcctgaggacgggtcagataaacccacccacccccgggctcgggagcacaccgcctccccaagggttctgcaggaagacctgggccggcctgtggggaactcagccccccgctacaggtgcgtgtgcggcaaggcgttcagatacaactcgctgcttctcaggcaccagatcatccacaccggcgccaagcccttccagtgcacagagtgcgggaaggccttcaagcaaagctccatcctgctgcggcaccagctgatccacactgaggagaagccgttccagtgcggcgagtgcgggaaggccttccggcagagcacgcagctgggtgcccaccaccgcgtccacacccgcgagcggccctacgcatgcggcgagtgcggcaaggccttcagccgcagctcccggctgctgcagcaccagaagttccacaccggggagaagcccttcgcgtgcacagagtgcggcaaggcgttctgccgcaggttcaccctcaacgagcacggccgcatccacagcggggagcggccctaccggtgcctgcggtgtgggcagcgcttcatccgagggtcctcgctcctgaagcaccaccggctgcacgcgcaggagggtgcccaggacggcggcgcggggcagggcgccctgctcggagctgcgcagaggccccaggcgggggacccgccccacgagtgcccggtgtgcgggaggccgttccgacacaactccctgctgctgctgcacctgcgcctacacacgggcgagaagccgttcgagtgcgcggagtgcggcaaggccttcggtcgcaagtccaacctcactctgcaccagaagatccacaccaaggagaagcccttcgcgtgcaccgagtgcggcaaggcgttccgcaggagctacacgctgaacgagcactaccggctccacagcggcgagaggccataccggtgccgcgcctgcgggagggcctgcagccggctgtccaccctcatccagcaccagaaggtgcacggccgcgagcccggggaggacacagagggcaggcgggcgccctgttgggcttcctgatgacggggacgacag

SEQ ID NO: 20454 - DNA, 592 bp, Homo sapiens
  MAP TO AC004761.1; EXPRESSED IN LUNG, SIGNAL = 1.7; EXPRESSED IN HEART, SIGNAL = 1.7; EXPRESSED IN ADULT LIVER, SIGNAL = 1.6; EXPRESSED IN BRAIN, SIGNAL = 1.8; EXPRESSED IN HELA, SIGNAL = 2.1; EXPRESSED IN FETAL LIVER, SIGNAL = 2.2; NT HIT: AL163227.2, EVALUE 0.00e+00; EST_HUMAN HIT: BG705017.1, EVALUE 1.00e-82
atgtggaagcgactttggaactgggtaataggcagaggttggaacagtttggagggatcagaagaagacaggaaaatgtgggaaagtttggaacttcctagagacttgttgaatggctttgcccaaaatgctgatagtaatatggacaataaagtccgggctgaggtggtctcagatggacatgaggaactttttgtgaactggagcaaaagtgactcttgttatattttagcaaagagactggtggcattttgctcctgccctagagatttgtggaattttaaacttgagagagatgatttagggtatccgatggaaaaaaatcctaagcagcaaagcactcaagaagtgacttgggtgctgttaaaagcatttagttttaaaagggaaacagagaataagagtttggaaaatttgcagcctgacaatgtgatagaaaagaaaaacccattttctggggagaaattcaagccagctgcagaaatttgcataagtgacgaggagcctaatgttaatccccaagaccatgggaaatcatctccaggccatgtcaaagaccttcacagcagcccctcccatcacaggcctggag

SEQ ID NO: 20455 - DNA, 2199 bp, Homo sapiens
  MAP TO AL096710.8; EXPRESSED IN ADULT LIVER, SIGNAL = 1.7; EXPRESSED IN PLACENTA, SIGNAL = 2.1; EXPRESSED IN HEART, SIGNAL = 3.1; EXPRESSED IN BONE MARROW, SIGNAL = 1.9; EXPRESSED IN FETAL LIVER, SIGNAL =   2; EXPRESSED IN HELA, SIGNAL = 1.4; EXPRESSED IN BRAIN, SIGNAL = 1.7; EST_HUMAN HIT: BG996494.1, EVALUE 0.00e+00; NT HIT: AF396879.1, EVALUE 0.00e+00; SWISSPROT HIT: P04929, EVALUE 1.00e-06
tcttcctttcttcctctccaactgccactgtcatcaaattttaatgatgcagtgaagctctcttttcctcctacaatatcataatcagtcaatgagtcagattcatcaccttcaaggatatttgtgcattccctttctgatccagtttccagtgactgtccattcaccttatctgagccaacaggatttaaatgtattttttcaccagaatctaattcatctttctcaacatccataaggaaatcctgaagacaatgtgctttgttcttcacacttaagctaccaactggtgccccctggggaaccatggaattttcattctcttttgagacatcataaaaaacatcagcaggagaagccgtctcatcattttcctcttgcagtgtgtcgtagtcctcagggtgcaggcaatcacgatcatcaccatcaagaagcaaagaatcatggtcatcatcttcaaacaagggagtatcataaaaatcatcatcactatcagtgtctgttcctgtgttattctgctgatcattcagcagtgacgtttcatagtcactagcactgatggtttcatcaagcaatggtgtagcacaagtaagagacacaatggcattatcagtatcaccccctggagtcacagcacaggaatactcttctatttcagactcatcttccttgtcttcaggcatctgctgaaaacctggatgtgttttttcatcctcaccagaagtatttgaaatgtatttatcattgtgatattgtacttgaggattactagaaatcatatttaaagatttctgtccatactgctctcctggtaaactgatgttaatagctgcaattcccagaaactggtcttgaaatttttctcctattctttgacctgacaacatggttttgtcactgaatgataaggctggggcttcacacttatttccattgctctctggggtgtgtgtatcattaaaacttccctgactgtgcatcaatttatcatgacttaacaaggcacttagcctgggggaatagtcaaagataggtgaatccctgtttgtattatcttcattctctgtttcattcacaccacagaatttactcatttttgatttcataataggattttctattaaatcacttggaaagttttgaatgtttttagaatgactacattcatttgcacgttcatttgtttccactcggctttgattttcatagtttgtaagtatgttttcagagtcacttctaagcatgctaatgtctgcaagttcagtctgtgttaaatatgatatgagactgggaacacacacactgggtgaactgttaactttaggatcaattgatattgtacttgccagttttcctgactgagaaaattcactattgataacagtatttctcatttcattaaattcttcatctatagcacactttctattttcaggagtctcttcatgttcaggttctccacagtgacatttattgaaactacttggtgtagctgtacattcatccttttctctacctgaagcattattaagaaatacaccagatgagcttaagacatcgagacattcttttatggctgtgtttccatcaaattctgcatgacagccttccagtagcatgccaacagcctcatccaagtctccatcgtacagcaaaagcctttgccctgtgtttgcatccatatagctatttatcattaaataagatagaaataattttttagtttcttctgaggtctgagtagtgacaggttcttctccatcaaaaacatcctcttcttgtctgtaatcatgaactgtggagggttgaaatttacaaaaagagagccatcttctggcatttttacaagcttctaaatctcctaaatctggcattttatcaggcagtgttatattttttaaaattgatgctgtgttgttgtctataattcctagctgtttagcagcatccaaaccaatgacttgagaactttctggaatataaagagcagctattttttgtctgccattcaggattttgtaggccaattcatttgtaatcaattcttgctgcaaggaagatgatgtgggaaatatttcaccagaatggggccaaatgagtccaacatagcctcgctgagcttccaggaccagaagagcactgctggaagttattaaatcacactgtactgcttcgtctacagttaaacgcttggcaggg

SEQ ID NO: 20456 - DNA, 983 bp, Homo sapiens
  MAP TO AL121774.3; EXPRESSED IN BONE MARROW, SIGNAL = 5.4; EXPRESSED IN ADULT LIVER, SIGNAL = 3.4; EXPRESSED IN PLACENTA, SIGNAL = 3.5; EXPRESSED IN HELA, SIGNAL = 7.6; EXPRESSED IN BRAIN, SIGNAL = 3.8; EXPRESSED IN HEART, SIGNAL = 4.3; EXPRESSED IN LUNG, SIGNAL = 4.2; EXPRESSED IN FETAL LIVER, SIGNAL = 4.6; EST_HUMAN HIT: BE700004.1, EVALUE 1.00e-03; NT HIT: U00828.1, EVALUE 0.00e+00; SWISSPROT HIT: P11277, EVALUE 0.00e+00
ggtaccagccttgtgacccccaggtcatccaggaccgcatcagccacttggagcagtgctttgaggagctgagcaacatggcagctgggcggaaggcccaactggagcagtccaaacgactctggaagttcttctgggagatggatgaggctgagagctggatcaaggagaaggagcagatctattcttccctggactatggcaaagacctgaccagtgtgctcatcttacagcgcaagcacaaggcctttgaggatgagctccgtgggctggatgctcacctggagcagatcttccaggaggctcatggcatggttgcgcgcaagcagtttgggcacccgcagatcgaggcccgcataaaggaggtgtcggcacagtgggaccagctgaaggacctggctgccttctgcaagaagaacctccaggatgctgagaactttttccagttccagggcgatgcggatgacctgaaggcttggctgcaagacgcccaccggctgctctctggtgaagatgtggggcaggacgaaggggccacgcgggccctggggaaaaagcacaaggacttcctggaggagctggaggagagccgtggggtgatggagcacctggagcagcaggcccagggattccccgaagagtttcgggattccccagatgtgacccatcggctgcaggccctgcgggagctctaccaacaggtggtggcccaggcggacctgcgtcagcagaggctgcaggaagccctggacctgtacacggtgttcggggagacagacgcctgtgagctgtggatgggagagaaggagaagtggctggccgagatggaaatgccagacaccctggaggacctggaggtcgtgcagcacaggtcagagttaactcatcttttcctcacgtccctgtacccaggcctgggcaccatctcccacctagtttggtaatagtctctggatcagcaaaggtctctttgagaggccctg

SEQ ID NO: 20457 - DNA, 567 bp, Homo sapiens
  MAP TO AL023585.1; EXPRESSED IN HELA, SIGNAL = 2.1; EXPRESSED IN ADULT LIVER, SIGNAL = 1.6; EXPRESSED IN BRAIN, SIGNAL = 1.4; EXPRESSED IN HEART, SIGNAL = 1.2; EXPRESSED IN BONE MARROW, SIGNAL = 1.5; EXPRESSED IN FETAL LIVER, SIGNAL = 1.2; EXPRESSED IN LUNG, SIGNAL = 1.4; EST_HUMAN HIT: BE408826.1, EVALUE 1.00e-05; NT HIT: gi16167544, EVALUE 9.00e-06; SWISSPROT HIT: O60810, EVALUE 9.00e-96
ctgagcagctggtccaggtggccttcgaggaaagaaacagagttcatataaagcttttggaggcagtgcagcttgaggaactgagtggtgaactgggtaacaatctccttcttctgctctggggaaacgtagcgagagacatccatgtgggagagaacgagcttctgaagattcctcatgtggcccaggtatggggtaaactgtgtcaggatgggcagtacccacttgcaattcacttccacctcctggatacagtctaggttcaccattttcaggatgcttctgatattgcggaagggcattcccaaaattttcagcttcttacagcacaggtgtagtaaatctttcctctgcttgacccatagaaggaggcaggtgaggtgttcatccagagtcctgttcttgagccaaagttccacgaacacagtcaagggctgccgtcctctcatccttggacagtcctgcactggttttttgttcctcttggcattgagaaagcacccacgggccatagcttcagacaaaaccatccagaagttctcacagacatcctgtaaatccagcact

SEQ ID NO: 20458 - DNA, 803 bp, Homo sapiens
  MAP TO AC022845.2; EXPRESSED IN BONE MARROW, SIGNAL = 2.4; EXPRESSED IN FETAL LIVER, SIGNAL = 2.5; EXPRESSED IN ADULT LIVER, SIGNAL = 2.1; EXPRESSED IN HELA, SIGNAL = 0.76; EXPRESSED IN BRAIN, SIGNAL = 2.2; EST_HUMAN HIT: BE080233.1, EVALUE 0.00e+00; SWISSPROT HIT: P38193, EVALUE 8.60e-02
tcttttgtatttctctctctgcacttggttcttgggaacctcaccagcttcttgctggaattggacctcaggcttcttccaaggagagccattgttggcaaccccaggtgttgacttaatattctctggctctaaggaggctttcaggatataggtatttcctactttgctctttctctctgcattcatgttatctttcaaacctggttctttgacaactgttgaagagtcaaaattcacttctgagtgtcctctattttcttcatgagcatgaaacttgggttcttcttcacccaagttgccaatattattagtgttgcatggaacttggttttctgcatcagattccttgagaacactgtaggaatagttactatttgaaggagatgccccattcccttttcctgggctttttgaatcttggctatagtccatatttttactcccttgacttggggtgccatagctttcaaatggttgcaatatacctgggccttcctttggggtgcctttttgggacaaattcatgaatttggatttgatattcacattattatcttggcaactttcagaaaccagcatatctccctctgcttggaatggtgagtcagatctcacaggcttcaattcaattttgctgggtgatagggtctttgagccattttctcttaaagtagtgtcatctgtcaccaagtcaacagcaacctgtgattttgagtctgttttttctttggactctattcctcggggatgttggaggaatgacttattgtcatctgaataagaacttcggttaaaccagt

SEQ ID NO: 20459 - DNA, 1068 bp, Homo sapiens
  MAP TO AC020667.3; EXPRESSED IN PLACENTA, SIGNAL = 4.5; EXPRESSED IN HELA, SIGNAL = 2.4; EXPRESSED IN BRAIN, SIGNAL = 1.4; EXPRESSED IN BONE MARROW, SIGNAL = 2.1; EXPRESSED IN ADULT LIVER, SIGNAL = 2.2; EST_HUMAN HIT: BI560057.1, EVALUE 0.00e+00; NT HIT: gi16161709, EVALUE 0.00e+00; SWISSPROT HIT: P22807, EVALUE 1.40e+00
aacacccctcacccgagccacctgcacttttccctcacccaccacacacccctgatcctctggcctgctctccgcctcctccaaaaggcttcactgctcctcccctgcgggactccacactgataactccatctcactgtgactcagtggcacttccactgggcaccgtccctcaaagcttgtctccacatgaggatttggtggcttctgtcccagccatctcaggccttggtggctcaaacagtcatgtttctgcctcctcccggtggcaggagactgccagaacctcgtgcgcctttaactcatcagtccagcaagatcctctttcccgccacccaccagagacctgtcagatggaagctggtagcctgtttttgctcagctctgatggccagaatgtcgtggggatacaagtcacagaaacagccaaggtcaacatttgggaagaaaaagaaaatgttggatcatttacaaatcaaatgaccccagaaaagcacttaaattctttggggaatttggctaaatcattggatgctgagcaggacaccacaaacccaaaacccttctggaacatgggagagaactcgaaacagctgcccggacctcagaagtgctcagatcctaggctcttgcaggaaagtttttggaagaattatagccagcttttctggggcctcccctctctgcacagcgagtccctggtggctaacgcctgggtaactgacaggtcttatactttacagtctcctcctttcttgttcaatgaaatgtccaatgtctgcccaattcaaagggagactacaatgtccccactgcttttccaggcccagcccctgtcccaccgccaaccctttatttcatccacaccccaattcctgcccacacctatggctcaggccgaggctcaggcccatcttcagtcttctttcccagtcctatctcctgcttttccatccctgattaagaacactggagtagcttgccctgcatcgcagaataaagtgcaagctctctccctacctgaaactcagcaccctgaatggcctttgttgaggaaacaactagaag

SEQ ID NO: 20460 - DNA, 517 bp, Homo sapiens
  MAP TO AC002093.1; EXPRESSED IN BONE MARROW, SIGNAL = 1.2; EXPRESSED IN HELA, SIGNAL = 0.67; EXPRESSED IN ADULT LIVER, SIGNAL = 1.4; NT HIT: gi4507202, EVALUE 0.00e+00; SWISSPROT HIT: P16014, EVALUE 3.70e-02
  unsure 106
  unsure 178
  unsure 210
tggaagctaccaaaatggcggaagacagagcggacagggccttcggatccgcggggcttccctgccagcatgtagatcgtggtcacagggcccgagctctcctggnacgctgccctcaatggcttccacgtgctcagccactgtccggctaccaagtgggggccgccggtggccagtnggctgaatccccgggactggcagccgccgganaaggactcgggggcttctgcttcgtctgggcctgtggactcttcggcttcccggccctcaggacccgactgcgccccccgggagagcctcttgggctttcggagcgggctggagagctcccctgagcttcggcgactctgtggtgcaaacttggtaccttccgcgaaggagaccgatggccgcttggccggagctaggctggaggtgcgcgggatggcgaatggcgtggaggcgtcctcagggggcgggaaagcacctgcagccaggctggcctctgacgaccctgcctgggccacagggaccatcc

SEQ ID NO: 20461 - DNA, 828 bp, Homo sapiens
  MAP TO AL138848.2; EXPRESSED IN LUNG, SIGNAL = 9.3; EXPRESSED IN HEART, SIGNAL =  17; EXPRESSED IN PLACENTA, SIGNAL =  14; EXPRESSED IN BRAIN, SIGNAL = 6.5; EXPRESSED IN ADULT LIVER, SIGNAL = 9.7; EXPRESSED IN HELA, SIGNAL =  24; EST_HUMAN HIT: AL536288.1, EVALUE 0.00e+00; NT HIT: gi14739587, EVALUE 0.00e+00; SWISSPROT HIT: P15880, EVALUE 1.00e-129
atggggaactgcggtggcttccgcggaggtttcggcagtggcatccggggccggggtcgcagccgtagacggggccggggccgaggccgcggagctcgcggaggcaaggccgaggataaggagtggatgcccgtcaccaagctgggctgcttggtgaaggacatgaagatcaagtccctggaggagatctatctcttctccctgcccattaaggaatcagagatcattgactttttcctgggggcctctctcaaggatgaggttttgaagattatgccagtgcagacgcagacccgtgctggccagcgcaccaggttcaaggcgtttgttgctatcggggactacaatggccacgtcggtctgggtgttaagtgctccaaggaggtggccaccgccatccatggggccatcatcctggccaagctctccattgtccccgtgcgcagaggctactgggggaacaagattggcaagccccacaccgtcccttgcaaggtgacaggccgctgcggctctgcactggtgcacctcatccctgtacccaggggcactggcattgtctccgcacctgtgcccaagaagctgctcatgatggctggtatcgatgactgctgcacctcagcctggggctgcactgccaccctgggcaacttcgccaaggccacctttgatgccatttctaagacctacagctacctgacccccgacctctggaaggagactgtatttaccaagtctcccgatcaggaattcactgaccacctcatcaaggcccacgccagagtctccgtgcagcggacccaggctccagctgtggctacaacatag

SEQ ID NO: 20462 - DNA, 903 bp, Homo sapiens
  MAP TO U75931.1; EXPRESSED IN BONE MARROW, SIGNAL = 1.5; EXPRESSED IN LUNG, SIGNAL = 1.4; EXPRESSED IN BRAIN, SIGNAL = 1.2; EXPRESSED IN HELA, SIGNAL = 1.3; EXPRESSED IN ADULT LIVER, SIGNAL = 1.4
atgaggaggaggaaggagaaagagaggaggaaggagaaagaaggaggagaaaggagaaagaaggaggaagaagaggaaggagaaagaaggaggaggaggaaggagaaagaaggaggaggaggaaggagaaagaaggaggaggaggaaggagaaagaaggaggaggaggaaggagaaagaaggaggaggaggaaggagaaagaaggaggaggaggaaggagaaagaaggaggaggaggaaggagaaagaaggaggaggaggaaggagaaagaaggaggaggaggaaggagaaagaaggaggaggaggaaggagaaagaagaaggaggaggaaggagaaagaaggaggaggaaggagaaagaaggaggaggaggaaggggaaagaaggaggaggaaggagaaaggaggaggagggaggagaaagaaggaggaggagggaggagaaagaaggaggaggaggaaggagaaagaagaaggaggagaaagaagaaggaggagaaggaaggagaaagaagaaggaggaggagaaagaagaagaaggagatagaagaaggaggaggaaggagaaagaagaaggaggaggagaaagaagaaagaggagaaagaagaaggagatagaaggagaaggaaggagaaagaagaaggaggaacgagaaaaaggagggggaaggagaaagaaggaggaggagaaaaaagaaggaggagaaaggaggagtaggaacgaaaaaggaggaggaaggaggaggaggaagaaggagaaggagaagaaagacagggagagggagagggagagggagaaggagaaggagattaccacctctggtttggccacatggaagtcagtggtgactggtttcaatggaccagtgtgggtggatgtcaagttgagaacatcaaggaggtag

SEQ ID NO: 20463 - DNA, 570 bp, Homo sapiens
  MAP TO AP000884.1; EXPRESSED IN ADULT LIVER, SIGNAL = 1.3; EXPRESSED IN PLACENTA, SIGNAL = 1.6; EXPRESSED IN BRAIN, SIGNAL = 1.2; EXPRESSED IN HELA, SIGNAL = 0.98; EXPRESSED IN BONE MARROW, SIGNAL = 1.3; EXPRESSED IN LUNG, SIGNAL = 1.2; EST_HUMAN HIT: AU127583.1, EVALUE 1.30e-02; NT HIT: AL163252.2, EVALUE 0.00e+00; SWISSPROT HIT: P08131, EVALUE 1.10e-02
ggtggaaaggtactgggtatatagctcagagatctgaagcttctagataaatagctcagtggtcggcagctcgtaggcctgtagcttgaatagtgataatttctcactaaatagctttggggttggcagctgttggaaatataacataatggtgagacgtagctgggtatgaagcaaggattttggtagcttttataccccaaagtactcaatctgcagtggtttagagtttggaaactcttggataagcagttaagttgtccaaagcagttggaaccgttgcggagggtttggcaggctttggatgcatttcgagtgggtatgtggcaattgcatacatacccattggtctgggtgcttgggctgcagctggggctggggctgacgttggtagtttcacagacactgaagacttggcctgctgatggggagttgcagggcacagaggagtttgacgggtcacaaccagtggtactgcaggtcttgggctcacagctgggagatttgcaggttggtgcttcaccgtaggattcttggcagtaatccaggagccagagatttccttggtag

SEQ ID NO: 20464 - DNA, 1196 bp, Homo sapiens
  MAP TO AJ011930.1; EXPRESSED IN BRAIN, SIGNAL = 1.6; EXPRESSED IN HELA, SIGNAL = 2.7; EXPRESSED IN ADULT LIVER, SIGNAL = 1.4; EXPRESSED IN LUNG, SIGNAL = 1.5; EXPRESSED IN HEART, SIGNAL = 1.7; EXPRESSED IN BONE MARROW, SIGNAL = 1.7; NT HIT: AL163300.2, EVALUE 1.00e-123; SWISSPROT HIT: P08131, EVALUE 2.00e-04; EST_HUMAN HIT: BF057518.1, EVALUE 1.00e-120
atggccgcgtccactatgtctgtctgctccagcgacctgagctacggcagccgcgtctgccttcctggttcctgtgactcttgctccgactcctggcaggtggacgactgcccagagagctgctgcgagcccccctgctgcgcccccagctgctgcgccccggccccctgcctgagcctggtctgcaccccagtgagccgtgtgtccagcccctgctgcccagtgacctgtgagcccagcccctgccaatcaggctgcaccagctcctgcacgccctcgtgctgccagcagtctagctgccagctggcttgctgtgcctcctccccctgccagcaggcctgctgcatgcccgtctgctgcaagactgtctgctgcaagcctgtgtactgtgtgcctgtctgcagtggggattcttcatgctgccagcagtctagctgccagtcagcttgctgcacctcctccccctgccagcaggcctgctgtgtgcccatctgctgcaagcctgtctgctctgggatttcctcttcgtgctgccagcagtctagctgtgtgagctgtgtgtccagcccctgctgccaggcggtctgtgagcccagcccctgccaatcaggctgcatcagctcctgcacgccctcgtgctgccagcagtctagctgccagccggcttgctgcacctcctccccctgccagcaggcctgctgtgtgcctgtctgctgcaagcccgtctgctgtgtgcccacctgctctgatgattccggttcatgctgccagccagcttgctgcacctcctcccaaagccagcagggctgctgcgtgcccgtctgctgtaagcctgtgtgctgtgtgcctgtctgctctggggcttccagttcatgctgccagcagtctagctgccagccggcttgctgcaccacctcctgctgcagaccctcctcctccgtgtccctcctctgccgccctgtgtgcaggcccacctgctgcgtgcccgtcccctcctgctgcgcccccacctcctcctgccaggccagctgctgccgcccagcctcctgtgtgtctctcctttgccgccccgcatgctcccgcccagcctgctgtggccccacctcaacccagaagtccagctgctgagtgatctccttaagatcatccaaagcctgagtgctcactgccacctgcacccctggattctttaccct

SEQ ID NO: 20465 - DNA, 741 bp, Homo sapiens
  MAP TO AC004821.2; EXPRESSED IN ADULT LIVER, SIGNAL = 1.4; EXPRESSED IN PLACENTA, SIGNAL = 1.4; EXPRESSED IN BRAIN, SIGNAL =   2; EXPRESSED IN HEART, SIGNAL = 6.5; EXPRESSED IN BONE MARROW, SIGNAL = 2.8; EXPRESSED IN LUNG, SIGNAL =  11; EST_HUMAN HIT: BE176341.1, EVALUE 0.00e+00; NT HIT: gi14735706, EVALUE 0.00e+00; SWISSPROT HIT: P18146, EVALUE 1.00e-105
ttagcaaatttcaattgtcctgggagaaaaggttgctgtcatgtccgaaagccctgtggaggcgctgaaggagttggtgacagctgaggaagggaagctgctgacctgggccgggaaagcagggggaacagaggagtacgtggtggccaccgacggggaggggaagccactgtgcacaggggatgggtaggtcgaggagccgggagaggagaaggaggtgggcacaggggatgggtatgaggtggtggccggggatggataagaggtagtaaccggggacgggtaagaggtagcaaccggggacgggtaggaagagagagaggaggtggccgaagaggccacaacacttttgtctgctttcttgtccttctgccgcaagtggatcttggtatgcctcttgcgttcatcgctcctggcaaactttcttccacagatgtcgcaggcgaagggcttttcgcctgtgtgggtgcggatgtgggtggtgaggtggtcgctgcggctgaagttgcgcatgcagatgcggcactggaagggcttctggcctgtgtggatgcggatgtggcgggtgagctcgtcggagcgggagaagcggcgatcacaggactccactgggcaagcgtaagggcgttcgtgggggggcgtcttgctgggccggttggggtacttgcgcatgcggctgggtttgatgagctgggactggtagctggtattgagggccttcaggtcctgggagcccgactg

SEQ ID NO: 20466 - DNA, 602 bp, Homo sapiens
  MAP TO AC002988.1; EXPRESSED IN ADULT LIVER, SIGNAL =   2; EXPRESSED IN PLACENTA, SIGNAL = 2.2; EXPRESSED IN HELA, SIGNAL =   2; EXPRESSED IN BRAIN, SIGNAL = 1.8; EXPRESSED IN BONE MARROW, SIGNAL = 2.2; EXPRESSED IN FETAL LIVER, SIGNAL = 2.2; EST_HUMAN HIT: AI909504.1, EVALUE 4.00e-52; NT HIT: gi14768167, EVALUE 0.00e+00; SWISSPROT HIT: O76100, EVALUE 4.00e-90
tgttgttcacaaaggtgtcagaacaggcaaggtggatcatctcattaagttcacagaaaaagtgagggatttccaagtctgtgcagaaggacaactgcaatgtcactaagctttgtaacatggagtttaggacactcatgatccaggacaccagaaccagcagtccacagagctgagggctcatgatgaccgtgtagtgcagggggtgacagatggccacaaactggtcataggccatcacggtcaggagtaagctgtccaacactataaagagtacaaaaaagcacatctgggtgatgcaacctgcataggtaatgactttgctctgtgtctggatgttcaccaacatctttgggaccatggtggaggcaaaacagatatctacgaaggacaggttggagagaaagaagtacatgggggtgtggaggcaggagtctgagattgcggccaggatgatgagcaggttcccgagcacagtgaccaggtacatggacaggaacagcccaaagaggaagggctgcaattcttgtttctctgaaaatcctagaagaagaaattctgaaatttgtgtctcattccctgctttcacctggttgatgttt

SEQ ID NO: 20467 - DNA, 501 bp, Homo sapiens
  MAP TO AL096708.14; EXPRESSED IN BRAIN, SIGNAL = 1.4; EXPRESSED IN ADULT LIVER, SIGNAL = 1.3; EXPRESSED IN HELA, SIGNAL = 1.4; EXPRESSED IN BONE MARROW, SIGNAL = 1.4; EXPRESSED IN FETAL LIVER, SIGNAL = 1.3; EXPRESSED IN HEART, SIGNAL = 1.5; EST_HUMAN HIT: AA884835.1, EVALUE 7.00e-01; NT HIT: gi16124256, EVALUE 7.40e+00; SWISSPROT HIT: P53832, EVALUE 4.00e-07
cacctgacaaccacgcagccacagcagggacacacaaagccgggcatccaggccctcctccaccgtggcggccaggggcacacaaagccgggcatccaggccctcctccaccatggcggccaggggcacacaaagccgggcatccaggccctcctccaccgtggcaggcaggggcacacaaagccgggcatccaggccctcctccaccgtggcggccaggggcacacaaagccgggcatccaggccctcctccaccgtgaagggcaggggcacacaaagccgggcatccaggccctcctccaccgtgacgggcaggggcacacaaagccgggcatccaggccctcctccaccgtggcggccaggggcacacaaagctgggcatccaggccctcctccaccatgaagggcaggggcacacaaagccgggcatccaggccctcctccaccgtgacgggcaggggcacacaaagccgggcatccaggccctcctccaccgtggc

SEQ ID NO: 20468 - DNA, 485 bp, Homo sapiens
  MAP TO AL009049.1; EXPRESSED IN PLACENTA, SIGNAL = 2.1; EXPRESSED IN HELA, SIGNAL =   3; EXPRESSED IN HEART, SIGNAL = 1.4; EXPRESSED IN LUNG, SIGNAL = 1.6; EXPRESSED IN BONE MARROW, SIGNAL = 1.7; EXPRESSED IN FETAL LIVER, SIGNAL = 1.7; EXPRESSED IN ADULT LIVER, SIGNAL = 1.3; SWISSPROT HIT: P10387, EVALUE 5.00e-27
atgtgctccctgccccggatgtgccccctgccccggatgtgtcccctgccccggatgtgctccctgccccggatgtgctccctgccccggatgtgtcccctgccccggatgtgctccctgccccggatgtgtcccctgccccggatgtgctccctgccccggatgtgctccctgccccggatgtgtcccctgccccggatgtgctccctgccccggatgtgtcccctgccccggatgtgctccctgccccggatgtgtcccctgccccggatgtgctccctgccccggatgtgctccctgccccggatgtgtcccctgccccggatgtgtcccctgccccggatgtgtcccctgccccagatgtgtcccctgccccggatgtgctccctgccccggatgtgttccctgccccggatgtgctccctgccccagaggtgctccctgtctcaagtgtgctccttgtcctagtgtgctccctgccccag

SEQ ID NO: 20469 - DNA, 1126 bp, Homo sapiens
  MAP TO AL133392.1; EXPRESSED IN ADULT LIVER, SIGNAL = 1.7; EXPRESSED IN PLACENTA, SIGNAL = 1.7; EXPRESSED IN BRAIN, SIGNAL = 1.2; EXPRESSED IN HELA, SIGNAL = 1.1; EXPRESSED IN LUNG, SIGNAL = 1.9; EXPRESSED IN HEART, SIGNAL = 1.7; EXPRESSED IN BONE MARROW, SIGNAL =   2; EXPRESSED IN FETAL LIVER, SIGNAL = 1.2; SWISSPROT HIT: P32927, EVALUE 0.00e+00; NT HIT: gi11418060, EVALUE 0.00e+00; EST_HUMAN HIT: AA001063.1, EVALUE 1.00e-129
ggtgttccctgtaggattcggggacagcgaggtgtcacctctcaccatagaggaccccaagcatgtctgtgatccaccatctgggcctgacacgactccagctgcctcagatctacccacagagcagccccccagcccccagccaggcccgcctgccgcctcccacacacctgagaaacaggcttccagctttgacttcaatgggccctacctggggccgccccacagccgctccctacctgacatcctgggccagccggagcccccacaggagggtgggagccagaagtccccacctccagggtccctggagtacctgtgtctgcctgctggggggcaggtgcaactggtccctctggcccaggcgatgggaccaggacaggccgtggaagtggagagaaggccgagccagggggctgcagggagtccctccctggagtccgggggaggccctgcccctcctgctcttgggccaagggtgggaggacaggaccaaaaggacagccctgtggctatacccatgagctctggggacactgaggaccctggagtggcctctggttatgtctcctctgcagacctggtattcaccccaaactcaggggcctcgtctgtctccctagttccctctctgggcctcccctcagaccagacccccagcttatgtcctgggctggccagtggaccccctggagccccaggccctgtgaagtcagggtttgagggctatgtggagctccctccaattgagggccggtcccccaggtcaccaaggaacaatcctgtcccccctgaggccaaaagccctgtcctgaacccaggggaacgcccggcagatgtgtccccaacatccccacagcccgagggcctccttgtcctgcagcaagtgggcgactattgcttcctccccggcctggggcccggccctctctcgctccggagtaaaccttcttccccgggacccggtcctgagatcaagaacctagaccaggcttttcaagtcaagaagcccccaggccaggctgtgccccaggtgcccgtcattcagctcttcaaagccctgaagcagcaggactacctgtctctgcccccttgggaggtcaacaagcctggggaggtgtgttga

SEQ ID NO: 20470 - DNA, 588 bp, Homo sapiens
  MAP TO AC003110.1; EXPRESSED IN LUNG, SIGNAL =   2; EXPRESSED IN HEART, SIGNAL = 1.8; EXPRESSED IN ADULT LIVER, SIGNAL = 1.8; EXPRESSED IN BRAIN, SIGNAL = 2.5; EXPRESSED IN HELA, SIGNAL = 3.5; EXPRESSED IN BONE MARROW, SIGNAL = 2.1; EXPRESSED IN FETAL LIVER, SIGNAL =   2; SWISSPROT HIT: P55066, EVALUE 1.00e-44; NT HIT: gi14766861, EVALUE 0.00e+00; EST_HUMAN HIT: BF529912.1, EVALUE 0.00e+00
ctcatcaccccacgtcacaacatggagacctagagaccccatcctctggggatgagggggagattctgtcagcagaggggcccccagttagagaactggagcccaccctggaggaggaagaggtggtcacccctgacttccaggagcctctggtgtccagtggggaagaagaaaccctgattttggaggagaagcaggagtctcaacagaccctcagccctacccctggggaccccatgctggcctcatggcccactggggaagtgtggctaagcacggtggcccccagccctagcgacatgggggcaggcactgcagcaagttcacacacggaggtggccccaactgaccctatgcctaggagaagggggcgcttcaaagggttgaatgggcgctacttccagcagcaggaaccggagccggggctgcaaggggggatggaggccagcgcccagccccccacctcagaggctgcagtgaaccaaatggagcctccgttggccatggcagtcacagagatgttgggcagtggccagagccggagcccctgggctgatctgaccaatgaggtggatatgcctggagctg

SEQ ID NO: 20471 - DNA, 918 bp, Homo sapiens
  MAP TO Z82216.1; EXPRESSED IN ADULT LIVER, SIGNAL = 1.2; EXPRESSED IN HELA, SIGNAL = 2.9; EXPRESSED IN LUNG, SIGNAL = 1.3; EXPRESSED IN HEART, SIGNAL = 1.6; SWISSPROT HIT: P17010, EVALUE 0.00e+00; NT HIT: gi16163318, EVALUE 0.00e+00; EST_HUMAN HIT: AW170533.1, EVALUE 0.00e+00
ctgttataataggtcctgatggacagcccctcacagtgtacccttgccatatttgcacaaaaaagtttaaatccaggggattcttaaaaagacacatgaagaatcatcctgatcatttaatgagaaaaaaatatcagtgtacagattgtgactttacaactaacaagaaagtgagtttccataaccacttagaaagccataagctcataaacaaagtcgacaaaacccatgaatttacagaatacacacgaagatacagagaggctagtccactgagttccaataaacttattttaagagacaaggagccgaagatgcacaagtgcaaatactgtgactatgaaactgcagaacaaggactgttaaacaggcatttgttggccgttcacagcaagaattttcctcatgtttgtgttgagtgtgggaagggttttcgacatccttctgaactcaagaaacatatgagaacccatactggtgagaagccatatcagtgtcagtattgtattttcaggtgtgcagatcaatcaaatctgaaaactcacattaagtctaaacatggtaacaatttgccatataaatgtgagcattgtccccaagcatttggtgatgagagggagcttcaacgccatctggatttgtttcaaggacataagacacaccagtgtcctcattgtgaccataagagcaccaattcaagtgaccttaagcggcacatcatatctgtccatactaaggattttcctcacaaatgtgaggtctgtgataaaggttttcatcgtccttctgagctcaaaaagcatagtgatatccataagggtaggaagattcatcagtgcaggcactgtgactttaaaacatccgatccatttattcttagtggccatatcctttcagttcatactaaagatcagccat

SEQ ID NO: 20472 - DNA, 708 bp, Homo sapiens
  MAP TO AL008724.1; EXPRESSED IN ADULT LIVER, SIGNAL = 1.3; EXPRESSED IN BRAIN, SIGNAL = 1.2; EXPRESSED IN HELA, SIGNAL = 0.7; EXPRESSED IN BONE MARROW, SIGNAL = 1.1; EXPRESSED IN FETAL LIVER, SIGNAL = 1.3; NT HIT: gi14778004, EVALUE 0.00e+00; EST_HUMAN HIT: D31449.1, EVALUE 1.00e-123; SWISSPROT HIT: P57074, EVALUE 9.60e-02
tgacaggcacccgcagccagccgaactcccacctgcccagttggaggggtgcgagaaggccttgctgctctgcaccaccttcatggcctcccccagggcggcgctggctttcaggccgttcagcagggatgagtagaaggcatggatgaacatcttagaagcagccactggcacaggccacagagacacgaggacacactgagcgccggcagccaggaaggcccttgtcagcgcgatgaccccgtcggctgtgactttgctgttggactcctgggaggagccaagcaccaccagcttcacaggcagctgcaggtccaggacgtcggcggcagtaagcagcagctcctgcaggggcgggcagtccgagatgctctccccatcactggcatcgtcctgcacccgcaaggactcagggatcgtgtaggggtggccgaaggagctcttgctgctggcagggttgccgtccatgctgggcgtgaggaccaaggccgacagcttccaggagatgtgggtggcaaagtggacgcattcagcctgggtcagggcactcatgaccctctccttggtggccacactgcccactaggggctggcagcccagcagctcggacaccatgtaggcctcttcctcggccgatggcatgggcccccacagccacctgtccatcacggccgatggtagcttggggttgccgatgacagccgccat

SEQ ID NO: 20473 - DNA, 459 bp, Homo sapiens
  MAP TO Z98883.3; EXPRESSED IN ADULT LIVER, SIGNAL = 1.8; EXPRESSED IN HELA, SIGNAL = 0.8; EXPRESSED IN BONE MARROW, SIGNAL = 4.5; EXPRESSED IN LUNG, SIGNAL = 1.7; EXPRESSED IN HEART, SIGNAL = 2.1; EXPRESSED IN PLACENTA, SIGNAL = 1.9; EST_HUMAN HIT: BG830575.1, EVALUE 6.40e-01; NT HIT: AB032055.1, EVALUE 1.70e+00; SWISSPROT HIT: P06914, EVALUE 7.00e-25
agaagagacagacacacagccccgaaggtggtgcaggcacaggccctagaggtgccccgggcccagagactagagatgccccgggcccggagactagaggtgccccgggcccggagactagaggtgccccgggcccggagactagaggtgccccgggcccggagactagaggtgccccgggcccggagacttgaggtgccccgggcccggagactagaggtgccccgggcccggagactagaggtgccccgggcccggagactagaggtgccccgggcccggagactagaggtgccccgggcccggagacttgaggtgccccgggcccggagactagaggtgccccgggcccggagacttgaggtgccccgggcccggagactagaggtgccccgggcccggagactagaggtgccccgggcccggagacttgaggtgccccgggcccggagactagag

SEQ ID NO: 20474 - DNA, 509 bp, Homo sapiens
  MAP TO AL159140.2; EXPRESSED IN HELA, SIGNAL = 1.3; EXPRESSED IN ADULT LIVER, SIGNAL = 1.4; EXPRESSED IN LUNG, SIGNAL = 1.4; EXPRESSED IN BONE MARROW, SIGNAL = 1.2; EXPRESSED IN FETAL LIVER, SIGNAL = 1.1; EST_HUMAN HIT: BG491290.1, EVALUE 0.00e+00; NT HIT: gi15300801, EVALUE 0.00e+00; SWISSPROT HIT: Q08727, EVALUE 6.40e-02
ctgtggccagcacgaaggccgggacgctgtggaagcgcaccggtccgtggctgcggccgtcctcgcatgccacgaaggcggtcaccagcccgcagggccagtggatattgacgcgggcctcgcgggtgcccgcaggggcgccggcacaagcccgaagtccaaagcgaagggcccagcgccagcactgcgtggccgcacatggagctgtagccctcgttgtgcaggaacaggacgcccagatgcgcgtccggcagctcgctcgggactaggaccgccccgtacatgtcccggtgccctcggggctcgaacatgagccgtcgccgcacgtggtcaaggtgctggcgcatgtagcgccgcttggccagcagggtgggcccagacacctccggacaccccgccagcacgatacgcaagggctcgccgcccgtgtgcatgtccaccaccgacagcaccggcgtccctggatcatgcgggggcagccggggcaccgccagcgcgctctccatggt

SEQ ID NO: 20475 - DNA, 619 bp, Homo sapiens
  MAP TO AC002988.1; EXPRESSED IN BRAIN, SIGNAL = 2.6; EXPRESSED IN FETAL LIVER, SIGNAL = 3.4; EXPRESSED IN HEART, SIGNAL = 2.6; EXPRESSED IN BONE MARROW, SIGNAL = 2.8; EXPRESSED IN LUNG, SIGNAL = 2.5; EXPRESSED IN ADULT LIVER, SIGNAL = 2.6; EXPRESSED IN PLACENTA, SIGNAL = 4.5; EST_HUMAN HIT: BG216012.1, EVALUE 2.00e-44; NT HIT: gi14768167, EVALUE 0.00e+00; SWISSPROT HIT: O14581, EVALUE 2.00e-91
ccagcagcacacttgtaaaattcatcatcatgtcattaataaaagtgtcggaacaggcaaggtggatgacctgattaagttcacagaaaaaatgagggattttcaattctgtacagaaggacagctgcaatgccattatgctttgtaacagagaatataggatgctcacgatccaggacaccagaaccagcagtccacagagccaggagttcataatgactgtgtagtgcagggggtgacagatggccacaaaccggtcataggccatcacagtcaggagtaagctgtccaacactacaaagagtataaaaaagcacatctgggtgatgcagtctgcataggtgatgactctgctctgtgtctggatgttcaccagcatctttgggacagtggtagacacaaaacagatgtctgcaaaggacaggttggagaggaagaagtacatgggggtgtggaggtgggagtctgagattgtggccaggatgatgagcaggttcccgagcacggtgaccaggtacatggacagaaatagcccaaagaggaagggctgcaattctggttcctctgaaagtcccaggagaaggaattgtgaaatttgtgtctcattccctggtttcat

SEQ ID NO: 20476 - DNA, 615 bp, Homo sapiens
  MAP TO AP001759.1; EXPRESSED IN FETAL LIVER, SIGNAL = 1.4; EXPRESSED IN BONE MARROW, SIGNAL = 1.2; EXPRESSED IN HELA, SIGNAL = 1.3; EXPRESSED IN BRAIN, SIGNAL =   1; EXPRESSED IN ADULT LIVER, SIGNAL = 1.7; EST_HUMAN HIT: AL553446.1, EVALUE 0.00e+00; NT HIT: gi16166477, EVALUE 0.00e+00; SWISSPROT HIT: P12110, EVALUE 1.00e-112
gtcctgtgccccacagagaagaccgactgccccatccacgtgtacttcgtgctggacacctcggagagcgtcaccatgcagtcccccacggacatcctgctcttccacatgaagcagttcgtgccgcagttcatcagccagctgcagaacgagttctacctggaccaggtggcgctgagctggcgctacggcggcctgcacttctctgaccaggtggaggtgttcagcccaccgggcagcgaccgggcctccttcatcaagaacctgcagggcatcagctccttccgccgcggcaccttcaccgactgcgcgctggccaacatgacggagcagatccggcaggaccgcagcaagggcaccgtccacttcgccgtggtcatcaccgacggccacgtcaccggcagcccctgcgggggcatcaagctgcaggccgagcgggcccgcgaggagggcatccggctcttcgccgtggcccccaaccagaacctgaaggagcagggcctgcgggacatcgccagcacgccgcacgagctctaccgcaacgactacgccaccatgctgcccgactccaccgagatcgaccaggacaccatcaaccgcatcatcaaggtcatg

SEQ ID NO: 20477 - DNA, 513 bp, Homo sapiens
  MAP TO AC004927.2; EXPRESSED IN ADULT LIVER, SIGNAL = 2.3; EXPRESSED IN PLACENTA, SIGNAL = 3.4; EXPRESSED IN BRAIN, SIGNAL = 2.1; EXPRESSED IN HEART, SIGNAL =   4; EXPRESSED IN BONE MARROW, SIGNAL = 2.2; EXPRESSED IN FETAL LIVER, SIGNAL = 1.7; EXPRESSED IN HELA, SIGNAL = 1.4; EXPRESSED IN LUNG, SIGNAL = 2.4; SWISSPROT HIT: Q08274, EVALUE 1.20e+00; EST_HUMAN HIT: BG771560.1, EVALUE 4.60e-02
agcgcccggggctggctgggctccggcccgcgctcggcttgcgggcgcctgcctctcccgccggttcacagctcaagtgaactccatcggcggccgccgcgggctccctggctggacggtagcaggagggggcggcggctacgcgggggccccttgctccggacttcgctccccgactgcgccgagcgcgcctcctccagacgctcgcagctctcggagcgggacttcctcggcgcgccgagcccgagccgccggtgccaccgcccctcctccgtcccgccccgcgcgccccgcccctcgccgcccctcctctcgtccccggcgccgggtcggcccagcggaggcgcggtccccaggcgcgacatcgacagctgttgctccccccgcggctcgagccctcggctccccccggctgccttccttgcgggcgggcgcggcggaaactgcaccgctcctcgccctccccgcagttgccgcttccaagattgcgccatggcagggaaaggccactag

SEQ ID NO: 20478 - DNA, 568 bp, Homo sapiens
  MAP TO AC006501.5; EXPRESSED IN ADULT LIVER, SIGNAL =   2; EXPRESSED IN HELA, SIGNAL = 1.7; EXPRESSED IN BRAIN, SIGNAL = 1.6; EXPRESSED IN FETAL LIVER, SIGNAL = 2.7; EXPRESSED IN BONE MARROW, SIGNAL = 1.7; EXPRESSED IN LUNG, SIGNAL =   2; SWISSPROT HIT: O15230, EVALUE 1.10e+00; NT HIT: gi15297984, EVALUE 0.00e+00; EST_HUMAN HIT: BF843739.1, EVALUE 0.00e+00
atgacttcccagacaacaaagacatccacagtgacctgcacgcctacgtccagcacagggtgcacagcagccaggacatcctcagcaacatctccctgaatggcaaggccgatgccacactcattggaaaagtgagcagccacctggtgctgcggagcctcggctcctacctgtacctcaagctcaccctggaccttttccagaggggccacttggtcattaagagtgccagctacaaggtggtgcccgtgtctctctctgagctctatttgcttcagtgcaacatgaagttcatgacccagtccgcctttgagagggcacttccgattctcaacgtggccctcgcatccctccaccccatgacagacgagcagatctttcaggctattaatgctggccacatccagggggagcagggatgggaagactttcagcagaggatggacgccctctcctgcttcctcattaagaggcgagacaaaacccgcatgttctgccacccgtccttcagggagtggcttgtatggagagcagacggggaaaacacggccttcctgtgtgagcccag

SEQ ID NO: 20479 - DNA, 1388 bp, Homo sapiens
  MAP TO AC009086.5; EXPRESSED IN HEART, SIGNAL = 1.7; EXPRESSED IN LUNG, SIGNAL = 1.7; EXPRESSED IN BONE MARROW, SIGNAL = 3.2; EXPRESSED IN FETAL LIVER, SIGNAL = 1.7; EXPRESSED IN HELA, SIGNAL = 1.5; EXPRESSED IN ADULT LIVER, SIGNAL = 1.4; SWISSPROT HIT: P16150, EVALUE 0.00e+00; NT HIT: M61827.1, EVALUE 0.00e+00; EST_HUMAN HIT: AL559650.1, EVALUE 0.00e+00
tcatttctgataacagtaaaagccagcatggaaaaaaccgttaaaccgcaggttgggcctggccgttggcagggaagtgggcagaggggaggcccggccaggtcctccggcaactcccgcgtgttctgcttctccggctgcccacctgcaggtcccagctcttgctcctgcctgtttgcctggaaatggccacgcttctccttctccttggggtgctggtggtaagcccagacgctctggggagcacaacagcagtgcagacacccacctccggagagcctttggtctctactagcgagcccctgagctcaaagatgtacaccacttcaataacaagtgaccctaaggccgacagcactggggaccagacctcagccctacctccctcaacttccatcaatgagggatcccctctttggacttccattggtgccagcactggttcccctttacctgagccaacaacctaccaggaagtttccatcaagatgtcatcagtgccccaggaaacccctcatgcaaccagtcatcctgctgttcccataacagcaaactctctaggatcccacaccgtgacaggtggaaccataacaacgaactctccagaaacctccagtaggaccagtggagcccctgttaccacggcagctagctctctggagacctccagaggcacctctggaccccctcttaccatggcaactgtctctctggagacttccaaaggcacctctggaccccctgttaccatggcaactgactctctggagacctccactgggaccactggaccccctgttaccatgacaactggctctctggagccctccagcggggccagtggaccccaggtctctagcgtaaaactatctacaatgatgtctccaacgacctccaccaacgcaagcactgtgcccttccggaacccagatgagaactcacgaggcatgctgccagtggctgtgcttgtggccctgctggcggtcatagtcctcgtggctctgctcctgctgtggcgccggcggcagaagcggcggactggggccctcgtgctgagcagaggcggcaagcgtaacggggtggtggacgcctgggctgggccagcccaggtccctgaggagggggccgtgacagtgaccgtgggagggtccgggggcgacaagggctctgggttccccgatggggaggggtctagccgtcggcccacgctcaccactttctttggcagacggaagtctcgccagggctccctggcgatggaggagctgaagtctgggtcaggccccagcctcaaaggggaggaggagccactggtggccagtgaggatggggctgtggacgccccagctcctgatgagcccgaagggggagacggggctgccccttaa

SEQ ID NO: 20480 - DNA, 558 bp, Homo sapiens
  MAP TO AC020893.4; EXPRESSED IN ADULT LIVER, SIGNAL = 1.5; EXPRESSED IN HELA, SIGNAL = 1.4; EXPRESSED IN LUNG, SIGNAL = 1.9; EST_HUMAN HIT: BG912922.1, EVALUE 0.00e+00; SWISSPROT HIT: P38757, EVALUE 1.00e-25; NT HIT: gi14772274, EVALUE 0.00e+00
ggtgaagaggaagatcatggtgctggatccggatgagatacttattcactcccaccatgatggggtcctgaggctcacagtctggcctggaacgcctcctgacttcatcctcaaggtggtaatagacaaacatcctgtccgtttctttgtacattagaggccccatgtggatttctttttggaagtcgtgagcgagtggtgggagctggtagtgtttatagcaagcatggagatctatggctctgctgtggcagataaactggacaatagcagaagcattcttaagacgagatactacggacagcactgcactttggagttgggcagctacatcaaggacctctctttggtccacagtgacctctccagcattgtgatcctggctaactctccaggggtttacaggagccatccagacaaggccatcaccatcaaatcctggttcagtgaccccagtgacacaacccttctcaacctgctcccgatgctggatgccctcaggttcaccgctgatgttcgttccgtgctgagccgcaaccttcaccagtataggttctg

SEQ ID NO: 20481 - DNA, 2481 bp, Homo sapiens
  MAP TO AL078611.1; EXPRESSED IN HELA, SIGNAL = 0.5; EXPRESSED IN ADULT LIVER, SIGNAL = 1.2; EXPRESSED IN HEART, SIGNAL = 1.3; EXPRESSED IN LUNG, SIGNAL = 0.98; EXPRESSED IN BONE MARROW, SIGNAL =   1; NT HIT: gi11418311, EVALUE 0.00e+00; EST_HUMAN HIT: BF185609.1, EVALUE 5.80e-02; SWISSPROT HIT: O35245, EVALUE 2.00e-24
atgataggaattgaaagtgtcttaattacaatccctgtgcaattattaataacttttttgttcacctgttcccagaggaaacctcaagcggatctaaaggaggtatctcctcaaaagcatcctctaatgtcagaagcaagtgagcactgggaagaatacttgagaaagtggcatgcttacgaaactgctaaggtgcaccccagggaggttgcaaaacctgcatctaaaggaaagcccaggcttccaaaggcttctcctaaggcaacctccaaacccaagcacaggcataggaaagcacaaatcaagaccccggagaccctcgggccaaatacaaattccaataacaacatagaagatgatcaggatgtccattccgaacagcacccttcccaaaaggatctccagcagcttaagaaaaagccccggatcgtcctaccttggtggtgtgtttatgttgcatggtttttggtttttgctacttctagcatatcctcattcttcattgtattttatggactgacttacggctatgacaagtcaatagaatggctctttgcatctttttgttcattctgtcagtcagttcttctggtgcagccatctaaaattatactcctgtcaggcttcagaacgaataaacccaagtattgcaaaaacctttcatggtcaaccaagtataaatatactgagatcaggttggatggaatgcgtatgcatccagaagaaatgcagaggatacatgaccagatcgtccgaatccgaggcacgaggatgtaccaaccccttacagaagatgaaatcagaatattcaaaagaaagaagaggatcaagagaagagcactcctgtttctgagttacattctaactcactttatctttctagcccttctgttgatccttatcgtcttactacgtcacactgactgcttttactataaccagtttattcgtgatcggttctctatggatcttgctactgtgactaagctggaagacatctatagatggctaaacagcgtgctgttgcctttgttacacaatgacctgaatccaacatttcttcctgaaagctcgtctaaaatccttggccttccattgatgaggcaagtgagagcaaaatctagtgaaaaaatgtgtctacctgccgaaaagtttgtgcaaaacagcatcagaagagaaattcattgtcaccccaaatatggcattgacccagaagacacaaaaaactattctggcttttggaatgaagttgataagcaggctatagatgagagtaccaatggatttacttataagcctcaaggaacgcaatggctatattattcctatggactactacacacctatggatctggaggatatgcactctatttttttccagaacagcagcggtttaattccacactgaggctcaaagaacttcaagaaagcaattggctggatgagaagacatgggctgtggttttggaattaacaacttttaatccagatataaatctgttctgtagcatttcggtcatatttgaagtctctcagttaggagttgtcaacacaagcatatctctgcactctttttcacttgctgattttgacagaaaagcttcagcagaaatctacttgtatgtggccattctcatttttttcttagcctacgttgttgatgagggttgtatcattatgcaagaaagagcctcctatgtgagaagtgtgtataatttgctcaactttgctttaaagtgcatatttactgtgttgattgtgctctttctcaggaaacatttcctggccactggcataattcggttttacttgtcgaacccagaagacttcattccctttcatgcagtttctcaggtagatcacattatgaggataattttgggtttcctgttatttctgacaattttgaagaccctcaggtattccagattcttctacgatgtgcgcctggctcagagggccatccaggctgccctccctggcatctgccacatggcatttgttgtgtccgtgtatttcttcgtatacatggcttttggttacctggtgtttggtcagcatgaatggaactacagtaacttgattcattccactcagacagtattttcctattgtgtctcagctttccagaacactgaattttccaataacaggattctgggggtcctgttcctctcatctttcatgctggtgatgatctgcgtcttgatcaacttatttcaggctgtaattctgtctgcatatgaggaaatgaagcagcccgtgtatgaggagccatcggatgaagtggaagcaatgacctatttgtgccgtaagctgagaaccatgttcagctttctgacctcgcaatctaaggccaaagatgagcctgagttctttattgacatgctgtatgggcagccagagaagaacagccaccgttatctggggctgaagaccagaaacatcaacgggaagaaaatggtttaccttgttgtttga

SEQ ID NO: 20482 - DNA, 510 bp, Homo sapiens
  MAP TO AL009172.1; EXPRESSED IN ADULT LIVER, SIGNAL = 3.1; EXPRESSED IN PLACENTA, SIGNAL = 2.6; EXPRESSED IN BRAIN, SIGNAL = 3.3; EXPRESSED IN HELA, SIGNAL = 3.2; EXPRESSED IN HEART, SIGNAL =   3; EXPRESSED IN FETAL LIVER, SIGNAL = 2.6; EXPRESSED IN LUNG, SIGNAL =   3; EST_HUMAN HIT: BI755351.1, EVALUE 0.00e+00; NT HIT: AB016194.1, EVALUE 0.00e+00; SWISSPROT HIT: P19419, EVALUE 2.00e-56
attcctgtcagtcacccgccacatgccaatcccattggtgctggcgcccacacaccccacccctccgcaggcactcaccaatgtatgcgtaggaagcagggatggggtcagcgccggccccggagcctggaggccggagccacttcccgatcctggggtccgttcgggtcccggcccacctagcaggctcgggctgagtggaagctctaggtcccggggcttccggcccttctgcggctgggagatctcagggctggaagccgcatggccgcccgcctgccctgcggtgtccataacaaccgcgggcagccgggctggcacgccctcctgtggagggacttctggctcggccttggtggtttctggcacaaaccctctctcccccgcaacttccaactcttccttgggcccttctactttcacttctgggggcaaagcccggcccaaacccggctccacattaagctcttccgatttcaggtttggggcctcgggcggggtcaggatgac

SEQ ID NO: 20483 - DNA, 941 bp, Homo sapiens
  MAP TO AC005618.1; EXPRESSED IN BONE MARROW, SIGNAL = 1.3; EXPRESSED IN ADULT LIVER, SIGNAL = 1.3; EXPRESSED IN PLACENTA, SIGNAL = 1.5; EXPRESSED IN BRAIN, SIGNAL = 1.4; EXPRESSED IN HELA, SIGNAL = 0.7; EXPRESSED IN LUNG, SIGNAL = 1.4; EXPRESSED IN HEART, SIGNAL = 1.7; EST_HUMAN HIT: BF531107.1, EVALUE 0.00e+00; NT HIT: gi14861871, EVALUE 0.00e+00; SWISSPROT HIT: Q9Y5I4, EVALUE 4.00e-68
atgggagggagctgcgcgcagaggcgccgggccggcccgcggcaggtactatttcctttgctgctgcctttgttctaccccacgctgtgtgagccgatccgctactcgattccggaggagctggccaagggctcggtggtggggaacctcgctaaggatctagggcttagtgtcctggatgtgtcggctcgcgagctgcgagtgagcgcggagaagctgcacttcagcgtagacgcgcagagcggggacttacttgtgaaggaccgaatagaccgtgagcaaatatgcaaagagagaagaagatgtgagttgcaattggaagctgtggtggaaaatcctttaaatatttttcatgtcattgtggtgattgaggatgttaatgaccacgcccctcaattccggaaagatgaaataaacttagaaatcagtgaatccgtcagcctggggatgggaacaattcttgagtctgcagaagatcctgatattagtatgaattcgctgagcaaataccaactaagtcctaacgagtatttctcattggtggagaaagacaatcctgatggtggcaaatatccagaattagtattgcagaagactctggaccgagaaacgcagagcgctcaccacttggtactgaccgccttagatggtggggaccctccccgaagcggtactgctcagataagaatcctggtaatagatgccaatgacaaccccccagtgttcagccaggacgtgtacagggttagccttcgggaagacgtgcctccaggcacctccatcctgagagtgaaggccactgaccaggacgagggcatcaactcagagatcacttattccttctttggtgtggctgacaaagctcagcacgtgttctctctggattacactacaggaaacattctaactcagcagcctttggattttgaagaagtagaaag

SEQ ID NO: 20484 - DNA, 801 bp, Homo sapiens
  MAP TO AL157789.1; EXPRESSED IN LUNG, SIGNAL = 9.3; EXPRESSED IN ADULT LIVER, SIGNAL = 7.5; EXPRESSED IN PLACENTA, SIGNAL = 7.4; EXPRESSED IN BRAIN, SIGNAL = 5.7; EXPRESSED IN HELA, SIGNAL =  15; EXPRESSED IN HEART, SIGNAL =  10; EST_HUMAN HIT: BG755277.1, EVALUE 0.00e+00; NT HIT: gi13654754, EVALUE 0.00e+00; SWISSPROT HIT: P11518, EVALUE 1.00e-122
ttaacccagtttagtggcaagttctttagcctttgcctttttgcgcttggcgatacgagccacagacttaggacccaggacattgccaccccagtgacggcggatctcatcgtatctgtcattgtaattggtcctgatagcttccaccagcttagccaaagcgcctttgtcttctgagttcacctgtgtgaaggcgacagtggtgcaggtcttcctgtggactagacgtcccagtcttgccttccccttgataatgcagtaagggacccccattttacgacatagggcaggcaagaagacaaccagctcgatgggatccatgtcgtgtgaaatcaccaccagctgagctttcttgttctccaccaaggtggtgacagtgttaactcctgctcgaaggacaggtggtctcttcttcgggacgtcccctttgccagcagctttcttctcggcccgggccaacagtctctgcttcttctcttgctttgtctctggcctgtacttgtgggccagcttaagcagctgagtagctgtttggcggtccagggcctgggtgaactggttaatcgcaggaggcactttcagccgcttatagaggatggctctctgccgctgcaacctgatatagcggggccatttcacaaagcgggtgaggtctcttttgggctggatgtcctgtccaatgccaaaattcttaggccttttctcaaacaggggattcaccactttcttagcctcctgcttcttcacgacagctggggccggagccaccttctttcccttggccttctttcctttcggcat

SEQ ID NO: 20485 - DNA, 553 bp, Homo sapiens
  MAP TO AL121985.13; EXPRESSED IN ADULT LIVER, SIGNAL = 1.9; EXPRESSED IN PLACENTA, SIGNAL = 1.8; EXPRESSED IN HELA, SIGNAL = 1.5; EXPRESSED IN LUNG, SIGNAL = 1.6; EXPRESSED IN HEART, SIGNAL =   2; SWISSPROT HIT: P10267, EVALUE 1.00e-103; EST_HUMAN HIT: BG433950.1, EVALUE 0.00e+00; NT HIT: AF333069.1, EVALUE 0.00e+00
tggatggataatcctatagaagtatatgttaatgatagtgtatgggtacctggccccacagatgatcgctgccctgccaaacctgaggaagaagggatgatgataaatatttccattgggtatcattatcctcctatttgcctagggagagcaccaggatgtttaatgcctgcagtccaaaattggttggtagaagtacctactgtcagtcctaacagtagattcacttatcacatggtaagcgggatgtcactcaggccacgggtaaattatttacaagacttttcttatcaaagatcattaaaatttagacctaaagggaaaacttgccccaaggaaattcctaaaggatcaaagaatacagaagttttagtttgggaagaatgtgtggccaatagtgtggtgatattacaaaacaatgaattcgaaactattatagattgggcacctcgaggtcaattctaccacaattgctcaggacaaactcagtcgtgtccaagtgcacaagtgagtccagctgttgatagcgacttaacagaaagtctagacaaac

SEQ ID NO: 20486 - DNA, 735 bp, Homo sapiens
  MAP TO AC004877.1; EXPRESSED IN ADULT LIVER, SIGNAL = 2.5; EXPRESSED IN HELA, SIGNAL = 0.92; EXPRESSED IN BONE MARROW, SIGNAL = 2.3; EXPRESSED IN LUNG, SIGNAL = 2.3; EXPRESSED IN PLACENTA, SIGNAL = 1.6; SWISSPROT HIT: P10072, EVALUE 3.00e-53; NT HIT: gi10181127, EVALUE 1.00e-111; EST_HUMAN HIT: BI160881.1, EVALUE 0.00e+00
gcgccacctcggggggagcggaccaggctggggccgcaagggcggcgtccggggccgcgtgggcggcttcgccgtgaatgagctggtgccgcaccaggtgggtcttgcggctgaagctctttccgcactgcgggcaggagaaggggcgggagcctgtgtggatcgcctggtggcggactaggttggttttggagctgaagctgcgggcgcagacggcgcaggcgtgggggcggctgccagtgtgcaccgcctggtggcggcccaggtgcgacttgcggctgaagcggcggccgcactgagcgcaggcgaaaggcctggcgccgctgtgggccctggagtgggcgaccagattaggccgcgagccgaagcggcggtcacactgcgtgcaggcgaagggccgttcgcccgtgtgcacgcgcgggtgccgcgccaggtgctgcccatgggagaagccgcgcccgcagtccgggcagaagaaggaccgctcgcccgagggggcgcgctggggcaccacgggatcggatcctgggccgcagcccggtccgccaggcgcgctggccaggggcttggcggcgggggcatccacggtggcgcccagtgcgcactcatcgcacccaaaggggcgaccctcgctgcggtgcagacactggtgcgtggcgaggttctttttccagccgaagctcaagccgcagtcggagcacgcgaaaggctttggcccgggaaaggatggggtcg

SEQ ID NO: 20487 - DNA, 770 bp, Homo sapiens
  MAP TO AC008103.27; EXPRESSED IN LUNG, SIGNAL = 1.5; EXPRESSED IN FETAL LIVER, SIGNAL = 1.3; EXPRESSED IN ADULT LIVER, SIGNAL = 1.5; EXPRESSED IN PLACENTA, SIGNAL = 2.4; EXPRESSED IN HELA, SIGNAL = 1.9; EXPRESSED IN HEART, SIGNAL = 1.5; EXPRESSED IN BONE MARROW, SIGNAL = 1.6; SWISSPROT HIT: P10264, EVALUE 0.00e+00; NT HIT: X72791.1, EVALUE 0.00e+00; EST_HUMAN HIT: AU119631.1, EVALUE 1.00e-65
tgcaaaatgaggccattgagcaagttagagctatctgccttagagcctgggaaaaaatccaagacccaggaagtgcctgcccctcatttaatacagtaagacaaggttcaaaagagccctatcctgattttgtggcaaggctccaagatgttgctcaaaagtcaattgccgatgaaaaagcccgtaaggtcatagtggagttgatggcatatgaaaacgccaatcctgagtgtcaatcagccattaagccattaaaaggaaaggttcctgcaggatcagatgtaatctcagaatatgtaaaagcctgtgatggaatcggaggagctatgcataaagctatgcttatggctcaagcaataacaggagttgttttaggaggacaagttagaacatttggaggaaaatgttataattgtggtcaaattggtcacttaaaaaagaattgcccagtcttaaacaaacagaatataactattcaagcaactacaacaggtagagagccacctgacttatgtccaagatgtaaaaaaggaaaacattgggctagtcaatgtcgttctaaatttgataaaaatgggcaaccattgtcgggaaacgagcaaaggggccagcctcaggccccacaacaaactggggcattcccaattcagccatttgttcctcagggttttcagggacaacaacccccactgtcccaagtgtttcagggaataagccagttaccacaatacaacaattgtcccctgccacaagcagcagtgcagcagtag

SEQ ID NO: 20488 - DNA, 1074 bp, Homo sapiens
  MAP TO AJ010770.1; EXPRESSED IN BONE MARROW, SIGNAL = 1.2; EXPRESSED IN LUNG, SIGNAL = 1.2; EXPRESSED IN FETAL LIVER, SIGNAL = 1.2; EXPRESSED IN HEART, SIGNAL = 1.5; EXPRESSED IN ADULT LIVER, SIGNAL = 1.3; EXPRESSED IN PLACENTA, SIGNAL = 1.4; EXPRESSED IN BRAIN, SIGNAL = 1.2; EXPRESSED IN HELA, SIGNAL = 1.7; NT HIT: gi14781706, EVALUE 0.00e+00; EST_HUMAN HIT: AW439271.1, EVALUE 0.00e+00; SWISSPROT HIT: Q99996, EVALUE 0.00e+00
gttattgaagaaaaaaatgaactgataagggatcttgaaacccaaatagaatgtttgatgagtgatcaagaatgtgtgaagagaaatagagaagaagaaatagagcagctcaatgaagtgattgaaaaacttcaacaggaattggcaaatattggacagaagacatcaatgaatgctcattccctctcagaagaagcagacagtttaaaacatcaattggatgtggttatagctgaaaagctggccttggaacagcaagtagaaaccgctaatgaagaaatgaccttcatgaaaaatgtacttaaagaaaccaattttaaaatgaatcagctaacacaggaattattcagcttaaagagagaacgtgaaagtgtggaaaagattcaaagcataccagagaatagtgttaacgtggctatagatcatctgagcaaagacaaacctgaactagaagtagtccttacagaggatgctcttaaatccctagaaaatcagacatacttcaaatcttttgaagaaaatggcaaaggttccataattaatttggaaacaaggttgctacaacttgagagcactgttagtgcaaaggacttagaacttacccagtgttataaacaaataaaagacatgcaagaacaaggccagtttgaaacagaaatgcttcaaaagaagattgtaaacctacagaaaatagttgaagaaaaagtggctgctgctcttgtcagtcaaatccaacttgaggcagttcaggaatatgcaaaattctgtcaagataatcaaacaatttcatcagaacctgaaagaacaaatattcagaatttaaatcaactaagagaagatgagttggggtcagatatatcagcattaaccttgagaatatcagaattagaaagccaggttgttgaaatgcatactagtttgattttagaaaaagaacaagtagaaattgcagaaaaaaatgttttagaaaaagaaaagaagctgctagaactacagaagctattggagggcaatgagaaaaaacagagagagaaagaaaagaaaagaagccctcaagatgttgaagttctcaag

SEQ ID NO: 20489 - DNA, 1069 bp, Homo sapiens
  MAP TO AC012064.1; EXPRESSED IN BRAIN, SIGNAL = 1.1; EXPRESSED IN HELA, SIGNAL = 0.47; EXPRESSED IN ADULT LIVER, SIGNAL = 1.3; EXPRESSED IN PLACENTA, SIGNAL = 1.6; EXPRESSED IN BONE MARROW, SIGNAL = 1.1; EXPRESSED IN HEART, SIGNAL = 2.2; EXPRESSED IN FETAL LIVER, SIGNAL = 0.92; NT HIT: gi16161051, EVALUE 0.00e+00; EST_HUMAN HIT: BF530254.1, EVALUE 0.00e+00; SWISSPROT HIT: Q00657, EVALUE 0.00e+00
aactgcaaggcccgcttcatccacgatggccctgaggacacctctgaccagctggtgctggaggtgtcagtgatggcttggttgcccatgccctcatgcctgcggaggggccaaacagacctcctgcccatccaggtcaaccctgtcaatgacccaccccacatcatcttcccacatggcagccttatggtgatcctggaacacacacagaagcctctggggcctgaggttctccaggcctatgacctggactctgcctgtgagggcctcgccttccagctccttggcaccccctctggcctccccatggagcaccgagaccagcctggggagccggtgactgagttctcctgctgggagttggaggccggcagcctagtctatgtccactgtggtggccctacacaggacttgacattccgggtcagcaatggactgcaggccagccccccggccatgctgaaggtggtggctgtccagctggccatacaaatccaccgcagcacagggctgcatctggcccagggctctgccatgcccatcttgcctaccaacctgttggtggagaccagcgccgtggggcaggatgtgaccgtgctgttccgtgtcaccggaggcctgccgttcagggagctgcagaagcagggggctggtggggtggaggatgctgagtggtgggtcacacaggcgttccaccagcaggatgtggagcagggccacgtgaggtacctgagcactgacccacagcactacaccgaggacaccgtggagaacctggatctgcaggtgcaggtgagctgggaaatcctgagcaatctgtccttcctagtgaccatccagagagccactgtgtggatgctgcagctggagccactgcacactcagaacacccagcaggaggccctcaccacagcccacctggaggccaccctggaggaggcaggcccaagccccccaaccttccactgtgaggtggttcaggctcccaggaaaggcaactttcaactacagggcacgatgctgtcagacggtcagggcttcacccaggatgacgtacaggctgcagagg

SEQ ID NO: 20490 - DNA, 873 bp, Homo sapiens
  MAP TO AC005950.1; EXPRESSED IN ADULT LIVER, SIGNAL = 1.8; EXPRESSED IN PLACENTA, SIGNAL = 4.2; EXPRESSED IN BRAIN, SIGNAL = 2.5; EXPRESSED IN HELA, SIGNAL = 2.5; EXPRESSED IN BONE MARROW, SIGNAL = 2.1; EXPRESSED IN HEART, SIGNAL = 3.1; EXPRESSED IN FETAL LIVER, SIGNAL = 1.9; EST_HUMAN HIT: BI439085.1, EVALUE 0.00e+00; NT HIT: gi13641743, EVALUE 0.00e+00; SWISSPROT HIT: P49918, EVALUE 3.00e-57
ggccggacaaagcggggccgggccgggccggggcggggccgtgcggggctcaccggagatcagaggcccggacagcttcttgatcgccgcgccgttggcgctggcggccgcggtgccggccgcgggacgtcccgaaatccccgagtgcagctggtcagcgagaggctcctggccgcgctgcccctggttcgcgccctgctcggcgctctcttgaggcgccgcgtccggggccggggccggggcgggggccggggcccgggccggggccggggctggggccggggccgcgactggagccggggccggagccggagccggagccggggccggggccggggccaggaccgcgaccgctaccggagccgcgaccggagccgcgaccggagccggagccggggccggggctggagccaggaccgggactgggggcggggtggacgccggggccgggaccgggacactaggcagctgctccggcgcctcctcgaggccgtcgagggactcagcggccggctcgaggggcgggctgacagccaccgcgaccgcgacgggccgcggcgccagcagcaggcggcagcgccccacctgcaccgtctcgcggtagaacgcgggcaccgagtcgctgtccacttcggtccactgcaggcgtccagggccccgcagcggcatgtcctgctggaagtcgtaatcccagcggttctggtcctcggcgttcagctcggccaggcgggcctgcagctcgcggctcagctcctcgtggtccaccggcccgaagaggctgcggcaggcgctggtgcgcactagtactgggaaggtcccacgggcgacaagacgctccatcgtggatgtgctgcggagggacgcgtcggacat

SEQ ID NO: 20491 - DNA, 596 bp, Homo sapiens
  MAP TO AC000384.1; EXPRESSED IN BRAIN, SIGNAL = 2.8; EXPRESSED IN HELA, SIGNAL = 5.5; EXPRESSED IN ADULT LIVER, SIGNAL = 3.4; EXPRESSED IN PLACENTA, SIGNAL = 1.8; EXPRESSED IN BONE MARROW, SIGNAL = 3.3; EXPRESSED IN HEART, SIGNAL = 2.3; EXPRESSED IN LUNG, SIGNAL =   3; EXPRESSED IN FETAL LIVER, SIGNAL = 3.1; EST_HUMAN HIT: BE799300.1, EVALUE 0.00e+00; NT HIT: gi14773950, EVALUE 0.00e+00; SWISSPROT HIT: Q9RPF4, EVALUE 3.00e-01
gtggttccacgagtgtttgggcgcatggtgggtaaaagccgggaggcggtggctcaggccatggtgctggagatgtttcgagaggaggactactacaacgatgatgttctggaccagatgggcgccagtatcctgggcgtggagggcccccggcgccacccagatgagccccctgaggatgaagtcttcgagctcttccccatgttcatgggggggcttctctctgcccacaaccgagctgtgctagctcagcttggctgccccatcaagaacctggatgccctggagaatgcccaggccatcaagaagaagctgggcaagctgggccggcaggtgctgcccccatcagagctccttgaccacctcttcttccactatgagttccagaaccagcgcttctccgctgaggtgctcagctccctgcgtcagctcaacctggcaggtgtgcgcatgacaccagtcaagtgcacagtggtggcagctgtgctgggcagcggaaggcatgccctggatgaggtgaacttggcctcctgccagctagatcctgctgggctgcgcacactcctgcctgtcttcctgcgtgcccggaagctggg

SEQ ID NO: 20492 - DNA, 603 bp, Homo sapiens
  MAP TO AL078600.14; EXPRESSED IN ADULT LIVER, SIGNAL = 2.7; EXPRESSED IN PLACENTA, SIGNAL = 1.8; EXPRESSED IN HELA, SIGNAL = 0.66; EXPRESSED IN BRAIN, SIGNAL = 1.8; EXPRESSED IN HEART, SIGNAL = 2.8; EXPRESSED IN BONE MARROW, SIGNAL = 2.8; EXPRESSED IN LUNG, SIGNAL = 2.6; SWISSPROT HIT: P45700, EVALUE 5.00e-71; EST_HUMAN HIT: BF476773.1, EVALUE 0.00e+00; NT HIT: gi14757437, EVALUE 0.00e+00
ctctttgatctttgcccttttctcgcggatggcggcgtcggcgggctcccggctctccaccccgattgggggcacgaagtccaccgggggcaggcctctgaacggcgccttgtcacgcagctggtcctgggccaccttcttcttctccagtaggatgtctctttggatctcctcgggcagcttctgcagggtctccttggcttccctgagagcccgctcgtggttttcgcggatcctggccaagttgtcctccagggcggcctccgggtccccgggtgccccctcctcgcggcgccgggctcgcccctcggccgcgtcctcggcgcgcgccccgggcccgggcttgtggtcggcggccggctgcaaggcggggctggagtggaacaggaccccgctgagcagcttggaggagtctggcaggaagaagatcgccccgaagcagagcgtgatgaaggcgctgaataccagcagcagcacgaacttctccgtcaggcggagggcggcggggcccgaccccttcctgccaccgccgccgccgagccccccgcccaggacgccgcccgcggggctgctgaagagcggcaacaggccccccacgggcat

SEQ ID NO: 20493 - DNA, 526 bp, Homo sapiens
  MAP TO AC004687.1; EXPRESSED IN BRAIN, SIGNAL = 2.3; EXPRESSED IN HELA, SIGNAL = 1.4; EXPRESSED IN ADULT LIVER, SIGNAL = 1.2; EXPRESSED IN BONE MARROW, SIGNAL = 1.3; EXPRESSED IN HEART, SIGNAL = 1.7; SWISSPROT HIT: P28481, EVALUE 1.00e-01; EST_HUMAN HIT: BG286145.1, EVALUE 6.00e-23; NT HIT: gi14769777, EVALUE 0.00e+00
atcatggaggtggcctcacccacggcaggcagtgtactggtggagttgtcccagctgcagctgctgcaggtgtgtcgtgaggtggtcgtgcgcaccatgtcgccccacggggagtcggcggactccatcccggctcctatcactcccgccctggctccggccagcctgccagcccgagtctcctgcccctcaccgcacccaagcccagaggccagagcgccccttgcttcagcctccccagggcctggagaccccagctctcctctccagcaccctgctccccttggaactcaagagcctccaggagcaccccctgcaagcccttccagagagatggcaaaagggtcccacgaggaccctccagcaccttgctcccaggtaccctgtctggggagaggggagcaggtgcaggctggcagagggacctgggcttgggtccttcctcagtgctctctgttccaggaggaggctggggcagcagtgctgggcacctcagaggagaggacagccagcacatctaccctgg

SEQ ID NO: 20494 - DNA, 791 bp, Homo sapiens
  MAP TO AC009288.8; EXPRESSED IN ADULT LIVER, SIGNAL = 1.9; EXPRESSED IN HELA, SIGNAL = 0.79; EXPRESSED IN LUNG, SIGNAL = 1.7; EXPRESSED IN HEART, SIGNAL = 1.9; SWISSPROT HIT: P08673, EVALUE 1.00e-19; NT HIT: gi14756466, EVALUE 1.00e-124; EST_HUMAN HIT: AL110383.1, EVALUE 0.00e+00
agcgtccacgttagcgtgccttgtcggtgccattagcaatgtcgtataaagcgccctcattggtgatgtcttgtacagtgccctcattagcgatgttgtgtacagtgtacttgttagcgacggcttgtagggtgtcctcgttagcgatgtcgtatacagctcgttggcgatgccctgggcggcgtcctcgttggcgatgccctgggcggcgtcctcgttggcgatgccctgggcggcgtcctcgttggcgatgccgtggacggcgtcctcgttggcgatgccctgggcggcgtcctcgttggcgatgccctgggcggcgtcctcgctggcgatgccgtgggcggcgtcctcgctggcgatgccgtgggcggcgtcctcgttggcgatgccgtgggcggcgtcctcgttggcggtgccctgggcggcgtcctcgttggcgatgccctgggcggcgtcctcgctggcgattccgtgggcggcgtcctcgctggcgatgccgtgggcggcgtcctcgttggcgatgccgtgggcggcatcctcgttggcggtgcccttgtcggcggcctcgttagcgatgccctgggcggcgtcctccttggcgatgccctgggcggcgtcctccttggcgatgccctgggcggcgtcctcgttggcgatgccctgggcggcatcctcgttggcgatgcccttgtcggcggcctcgttagcgatgtcgtgtacagtatcctcgttagcgatgtcgtgtgtggcgtcctcgttagtgatgtcgtgtacggtgtcctcatggggag

SEQ ID NO: 20495 - DNA, 639 bp, Homo sapiens
  MAP TO AC016594.5; EXPRESSED IN ADULT LIVER, SIGNAL = 1.2; EXPRESSED IN BRAIN, SIGNAL = 1.7; EXPRESSED IN PLACENTA, SIGNAL = 1.6; EXPRESSED IN HELA, SIGNAL = 1.4; EXPRESSED IN LUNG, SIGNAL = 1.1; EXPRESSED IN HEART, SIGNAL = 1.7; SWISSPROT HIT: Q92747, EVALUE 1.00e-105; NT HIT: gi13643735, EVALUE 0.00e+00; EST_HUMAN HIT: BI761009.1, EVALUE 0.00e+00
ggatcgtacccagattgccctcagtgtcaataatcacgaagtgcacatctataagaagaatgggcgccagtgtgtgaaagctcacgaactcaaggagcacaatggacacatcacagatattgactgggctcccaagcatgaccacatcgtcacttgtggggcagaccacaatgcctatgtctggagtcagaaagatggtgtctggaagccaacactgatgatcctgagaattaatcgcacagctacttttgtgaagtggtccgccctagagaacaaatttgctgtgggaagtgaagcacgactcatttcagtttgttactttgagtctgaaaatgactggtgggtgagcaagcacattaaaaagctgattcgctccacagtcctcagcttggattggcatcccaacaatgttttgctggcagcaggatcatgtgacttcaaacacagagtgttttcttcctacattaaagaagtggatgaaaagctggccagcatgccctgggacagcaagatgctttttgggcagctgatgtcagagtctggtggcggtggcactggtggctgggtccacggggtcagcttctccgccagtgggagccacctggcctgggccagccacgacagcaccatgtctgctgc

SEQ ID NO: 20496 - DNA, 579 bp, Homo sapiens
  MAP TO AL023753.1; EXPRESSED IN ADULT LIVER, SIGNAL = 1.9; EXPRESSED IN PLACENTA, SIGNAL = 3.3; EXPRESSED IN HELA, SIGNAL = 1.8; EXPRESSED IN BONE MARROW, SIGNAL = 1.8; EXPRESSED IN HEART, SIGNAL = 2.3; EXPRESSED IN FETAL LIVER, SIGNAL = 2.3; NT HIT: gi13637310, EVALUE 0.00e+00; EST_HUMAN HIT: BF945100.1, EVALUE 1.00e-45; SWISSPROT HIT: O95521, EVALUE 1.00e-113
ctgatcagctgttccaggtgcccactgaagaaggtgatcaattttattttaagcaactgaaggtgttccagcctgaggaacacagagctgaatttggcaactaaccgtccttggagttcattatctgacgtgtaatgatggcacctggagaaaacgagtttgcgaagattcttcatctccttcaggtaacaacgaagctttcttatcagacgtggccaggacatgttgcgaatttccagctcttgaatactattcaggtatattattttcaatgactttctgagatatttaatcggcgttagataattgaccagcttactacagcacaggtgtactaaacctctcctttggtaaacccactggaagaggtatctcaggcattcatcctggggtatttccttgaggcagatgtctatgaacacctttaagggctggtgctctcccatccttggacagtcctctgctgtctgcctcttactcgtggtctctgggaagcaggacagggcccaggctccaggccatctggcccagaaattctcgtcaacatcccgcaaatccagcacttgaagtttccacctc

SEQ ID NO: 20497 - DNA, 1180 bp, Homo sapiens
  MAP TO AC009487.3; EXPRESSED IN ADULT LIVER, SIGNAL = 5.1; EXPRESSED IN HELA, SIGNAL =  10; EXPRESSED IN PLACENTA, SIGNAL = 4.4; EXPRESSED IN HEART, SIGNAL = 4.9; EXPRESSED IN BRAIN, SIGNAL = 4.7; EXPRESSED IN LUNG, SIGNAL = 5.2; EXPRESSED IN BONE MARROW, SIGNAL = 5.8; EXPRESSED IN FETAL LIVER, SIGNAL = 5.6; EST_HUMAN HIT: BE071796.1, EVALUE 1.00e-69; NT HIT: gi15668172, EVALUE 2.90e-01; SWISSPROT HIT: Q09625, EVALUE 1.60e-02
aggtaaagactgaaacactagtgtcaggcgatagagcttcattcacgccttcctccctgtcaccatgagatcgaaatttctctatactctggcatcccaacaatttggtattactcgtctgtcccctcaaagggaacatgccacctgtcaggtccagagtgtatctttcttcacagtattctaaccactcatataagatttgtcctgatgccaaacactttctattaccaaaggccagctgcagtagatgcaaactcaaaacatccccttcactatcttgtgtagactgaacagcccacaagtagcagcaattccgacgatcattctcaggttcttgaaaagtgacagcatatacaggaacttgtccactttccaattgtatgtaatattctcttttcatgcttttcatgttccaaagtgctagatagccatcagaaaaacctgcagcaagctgatttgtcctgcttatgtaactaagagttgaaacggctgttcctgttggacttactaactggaaacacagatggcgcccttctctcatcacactttctctaatgtgtggtacttcagctgggataccagttagaacttcaagatctgatgcttcaacttcattttgattgcatgacaagtcatccaaacataggtcaataagaaggatctgtccaacatcagtgaccacagctgccactccaaaaagccatcgcagacttggatgtaaatgctgagtgcttgcactggctcctccatgattaattataggttcaatagctgttacccttccaggaagaacaactgctttaactacttttgatattccaaggtcataaagacagagaacactcccttctgtttcttccaatcctattaataatccagttctcttctgccaagagaattctttcacagctaaaactacaggaggctgttcattgactccactgaatctgtaagcagacaatcgctctcctgttatagagtttactacctcaagttgtggaccacaagccaagcaagcaagtccatttttccccgcagcaaactttccacgaagcacagattctaatgttatttcgtcttctccaagggcttgaagagtcacttctggaaatggcaggagaccactagtcacttgagctcttaagtctcgcatacttccacagcgccgttccgccgccat

SEQ ID NO: 20498 - DNA, 1002 bp, Homo sapiens
  MAP TO AJ011930.1; EXPRESSED IN ADULT LIVER, SIGNAL = 1.3; EXPRESSED IN HELA, SIGNAL = 1.5; EXPRESSED IN BONE MARROW, SIGNAL = 1.4; EXPRESSED IN LUNG, SIGNAL = 1.2; SWISSPROT HIT: O75690, EVALUE 7.40e-01; EST_HUMAN HIT: BF057369.1, EVALUE 0.00e+00; NT HIT: AL163300.2, EVALUE 0.00e+00
ggcagcagctgggctggcaggaggaggcagaggcaccacaggaggggacgggcacgcagcaggtggacttgcacacagggtggcagaggagggacacggaggaggagggtctgcagcaggaggcggtgcagcaagccggctggcagctagactgctggcagcatgatgtggaagccccagagcagacgggcacacagcaggcgtgctggcagggggaggaggtgcagcaagctggctggcagctagactgctggcagcatgaagaggaatcctcagagcaggtgggcacacagcacacaggcacgcagcagacgggcacgcagcaggcctgctggcagggggaggaggtgcagcaagttggctggcagctagactgctggcagcacgagggcgtgcaggagctggtgcagcctgattggcaggggctgggctcacagaccgcctggcagcaggggctggacacacagctcacacagctagactgctggcagcacgaagaggaaatcccagagcagacaggcttgcagcagacgggcacacagcaggcctgctggcagggggaggaggtgcagcaagctgactggcagctagactgctggcagcatgaagaatccccacagcagacggacacacagcacacaggcttgcagcagacagtcttgcagcagacgggcacgcagcaggcctgctggcagggggaggaggcacagcaagccagctggcagctagactgctggcagcacgagggcgtgcaggagctggtgcagcctgattggcaggggctgggctcacaggtcactgggcagcaggggctggacacacggctcactggggtgcagaccaggctcaggcagggggccggggcgcagcaggggggctcacagcagctctctgggcagtcgtccacctgccaggagtcggagcaagagtcacaggaaccaggaaggcagacgcggctgccgtagctcaggtcgctggagcagacggacatggtggacgcgg

SEQ ID NO: 20499 - DNA, 1082 bp, Homo sapiens
  MAP TO Z97986.3; EXPRESSED IN HELA, SIGNAL = 2.1; EXPRESSED IN ADULT LIVER, SIGNAL = 1.5; EXPRESSED IN HEART, SIGNAL = 1.8; EXPRESSED IN BRAIN, SIGNAL = 2.2; EXPRESSED IN LUNG, SIGNAL = 1.6; EXPRESSED IN BONE MARROW, SIGNAL = 1.8; SWISSPROT HIT: P20631, EVALUE 1.00e-05; EST_HUMAN HIT: BE784253.1, EVALUE 0.00e+00
atgtcgcgggaggcgggctcatgccgcgtgggcacaggggcgagggcgcggtctcggaagcccaagaagccacactacatcccgcggccctggggcaaaccctacaactacaaatgcttccagtgccccttcacctgcctggagaagtcacacctctacaaccacatgaagtacagcctctgcaaggactccctgtccctgctgctagactccccagactgggcgtgccgccgtggctccaccacgcctaggccccacgcacccaccccagaccgccctggggagtccgaccccggcaggcaaccccagggagcacggcccacaggtgctgcccccgcgcctgacctcgtggtcgccgacatccactccctgcactgtggcggaggccccaagtccagggccaaggggtccccagggccaccaccccctgtggctagggccacccggaagggtcccggccccagtgggctcctgcctgagtcgtggaagccggggatgggaggggacccaaggggcgtgggtgcgggggacatggcctcagcaggccctgagggcagcgtcccctgctatcccccgcctgccccaggggagttccctgaggcccacagcctccacctgtctctgctgggcgtcaactacccgctcagccccggcctcttctcctacttggggccctcactggccgctgcagcccatgtgcccttcctggcctcggccagccccctgctgcccccggccacggccttcccagccgtgcagccccctcagcgccccaccccggccccccgcctgtactacccgctgcttctggagcacactctggggctgccagcaggcaaagctgcccttgccaaggcccctgtctcccccaggagcccctctgggactccggctcctggcctgctgaaggtgccagttccagggctggggccctggccccgagtcacccccagggacccagggcaggagggggagctggagcgggcagcccagagtgaccccaggaggaggctgtccctgggaagcaggctggagcttccgaaggcatcccccagcctgacaaggttctgttcccggagcag

SEQ ID NO: 20500 - DNA, 544 bp, Homo sapiens
  MAP TO AL138499.1; EXPRESSED IN HELA, SIGNAL = 1.9; EXPRESSED IN ADULT LIVER, SIGNAL = 1.5; EXPRESSED IN BONE MARROW, SIGNAL = 1.1; EXPRESSED IN HEART, SIGNAL =   2; EXPRESSED IN FETAL LIVER, SIGNAL = 1.4; SWISSPROT HIT: Q91062, EVALUE 3.70e+00; NT HIT: gi15300836, EVALUE 2.00e-90; EST_HUMAN HIT: BG290549.1, EVALUE 4.00e-89
gatcacattgacaaaagtaccatggagttttatgagtcagcatattttattgttcttattccttcaatagttattacagtaattttcctcttcttctggcttttcatgaaagaaacattatatgatgaagttcttgcaaaacagaaaagagaacaaaagcttattcctaccaaaacagataaaaagaaagcagaaaagaaaaagaataaaaagaaagaaatccagaatggaaacctccatgaatccgactctgagagtgtacctcgagactttaaattatcagatgctttggcagtagaagatgatcaagttgcacctgttccattgaatgtcgttgaaacttcaagtagtgttagggaaagaaaaaagaaggaaaagaaacaaaagcctgtgcttgaagagcaggtcatcaaagaaagtgacgcatcaaagattcctggcaaaaaagtagaacctgtcccagttactaaacagcccacccctccctctgaagcagctgcctcgaagaagaaaccagggcagaagaagtctaaaaatggaagcg

SEQ ID NO: 20501 - DNA, 598 bp, Homo sapiens
  MAP TO AC008770.3; EXPRESSED IN BRAIN, SIGNAL = 2.2; EXPRESSED IN ADULT LIVER, SIGNAL = 2.1; EXPRESSED IN BONE MARROW, SIGNAL = 2.7; EXPRESSED IN LUNG, SIGNAL = 2.1; EXPRESSED IN FETAL LIVER, SIGNAL = 2.8; EXPRESSED IN HEART, SIGNAL = 2.2; EXPRESSED IN HELA, SIGNAL = 3.5; NT HIT: gi14760109, EVALUE 0.00e+00; EST_HUMAN HIT: BE746922.1, EVALUE 0.00e+00; SWISSPROT HIT: P52737, EVALUE 3.00e-71
agaatgcactctggagaaagaccttatgaatgtaagacatgtgggaaaggcttttattctgccaagtcatttcaaagacatgaaaaaactcacagtggagagaaaccgtataaatgcaagcaatgtggtaaagccttcactcgttccggttcctttcgatatcatgaaaggactcacactggagagaaaccctatgagtgtaagcaatgtgggaaagccttcagatctgccccaaatcttcaattgcatggtaggactcacactggagagaaaccgtatcaatgtaaggaatgtgggaaagctttcagatctgcctcacaacttcgaatccatcgtaggattcacactggagagaaaccctatgaatgtaagaaatgtgggaaagccttcagatatgtccagaactttcgatttcatgaaaggacacaaacacataagaatgcactctggagaaagaccttataaatataagatatatgggaaacacttttattctgccaagttatttcaaacacatgaaaaaattcacactggagagaaaccctataaatgcaagcaatgtggtaaagccttaattgttccagttcctttcgatatc

SEQ ID NO: 20502 - DNA, 962 bp, Homo sapiens
  MAP TO AL359218.1; EXPRESSED IN ADULT LIVER, SIGNAL = 1.9; EXPRESSED IN PLACENTA, SIGNAL = 2.1; EXPRESSED IN HELA, SIGNAL = 4.4; EXPRESSED IN BRAIN, SIGNAL = 2.1; EXPRESSED IN HEART, SIGNAL = 2.3; EXPRESSED IN LUNG, SIGNAL = 2.1; EXPRESSED IN BONE MARROW, SIGNAL = 2.3; EXPRESSED IN FETAL LIVER, SIGNAL = 2.1; NT HIT: gi10048447, EVALUE 2.00e-05; EST_HUMAN HIT: AV752962.1, EVALUE 1.40e+00; SWISSPROT HIT: O95013, EVALUE 2.00e-82
attacaaacaaagtctgaaacctgaggcaatggacccacagaactattccttggtgtcagaatttgtgttgcatggactctgcacttcacgacatcttcaaaattttttctttatatttttctttggggtctatgtggccattatgctgggtaaccttctcattttggtcactgtaatttctgatccctgcctgcactcctcccctatgtacttcctgctggggaacctagctttcctggacatgtggctggcctcatttgccactcccaagatgatcagggatttccttagtgatcaaaaactcatctcctttggaggatgtatggctcaaatcttcttcttgcactttactggtggggctgagatggtgctcctggtttccatggcctatgacagatatgtggccatatgcaaacccttgcattacatgactttgatgagttggcagacttgcatcaggctggtgctggcttcatgggtcgttggatttgtgcactccatcagtcaagtggctttcactgtaaatttgccttactgtggccccaatgaggtagacagcttcttctgtgacctccctctggtgatcaaacttgcctgcatggacacctatgtcttgggtataattatgatctcagacagtgggttgctttccttgagctgttttctgctcctcctgatctcctacaccgtgatcctcctcgctatcagacagcgtgctgccggtagcacatccaaagcactctccacttgctctgcacatatcatggtagtgacgctgttctttggcccttgcatttttgtttatgtgcggcctttcagtaggttctctgtggacaagctgctgtctgtgttttataccatttttactccactcctgaaccccattatctacacattgagaaatgaggagatgaaagcagctatgaagaaactgcaaaaccgacgggtgacttttcaatga

SEQ ID NO: 20503 - DNA, 1619 bp, Homo sapiens
  MAP TO Z82187.1; EXPRESSED IN ADULT LIVER, SIGNAL = 1.2; EXPRESSED IN BRAIN, SIGNAL = 1.2; EXPRESSED IN HELA, SIGNAL = 1.7; EXPRESSED IN LUNG, SIGNAL = 1.3; EXPRESSED IN HEART, SIGNAL = 1.6; EXPRESSED IN BONE MARROW, SIGNAL = 1.5; EXPRESSED IN FETAL LIVER, SIGNAL = 1.4; NT HIT: gi14776068, EVALUE 6.20e+00; SWISSPROT HIT: Q01955, EVALUE 2.20e-02
atgagaaaaaaaagtcccacatgcccacgcgcagaccagaatccttttcgatagaggtctgtgtagtgctgtgccccttcccgggaccagaatccttttcgatagaggtccgcgcagtgctgtgccccttcccgggaccagaatccttttcgatagaggtccgcgcagtgctgtgccccttcccgggaccagaatccttttccatagaggtccgcgcagtgccgtgccccttcccgggaccagaatccttttttgatagaggtccgcgcagtgccgtgccccttcccgggaccagaatccttttccatagaggtccgcgcagtgccgtgccccttcccgggaccagaatccttttttgatagaggtccgcgcagtgccgtgccccttcccgggaccagaatccttttccatagaggtccgcgcagtgccgtgccccttcccgggaccagaatccttttccatagaggtccgcgcagtgccgtgccccttcccgggaccagaatccttttttgatagaggtccgcgcagtgccgtgccccttcccgggaccagaatccttttccatagaggtccgcgcagtgctgtgccccttcccggggccagaatccttttccatagaggtccgcgcagtgctgtgccccttcccgggaccagaatccttttttgatagaggtccgcgcagtgccgtgccccttcccgggaccagaatccttttccatagaggtccgcgcagtgctgtgccccttcccggggccagaatccttttccatagaggtccgcgcagtgctgtgccccttcccgggaccagaatccttttttgatagaggtccgcgcagtgccgtgccccttcccgggaccagaatccttttccatagaggtccgcgcagtgctgtgccccttcccggggccagaatccttttccataaaagtccgcgcagtgctgtgccccttcccgggaccagaatccttttttgatagaggtccgcgcagtgctgtgccccttcccgggaccagaatccttttccatagaggtccgcgcagtgctgtgccccttcccgggaccagaatccttttccatagaggtccgcgcagtgccgtgccccttcctgggaccagaatccttttccatagaggtccgcgcagtgctgtgccccttcccgggaccagaatccttttttgatagaggtccgcgcagtgccgtgccccttcccgggaccagaatccttttccatagaggtccgcgcagtgctgtgccccttcccggggccagaatccttttccatagaggtccgcgcagtgctgtgccccttcccgggaccagaatccttttttgatagaggtccgcgcagtgctgtgccccttcccgggaccagaatccttttccatagaggtccgtgcagtgctgtgccccttcccgggaccagaatccttttttgatagaggtccgcgcagtgccgtgccccttcccgggaccagaatccttttccatagaggtccgcgcagtgctgtgccccttcccggggccagaatccttttccatagaggtccgcgcagtgctgtgccccttcccgggaccagaatccttttccatagaggtccgcgcagtgccgtgccccttc

SEQ ID NO: 20504 - DNA, 528 bp, Homo sapiens
  MAP TO AL355073.2; EXPRESSED IN ADULT LIVER, SIGNAL = 1.5; EXPRESSED IN BRAIN, SIGNAL = 1.8; EXPRESSED IN BONE MARROW, SIGNAL = 2.2; EXPRESSED IN LUNG, SIGNAL = 1.7; EXPRESSED IN PLACENTA, SIGNAL = 1.8; EXPRESSED IN HELA, SIGNAL = 2.8; SWISSPROT HIT: P15505, EVALUE 4.30e-01; EST_HUMAN HIT: AW271838.1, EVALUE 1.00e-114; NT HIT: gi16190301, EVALUE 0.00e+00
tcaaacttgttgtaggtggaaagtgagaccaacgtcctgcaggacggctccctcattgacctgtgtggggccactctcctctggagaacagcagatgggctttttcatactccaactcagaagcacatagaagccctccggcaggagattaacgccgcccggcctcagtgtcctgtggggctcaacaccctggccttccccagcatcaacaggaaagaggtggtggaggagaagcagccctgggcatatctcagttgtggccacgtgcacgggtaccacaactggggccatcggagtgacacggaggccaacgagagggagtgtcccatgtgcaggactgtgggcccctatgtgcctctctggcttggctgtgaggcaggattttatgtagacgcaggaccgccaactcatgctttcactccctgtggacacgtgtgctcggagaagtctgcaaaatactggtctcagatcccgttgcctcatggaactcatgcatttcacgctgcttgccctttctgtgctacacag

SEQ ID NO: 20505 - DNA, 561 bp, Homo sapiens
  MAP TO AL022068.2; EXPRESSED IN ADULT LIVER, SIGNAL = 6.5; EXPRESSED IN BRAIN, SIGNAL =   1; EXPRESSED IN HELA, SIGNAL = 6.3; EXPRESSED IN LUNG, SIGNAL = 7.6; EXPRESSED IN HEART, SIGNAL = 1.4; EXPRESSED IN BONE MARROW, SIGNAL = 1.4; NT HIT: gi4557887, EVALUE 0.00e+00; SWISSPROT HIT: P05783, EVALUE 1.00e-68; EST_HUMAN HIT: BE732681.1, EVALUE 0.00e+00
ggatgtccgtgtcccactccaccagcctccgggacggcataagttccgggggcctggcgcggggatggccaggggtctgggaggaatgggaggcatccagaacaagaaggaaaccacgcaaagcctgaatgacagcctggcggtcagagtaaggagtctggagactgagaaccggaagctcgaaagcaaaatccgggagcacttggagaagaagggaccccaggtcagagactggagccattacttcaagaccatcgaggacctgagggctcagatcttcgcaaatactgtggacaatgtccgcatctttctgcagatcgacaatgcccgtcttgctgctgatgactttagagtcaagtatgagacagagctggccatgcgccagtctgtggagagcgacatctatgggctccacaaggtcattgatgacaccaatgtcatcaatggctgcagctggagacagagatcgaagctctcaaggaggagctgttcttcatgaagaagaaccacggagaggaagtaaaatgcctacaagcccagattgccagctctgggttgacc

SEQ ID NO: 20506 - DNA, 1335 bp, Homo sapiens
  MAP TO AC008403.3; EXPRESSED IN ADULT LIVER, SIGNAL = 3.4; EXPRESSED IN PLACENTA, SIGNAL = 3.1; EXPRESSED IN HELA, SIGNAL = 3.1; EXPRESSED IN BONE MARROW, SIGNAL = 3.1; EXPRESSED IN LUNG, SIGNAL = 2.8; NT HIT: gi13650682, EVALUE 0.00e+00; SWISSPROT HIT: Q03391, EVALUE 1.00e-61; EST_HUMAN HIT: BI912691.1, EVALUE 1.20e-01
tcatacctcggactcgaggctagagaagtgcgccgagcccctgcgggtgcccaggtccccgccccggtgtctccggtgggaagctgtgggcagcggcggcccccagtgcgcggcgtgcggacacctgcgagcgtggcgggagggcccggtaagcctgcgcgcaggggcggcgcgagggcacgagctgaggtcctcgagcgagcgcgaggtgggcgcgggcggcgggaggtcccagcccccagcggcgcgccggtgcctgtggtggtggggcgcggcggcggcgggcgtgcggtgcgaggcccgcgggcggtgcgggtgcgaccgcgggcacccgcagcgggcccggcgtcggggcaggggcccggcggcccagggtggaggcggtggcgcccaccagccgccgtccaggccatcgtgcgagcagctgagatggcgcggcggcggcagcagctccaggctggcgcagtgccgacagtgccaggcggccggaccgctgcgcgggggcaggtagtcccagctcccggcgcgccagcccccgagcttgtcgaccgaccagtagcggccgggcggcggcccgaggcgctcggcatacgggtaagggaagtcggcgaaccaccagggctccaggccgcccagcgacgcgccgcccaggctctccgagtcctccgagtccgacggcgacggctcgagatcgaggtaagggcacgggggcggcgcggcgcggcacgggggcggagcggccggggctcctccgcctgcgccccccgtgccccccgcgccgcccgcgcctggccccagcaggggttggctctcggggtccgagcgcggccaccgcgcgggcgccggcgggctctcgtcctcgaaggccaagcggcagagtggcggcccgacggcggtggccgcggcggcggggggcgcgggcggcgacgggaagccggggaaggcgccggcggggggctcggctggctccttgtcgcgtacgatggcgaaataggagggcggcggcttctgcgggggctgagcggccggcggggacagcgggcgcccggctgcgccccgcggtgccgcgcgcgcttcgcccaggccgaggcctaggccctgcggctcgatggggccgtagtagcggtggaagccgtcggccaggcccgcgccccccggcggccccgcgcccttggtccggcgccagcggtccactgaggcgcgctcgcggggcacgaaaggtgcgggcccgggagccggccgcggcgcggggtacgcggggctgggcaggggctgtggcggcggcgggggcttggcgggcggtggggcggcctcagcgctgcagcagctgtacat

SEQ ID NO: 20507 - DNA, 935 bp, Homo sapiens
  MAP TO Z81365.1; EXPRESSED IN BRAIN, SIGNAL = 1.8; EXPRESSED IN HEART, SIGNAL =   2; EXPRESSED IN LUNG, SIGNAL = 1.8; EXPRESSED IN BONE MARROW, SIGNAL = 2.4; EXPRESSED IN ADULT LIVER, SIGNAL = 1.7; EXPRESSED IN PLACENTA, SIGNAL = 2.1; EXPRESSED IN HELA, SIGNAL = 2.2; EST_HUMAN HIT: BF677616.1, EVALUE 3.40e-01; NT HIT: gi14763916, EVALUE 0.00e+00; SWISSPROT HIT: Q09738, EVALUE 4.00e-06
tggttttcacatatttctttcgttttggattttcgggcactgtttgaaagtcaacttttgagagaggtgtgcctgggctgctggcaggtttacctccagctttgtggaactgacaaagtgaggtatcttccagatacgtcattaagtgagctaacggttctttttcaatgaatgctcgatctcctgagtatacagattctagctcatttggtttagaattttttccaaggtacttttgctgctgtcttctgcttgcccctttaaagactgtctggccttttttttgttcagactccttatctgatccaatgtgtggagccaggatatctttggattcctttgttgcaggccatgatacactgatgtttccagaagtcatctttcgaataacttttaataattggaaatctgtaatttctccatcctcactcaagggaagaggtggtctggtgccttcattgcaatgagaagacacctttaaatatttggaaatgatgacttcctggtcattcttctttaatgcacaaaactcattcaagctatagcgtttgaggtgaacaataaggattctaggtagcctactgaatgagtgcactccaacggaagtcttgtgctcacattttgcacatttatactcaagctcttctgctccaaaaaaaagatcaaaagtagactgaatagatgaaggatgtgcttttattctttggggaaggttgatggagaggtaattattcagttctgtcttgagaataacctgaccacaagctttacaagcaatggagtgcaacaactctaactcaaaattagtaatgacagggcaagaaaacccactggtgtcaggatcatcagcaaaaacctgtttaggaaaattatcttccccaaattcacttttaggcttccaaattgtgttgagtttttccatgttatctttcagt

SEQ ID NO: 20508 - DNA, 675 bp, Homo sapiens
  MAP TO AC008688.4; EXPRESSED IN ADULT LIVER, SIGNAL = 1.4; EXPRESSED IN HELA, SIGNAL = 0.59; EXPRESSED IN LUNG, SIGNAL = 1.2; EXPRESSED IN HEART, SIGNAL = 1.7; EXPRESSED IN BONE MARROW, SIGNAL = 1.3; EXPRESSED IN FETAL LIVER, SIGNAL = 1.1; SWISSPROT HIT: Q9Y5E5, EVALUE 1.00e-111; EST_HUMAN HIT: AU127985.1, EVALUE 4.00e-06; NT HIT: gi15295801, EVALUE 0.00e+00
ctgcaccccatatggagtgtgcacaaactcaggagcattgtcattgatgtccatgatcaggattcgaaccatgaccgtgccagacctaggtggtgacccaccatccagcgccacgagggttaagctgaactcaggctgctcctctcgatccagtggtttgtcctgcaccaaatctgggtatttcttgccctcactatgatttcgagtgagaatgtgaaaatgagaattggggctgattgtgtatttttgaagaccattgctgcccacatccaaatcctcagctattagcaacggaaatagagtacccggctggctattttctagtattttcaagagcacttccctttcagggaatattggagagtgatcatttatgtcctggatcaataattctccttgaaaaaattgcaccggcatttccaggaacacttggaaatgcagtacacacggttcaataggaccacagagctcttcccggtctagtttctccctcagaagcaaatctccagtctgacgatccagctgcaaacgctgcttgtcatcgtcagacagcacccgggctgaccgggaggccagttccccaattcccaggcccagatccttggccagatgggctacaaaggagccgctctctgtttcctccaacacagaataacgaataggctcgaggcgaac

SEQ ID NO: 20509 - DNA, 1041 bp, Homo sapiens
  MAP TO AC016326.4; EXPRESSED IN ADULT LIVER, SIGNAL =   2; EXPRESSED IN HELA, SIGNAL = 1.9; EXPRESSED IN LUNG, SIGNAL =   2; EXPRESSED IN FETAL LIVER, SIGNAL = 1.7; EXPRESSED IN BRAIN, SIGNAL = 2.5; SWISSPROT HIT: P38889, EVALUE 1.00e-03; EST_HUMAN HIT: BI033118.1, EVALUE 0.00e+00; NT HIT: Y18276.1, EVALUE 0.00e+00
atgttttctttacttattcctaaggtcacttatgaagctcataaggaatacctagccaaaatgtatgaggaatatcaaagacaagaggaggaaaacattaaaaagggaaagaaagggaatgtgagcaccatctctggtctttcatcacagacaacaggagcaaaaggtggaatggaaattcgagagatagaagatctttcacaaagccagagcccagaaagtgagaccgattaccctgtcagcacagatactcgagacttactcatgtcaacaaaagtgtcagatgatattcttggaaattcagatagaccaggaagtggtgtacatgtggaagtacatgatcttttagtagatataaaagcagagaaagtggaagcaacagaagtaaagctcgatgatatggatttatcaccggagactttagtaggtggagagaatggtgcccttgtggaggttgaatctctgttggataatgtatatagtgctgctgttgagaaactccagaacaatgtacatggaagtgttggtatcattaaaaaaaatgaagaaaaggataatggtccattgataacattagcagatgagaaagaagaccttcccaatagtagtacatcatttctctttgataaaatacccaaacaggaggaaaaactacttcctgaactttctagcaatcacattattccaaatattcaggacacacaagtacatcttggtgttagtgatgatcttggattgcttgctcacatgaccggtagcgtagacttaacttgtacatccagtataatagaagaaaaagaattcaaaatccatacaacttcagatggaatgagcagtatttctgaaagagacttagcgtcatcaactaaggggctggagtatgctgaaatgactgctacaactctggaaactgagtcttctagtagcaaaattgtaccaaatattgatgcaggaagtataatttcagatactgaaaggtctgacgatggcaaagaatcaggaaaagaaatccgaaaaatccaaacaactactacgacacaa

SEQ ID NO: 20510 - DNA, 705 bp, Homo sapiens
  MAP TO AC006487.7; EXPRESSED IN LUNG, SIGNAL = 1.5; EXPRESSED IN ADULT LIVER, SIGNAL = 1.2; EXPRESSED IN HELA, SIGNAL = 0.5; EXPRESSED IN HEART, SIGNAL = 1.9; EXPRESSED IN FETAL LIVER, SIGNAL = 1.2; SWISSPROT HIT: Q9Z2N5, EVALUE 1.00e-130; EST_HUMAN HIT: BI916355.1, EVALUE 0.00e+00; NT HIT: gi14773181, EVALUE 0.00e+00
gtcatctgtggccaggatgatggtcctcccggctcagaggaccctgagcgtgatgaccacgagggccagccccggccccgggtgcctcggaagcggggccacatctcacctaagtcccgccccatggccaattccactctcctagggctgctggccccgcctggggaggcttggggcattcttgggcagccccccaaccgcccgaaccacagccccccaccctcagccaaggtgaagaaaatctttggctggggcgacttctactccaacatcaagacggtggccctgaacctgctcgtcacagggaagattgtggaccatggcaatgggaccttcagcgtccacttccaacacaatgccacaggccagggaaacatctccatcagcctcgtgccccccagtaaagctgtagagttccaccaggaacagcagatcttcatcgaagccaaggcctccaaaatcttcaactgccggatggagtgggagaaggtagaacggggccgccggacctcgctttgcacccacgacccagccaagatctgctcccgagaccacgctcagagctcagccacctggagctgctcccagcccttcaaagtcgtctgtgtctacatcgccttctacagcacggactatcggctggtccagaaggtgtgcccagattacaactaccatagtgataccccctactacccatctgggtga

SEQ ID NO: 20511 - DNA, 978 bp, Homo sapiens
  MAP TO AC004775.1; EXPRESSED IN HELA, SIGNAL = 0.94; EXPRESSED IN ADULT LIVER, SIGNAL = 3.2; EXPRESSED IN BONE MARROW, SIGNAL = 0.92; EXPRESSED IN LUNG, SIGNAL = 1.2; NT HIT: gi16124256, EVALUE 6.10e-02; EST_HUMAN HIT: BE900598.1, EVALUE 0.00e+00; SWISSPROT HIT: Q01613, EVALUE 5.00e-12
atggaggccctgggacctgggggcgaccgcgcctccccggcctcgtccactagcagcctggacctgtggcatctgtccatgcgcgcggactcggcctacagctctttctccgcagcctccggcggccccgagccgcgcacgcagtcgccggggacagacctccttccttacctagactgggactacgtgcgtgtggtttggggcggcccgggccccgccccgcccgacgctgccctttgcacatccccgcggccccggcccgcggttgcagcccgcagtgggccgcagccaacagaggtcccggggaccccgggaccactgaacaggcaggccaccccgctgctgtacgcgctggcggccgaggcggaggccgcggcgcaggctgccgagccgcccagcccgccggcctcgagggccgcctaccgccagcggcttcagggcgcgcagcggcgagtgctccgggagacgtcgttccagcgcaaggagctccgcatgagcctgcccgcccgtctgcggcccactgtcccagcgcggcccccggcgactcacccgcgctccgcctcgctcagccacccgggcggggagggggagccggcgcgctcccgggctcccgcgccaggaactgccggccggggtcccctcgccaaccagcagcggaagtggtgcttctcagagccaggaaagctggatcgtgtgggtcggggcggtgggccggcgcgggaatgcctgggtgaggcctgctccagctctggcctccctgggcccgagcccttggagttccagcatccggcgctggctaagtttgaagatcacgaggtcggatggctgcccgagacgcaaccccaaggctccatgaacctggactccgggtccttgaagctcggtgatgccttcaggcccgccagtcggagtcggagcgcttcaggcgaagtcttgggttcctggggaggatcaggagggaccatacccattgtccag

SEQ ID NO: 20512 - DNA, 1176 bp, Homo sapiens
  MAP TO AL022718.1; EXPRESSED IN LUNG, SIGNAL = 1.4; EXPRESSED IN BONE MARROW, SIGNAL = 1.5; EXPRESSED IN FETAL LIVER, SIGNAL = 1.3; EXPRESSED IN HELA, SIGNAL = 1.5; EXPRESSED IN ADULT LIVER, SIGNAL = 1.4; EXPRESSED IN PLACENTA, SIGNAL = 1.6; EXPRESSED IN BRAIN, SIGNAL = 1.5; NT HIT: AF199504.1, EVALUE 4.50e+00; EST_HUMAN HIT: BE314047.1, EVALUE 2.70e-02; SWISSPROT HIT: P10388, EVALUE 2.00e-17
cttgcccgtggcctgcagtgggcttccaggaggagatggcccctctgtggtaccagagaagctacatccaggaggaagattccaaaatccttcaggggtcattccccttaggagacagcagaagccacagccagggagaaggttcagagaggtcccaaagaatgcccctccccggggacagtgggtgccacaacccgctgtcagagagtccccaggggacagccccactggggagcagcggatgccactcccaggaagaaggtacagaaggaccccaggggatggatcccctggggaacagagagagacaaaatcagaaagaaggtccaaagagggcccggaggatgcacaccctggtgtttcgcaggagccacaaatcagaaggtccagaggggccccaggggacggtcccccagggagacagcagaagctacagccaggaaggatgttcagatagggcccaggagatggccaccctggtgtttatcaggaggtgcaaaccagaaggtccaaagaggccccagtggactgtccccctgggggacagcagaagtcatatcaaggaagaaggcccagaggggccccagaggattgtcctccagggagacaacaggagctatagccaggaaggaagcccagagagggcccaggggatggccaccctggtgtttagcaggagctgcaaaccagaagaaggtccagagaggccccaggacactcccctgggggacagcagaagtcatatcaaggaagaaggcccagaggggccccagaggattgtcctccagggagacaacaggagctatagccaggaaggaagcccagagagggcccaggggatggccaccctggtgtttagcaggagctgcaaaccagaagaaggtccagagaggccccaggacactcccctgggggacagcagaagtcatatcaaggaagaaggcccagaggggccccagaggattgtcctccagggagacaacagaagctatagccaggaaggaagccgagagagggcccaggggatggccaccctggtgtttagcaggagctgcaaaccagaagaaggtccagagaggccccagggcactcccctgggggacagcaggagccatggtgtcagagaaagcccaaagaaatggcaacctcagaggcagaaggccaagaaaccaaaag

SEQ ID NO: 20513 - DNA, 2412 bp, Homo sapiens
  MAP TO Z99130.1; EXPRESSED IN ADULT LIVER, SIGNAL = 3.4; EXPRESSED IN LUNG, SIGNAL =   2; EXPRESSED IN BONE MARROW, SIGNAL = 2.7; EXPRESSED IN FETAL LIVER, SIGNAL = 3.2; EXPRESSED IN HEART, SIGNAL = 4.1; EXPRESSED IN PLACENTA, SIGNAL = 3.9; EXPRESSED IN HELA, SIGNAL = 1.7; SWISSPROT HIT: P98169, EVALUE 0.00e+00; NT HIT: gi14765404, EVALUE 0.00e+00; EST_HUMAN HIT: BG120060.1, EVALUE 0.00e+00
atggaaatcccgaagctgctcccggctcgcgggacactacagggcggcggcggcggcggtatccccgcgggtggcggccgagtccaccgaggccctgactcgccggctggccaggtccccacgcgccgcctcctgctgctccggggcccccaagatggcgggcccgggcggcggcgcgaggaggccagcacggcatcacggggccctggcccaagcctgttggcgccgaggaccgatcaacctagcggcggcggcggcggcggcggcgacgacttcttcctggtgctgcttgacccggtgggtggcgacgtggagaccgcgggctccggtcaggccgcagggcctgtgttgagggaggaggccgaggagggcccggggctccaggggggcgagagcggcgcgaatcccgcggggcccactgcgctaggcccccgctgcctgtccgcggttcccactccggccccgatctccgcccccggccccgccgcggccttcgcgggcacagtcactatccacaaccaggacctgctgttgcgctttgagaacggcgtcctcaccctggccacgcccccaccacacgcctgggagccaggggccgctcctgcccagcagcccgggtgtctgatcgccccgcaagctgggttcccgcatgccgcgcacccgggtgactgcccagagctgccgccagacctcctgctagctgagccggccgaacccgcgccagctccggcgcctgaggaggaggcggagggcccggccgccgccctgggcccccgcggaccgctgggctccggcccaggcgtggtgctgtacttgtgccccgaggcgcagtgcgggcaaaccttcgccaagaagcaccagctgaaggtgcacctgctgacgcacagcagcagccagggccagaggcccttcaaatgccccctgggtggctgcggctggaccttcaccacctcttacaagctcaagaggcacctgcagtcgcacgacaaactgcggccctttggctgcccggcagagggctgtggcaagagcttcaccacagtgtacaacctcaaggcgcacatgaagggccatgagcaggagaactcattcaaatgcgaggtgtgcgaggagagcttccccacgcaggccaaactcagcgcccaccagcgcagccacttcgaaccggagaggccttaccagtgcgcgttttctggctgcaagaagacatttatcacagtgagtgctctgttttcccataaccgcgcccatttcagggaacaggaactgttttcctgctcttttcctggctgcagcaaacaatatgacaaggcttgtaggctgaaaattcacctgcggagtcacaccggcgagagacctttcctttgtgactttgatggctgtggctggaacttcactagcatgtccaaactcttaaggcacaaaagaaagcacgacgatgaccggaggttcatgtgccctgtggaaggctgtgggaaatctttcacgagggcggaacatctgaaaggccacagcataacccacctgggcacaaagcctttcgtgtgtcctgtggcaggctgctgtgccaggttctctgctcgcagtagcctctacattcactccaagaaacacctgcaggatgtggacacttggaaaagccgttgcccgatctcctcttgtaataaactcttcacatccaagcacagcatgaagacgcacatggttaaaaggcataaggtgggccaggatctcttagctcagctagaagcagcaaattctctcacacccagcagtgaacttaccagccagagacagaatgatctcagtgatgcagagatagtgtctctcttctctgatgtacctgacagtacttctgctgcattgctggacacagcattggtgaactctggaatcttgactattgatgtggcttctgtgagctcgactctggcagggcacctccctgctaataataataattccgtagggcaggctgtggaccctccgtccttgatggccaccagcgaccctcctcaaagtctggatacctctctcttttttggaacggcggccactggttttcagcagagctccttaaatatggatgaggtctcaagtgtaagtgtggggccattgggatctctggactctttggccatgaaaaactccagtccagagcctcaggctttgacacccagcagtaagctaacagtggacacagatgctctgactccttcgagcaccctttgtgaaaacagtgtctcagaactactgacaccaaccaaagcggagtggaacgtacatcctgactctgacttctttggacaggagggagaaacccagtttggattccccaatgcagcaggaaaccatggttctcagaaagaaacagatcttatcactgtgactggcagctcatttttggtatga

SEQ ID NO: 20514 - DNA, 600 bp, Homo sapiens
  MAP TO AL096710.8; EXPRESSED IN ADULT LIVER, SIGNAL = 1.8; EXPRESSED IN PLACENTA, SIGNAL = 2.6; EXPRESSED IN BONE MARROW, SIGNAL = 1.9; EXPRESSED IN LUNG, SIGNAL = 1.9; EXPRESSED IN HELA, SIGNAL = 1.2; SWISSPROT HIT: P48552, EVALUE 5.90e-02; EST_HUMAN HIT: BG469472.1, EVALUE 5.40e-02
taaaatattcatctttacctttcacagaatcagtcaattctggcaattctgacccttgaatcaacttaacctttgtgtttgctagatcagtacctaattcagaagttgaactgatattattattatcatgtgaaatacttgcagggccaaaagttttttcagattcagtgtctttaatgataggcggcaatacatccttaagtaccatctcatggttcaacagattttctttgctttttccagcaatctcagttgtatattctggaaggttgcttttttcagtaactaagttattttcactaggtgatgctagctgtacaacatttaccctttgctgtttttctaaagagctacaactgtgcattttatccagaagaatcattgtattaatattttcattttcatcactgttttcatttaaaatagaggcacacaactggatatccatatcttcagccacattttggcacctgggctttccattctcatctcttatacctcctccttcttcatcaatgccatcatcatcatcgtcatcctgatcattactgtcatatatataatccccataactttcttcactttgcatagaatctaaat

SEQ ID NO: 20515 - DNA, 681 bp, Homo sapiens
  MAP TO AF235096.1; EXPRESSED IN BRAIN, SIGNAL =   2; EXPRESSED IN ADULT LIVER, SIGNAL = 1.8; EXPRESSED IN BONE MARROW, SIGNAL =   2; EXPRESSED IN LUNG, SIGNAL = 1.9; SWISSPROT HIT: Q9UH77, EVALUE 4.00e-22; NT HIT: AB037749.1, EVALUE 6.50e-01; EST_HUMAN HIT: BG033609.1, EVALUE 6.20e-02
gacgctgcggtgcaaggtgatggcagaggccttgtacagccgtgtcgggagtttggcaaggctctgccattggccggtctgtttgctgtacagtaggacgtccctggtggtctgctggctgtccttccttccgcccaagaggatgaggaaatcttggtaagagtttcttggagggacatgcaacaggagtttgcagtctgggacggtggtgccacacaaagagaacatctgtctcttggcggtctccaagatgatctggcatgcaggcgaggactgcaggagggcatcgttggcgatgaagtggtgaaagaaggctgggtggatgtactgcagcctgacctgcttgaacagttcctgcatgtatcgcttccgggcctggaggtcatgcttgatccaaaccatgagggcctcaaacaccttttcctcctccccacagagcccatcatctccgagatagtccctcaactccaaggcacagagctccttcaggtcggccgatgcggccacctctgggaaggacgtcagtgccacctccctggctttcttcttgagggtctcgcagcttaagatttctgagagtctgatcatacccaggcagttgctgggggccaactggctctgcaagtatgaggagcaggcctcaaacagcttggggaactgtagcatggaggcggcctccat

SEQ ID NO: 20516 - DNA, 901 bp, Homo sapiens
  MAP TO AC006057.5; EXPRESSED IN LUNG, SIGNAL = 1.2; EXPRESSED IN ADULT LIVER, SIGNAL = 1.5; EXPRESSED IN HELA, SIGNAL = 0.74; EXPRESSED IN BONE MARROW, SIGNAL = 1.2; SWISSPROT HIT: Q49537, EVALUE 7.00e-09
ctagtccacacgccaacgggaatagaatcccgtccacacaccgacggaacagaatccagtccatgcaccgacggaacaggatccagtccacgcaccgacgggaatagaatccagtccacacaccgacagaacagaatccagtccacacacggacgggaatagaatccagtccacacaccgacggaacaggatccagtccacacaccgacggaacaggatccagtccacacgccgacggaagaggatccagtccacacaccgacggaacaggatccagtccacgcgccgacggaagaggatccagtccacacgccgacagaacagaatccagtccacacacggacgggaatagaatccagtccacacacggacgggaatagaatccagtccacacaccgacggaacaggatccagtccacgcgccgacggaagaggatctagtccacacaccaacgggaatagaatcccgtccacacaccgacggaacagaatccagtccatgcaccgacggaacaggatccagcccacgcaccgacggaagaggatccagtccacacaccgacgggaatagaatccagtccacacaccgacgggacaggatccagtccacacaccgacgggaatagaatccagtccacacaccgacggaacaggatccagtccacacaccgacggaacaggatccagtccacacgccgacggaagaggatccagtccacacaccgacggaacaggatccagtccacgcgccgacggaagaggatccagtccacacgccgacagaacagaatccagtccacacacggacgggaatagaatccagtccacacacggacgggaatagaatccagtccacacaccgacggaacaggatccagtccacgcgccgacggaagaggat

SEQ ID NO: 20517 - DNA, 924 bp, Homo sapiens
  MAP TO AL078614.2; EXPRESSED IN HEART, SIGNAL = 1.4; EXPRESSED IN BONE MARROW, SIGNAL = 2.2; EXPRESSED IN ADULT LIVER, SIGNAL = 2.1; EXPRESSED IN BRAIN, SIGNAL = 2.1; NT HIT: gi14736670, EVALUE 0.00e+00; EST_HUMAN HIT: BG622137.1, EVALUE 0.00e+00; SWISSPROT HIT: Q9TU23, EVALUE 7.00e-05
tactccttctgttttctctctctcatactgaaagagactttcttttaaatgatcacattcattcgttagcttcttacttttctcttctagcacgaggtctttctttccactctcaataaagcctctttggatattagttactgtctctttatgatcctctttctgatgaacgtcatctagttgctgtacaagccacgcattttcacgttggaggtgacatatcctctcttctacacagttccactttccagtggaattattcactttagcttctgcattttgatacatctctttcatttcctgtgtttgctgctgtgtttgggttaggtcgttttgtacagtttctaaagccaatgacttttttctgagactatctcttgtcttacggaacttatcttttaaggtattgaatttaatttgtgtttcagaaagttgttcagtaagaaactcattctcagcttttactttggaaatagcagaactcatttctacttgtacagaaacatctcgtgttctctctaaagcaagttttaggtttctttctgttttcacactttcactgtgtttgcttatagcagcagccagtctagactgataagattcaatgtcagcttccagtcttttcttgctttctttttccttcaacagttcggcattgagccttgtattctcagccttgagatcattaagctcttgttgataccggaatgctgtttctgttatcatttcctcattgagttttatatacttttcaagggcagcatttgtttctttaacaattttaatgtccttaagatatttattttctttttccaagttgtcatttttcattgtacatatttcctgtctgagtatagcaatatctgccttcaaaatgcaattttcatccatcagacctttcatttcttcatgattatgaaaatc

SEQ ID NO: 20518 - DNA, 521 bp, Homo sapiens
  MAP TO AC002094.1; EXPRESSED IN PLACENTA, SIGNAL = 1.6; EXPRESSED IN HELA, SIGNAL = 3.1; EXPRESSED IN ADULT LIVER, SIGNAL = 1.8; EXPRESSED IN BONE MARROW, SIGNAL = 1.8; EXPRESSED IN HEART, SIGNAL = 1.6; EXPRESSED IN LUNG, SIGNAL = 1.7; EXPRESSED IN FETAL LIVER, SIGNAL = 1.7; EXPRESSED IN BRAIN, SIGNAL = 1.8; SWISSPROT HIT: O60309, EVALUE 2.00e-36; NT HIT: gi12740329, EVALUE 1.00e-106; EST_HUMAN HIT: BG988474.1, EVALUE 5.00e-73
atatgcagctcaccatagcaacagagcctactgcagaggtgggaacttctccagtctaccaagagggtacagctcagctctcagggccagttaatgatgtagaaccttctgccacccagcatgggggcccacctctgcctccagagtcattggaagaggctgggcctttaccagttcaacaggagacttcagttcagtctccagaacctattaaggatcagaacccctctgcagcccagcaggaggctgagcatccacagacccctgaggaggttgagtcttctctaacccagcaggaggccccagctcagactccagagctccttaatgaagttgtagctcaatctccagagcatcatgaggtaacagtttctcctctaagtcatgatcaagttcagcctccaacattgtacaatgtcactgttaaacctgtggatcacatggttaccatgactccagatttcactaatcaggttgaaattttaacccaacagggggacccaggtcagcccttagtgtcc

SEQ ID NO: 20519 - DNA, 646 bp, Homo sapiens
  MAP TO AL139195.2; EXPRESSED IN ADULT LIVER, SIGNAL = 1.5; EXPRESSED IN PLACENTA, SIGNAL = 2.1; EXPRESSED IN BRAIN, SIGNAL = 1.3; EXPRESSED IN HELA, SIGNAL = 1.7; EXPRESSED IN BONE MARROW, SIGNAL = 1.3; EXPRESSED IN LUNG, SIGNAL = 1.1; EXPRESSED IN HEART, SIGNAL = 1.4; EXPRESSED IN FETAL LIVER, SIGNAL = 1.3; SWISSPROT HIT: Q58508, EVALUE 8.60e-02; NT HIT: gi16190317, EVALUE 0.00e+00; EST_HUMAN HIT: AU132960.1, EVALUE 0.00e+00
acggtatccaactgttgaaaaacgagccagagtcttcaatggagcaagttatgtgcctgttcctgaagatggtccctttcttaaagcactgctctttgaacttagattattggatgatgataaagacttcgttgagagtcgtgatagctgttcacgcatcaataaaacatccatttatggactcctgataggaggtgaagaactctggccagttgttgcttttctgaagaatgacatgatatatgcttgtgttccactagttgaacaaactctgtcccctcgtccgccactaattagtgtcagtggagtttcacaaggctttgaatttctttttgggatacaggattttctttattcaggtcaaaaaaatgactctgagctgaatacaaaattgagccagttgcctgacttgcttctgcaggcttgtccatttggtactttattagatgccaacttacagaattcattagataataccaattttgcatctgtgactcagccacagaaacagccagcttggaaaactgggacgtacaaaggaaaaccacaagtttctatttctatcactgaaaaggtaaaatccatgcaatatgataaacagggtatagcagatacatggcaagttgttggaacagtgacttgcaag

SEQ ID NO: 20520 - DNA, 453 bp, Homo sapiens
  MAP TO AJ009611.1; EXPRESSED IN LUNG, SIGNAL = 1.6; EXPRESSED IN HEART, SIGNAL = 1.7; EXPRESSED IN FETAL LIVER, SIGNAL = 1.5; EXPRESSED IN PLACENTA, SIGNAL = 1.5; EXPRESSED IN HELA, SIGNAL = 0.9; EXPRESSED IN ADULT LIVER, SIGNAL = 1.6; SWISSPROT HIT: Q15973, EVALUE 2.00e-49; NT HIT: gi16177795, EVALUE 0.00e+00; EST_HUMAN HIT: AU118770.1, EVALUE 1.00e-113
gagggccaaccgaatgctttcccgcattttccacacttatagggtttctccccgttgtgaattctcacgtgtcgttgaaaggatgttgcccagcagtaggctttcccacactgcttgcactcatacggtctccctccggcgtgcatgatcatatggactcgaaaggatttctgacacctgaaggctttcccacagtgcttgcactcatacggtctccctccggcgtgcatcatcacatgtgcgcgaaaggatttgggacaactgaagcctttcccacactgcccacattcgtagggtttctctccagtgtgagtccttacatgttcagtgagagagtgggaacgaagaaatgtcttcccgcaagattgacaggcatagggtttctctccactgtgagttttctcatgcgtctgtaggtaggaagggcgactgaaggctttcccacattcctta

SEQ ID NO: 20521 - DNA, 623 bp, Homo sapiens
  MAP TO AL161781.2; EXPRESSED IN ADULT LIVER, SIGNAL = 1.7; EXPRESSED IN BONE MARROW, SIGNAL = 1.4; EXPRESSED IN LUNG, SIGNAL = 1.4; EXPRESSED IN HEART, SIGNAL = 1.6; EXPRESSED IN FETAL LIVER, SIGNAL = 1.4; SWISSPROT HIT: P15387, EVALUE 2.00e-22; NT HIT: gi15805042, EVALUE 2.40e+00; EST_HUMAN HIT: BI464211.1, EVALUE 0.00e+00
gccagcatccacggctggacagagggccactataactactacatcgagaagacgaagacgggagggggaggaccagtggaaggacgacctggcagaagaggaccagcagcaggggaggtcaccaccgccaagcccgagggccccagcgaccctccggccctgctgtccacgctgaatgtgaacgtgggtggccacagctaccagctggactactgcgagctggccggcttccccaagacgcgcctaggtcgcctggccacctccaccagccgcagccgccagctaagcctgtgcgacgactacgaggagcagacagacgaatacttcttcgaccgcgacccggccgtcttccagctggtctacaatttctacctgtccggggtgctgctggtgctcgacgggctgtgtccgcgccgcttcctggaggagctgggctactggggcgtgcggctcaagtacacgccacgctgctgccgcatctgcttcgaggagcggcgcgacgagctgagcgaacggctcaagatccagcacgagctgcgcgcgcaggcgcaggtcgaggaggcggaggaactcttccgcgacatgcgcttctacggcccgcagcggcgccgcctctggaacct

SEQ ID NO: 20522 - DNA, 873 bp, Homo sapiens
  MAP TO AC013584.3; EXPRESSED IN ADULT LIVER, SIGNAL =   3; EXPRESSED IN PLACENTA, SIGNAL = 5.7; EXPRESSED IN HELA, SIGNAL = 0.79; EXPRESSED IN BRAIN, SIGNAL = 2.6; EXPRESSED IN HEART, SIGNAL = 3.8; EXPRESSED IN BONE MARROW, SIGNAL =   3; EXPRESSED IN FETAL LIVER, SIGNAL = 4.3; SWISSPROT HIT: Q10190, EVALUE 1.40e+00; NT HIT: gi14721470, EVALUE 0.00e+00; EST_HUMAN HIT: AU124751.1, EVALUE 0.00e+00
gcttgaagatgcagtggacgccagagcatgcccagtggccagaacagcactttgacatcacctcaaccactcggtctcctgcccacaaagttgaagcctacagaggtcatctgcagcgcacctatcagtacgcctgggcgaatgatgacatatctgctctgactgcatccaacctactaaaaaaatatgcagagaagtattccggcattttggaaggtcctgtggaccgacccgtactcagcaactattcggacacaccatcaggactagtgaacggtcggaaaaatgaaagtgaaccctggcagccttccttgaattcagaagctgtttatcccatgaactgtgttccggatgttatcactgccagcaaagctggagtcagttcagccctccctccagcagatgtctctgcgagtataggaagctctcctggggtagccagcaacctgacagaacctagttattcaagtagtacctgtggaagccacactgtacccagtcttcatgcagggctcccatctcaggaatatgccccaggatacaacggatcatatttgcattctacttatagtagccagccagcacctgcacttccttcacctcatccgtctcctttgcatagctctgggctactacagcccccaccaccacctcctccgccaccagccttggtcccaggctacaatgggacttctaacctctccagttacagctatccgtctgctagctatcctcctcagactgctgtggggtctgggtacagccctgggggggcaccgcctccgccttcagcgtacctgccttcaggaattcctgctcccacccccctaccccccaccactgttcctggctacacctaccagggccatggtt

SEQ ID NO: 20523 - DNA, 807 bp, Homo sapiens
  MAP TO AJ009612.1; EXPRESSED IN FETAL LIVER, SIGNAL = 2.7; EXPRESSED IN LUNG, SIGNAL = 2.2; EXPRESSED IN PLACENTA, SIGNAL = 2.5; EXPRESSED IN BRAIN, SIGNAL = 2.1; EXPRESSED IN HELA, SIGNAL = 5.4; EXPRESSED IN ADULT LIVER, SIGNAL = 2.4; EXPRESSED IN BONE MARROW, SIGNAL = 2.6; SWISSPROT HIT: Q15776, EVALUE 1.00e-52; NT HIT: gi14770861, EVALUE 0.00e+00; EST_HUMAN HIT: AU130954.1, EVALUE 0.00e+00
atgaactatgactgaaggttttaccacattccaagcatttatatggtttctctccagtatgtgtcctttgatggatggtaaggtgtgcacgctgactgaagtctttcccacagtcatcacacttatagggtttctctccagtatgaattctctgatgtatagtaaggtgtgcacgctggctgaaggctttaccacactggtggcattcatatggtttttctccagtgtgcattctctgatgtgcaataagggatgagatatgcctaaactctttcccacattcttcacattcatacgatttctctttggcatgggtactttggtgtttcaggagggatgggtatttcctaaattttttcccacacacattacacttgtaaggcttctctccaggaagtattttcctatgtacaataccatatgagacatgattgaaggttgccctgccttcattatacacagaagttttattatctaattgggtatcaaactgtacaattaggtttgaatgcttttcaaaattatttctatatatatcatatttactaagacattcttctgtaggatcatattcttgtgaaaggactgacttcaaactgaaacctctttcatcagtgtgaattttccagaagccaccttttcctcgcctctctagtctatcatcgtagtcatatgagtcttctaatttgatggtatgggtttcttcctttgtgagtttagacatatcctccactggagtacatgcttgggctttagtttcccattctgaaataaaaaatatattaaaaaatcttcatttatttggag

SEQ ID NO: 20524 - DNA, 777 bp, Homo sapiens
  MAP TO AC011446.2; EXPRESSED IN PLACENTA, SIGNAL = 1.5; EXPRESSED IN ADULT LIVER, SIGNAL = 2.2; EXPRESSED IN LUNG, SIGNAL = 2.2; EXPRESSED IN HEART, SIGNAL = 2.4; SWISSPROT HIT: O00555, EVALUE 1.00e-115; NT HIT: gi14763595, EVALUE 0.00e+00; EST_HUMAN HIT: AI590622.1, EVALUE 0.00e+00
ttagcaccaatcatcgtcactctcgctgtagggttcgtgcaggcccttcctggagcccggcccgcggggcctggccagtccgtgcgccgggtagtagccgttggggagtcgccggccgtgccgagaaggcgaggcgcaggccgggcccgaggcccggggagtcctgggcgagcgcccggtggcgcccgaggacgcgtgtcgtacggggggtggcgcgtcgtaggccccggccatggcctcctcgccgcccccgctgcccgggccatcggcctcgtcgtagtcggagccccggtagtagccatggtgccggggacccgggggcccctcggacacgtgcgggccagatgccggccaccgggccccgccgtgtcgacaggccctgggggactcgctccgggccgggcctgggacccgcctctccatcctgggcgagcggccgctgctgtggccccccgtgggcggccgatctccggccagaggctcggccgtggggcctgggtacctccgagggccgctggtggccgcccggcccggcctggccaccgcctgctgctgctgctgctgctgctgctgctgctgctgctgcgggggccccgagccgccggccttacggatcacaggggaataggacacgtgtggccggggggtggagggggtctgggggagctggcggcggccccgccgcggagtgctggtaccagatgttgagggggctgggcttccacttacggaactactgccctacacgaaaattgaaacaaaggaaatcaaaaaaaa

SEQ ID NO: 20525 - DNA, 642 bp, Homo sapiens
  MAP TO AL157736.2; EXPRESSED IN BRAIN, SIGNAL = 1.8; EXPRESSED IN HELA, SIGNAL = 1.6; EXPRESSED IN ADULT LIVER, SIGNAL = 1.4; EXPRESSED IN LUNG, SIGNAL = 1.7; EXPRESSED IN BONE MARROW, SIGNAL = 1.3; EXPRESSED IN FETAL LIVER, SIGNAL = 1.5; SWISSPROT HIT: O00409, EVALUE 7.00e-97; NT HIT: gi4885136, EVALUE 0.00e+00; EST_HUMAN HIT: BE676347.1, EVALUE 0.00e+00
atgggtccagtcatgcctcccagtaagaagccagaaagctcaggaattagtgtctccagtggactgagtcagtgttacgggggcagcggtttctccaaggcccttcaggaagacgatgacctcgacttttctctgcctgacatccgattagaagagggggccatggaagatgaagagctgaccaacctgaactggctgcacgagagcaagaacttgctgaagagctttggggagtcggtcctcaggagtgtcagccccgtccaggacctggacgatgacacccccccatcccctgcccactctgacatgccctacgatgccaggcagaaccccaactgcaaacccccctactccttcagctgcctcatatttatggccatcgaggactctccaaccaagcgcctgccagtgaaggatatctacaactggatcttggaacattttccgtattttgcaaatgcacctactgggtggaaaaactcagtgagacacaatttatcattgaataagtgttttaagaaagtggacaaagagaggagtcaggtaagcctctgtgtctggaacccaaggttttctttttttttttttaatttaaaatttttctctattaaaaatgaatttctattcaccacattgaagtag

SEQ ID NO: 20526 - DNA, 1068 bp, Homo sapiens
  MAP TO AL078591.17; EXPRESSED IN LUNG, SIGNAL = 1.7; EXPRESSED IN BONE MARROW, SIGNAL =   2; EXPRESSED IN HELA, SIGNAL = 3.9; EXPRESSED IN ADULT LIVER, SIGNAL = 1.6; EXPRESSED IN PLACENTA, SIGNAL = 1.8; EXPRESSED IN HEART, SIGNAL =   2; EXPRESSED IN BRAIN, SIGNAL = 1.8; SWISSPROT HIT: P32323, EVALUE 2.10e-01; NT HIT: gi14755993, EVALUE 0.00e+00; EST_HUMAN HIT: AU138527.1, EVALUE 0.00e+00
aactttcataccaggaaatcgaagaagtgaagttgtaagaagtactgcttggctgctttgtaatggcatcaaatttacttttggaagaatatttaacattacaaggagactctcgtggtgcagacgggaaggacaaacaaccagaagtacagacagtaggcatgtttataccatctctcagatagtcactgtttattttttcagattttgtaagtctttcttccattagttcatctctgcttgtatagtgagcatttattgttccatccaaagctgaataatctgtttcttcatagtacccattttgaaccatttgttgatcctgctcttcctcctcatcctctttatcctgttcctgctgaagattactaatttctttttcagaagtttccttctgagggctaagtgcattgctgtagctaacagcacatgtgtcagaaatatccgtactgctttgagaaccaaaataattttccacaagcccttgctttactatatcagtactggctgaaaaaggatcacttgtacccagatgagtttcactttcaactgtagggatttctgaatacatctgtgtgagatttaatacatcactattttttttcatagttctatcttcactaacatctgtattactagaaatggaacctgaaatgacacaaggagtgcctaaacaaatcagttttgaatttaatgtaattgctgtccctgtagagttattagatttatcaggactctggaagcctttacacatagtatccaagttaggtttggagctgcaactacttttcacatcactggaagtctcttcatctgaaaaaacaaattgtaaagggtctttaatgcttgaatttaaggaatgtattgctacagtttcattgtccaagttccctgaaaatacaacactctgctgttgcaaagtgatacttgactttttagtatcatcacattttggcaaatcagtcgttcctagatttaatacagttttgctatcatttagatggcattcaggtacaacagatttcttagaattttcatcaggtgacagttcatcatcggagggtagag

SEQ ID NO: 20527 - DNA, 628 bp, Homo sapiens
  MAP TO AC016786.4; EXPRESSED IN ADULT LIVER, SIGNAL = 1.2; EXPRESSED IN HEART, SIGNAL = 1.5; EXPRESSED IN FETAL LIVER, SIGNAL = 1.2; EXPRESSED IN LUNG, SIGNAL = 1.6; EXPRESSED IN BONE MARROW, SIGNAL = 1.5; EXPRESSED IN BRAIN, SIGNAL = 1.5; EXPRESSED IN HELA, SIGNAL =   2; SWISSPROT HIT: Q9Y5F3, EVALUE 3.00e-45; NT HIT: gi15302306, EVALUE 0.00e+00
accgcccgctggaccgcgagacacaagacgagtacaacgtgaccatcgtggcgcgggacgggggctctcctcccctcaactccaccaagtcgttcgcgatcaagattctagacgagaacgacaacccgcctcggttcaccaaagggctctacgtgcttcaggtgcacgagaacaacatcccgggagagtacctgggctctgtgctcgcccaggatcccgacctgggccagaacggcaccgtatcctactctatcctgccctcgcacatcggcgacgtgtctatctacacctatgtgtctgtgaatcccacgaacggggccatctacgccctgcgctcctttaacttcgagcagaccaaggcttttgagttcaaggtgcttgctaaggactcgggggcgcccgcgcacttggagagcaacgccacggtgagggtgacagtgctagacgtgaatgacaacgcgccagtgatcgtgctccccacgctgcagaacgacaccgcggagctgcaggtgccgcgcaacgctggcctgggctatctggtgagcactgtgcgcgccctagacagcgacttcggcgagagcgggcgtctcacctacgagatcgtggacggcaacgacgaccacctgtt

SEQ ID NO: 20528 - DNA, 517 bp, Homo sapiens
  MAP TO AP001621.1; EXPRESSED IN LUNG, SIGNAL = 1.4; EXPRESSED IN BONE MARROW, SIGNAL = 0.98; EXPRESSED IN HELA, SIGNAL = 1.1; EXPRESSED IN ADULT LIVER, SIGNAL = 1.6; EXPRESSED IN PLACENTA, SIGNAL = 1.6; SWISSPROT HIT: Q07284, EVALUE 6.00e-03; EST_HUMAN HIT: AA143205.1, EVALUE 7.20e-01
gtgacctggtgagccccatgggcggtggactgtctgcggcaacaggggtaacggtcccaggtcttggcacgggaacagcagccctcggcctagagaacttcaccttgtcacccagtcctgggtaccctcagggcaccccggcagcaggccaggcctggaccccagagccctcacccagaagagggggcagcaatgtggtcgggtatgacaggaacaacacaggaaaaggcgtggagcaggaggtgcccagcactgccccgggtctggggatggaccaggggagccccagccaggtgaaccccagccaggggagccccagccaggggagcctcagacaggagagtaccagccaggcgagccccagccagaggagcaccagccaggggagccccagccaggtgaaccccagccagcggagcaccagccacgcgaactccagccaggggagccccagccaggggagccccagccaggagagccccagccaggggagcaccagccaggcgagccccagcca

SEQ ID NO: 20529 - DNA, 900 bp, Homo sapiens
  MAP TO AL133284.7; EXPRESSED IN LUNG, SIGNAL = 1.5; EXPRESSED IN HEART, SIGNAL =   2; EXPRESSED IN FETAL LIVER, SIGNAL = 1.5; EXPRESSED IN BRAIN, SIGNAL = 1.6; EXPRESSED IN ADULT LIVER, SIGNAL = 1.7; EXPRESSED IN PLACENTA, SIGNAL = 1.9; EXPRESSED IN HELA, SIGNAL = 2.8; NT HIT: gi16160487, EVALUE 0.00e+00; SWISSPROT HIT: Q13049, EVALUE 0.00e+00; EST_HUMAN HIT: BI087990.1, EVALUE 0.00e+00
cttgagggagttatcatagctgtcagtcacaccaatcagcccctggcagttcattgccactgagagaggagtgaggttgggtagatctgccccaaggaagcttagcacaaagctatcaatgccactggggctgcggcggatttccttcaaaaagcctttgcgggtaaagacttgtatacgatagttaccacggtcagcgactagtacttcaccttgactggtcacgtagagactgactggaagattgaacattcctggagtgctgcctttggcccccatcttcttgagaaagaggcactgctggatattggaggctgcctcaggaccccgctgtttagcaggtgaggccctagggctggcaaccacttcctccgggctcatgtccatctctctaaaagtaacagaggtagaggcagcagacgctgtggcctccatggcccaggaatcttccacgttaactgtccggggcttcttaacagcttgtccaatttggagggggccaacatgacctaccttaaggagctccacatcttgcagggtgagctcccgaggcaagctggcagtgagctctggctcctcctcatcagctgtctcctccagtagtgctacatctgcctgcttgatcttggccaggaagtagtcacagcgagacacagcctgcacctctgcaatgttaagcaggtaactctgctcctctaccacttgactattggacttctcaacttcagccaaagagcctgtgaagaacttccgagagcgagccagctcatcctggaccctgcgctcctcatgcccatactcctggagaactgctttataccttgcctgaaggtccttggagacaccttccaaggctgccttccgccgctgcagctcccccataagttcccgcagacgagt

SEQ ID NO: 20530 - DNA, 458 bp, Homo sapiens
  MAP TO AC004923.2; EXPRESSED IN LUNG, SIGNAL =   4; EXPRESSED IN FETAL LIVER, SIGNAL = 5.2; EXPRESSED IN ADULT LIVER, SIGNAL = 4.2; EXPRESSED IN PLACENTA, SIGNAL = 6.8; EXPRESSED IN HELA, SIGNAL =   3; SWISSPROT HIT: Q60760, EVALUE 5.70e-02; EST_HUMAN HIT: AL532400.1, EVALUE 4.00e-67; NT HIT: L78810.1, EVALUE 9.00e-61
actcaggagcccagctggcttcacccagtggattctgcacaggagctgcaggtggagctgcctgccagttcctctctgtgcacccacactcctcagcccttgggtggtcgatgggactgggcgccgtggagcagggggcggtgctcgtcggggaggctcgggccgcacaggagcccatggaggggggaggctcaggaatggcaggctgcaggtcccaagccctgccccacatggaggcagctaaggcccagcgagaagccgagcacagcagctgctggcccagttgctaagctcctcactgcccggggctggcagggccatccggcagctcctagtgcggggccaccaagcccacccccacccagaactccagccggcaggcaagtgctggggtcagcccccgttttagctcatgcctctccctccacacctccctgcaagctgagggagccagctcc

SEQ ID NO: 20531 - DNA, 1572 bp, Homo sapiens
  MAP TO AC009487.1; EXPRESSED IN ADULT LIVER, SIGNAL =   2; EXPRESSED IN PLACENTA, SIGNAL = 1.8; EXPRESSED IN BRAIN, SIGNAL = 1.7; EXPRESSED IN HELA, SIGNAL = 1.3; EXPRESSED IN BONE MARROW, SIGNAL = 2.4; EXPRESSED IN FETAL LIVER, SIGNAL = 2.4; EXPRESSED IN LUNG, SIGNAL =   2; EST_HUMAN HIT: BE886672.1, EVALUE 0.00e+00; SWISSPROT HIT: P43554, EVALUE 2.10e-02
agcgatgttatccttcacctcactgttttgctttttagtaggtgcatggttgaagcctggaattttttgcggcaacattgcaataggttgaatatagaggagttactgaagcacatgtatgaagtctgtcaggaaatgggcttgatggaagatttactgaagttaccatttacagacactgagcaggaatgtttagtgaaatttttgcagtccagtgccagcattcagagtcatgaattccttttagtgcaccatttgcagcatgccaattatgtgcctcccttgaagctgaaccaaactctgaagattaatgttatgaatgatcgtgatcctcgtttgcgggagagatcactggctcgaaattctatattagaccagtatggaaaaatccttcctagagtccatcgaaaattagccattgaacgagctaagccttatcatctgtcaacatcatcagtttttcgattagtttctagacccaaaccattatcagcagttccaaagcaagttgtaacaggaactgtgttgacaagatctgttttcatcaacaatgtgttatctaaaattggagaagtttgggcaagcaaagaacctataaatagcaccacacctttcaatagttctaaaatagaagaaccatctcctatagtgtattcgctcccagctccagagctgcctgaggcattttttggaacaccaatttcaaaagcatcacaaaaaatttctagactgctagatttggttgttcagcctgtcccccggccttctcagtgttcggagtttattcagcaaagctccatgaaatctcctttgtacctagtatcccgttcactgccctcaagttcacaattaaaaggatcgcctcaggccatctccagggcttcagaattacatttgcttgaaactcctcttgtagttaacaaagctaaaagtttggccatgtcagttactacttctggattttctgagttcactcctcagtccatcctgaggtctactcttcgatcaacacctttagcatctccctctccatcacctggaaggtctcctcaacgacttaaagaaactagaatttcatttgtggaagaagatgtccacccaaagtggattcctggggctgcagatgatagcaaattagaagtatttactacacctaaaaaatgtgcagttccagtggaaactgaatggctgaagagcaaagataggaccacatcttttttcctgaacagccctgaaaaggagcatcaagaaatggatgtggggtcacaaagtttagagaaactggatgtgagcaaaggaaacagcagtgtttcaatcacatccgatgagactaccttagagtatcaggatgcactgtcaccggaagaccttgaagagactgttttcacggcctctaagcccaaaagctcttccactgcactaactactaatgtaactgaacaaactgaaaaggatggagataaagatgtatttgcatcagaagtaactccttcagacctacagaaacaaatgggcaatttagaagatgcagaaacaaggatctcttagttgcagcagaggcattttcagaat

SEQ ID NO: 20532 - DNA, 1410 bp, Homo sapiens
  MAP TO AC008990.5; EXPRESSED IN ADULT LIVER, SIGNAL = 1.9; EXPRESSED IN PLACENTA, SIGNAL = 4.1; EXPRESSED IN BRAIN, SIGNAL = 2.5; EXPRESSED IN HELA, SIGNAL = 3.9; EXPRESSED IN LUNG, SIGNAL = 2.5; EXPRESSED IN BONE MARROW, SIGNAL = 3.8; SWISSPROT HIT: Q03923, EVALUE 0.00e+00; EST_HUMAN HIT: BG818171.1, EVALUE 0.00e+00; NT HIT: gi13650821, EVALUE 0.00e+00
ttaaaggctttcccacattcttgacatttgtagagtttctctccagtatgaattattttgtttaataaggtttgaggactggttaaatgtattgtcacattcttcacagttgtagggtttctgtctagtatgaattttcctatgtttagtaagagttgaggattggttaaaggctttaccacattcttcacatttgtaagatttctctcctgtatgaattatcttatgtttagtaagatttgaggatcggttaaaagctttgccacattcttcacatttgtagggtttctctccagtgtgaattctcttatgtgtagtaaggattgatgactggctaaaagctttgccacattcttcacatttgtaaggtttctctccagtatgaattatcttatgtgcagtaagttgtggggaccggttaaaagctttgccacattcttcacatttgtagggtttctctccagtatgaatcatcttatgtgtagtaaggtttgaggactcattaaaggctttgccacacacttcacatttgtagggtttctctccagtatgaattcttttatgtttagtaagggttgaggaccaattaaagcctttgccacattcttcacatttgtaagatttttctccagtatgaattatcttatgtttagtaaggtatgagaatcgattaaaagctttgtcacattcctcacatttgtagggtttctctccagcatgaatgaacttatgtgtactaagggttgaagactggttaaaagctttgccacattcttcacatttgtagggcttctctccagtatgaattatcttatgtgtagtaaggtgtgaggaccggttgaaggctttgccacattcttcacatctatatggtttctccccagtatgaattatcttatgtgtagtaagggttgaggactgcttaaaagctttgccacattcttcacatttgaagggtttctctccagtatgaattctcttgtgtctagtaagggttgagaaccatttaaaagctttgccacattcttcacattggtaagaattctctctaatatgaattcttttatgttgacttaggtgtaaaagcatgcaaaatgatttgccacattttttacatttgaaaggtttctttccagtatgtcttgtcttatgtctatttgcatttaaaaatttatgaaagactttcacatatttatcacatggaaatattttgctctgggtagttgtcaaacactggtttagctcattataaccttctttgtgcaccttatactcatctacacttgcggagccttttcttaactgtaaattctcatgttcacatttgccatatcttctcagtattacttgttgaaaagaatcttttatgtcttgctctggccaaaggtctttggtaaaataagaacacat

SEQ ID NO: 20533 - DNA, 1522 bp, Homo sapiens
  MAP TO AC004525.1; EXPRESSED IN ADULT LIVER, SIGNAL =   3; EXPRESSED IN PLACENTA, SIGNAL = 3.7; EXPRESSED IN BRAIN, SIGNAL = 0.82; EXPRESSED IN HELA, SIGNAL = 0.34; EXPRESSED IN BONE MARROW, SIGNAL = 3.4; EXPRESSED IN LUNG, SIGNAL = 6.9; EXPRESSED IN HEART, SIGNAL = 1.5; EXPRESSED IN FETAL LIVER, SIGNAL = 1.6; SWISSPROT HIT: P24394, EVALUE 0.00e+00; EST_HUMAN HIT: BG757509.1, EVALUE 0.00e+00; NT HIT: AF421855.1, EVALUE 0.00e+00
tcatgtatgtgggtcccacggagacaaagttcacgattttgggggtctggcttgagctctgagcattgccaggggcaggatggaaggatgatgaggatttactcttctctgagatgcccgagggtgccagggaggccggacacagactggcctccagtggaaccccacctggagaggggtctggggccctcaggggggttgtagggggcgaggacctgtctccacagcagcagccacagcaaggactggccatgacaggggtctggccaccatcctcctggccatgacactgtttcaggtggccgcacaggtggcaggtaagggctgagtagacaatgccactgcccaggctgtccacaagggggtctgtggcctgctcctggggaagtgggggctttggcatgtcctctaccttttcccccggctccagacccaggtgctctggggagctgcttgggagatgtgagctctgcggactgcgaggtggctccctgtccagtccaaaggtgaacaaggggacagggactggggcagggtccccagggcagccaggaatgaggtcttggaaaggcttatacccctcttccccactgctagccccaaacccacatttctctggggacacagcactgctggcaagcaggcttgagaaggccttgtaaccagcctctcctgggggacccaagcccaccaccgcactggcctgggtgccaccctgctccaccgcatgtacaaactcctgatagccactggtgggggccgagacgggggctgcagctgccccatgctggaggacatttcggcggaggatctgctcccaggtttctggctcaggttggggcacagtggttggctcagagagctgggggacacagggcatctcgggttctacttcctccaggtgtctggccagcagtgggtctggacccagctctctgggacacggtgactggctcagggagttgctgaagctgcggtaagcagggttgcctgcgatgacgaggggcgtctctgtgcaagtcaggttgtctggactctgggtcgggctggcaggaggacttggctccaggtggagaggctgctccttgccccagggaggtgcctccttgggccctgcacttgggaactcatcccagggcatgtgagcactcgtacttcccgaaggtggaagaaggcatgactcccccatgtcctgctggcaaaagcccccattctcctctccgagcaggtccaggaacaggctctctgttagccgggccacaatgccctcccttccctcctggaagtcatccctgctgctctcaggcgatgcacagaagctccctttttcttcctctacctcctcctcctcctcacactccaccggggcctcaaacaactccacacatcgcaccacgctgatgctctctggccagaggactgtcttgctgatctccactgggcaccatgctgattttccagagccctggaaaggcatctctttggcagccttgtgaggatcttcatcccttttcatgttgtg

SEQ ID NO: 20534 - DNA, 647 bp, Homo sapiens
  MAP TO AL035669.27; EXPRESSED IN LUNG, SIGNAL =   2; EXPRESSED IN BONE MARROW, SIGNAL = 1.7; EXPRESSED IN FETAL LIVER, SIGNAL = 3.3; EXPRESSED IN ADULT LIVER, SIGNAL =   2; EXPRESSED IN HELA, SIGNAL = 3.8; EXPRESSED IN BRAIN, SIGNAL = 1.8; NT HIT: gi14769816, EVALUE 0.00e+00; EST_HUMAN HIT: AL135060.1, EVALUE 0.00e+00
atgtcgggccccggaccgcgggagccgccgccggaggcaggcgcggcaggcggcgaggcggccgtcgagggcgcgggcggcggggacgcggcgctgggcgagccggggctgagcttcacgaccaccgacctgagcctggtggagatgacggaggtggagtacacgcagctgcagcacatcctctgctcgcacatggaggcggcggctgacggcgagctcgagacgcgcctcaactcggcgctgctggcggcggcgggcccgggcgcaggcgcgggcggcttcgcggcgggcggtcaggggggcgcggcgcccgtgtaccccgtgctgtgcccgtccgcgctggcggccgacgcgccctgcctgggccacatcgacttccaggagctgcgcatgatgctgctaagcgaggcgggcgcggcggagaagacgtcgggcggcggggacggagcgagggcccgggccgacggcgccgccaaggagggcgcgggcgcggctgcggctgcggctggacccgacggcgcgcccgaggcccgggccaagccggccgtgcgcgtccgcctggaggaccgcttcaacagcatccccgccgagccgccgcccgcgccgcgcggccccgagccccccgagccgggcggggcgctcaacaa

SEQ ID NO: 20535 - DNA, 454 bp, Homo sapiens
  MAP TO AP000539.1; EXPRESSED IN PLACENTA, SIGNAL = 2.2; EXPRESSED IN HELA, SIGNAL =   2; EXPRESSED IN ADULT LIVER, SIGNAL = 1.5; EXPRESSED IN BONE MARROW, SIGNAL = 1.2; EXPRESSED IN LUNG, SIGNAL = 1.4; EXPRESSED IN FETAL LIVER, SIGNAL = 1.3; NT HIT: AL163202.2, EVALUE 0.00e+00; SWISSPROT HIT: Q92794, EVALUE 2.70e-01; EST_HUMAN HIT: BG009093.1, EVALUE 2.00e-68
tcaaaaacactgctgctgctcggttcacagttgtcccttacatatgattgctgaacactgctatgaggttctgaatgcttgtccctcacaaaggattccagaacactgctgctgggttctgagtgtttgacactcacatagcattccagaacactgctgctgggttctgagtgtttgtccttcacataggattgaagaacactgcagctgggttctgagtgtttgtccctcacattggattccagaacactcctaagaacttctgaatgtttgtccctcacataggattccagaacattgctgctgggttctgagtgtttgtccctcacataggattccagaacaatgttgctgggttctgagtgtttttccctcacataggactccagaacactgcttcgaaggtctgaatgtttttccctcacaaaggattcaagaacactgctgctgggtt

SEQ ID NO: 20536 - DNA, 2543 bp, Homo sapiens
  MAP TO AC007663.28; EXPRESSED IN PLACENTA, SIGNAL = 3.6; EXPRESSED IN BRAIN, SIGNAL = 4.2; EXPRESSED IN HELA, SIGNAL = 2.3; EXPRESSED IN BONE MARROW, SIGNAL = 4.3; EXPRESSED IN HEART, SIGNAL = 2.9; EXPRESSED IN ADULT LIVER, SIGNAL = 2.3
tcaccatgagcatggccataaccaccatcatggtcagctccaccagcatcaccaccaccaccaccaccatcaccatcactgccaccaccaccgccaccatgactaccaccaccatcaccaccaccaccaccatcactaccaccaccaccatcactaccaccaccaccaccacgatcactaccaccaccaccaccatcaccatcactaccaccaccaccaccatcaccatcaccaccaccatcactaccaccaccaccaccaccaccatcaccatcactaccaccaccatcactaccaccaccaccaccaccaccaccatcactacaaccactaccaccaccaccaccatcactacgaccaccaccataaccatcactaccaccatcaccaccaccaccatcaccatcaccaccaccatcaccatcactaccaccaccaccaccaccaccatcactaccaccaccaccatcactaccaccatcaccatcactaccaccaccaccaccaccaccatcactaccaccaccaccaccaccatcatcaccaccaccaccaccaccaccaccatcactaccaccaccaccaccatcactaccactaccaccaccatcactgccaccaccaccaccaccaccatcactaccaccaccaccaccatcactgccaccaccaccaccaccaccatcactaccaccaccaccatcaccaccaccaccaccatcactaccaccaccaccaccaccatcactaccaccaccaccaccaccatcactaccaccaccaccatcaccaccaccaccaccatcactaccaccaccaccaccaccaccatcactaccaccaccaccaccaccatcactaccaccaccaccaccatcactaccaccaccaccaccaccaccatcactaccaccaccaccaccatcaccatcactaccaccatcaccaccaccaccaccatcaccaccaccaccatcaccatcactaccaccaccaccatcaccaccaccaccaccatcactaccaccaccaccaccaccaccaccatcactaccaccaccaccaccaccatcactaccaccaccaccaccatcactaccaccaccaccaccaccatcactaccaccaccaccaccatcaccatcactaccaccatcaccaccaccaccaccatcaccaccaccaccatcaccatcactaccaccaccaccaccaccatcactaccaccatcaccaccatcaccaccaccatcactacaaccaccatcactaccaccatcaccactaccaccatcactaccaccaccaccaccaccatcaccatcacttccaccaccaccaccaccaccatcactaccaccaccaccaccaccatcaccatcacttccaccaccaccaccaccaccatcactaccaccaccaccaccaccatcaccatcacttccaccaccaccaccaccaccatcactaccaccactaccaccaggaccaccatcactaccaccaccaccaccaccatcactaccaccatcaccaccaccaccaccaccatcactaccaccaccaccaccaccatcactaccaccaccaccatcaccatcaccaccaccaccaccaccaccatcactaccaccaccaccaccatcaccatcaccaccaccaccaccatcactaccaccaccaccaccaccatcactaccaccaccaccatcaccatcacttccaccaccaccactgccatcactaccaccaccaccaccatcaccatcactaccaccaccccaccactaccaccatcaccaccaccaccaccatcactaccaccaccaccaccaccatcactaccaccaccaccatcaccatcacttccaccaccaccactgccatcactaccaccaccaccaccatcaccatcactaccaccaccaccaccaccatcaccatcactaccaccaccaccaccaccaccatcactaccaccaccaccaccatcactaccaccaccaccatcactaccaccatcaccaccatcactatccccaccatcactaccactgccaccaccaccaccatcactaccaccaccaccaccatcactaccaccactaccaccaccaccaccatcaccaccaccaccaccatcactaccaccaccaccaccagcaccaccaccatcactaccaccatcaccaccacaaccaccatcaccaccaccatcatcagaaccaccaccatcaccatcactaccaccaccaccaccatcaccaccaccaccatcaccatcactatcaccaccaccatcaccatcgttaccatcaccatcaccatcaccaccaccaccaccatcaccatcactatcaccaccaccatcaccatcgttaccatcaccatcaccatcaccatcaccatcaccatcaccacacctccatcactatggtcgctgtgactgagcccatcctcactactgtcatcagcactgtcacagcaccatgctgacaagcccacagtgggtttgagggctgccattgcttgggactagttcc

SEQ ID NO: 20537 - DNA, 620 bp, Homo sapiens
  MAP TO AC010680.2; EXPRESSED IN LUNG, SIGNAL = 1.4; EXPRESSED IN ADULT LIVER, SIGNAL = 1.4; EXPRESSED IN HELA, SIGNAL = 1.8; EXPRESSED IN BRAIN, SIGNAL = 1.3; NT HIT: gi16157781, EVALUE 0.00e+00; SWISSPROT HIT: Q14324, EVALUE 3.00e-24; EST_HUMAN HIT: AA677345.1, EVALUE 0.00e+00
aggcaccaacaattgtccttgatcccacaataaaagatgggctaacaattaaagcaggggataccattgttttgaatgccattagcattcttggcaaaccccttccaaaatcaagttggtccaaggcaggaaaagacattagaccatcagatatcactcagataacttcaaccccaacatcttccatgcttactatcaagtatgccactagaaaagatgcgggtgaatataccatcactgctaccaatccttttggcacgaaggtggaacatgtgaaggtaacagtccttgatgtacctggtcccccaggtcctgttgaaatcagtaatgtttctgctgaaaaagcaacacttacatggacacctcccttggaagatggcggctcaccaattaagtcctatatacttgaaaagagagaaaccagccgacttttgtggacagtggtttctgaagatattcagtcttgcaggcatgtggcaaccaaacttatccaaggaaatgagtacatcttccgggtctcagctgtaaaccactatggcaaaggagaacctgtacagtctgaacctgtcaaaatggtagacagatttggtatgtagagcatgtgagggaattgacatgga

SEQ ID NO: 20538 - DNA, 729 bp, Homo sapiens
  MAP TO AC008471.6; EXPRESSED IN PLACENTA, SIGNAL =  26; EXPRESSED IN BONE MARROW, SIGNAL =  11; EXPRESSED IN LUNG, SIGNAL = 8.1; EXPRESSED IN HEART, SIGNAL =  23; EXPRESSED IN FETAL LIVER, SIGNAL =  11; EXPRESSED IN ADULT LIVER, SIGNAL =  18; EXPRESSED IN BRAIN, SIGNAL =  15; EXPRESSED IN HELA, SIGNAL = 3.8; SWISSPROT HIT: P33479, EVALUE 3.30e+00; NT HIT: gi9629818, EVALUE 2.80e+00; EST_HUMAN HIT: BI553396.1, EVALUE 0.00e+00
ggcactcacctggctgctgccgtgctcctcgcccgtctccggggcccgagactccgcgggactccgcgccggctctgcgggaggaggcggcggctccagcagctgctccaggcaggcggtgcccggcagagaggagctcttctggtggcacaagtgcgccccggggccctgacgccgtgcaccctcatctcgggcgcggtcccccctcgggggaggctggggcgaggaggacagggaggatgaggcggaggaagaggaaggagctgagtcgggggagcgtccgccaggaggcgtccctcccgctgctcccgaggccgccgcgggcccctttacggcggggagcaaatgctcgcggatccggcggcgtagcgtggacccctgctcggctctgccggcgccgccgggctccaggggctccggcgacgagcagcacaggttgggctgcgaggaggagaagactcggtccagcacttgcttccgcttcttgaagccgctccacctgctgcctgcaccactccccctggccggtgcattccctgtgcccaccgggggtggcggggagggcgacggggtgtccgcagtgcggcgctctggacccccagcgcgcccgcccccgccgcccttgctcctgcccacccccagctgcaggttcttccagagccgggcctggaaggaggaggacgccgccggcggctctggctcgcccgccgcggcagcccggggctccat

SEQ ID NO: 20539 - DNA, 743 bp, Homo sapiens
  MAP TO AL031388.1; EXPRESSED IN BRAIN, SIGNAL = 1.5; EXPRESSED IN HELA, SIGNAL = 1.5; EXPRESSED IN ADULT LIVER, SIGNAL = 1.6; EXPRESSED IN LUNG, SIGNAL = 1.4; SWISSPROT HIT: P26805, EVALUE 2.00e-18; NT HIT: AB008681.1, EVALUE 0.00e+00; EST_HUMAN HIT: AI821407.1, EVALUE 1.00e-113
agaacaccgaggttgccagttttaataattcctccagattttgttcagggcccagtgcttgcttttggagctttttcctgatatctgtggctgattgggtaataaacttatcttttaggctcaattgaccctcaagggagtcaggtgatacgggagtgtatttttctaaggccttccatagccactcgaggaaggcagaaggatttgcttcctttccctgagttatggtggacatcattgaataatttatgggctttttcctaattctccttagtccttctataacacaggtcagcaggtgtttatgactccagtccccatgatctgagtcgaggtcccagtggggatccatactggggacggcttgctgaccagtagggaatttgtccctttctttggttatcattctatcatttacttgactaagataccgggtatctccaaactcttgggctgcagctaaatccgcattcttttcattaaaggccagggtttgatctaacaatagcatgacatctctccatgtgaggtcgaagctttgccctagaccatgtaggacatctatatacctatcaggattgtctgaaaacttccccaggtctaccctgatctgctttaaatcagagagagagaaggggacatgtaccctggttgggccaaattcccctccccctacagcttgaaggggacaaaactgatagacaggaggttttgtggtcctttggagatttctttgtttgttt

SEQ ID NO: 20540 - DNA, 732 bp, Homo sapiens
  MAP TO AC002404.1; EXPRESSED IN ADULT LIVER, SIGNAL = 1.8; EXPRESSED IN PLACENTA, SIGNAL = 2.1; EXPRESSED IN BRAIN, SIGNAL = 1.8; EXPRESSED IN HELA, SIGNAL = 5.7; EXPRESSED IN LUNG, SIGNAL =   2; EXPRESSED IN HEART, SIGNAL =   2; EXPRESSED IN BONE MARROW, SIGNAL =   2; EXPRESSED IN FETAL LIVER, SIGNAL = 1.6; SWISSPROT HIT: P17010, EVALUE 0.00e+00; NT HIT: gi15311881, EVALUE 0.00e+00; EST_HUMAN HIT: BF805984.1, EVALUE 0.00e+00
aactgaaattatgtgtcgtttcaaatcacttgagttcgaactcttgtggtcgcaatgcaaacactggtgtgttttgctttcttggtggataagagcatgttgctgcacctctttggtatccgagaaagtcagaagacaaatgtcacacttgaatggcatctctttactatgcttagttttgacatgcgttttcaagttagaagagtctgcagacctatattcgcagtactggcattggtacggcttctccccagtatggattctcatgtgctttttgagctctgacgggtgacgaaaacccttaccacactccacacaaatatgaggaaagttcttgctgtggactgccaagaggtggcgattcaataacccttgttcagctgtctcgtattcacagaatttacacttgtgcattttgttggctcctttttccttatgcaccattttgtgagtaaacaaagcccctgcatgagagaaatgcttcccacactcatcgcattcaatggccttctctgccttgctggtcagcttgtggctctccaggtggttgtgtaaacttatcttcttgttggtagtgtaatcacagtcagtacagcggtatttcttcttggcaaggtgttcgggatggtttttcatgtgccttttcaaaaaacctctcgacttaaacttcttcccacaaatcatgcaaggatagacagtcaaaggatgtccatcagggccaataattattgc

SEQ ID NO: 20541 - DNA, 567 bp, Homo sapiens
  MAP TO AL117339.3; EXPRESSED IN ADULT LIVER, SIGNAL = 3.4; EXPRESSED IN PLACENTA, SIGNAL = 2.4; EXPRESSED IN HELA, SIGNAL = 3.8; EXPRESSED IN BRAIN, SIGNAL = 3.3; EXPRESSED IN HEART, SIGNAL = 5.5; EXPRESSED IN LUNG, SIGNAL = 5.2; EXPRESSED IN BONE MARROW, SIGNAL = 6.5; SWISSPROT HIT: P29295, EVALUE 3.60e-01; NT HIT: gi15299301, EVALUE 0.00e+00; EST_HUMAN HIT: BI856167.1, EVALUE 0.00e+00
atgtaccccatgagtattgatgagagcattcacctccagcggtgggataaatacagcaacaagatgctgtgcatgcagaaaggtgacccagaagtctatgaagaacttttcagttacttctgccccaagttcctgtcgcctgtagtgcccaactacgataatgtgcaccccaactaccacaaagagcccttcctgcagcagccgaaggtgttttctgatgaagtacagcagcaggcccagctttcaaccatccgcagcttcctcaagctctacaccaccatgcctgtggccaagctggctggcttcctggacctcacagagcaggagttcaggatccagcttcctgtcttcaaacacaaattgaagaacctggtgtggaccagcagcatcacaaccctggatgatgaatttcagtcagcctcagaggttgacttctacattgataaggacatgatccacatcatggacaccaaggtcgccaggcgctatgggaatttcttcatccgtcagatccacagattcgaggagcttaatcgaaccctgaagaagatgggacagagaccctga

SEQ ID NO: 20542 - DNA, 460 bp, Homo sapiens
  MAP TO AC004142.1; EXPRESSED IN PLACENTA, SIGNAL = 2.2; EXPRESSED IN BRAIN, SIGNAL = 2.1; EXPRESSED IN ADULT LIVER, SIGNAL = 2.7; EXPRESSED IN HELA, SIGNAL = 0.94; EXPRESSED IN LUNG, SIGNAL = 2.1; EXPRESSED IN HEART, SIGNAL =   2; EXPRESSED IN BONE MARROW, SIGNAL = 2.1; EXPRESSED IN FETAL LIVER, SIGNAL = 2.1; EST_HUMAN HIT: AW967203.1, EVALUE 0.00e+00; SWISSPROT HIT: O75325, EVALUE 2.00e-54; NT HIT: gi14751033, EVALUE 0.00e+00
agacaatctagggttgttagtagcttctatttttcttaaatctggcaggttatccacagcaagactatcgatggaaatcagctcaggcatattatttatccccaactcttttaagtgtagcatattgctaaaatcaccccttcgtattctattaataggatttttatttagatccaaaaatttgagatttacaactttttgaagagcaacatggggtactttaataagcctgttatcgtaaaaagagatgctttctaagttttccagtccaaccaaggcgttatctggtatttctgtgaggtttataccagctataaccaggctgcgaagattgataagaggcttaaagttcatgtctttgattctgataattggattttccccaatcatcagaatctctagatttggaagagcatcaaaccacttactgttgatcatctgcaatctatttgaattgaga

SEQ ID NO: 20543 - DNA, 987 bp, Homo sapiens
  MAP TO AL049870.3; EXPRESSED IN PLACENTA, SIGNAL = 3.1; EXPRESSED IN ADULT LIVER, SIGNAL = 1.9; EXPRESSED IN HELA, SIGNAL = 2.2; EXPRESSED IN HEART, SIGNAL = 2.2; EXPRESSED IN LUNG, SIGNAL = 2.1; EXPRESSED IN FETAL LIVER, SIGNAL = 1.9; EST_HUMAN HIT: BE833556.1, EVALUE 1.00e-100; SWISSPROT HIT: Q09543, EVALUE 2.00e-03; NT HIT: gi14747442, EVALUE 0.00e+00
gagctgcattcacgattattggatcaggaagactataagaaccggacccaggccgtcgaagaactaaagcaggtgctgggaaaatttaaccctagttctactcctcattctagtcttgttggcttcattagtttgctatataatttgttagacgattctaacttcaaagtggtgcatggcacacttgaagtcctgcatttactggttattcgccttggagagcaggtacagcagttcttgggaccagttatagcagcttctgtcaaagtgctggcggacaacaagttggtgatcaaacaagaatacatgaaaatcttcctcaagctaatgaaggaagtaggacctcagcaggtgctttgtttactcctggaacatctcaaacataagcattccagagtgagagaggaggtggtgaacatttgcatctgctccctgctgacctatcctagtgaggattttgacttgcccaaactgtcctttgatcttgccccagctcttgtagatagcaaacgcagggtacgccaagcagctttagaagcttttgccgtattggcatcatcaatgggctcaggtaaaaccagcatcctttttaaagctgtggatacagttgaactgcaagataatggagatggagtgatgaatgctgtgcaggccagattggctaggaaaaccttaccaaggctcacagagcagggatttgtggaatatgcagtactgatgccatcttctgccgggggtaggtcaaaccatttggcacatggagcagatacggactggcttttggctggtaacagaactcagagtgcacactgtcactgtggtgaccacgtgagggatagcatgcacatttatggatcttacagcccaactatctgtacccgaagggtattaagtgcaggaaaaggaaaaaataaattaccatgggaaaatgagcaacctggaatcatgggagaaaaccagacctccacttccaaggatatagagcag

SEQ ID NO: 20544 - DNA, 745 bp, Homo sapiens
  MAP TO AC006115.1; EXPRESSED IN ADULT LIVER, SIGNAL = 1.4; EXPRESSED IN HELA, SIGNAL = 2.1; EXPRESSED IN LUNG, SIGNAL = 1.2; SWISSPROT HIT: P52740, EVALUE 1.00e-18; NT HIT: gi14768850, EVALUE 0.00e+00; EST_HUMAN HIT: AA065303.1, EVALUE 0.00e+00
agctatgaataaaagattccccacactttggacattcatacagctgctctccagtgtaatctctctgatactcgctgatggaatgggtgtgaattacagaatgtgtgtactcccgactgtcaaccaggcacttcctgctgtggactttctgatggtctgtgaggtctgtgagatccacaaagcccaggccacagtcctcacattcatagattttgtcatcagggtcatccttctgagggtcttccatgtctgagccttgaatgacagggtcttcaattgtctcctgaccatgggtctcctcgctgtgggtctcctccccatcagtattctcgccttgagactcctcgccatgagacttctcttggtcatagattttctggtttgtgttgaggtcttcgctggtagcaaaaaattgtctgaagtccttacatttgttccgcgcttgctctttagcatactgctcttgggcgtaacttgtttgagggtcagtaggggccaagctgcgaatgacagaccattcatagtttctgcttccagagggcttctccctatcatgaatcttctggtgctcagtgaggtcagagctatgagcaaagcactccccacactcctgacattcatagagcatccctcgagggcgaaatgtttgttcaccaaaaggcagagagtgaattacagaggtctcattgctcctatgctcaatgtatttctttttagcacgagccttctggtattcacggacatt

SEQ ID NO: 20545 - DNA, 778 bp, Homo sapiens
  MAP TO AP001669.1; EXPRESSED IN BONE MARROW, SIGNAL = 4.3; EXPRESSED IN ADULT LIVER, SIGNAL =   4; EXPRESSED IN LUNG, SIGNAL = 3.4; EXPRESSED IN HEART, SIGNAL = 3.3; SWISSPROT HIT: P03356, EVALUE 1.00e-38; NT HIT: AF198490.1, EVALUE 0.00e+00; EST_HUMAN HIT: AI267168.1, EVALUE 0.00e+00
aaaacattcgtttatgcactcttttttagttatccccacctgcccagttcccttattaggccaagacattttaactaagttatctgcttccctgactattcctggactacagctgcatctcattgccacccttcttcccaaaccaaagcctcctttccgtcttcctctcatttccccccaccttaacccacaagtatgggacatgtctactccttccctggcaactgatcacatgccccttaccatcccattaaaacctaatcacccttaccccactcaatgccaatatcccatcccacagcaagctttaaaaggattaaagcctgttatcactcgcctgctacagcatgggcttctaaaacctataaactccccttacaattcccccatttcacctgtcctaaaaccagacgtggcttacaggttagttcaagatctgcgccttatcaacaaaattgttttgcctatccaccccgtggtgccaaacccatatactctcctattctcaatacatccctccacaatccattattctgttctagatctcaaacatgctttctttactattcctttgcacccttcatcccagcctctcttcactttctcttggaccgaccctgacacccatcaggctcagcaaatgacctgggctgtactgatgcaagtcttcacagatggcccctattatttcagtcaagcccaaatttcttcctcatctgttacctctcttgacatcataaaaacacatgtgctctccctgctgaccatgtccggctaa

SEQ ID NO: 20546 - DNA, 582 bp, Homo sapiens
  MAP TO AL022101.1; EXPRESSED IN ADULT LIVER, SIGNAL = 2.1; EXPRESSED IN BRAIN, SIGNAL = 1.9; EXPRESSED IN HELA, SIGNAL = 2.5; EXPRESSED IN BONE MARROW, SIGNAL = 2.3; EXPRESSED IN LUNG, SIGNAL = 2.2; EXPRESSED IN HEART, SIGNAL = 2.5; SWISSPROT HIT: O60813, EVALUE 1.00e-104; NT HIT: gi16167544, EVALUE 9.00e-06; EST_HUMAN HIT: BE409930.1, EVALUE 8.00e-04
gagatggaaacttcaagtgctggatttacaggatgtctgtgagaacttctggatggtttggtctgaagctatggcccatgggtgcttcctcaatgccaagaggaacaaaacaccagtgcaggactgtccaaggatgagagaacggcagcccttgactgtgtttgtagaactttggctcaagaacaggactctggatgaatacctcacctgcctccttctatgggtcaagcagaggagagatttactacacctgtgctgtaagaagctgaaaattttgggaatgcccttccgcaatatcagaagcatcctgaaaatggtgaacctagactgtatccaggaggtggaagtgaattgcaagtggatactgcccatcctgacacagtttaccccatacctgggccacttgaggaatcttcagaagctcgttctctcccacatggatgtctctcgctacgtttccccagagcagaagaaggagattgttacccagttcaccactcagttcctcaagctgcgctgcctccaaaagctttatatgaactctgtttctttcctcgaaggccacctggaccagctgctcag

SEQ ID NO: 20547 - DNA, 478 bp, Homo sapiens
  MAP TO AF129756.1; EXPRESSED IN ADULT LIVER, SIGNAL = 1.6; EXPRESSED IN BRAIN, SIGNAL = 4.3; EXPRESSED IN HEART, SIGNAL = 3.7; EXPRESSED IN LUNG, SIGNAL = 2.9; EXPRESSED IN BONE MARROW, SIGNAL = 3.1; EXPRESSED IN HELA, SIGNAL = 3.1; SWISSPROT HIT: P48634, EVALUE 1.00e-44; NT HIT: gi14782330, EVALUE 0.00e+00; EST_HUMAN HIT: BE299094.1, EVALUE 0.00e+00
cttcggttcttgggagagggccagctcctcttgtcgcctcgtcctggcccggtccttcctccaggacccccaccgcctcctccactgctgctgccactgctgccagccttgccccctgggccagggcgccgattctgccgttccatgcctggccgctgacttgagaagctccgtttactcaaatccttggctctctggctcagatctccgcgggacatggctgaaatacctggtacggctccacctccacctcccccaggagttcccacagccttgggtgtcagcagtactggtgggggtgcctctttgtcccctcggcgctcactggtgaagtcactgctctctgatgcagtctcccattcctcattggcttggtctgagttctggtttgacagatcaggagacttggcagctgcccggcgaggtgctggggccactgtgactgttgtgagggcctcctcaggtgcaggagcggagg

SEQ ID NO: 20548 - DNA, 597 bp, Homo sapiens
  MAP TO AL139412.2; EXPRESSED IN ADULT LIVER, SIGNAL = 1.3; EXPRESSED IN BONE MARROW, SIGNAL = 1.1; EXPRESSED IN BRAIN, SIGNAL = 1.2; EXPRESSED IN HELA, SIGNAL =   2; SWISSPROT HIT: P45577, EVALUE 2.30e-01; NT HIT: AB042999.1, EVALUE 3.00e-21; EST_HUMAN HIT: AW327714.1, EVALUE 0.00e+00
ctaaaagtttcctcacctctatcttctaggttcaagtcctcctcctcctgttgctgcctcttctttcttcggctgcatgggtcagcatatgccctgctctctacctcctctgtcctgacactgcctgcagcctccttgccttttcctccttcctccaagacccccatcttctcctcttcatggtgccacctcttctttttcttccctttcctgagggactgattggtttgctctctgctattcaattccccaagcccacttgttcctgcagcgtcctccttctcattccctttagttgtaccctctctttcatctgagacctttccttcttgatgtcgccttttcttcttcttgctttttctgatgttctgctcagcatgttctgggtgcttctcatctgcatcattcctttcagatgctgtagcttcttcctcctctttctgcctccttttctttttcttttttttggggggcttgctctctgactgcagttgaggggccccagggtcctggcctttgagacgagccaggaaggcctgctcctgggcctctaggcgagcaagcttggccttcattgtgatcccaagacgggcagcc

SEQ ID NO: 20549 - DNA, 623 bp, Homo sapiens
  MAP TO AL034450.1; EXPRESSED IN BRAIN, SIGNAL = 1.3; EXPRESSED IN ADULT LIVER, SIGNAL = 1.6; EXPRESSED IN PLACENTA, SIGNAL = 1.6; EXPRESSED IN HELA, SIGNAL =   2; EXPRESSED IN LUNG, SIGNAL = 1.6; EXPRESSED IN FETAL LIVER, SIGNAL = 1.5; EST_HUMAN HIT: BG167829.1, EVALUE 0.00e+00; SWISSPROT HIT: P40618, EVALUE 9.00e-80; NT HIT: gi12719155, EVALUE 0.00e+00
ggaacaatacagtcaggatggctgaaggtgaccacaagaaaccaaagggcaagatgtctgcttatgccttctttgcgcagacatgcagagaagaacataagaagaaaaacccagaggtccctgtcaattttgtagaattttccaagaagtgctctgagaagcggaagaccatgtctgggaaagagaagaccaaatttgatgaaatggcaaaggtggataaagtacactatgatcaggaaatgaaggataatggaccagttgagggaggcaagaagaaggaccctaatgccctcaaaaggccactgtctggattcttcctgttctgttcagaattccaccccaagatcaaatccacaaatcctggcatctctattggagacatggcaaaaaagctgggtgagatgtggattaactatagtgacagggaaaagcagccttacatcactaaggcagcagacctgaaggagaagtatgagaaggatgttgctgactataagtctaaaggaaagtttgatagtgcaaagggtcccactaaaattgcctggaaaaaggtgaaagagaaagacaaagaagatgaggaggaagaagaggaggaggaagagaagaaggaggagggggaataa

SEQ ID NO: 20550 - DNA, 1326 bp, Homo sapiens
  MAP TO AP000529.1; EXPRESSED IN BRAIN, SIGNAL = 8.8; EXPRESSED IN LUNG, SIGNAL =  18; EXPRESSED IN HEART, SIGNAL =  18; EXPRESSED IN ADULT LIVER, SIGNAL =   6; EXPRESSED IN PLACENTA, SIGNAL = 6.8; EST_HUMAN HIT: AL517640.1, EVALUE 0.00e+00; SWISSPROT HIT: P02570, EVALUE 0.00e+00; NT HIT: AY014272.1, EVALUE 0.00e+00
ctagaagcatttgcggtggacaatggaggggcctgactcatactcctgcttgctgatccacatctgctggaaggtggacagcgaggccaggatggagccaccgacccacacggagtacttgcgcttgggaggagcaacaatcttgatcttcatcgtgctaggcgctagggcagcgatctccttctgcatcctgtgggcaatgccagggtacatggtggtgccaccagatagcactgtgttggtgtacaggtctttgtggatgtccacatcagacttcatgatagagttgaaggtagtttcgtggatgccacaggattccatgcccaggaagcaaggctggaagagcacctcggggcagcggaaccgctcgttgctaatggtgatgacctggccgttgggcagctcatagctgttctctagggaggagctggaggccgctgtggccatctcctgctcgaagtccagggcaacatagcacagcttctctgtgatgtcacgcacgatttcctgctcggccatggtggtgaacctatagccacgctcggtgaggatcttcatgaggtagtcagtcagttcccggccatccaggtctaggcgcagggtggcatgggggagggcattcccctcatagatgggcacagtgtgggtgaccccgtcaccagagtccatcacaatgccagtagtacggccagaggtgtacaaggacagcacggcttggatggccacgtacatggctggggtgttgaaggtctcaaacatgatctgggtcatcttctcacggttggccttggggttcaggggtgcctcggtcagcaggatggggtgctcctcgggagccacacgcagctcattgtagaaggtgtggtgccagatcttctccatgtcgtcccagttggtgatgatgccgtgctccatggggtacttcagggtcaggatgcctctcttgctctgggcctcattgcccacataggactccatctgacgcatgccccccatcatgttctggtgcctggggcaccccacgatggaagggaagacagcccggggggcatcgtcacctgcaaagccggccttgcacatgccagagccgttgtcaatgacgagcacggcagtatcatcatccatggtgagctcattcagttgtagaccctttaaaagattatcattctttttttccacactttcaatttcctccaaatatttcttttctcttagctggctctgatgtttcattatgtctagttccagtcttagcatgacaatttcttcctgcaacgtactattttcatgcaagaggtctttttctttcttataactaagagaaag

SEQ ID NO: 20551 - DNA, 931 bp, Homo sapiens
  MAP TO AC011551.3; EXPRESSED IN LUNG, SIGNAL = 7.7; EXPRESSED IN HEART, SIGNAL =  20; EXPRESSED IN PLACENTA, SIGNAL = 6.9; EXPRESSED IN BRAIN, SIGNAL =  15; EXPRESSED IN ADULT LIVER, SIGNAL =  12; EXPRESSED IN HELA, SIGNAL =  20; EXPRESSED IN BONE MARROW, SIGNAL =  20; SWISSPROT HIT: P04406, EVALUE 5.00e-97; NT HIT: gi16187805, EVALUE 0.00e+00; EST_HUMAN HIT: AL515633.1, EVALUE 0.00e+00
ttactccttggaggccatgtgggccatgaggtccaccatactgttgctgtagccaaattcatcgtcataccaggaaatgagcttcacaaagtggttgttgagggcaatgccagccccagcattgaaggtggaagagtgggtgtcgctgtcgaagtcagaggagacgacctggtgctcactgtggcccaggatgcccttgagggggtcctccaatgcctgcttcatcattttcttgacatcatcatatttggcagggttttcccagatggcaggtcaggtccatgaccaacacgttggcagtggggatatggaaggccatgcctatgagcttcccattcagctcaaggatgaccttgcctacagccttggcagtgccagtagaggcacggatgatattctggagagtccgacggccatgatgctacagtttcccggaggggccatccacagtcttctgggtggcagtaatggcgtggactgtggtcatgagtccttccacgataccaaagttgtcatgggtgaccttggctggggcactaagcagttggtggtgcaggaggcattgctgatgatcttgaagctgttgtcatacttctcgtggttcatgcccatcacgaacatgggagcgtcagaagagggggcagagatgataacccttttggctcctccctgcaagcgagccccagccttcttcctggtggtgaagatgccggtcgactccatgatggactcagcaccagcattgccccatttgattttggaggggtctcgcacctcgaaaatggtgatgggatttccattgatgacaagcttcccgttctcagccttgatggtgccatggaatttgccatgggtggaatcatactggaacatgtagaccatgtagttgaggtcaatgaaggggtcattgatggcaacaatatctacttta

SEQ ID NO: 20552 - DNA, 563 bp, Homo sapiens
  MAP TO AC007059.1; EXPRESSED IN ADULT LIVER, SIGNAL = 1.9; EXPRESSED IN HELA, SIGNAL = 3.5; EXPRESSED IN LUNG, SIGNAL = 2.2; EXPRESSED IN HEART, SIGNAL =   2; EXPRESSED IN BRAIN, SIGNAL = 1.9; SWISSPROT HIT: P37370, EVALUE 1.40e-02; NT HIT: AB012266.1, EVALUE 1.00e-118; EST_HUMAN HIT: BG394356.1, EVALUE 0.00e+00
ctgaggtcccgaccctcccagcgccagaacctccctcggctcttgggacccacactcactgaggttcaagggcccctcatcctcagactgaggccactgtgcctttggggaggccggccgggggctcagggacagctgggggctcttgtcctcaggattcttaggggtaggggagcccgccagggccagtggtgtctttttgaggagtggagagctgggcgggtggcccaggcccttggccgagaagccgggaggcgacttgatggctttgttgacagcaggggcatccaagggcttggccaggctgagcaagccgggccggggggccccggcgaccacctccttcagtgagctggacttcttagccaggcctgggggcagcccaaggtgggcgtcaggcagacccttctgcttcacaagctcgtagaggaggtcgatgggtgcgccgctgctttccgactctgccactcccagctgccgcaggtgggagcgcgcgtggctggacaggccctttcgggtctcaaagcaggcaccgcagacctcgcaggtggtcaggctctggg

SEQ ID NO: 20553 - DNA, 471 bp, Homo sapiens
  MAP TO L44140.1; EXPRESSED IN BRAIN, SIGNAL = 0.92; EXPRESSED IN HELA, SIGNAL = 0.92; EXPRESSED IN BONE MARROW, SIGNAL =   1; EXPRESSED IN LUNG, SIGNAL = 0.96; EXPRESSED IN ADULT LIVER, SIGNAL = 1.3; SWISSPROT HIT: P21333, EVALUE 5.00e-51; NT HIT: L44140.1, EVALUE 0.00e+00; EST_HUMAN HIT: BI907596.1, EVALUE 0.00e+00
gccagccagccagcccgcgcgcctttgttctgcaggcccgcgtggagcagagcagccggaggcctcgggagttgcgctgcggcccggaagggggtggtttggaggggtccgcccggggagatggaaggacgcacggagtccccgcccccgcccgcccggcgcttcggggcgtccctcaccgatggacaccagtttgatgctctcgcggtccaggaactcgagcgccaccgacacgttctcaagctgcatttggcggaaagtgggccgctggttgtgcttgcggtgcatcttcttctggctgagcacctccaacagcgcgataagccgcagcccgtcgctcaggtccgtctgcaggttggcgatgcgcttgctcacgcacttcaggtgctcgttgcaccagcgcgtgaaagtgttctgctggatcttcttccacggcgcgtcctccgccaggtccttctcggtggccggcat

SEQ ID NO: 20554 - DNA, 1502 bp, Homo sapiens
  MAP TO AF205588.1; EXPRESSED IN ADULT LIVER, SIGNAL = 2.1; EXPRESSED IN BRAIN, SIGNAL = 1.8; EXPRESSED IN HELA, SIGNAL = 1.5; EXPRESSED IN BONE MARROW, SIGNAL = 1.7; EXPRESSED IN LUNG, SIGNAL = 1.7; EXPRESSED IN FETAL LIVER, SIGNAL = 1.9; EST_HUMAN HIT: AV707288.1, EVALUE 0.00e+00; SWISSPROT HIT: Q06730, EVALUE 0.00e+00; NT HIT: AJ245587.1, EVALUE 0.00e+00
tcaggatgttgaaagagctttcacccttgtgtgaattctctgatgtttggtgagcactgacctctgactaaaggtcttcccacatgcattacactcatacggcttctcccctgtgtgagtcctctgatgtttagtgagagctgatttttcacagaaggttttcccacattcattacacttatatggtttctccccagtgtgagttctttgatgtacaatgaggtttgacttcacacagaaggattttccacattcattacatataaacggtttctcccctgtgtgtgttctctgatgcacagtgagggctgatctgtggcagaaggatttcccacatgcattacattcatagggcttctcccctgtgtgtgttctctgatgttcagtgaggtttgacttcacacagaatgtttttccacattgcttacattcatagggtttttctcctgtatgtgttcgctgatggttggtcaggtgtggtttctggcaaaaggctttcccacattcagtacattcatagggcttctctcctgtgtgtgttctctgatgttgagtgaggtttgacttctcccagaaggttttcccacattcaccacattcaaaggttttttctcctgtgtgagctctccgaagctgggtaagatgtgacttcttgctgaaattactcccattttcattgtaatcataagactttccccccatgtgtactatttgatgttttaagagagctgacttttcccaggttttgtcactcactttatattcacggagaatctttcttgtgtaagctccctgatggataatgaaagctgaattgtcacagaagatttccccatattcattatattcataaggattgtcctttgtaagagctctctgatgtccaaaccttaaattcatgcagaaggacttcccgcaaatactgcatccatacggctccatttccaaatgaggtctttgagatatattcagctttaaactttcaatgaaggttcttccacattcgttatatttacagactgtctctcctatctgagatctcttatttgtaaaaaatgctgcctcatcatggaacccttgtccatttttactatactcaaaagattggccaaaacttggctgactgagatcctggtgataattaatgccattccttttttgatcatatttataagacttctctccaatagggattttctcatgcctaataccaaggagcaatttctcacatacattaaactcatcaggcttctttctggaacagttctttttactaataattaagcccgaaatatttttcaaattcatttcacatgagtcacatattttatagggataatttcttaaagaaacagggtctgtgcccaaattgaaagttttgcttcctctatctccattttctacacttactgttttgttgttgtggaatagaagctcccaaaaatggtcatcttcattttcctggctgctctctaacacgtcatcaactttccatttccttt

SEQ ID NO: 20555 - DNA, 737 bp, Homo sapiens
  MAP TO AC007326.28; EXPRESSED IN PLACENTA, SIGNAL = 1.9; EXPRESSED IN LUNG, SIGNAL = 1.7; EXPRESSED IN BONE MARROW, SIGNAL = 1.6; EXPRESSED IN FETAL LIVER, SIGNAL = 1.6; EXPRESSED IN ADULT LIVER, SIGNAL = 1.7; EXPRESSED IN BRAIN, SIGNAL = 1.3; EXPRESSED IN HELA, SIGNAL = 1.4; SWISSPROT HIT: P10263, EVALUE 1.00e-105; NT HIT: Y08032.1, EVALUE 0.00e+00; EST_HUMAN HIT: AI635368.1, EVALUE 0.00e+00
tatggaatgattgggccattattaaagcagctttagaaccatttcaaacagaagaagatagcgtttcagtttctgatgcccctggaagctgtttaatagattgtaatgaaaagacaaggaaaaaatcccagaaagaaacggaaagtttacattgcgaatatgtagcagagccggtaatggctcagtcaacgcaaaatgttgactataatcaattacaggaggtgatatatcctgaaacgttaaaattagaaggaaaaggtccagaattagtggggccatcagagtctaaaccacgagggacaagtcctcttccagcaggtcaggtgcccgtaacattacaacctcaaaagcaggttaaagaaaataagacccaaccgccagtagcctatcaatactggcctccggctgaacttcagtatcggccacccccagaaagtcagtatggatatccaggaatgcccccagcaccacagggcagggcgccataccctcagccgcccactaggagacttaatcctacggcaccacctagtagacagggtagtgaattacatgaaattattgataaatcaagaaaggaaggagatactgaggcatggcaattcccagtaacgttagaaccgatgccacctggagaaggagcccaagagggagagcctcccacagttgaggccagatacaagtctttttcgataaaaatgctaaaagatatgaaagagggagtaaaacagtatgga

SEQ ID NO: 20556 - DNA, 1725 bp, Homo sapiens
  MAP TO AC011538.5; EXPRESSED IN ADULT LIVER, SIGNAL = 1.2; EXPRESSED IN BONE MARROW, SIGNAL = 0.95; EXPRESSED IN LUNG, SIGNAL = 1.2; EXPRESSED IN FETAL LIVER, SIGNAL = 0.98; EXPRESSED IN BRAIN, SIGNAL = 0.84; SWISSPROT HIT: Q05481, EVALUE 0.00e+00; NT HIT: gi4758513, EVALUE 0.00e+00; EST_HUMAN HIT: BG617080.1, EVALUE 0.00e+00
atgtgtcctcattttgctcaagacctttggccagagcagggcatggaagattcttttcaaaaagcaatactgagaagatatggaaaatatggacatgagaatttacagttaagaaaaggctgtaaaagtgtggatgagtataaggtgaacaaagaaggttataatggacttaaccagtgtttcacaactgcccagagcaaagtatttcaatgtgataaatatttgaaagtcttctataaatttttaaattcaaacagacctaagataagacatactgaaaagaaatctttcaaatgtaaaaaacgtgtcaaattattttgcatgctttcacataaaacccaacacaaaagcatttatcatagagagaagtcctacaaatgtaaagaatgtggaaaaacctttaattggtcctcaacccttactaatcataggaaaatttatactgaagagaaaccttacaaatgtgaagaatataacaaatctcctaagcaactctcaacccttactacacatgaaataattcatgctggagagaaactctacaaatgtgaagaatgtggtgaagcttttaatcgatcctcaaatcttactacacataagataattcatactggagagaaaccttacaagtgtgaagaatgtggcaaagcatttatctggtcctcaacccttactgagcataagaaaattcatactagaaagaaaccctacaagtgtgaagaatgtggcaaagcatttatatggtcctcaacactaactagacataagaggatgcacactggagagaaaccctacaaatgtgaagaatgtggcaaagcttttagccagtcctcaacccttactacacataagataattcatactggagagaaacgctacaaatgcttagaatgtggcaaagcttttaagcaactctcaactcttactacacataaaataattcatgttggagagaaactctacaaatgtgaagaatgcggcaaaggttttaatcgatcttcaaatcttactacacataagataattcatactggagagaaaccttacaagtgtgaagaatgtggcaaagcatttatctggtcctcaacccttactaaacataagagaattcatgctagagagaaaccctacaaatgtgaagaatgtggcaaggcatttatatggtcctcaaccctaactagacataagaggatgcacactggagagaaaccctacaaatgtgaagaatgtggcaaatcttttagccaatcctcaacccttactacacataagataattcatactggagagaaaccctacaaatgtgaagaatgtggcaaagcctttaactggtcctcaactcttactaaacataagataattcatactgaagagaaaccctacaaatgtgaaaaatgtggcaaagcctttaagcagtcttcaatccttactaaccataagagaattcatactggagagaaaccctataaatgtgaagaatgtggcaaatcttttaaccggtcttcaacttttactaaacataaggtaattcatactggagtaaaaccctacaaatgtgaagaatgtggcaaagcatttttctggtcctcaaccctaactaaacataagagaattcatactggagagcaaccctacaaatgggaaaaatttggcaaagcctttaatcggtcctcgcacctcaccacagataagataactcattggagagaaatcttacaagtatga

SEQ ID NO: 20557 - DNA, 770 bp, Homo sapiens
  MAP TO AL009182.12; EXPRESSED IN HEART, SIGNAL = 1.6; EXPRESSED IN FETAL LIVER, SIGNAL = 1.2; EXPRESSED IN ADULT LIVER, SIGNAL = 1.2; EXPRESSED IN PLACENTA, SIGNAL = 1.7; EXPRESSED IN HELA, SIGNAL = 1.5; SWISSPROT HIT: Q21313, EVALUE 3.10e-01; NT HIT: gi14736714, EVALUE 0.00e+00; EST_HUMAN HIT: BG338751.1, EVALUE 0.00e+00
aaaatgaagaatctgacgtaaagcctccagactggccaaacccaatgaatgctacctcccagtttcctcagcctcagcactttgacagctttggcctccgtctgcctcgggatatcacagagctgcccgagtggagtgaggggtaccccttctacatggccatgggcttcccagggtatgacctctcggctgatgacatagctgggaagtttcagttcagccggggcatgcgccgcagttacgacgcagggttcaagctgatggtagtggaatatgctgagagtaccaacaactgccaggctgccaagcagtttggagtattggaaaaaaacgttcgagactggcgcaaagtgaagccacagcttcaaaacgcccacgccatgcggcgggcattccgaggccccaagaatgggaggtttgctctggtggaccagcgtgtggccgaatatgtcagatacatgcaggccaaaggggaccccatcacccgggaggcgatgcagctgaaagctctcgaaatcgcccaggaaatgaacattccagagaaagggttcaaggcaagcttgggttggtgtcgaagaatgatgagaaggtatgacctgtctctgaggcataaagtgcccgtgccccagcacctgccggaagacctgactgagaaactcgtcacttaccagcgcagtgtcctggctctgcgcagggcgcatgactatgaggtagctcagatggggaatgcagatgagacgcccatttgtttagaggtgccatcacgggta

SEQ ID NO: 20558 - DNA, 519 bp, Homo sapiens
  MAP TO Z97055.1; EXPRESSED IN ADULT LIVER, SIGNAL = 2.9; EXPRESSED IN PLACENTA, SIGNAL = 4.6; EXPRESSED IN BRAIN, SIGNAL =   4; EXPRESSED IN HELA, SIGNAL = 2.4; EXPRESSED IN BONE MARROW, SIGNAL = 3.6; EXPRESSED IN LUNG, SIGNAL = 2.7; EXPRESSED IN HEART, SIGNAL = 2.9; EXPRESSED IN FETAL LIVER, SIGNAL = 2.6; SWISSPROT HIT: P26515, EVALUE 4.20e-01; NT HIT: AL163210.2, EVALUE 2.00e-74; EST_HUMAN HIT: BI022322.1, EVALUE 1.00e-103
agaacagactaatacagtaaattggtaccacagagagtggggtgctgccataaagatacccaaaaatgtggaagagacattggaactgggtgataggcagaggttggaagtttggagggccaagaagaagacgggaatatgtaggaaagtttcaaacttcctagagacttgttggatggttttggccaaaatgctgatagtgatatggacaatgaaatccacgctgaggtggtctcagatggagatgaaaaacttcatgggaactggagcaaaggtgactcttgccatgctttagcaaagagactggtggcattttgcccctcccctaaagatctatggaattttgaactagagagagatgatttaaggtatctggtgaaagaaatttctaaacagcaaagtgttcaagaggaagcagggcataaaagtttggaaaatttgcagcctaatgatgtgatagaaaaaccccattttctggggagaaattcaagctggctacagaaatttgcaaaagtaaca

SEQ ID NO: 20559 - DNA, 475 bp, Homo sapiens
  MAP TO AF109907.1; EXPRESSED IN HEART, SIGNAL = 1.9; EXPRESSED IN BRAIN, SIGNAL = 1.4; EXPRESSED IN LUNG, SIGNAL = 4.2; EXPRESSED IN BONE MARROW, SIGNAL =   2; EXPRESSED IN HELA, SIGNAL = 1.1; EXPRESSED IN ADULT LIVER, SIGNAL = 1.9; EST_HUMAN HIT: AL541223.1, EVALUE 0.00e+00; SWISSPROT HIT: P49757, EVALUE 2.00e-92; NT HIT: AF109907.1, EVALUE 0.00e+00
aagggttggtaggggagggattagtacgctgcttggacttgttttctaatgcagcccactgggcttcaaaaggatccactgggcaggtgcctgtaggaacctctgtatgcctgtctgctgaggccaacctgccatcatctacaccattgaaagctgcagaaccgttgaggtgctgagcaggaggcttaaagaagggactggtggtagcactgcttgcctcgtagtgagggaatgtctgctgcctgaccaggctgggtgactgatggggatgggcagcctgagggtggcctgcagtgccaaatacgttggccaccatctgggagggagtgatgcccaccacaggcacattaggggctggatagggcattccattggccacaggataggactgggcagggacaaaggctggttgcagggctgggaccacacccactggcacaggctgagaggtgaggaatgcattcccttggaaagg

SEQ ID NO: 20560 - DNA, 572 bp, Homo sapiens
  MAP TO AL163204.2; EXPRESSED IN ADULT LIVER, SIGNAL = 1.4; EXPRESSED IN BRAIN, SIGNAL = 1.6; EXPRESSED IN BONE MARROW, SIGNAL = 1.3; EST_HUMAN HIT: AL530855.1, EVALUE 0.00e+00; SWISSPROT HIT: P17221, EVALUE 2.00e-21; NT HIT: AL163204.2, EVALUE 0.00e+00
atggcggcgagggagacggtgaaggttggctcccgcctgtctgggctctgatcctctgtctccccctccccctgcggccggctcatggcctggcggaggcccgaaccaaagacctccgcaccgccgtgtacaacgccgcccgtgacggcaagggggcagctgctccagaagctgctcagcagccggagccgggaggaactggacgagctgactggctaggtggccggcggggggacgccgctgctcatcgccgcctgctacggccacctggacgtggtggagtacctggtggacccgtgcggcgcgagcgtggaggccggtggctcggtgcacttcgatggcgagaccatggagggtgcgccgccgctgtgggcgcggaccacctggacgtggtgcggagcctgctgcgccgcggggcctcggtgaactgcaccacgcgcaccaactccacgcccctccgcgccgcctgcttcgagggcctcctggaggtggtgcgctacctggtcggcgagcaccaggccaacctggaggtggccaaccggcacggccacatgtgcctcatgatctcgtgc

SEQ ID NO: 20561 - DNA, 573 bp, Homo sapiens
  MAP TO AC005618.1; EXPRESSED IN ADULT LIVER, SIGNAL = 1.3; EXPRESSED IN BONE MARROW, SIGNAL = 2.2; EXPRESSED IN LUNG, SIGNAL = 1.4; EXPRESSED IN HELA, SIGNAL = 0.99; NT HIT: gi14861871, EVALUE 0.00e+00; EST_HUMAN HIT: AL538057.1, EVALUE 0.00e+00; SWISSPROT HIT: Q01356, EVALUE 2.00e-15
atagccaccaaagaaaaagaaataacccggtacttcttgaagtagagtactcgagagtccatggtagaagcccaaggggccatcctttttaaggatacccttcacgacagaccaaattgtattatggctttttgctatcttccctgacatctccatttcatacatggtctgtagccggcacttcacaagctcagtggggcagagagccagtgcagcaaatgcagaggcgaaggaccccgcggctgcagtctggagatcactcagctttgcctgcttgtccattccagccactttcctgacaaactgctggcagaacccgtagcacatgaagaggaccgagttttcggcgacgtaggccataagtgccgggccggtgcccttgtagaagccccggagacccacttgggcgtatgtcttcaggaagcagtcggtgaggcccttgtacaggtcagggaacgtctgcatcttcacttttattgtgtcgaagggctgcccagtcagtacacacgctgtcccccctgcggcccccgctgtgaggtcgatggcggcttggatgccaggaccggacttcat

SEQ ID NO: 20562 - DNA, 687 bp, Homo sapiens
  MAP TO AP001760.1; EXPRESSED IN HEART, SIGNAL = 1.7; EXPRESSED IN BONE MARROW, SIGNAL = 1.9; EXPRESSED IN LUNG, SIGNAL = 1.7; EXPRESSED IN ADULT LIVER, SIGNAL = 2.1; EXPRESSED IN BRAIN, SIGNAL = 1.7; EXPRESSED IN HELA, SIGNAL = 1.1; SWISSPROT HIT: O95613, EVALUE 1.00e-107; NT HIT: gi16166512, EVALUE 0.00e+00; EST_HUMAN HIT: AW816925.1, EVALUE 0.00e+00
gagctgcgggcgtctttggagacacagcgtgctcagagcagtcgactctgcgtggcactgaaacacgagcagacggccaaggacaacctgcagaaggagctgcgtatcgagcactcacgctgcgaggccttgctggctcaggagcggagccagctctctgagctccagaaggaccttgcggctgagaagagccgcaccctggagctgtcagaggccttgcggcacgagcggctcctgaccgagcagctgagccagaggacacaggaggcttgcgtgcaccaggacacacaggcccatcacgctctgctgcagaagctgaaggaggagaagtcccgggtggtggacttgcaagcgatgcttgaaaaggtgcagcagcaagccctgcattctcagcagcagcttgaggctgaggctcagaagcactgtgaggcgctcaggagagagaaggaggtaagtgccacactgaagtcgacggtggaagccctgcacacccaaaaacgagagctgagatgctctctggagagagagagggagaaaccagcgtggttgcaggcagaattagagcagtcacacccacggttgaaagagcaagaaggacgcaaggctgcgaggaggagcgcggaggccaggcagagcccagcggctgcggagcagtggaggaagtggcagagagacaaggagaagctg

SEQ ID NO: 20563 - DNA, 554 bp, Homo sapiens
  MAP TO AC006445.10; EXPRESSED IN HELA, SIGNAL = 0.85; EXPRESSED IN ADULT LIVER, SIGNAL = 1.2; EXPRESSED IN BRAIN, SIGNAL = 1.3; EXPRESSED IN HEART, SIGNAL = 1.2; EXPRESSED IN LUNG, SIGNAL = 1.1; EXPRESSED IN BONE MARROW, SIGNAL = 1.3; EXPRESSED IN FETAL LIVER, SIGNAL = 1.3; SWISSPROT HIT: P78367, EVALUE 6.00e-48; NT HIT: AF009802.1, EVALUE 0.00e+00; EST_HUMAN HIT: AW001138.1, EVALUE 3.00e-06
gcgaccgcagcccaaggaccgaggacgacggtgttggccccagaggtgcacacgtgtccgcgctgtgcagcggggccggcggcgggggcggcagcgggccggcaggcgtcgcggaggaggaggaggagccggcggcgcccaagccacgcaagaagcgctcgcgggccgctttctcccacgcgcaggtcttcgagctggagcgccgctttaaccaccagcgctacctgtccgggcccgagcgcgcagacctggccgcgtcgctgaagctcaccgagacgcaggtgaaaatctggttccagaaccgtcgctacaagacaaagcgccggcagatggcagccgacctgctggcctcggcgcccgccgccaagaaggtggccgtaaaggtgctggtgcgcgacgaccagagacaatacctgcccggcgaagtgctgcggccaccctcgcttctgccactgcagccctcctactattacccgtactactgcctcccaggctgggcgctctccacctgcgcagctgccgcaggcacccagtgaacccgcttgggctgaggc

SEQ ID NO: 20564 - DNA, 1218 bp, Homo sapiens
  MAP TO AC004520.1; EXPRESSED IN BRAIN, SIGNAL = 1.1; EXPRESSED IN HELA, SIGNAL = 0.84; EXPRESSED IN ADULT LIVER, SIGNAL = 1.2; EXPRESSED IN LUNG, SIGNAL =   1; SWISSPROT HIT: Q14494, EVALUE 2.00e-72; NT HIT: gi14751668, EVALUE 0.00e+00; EST_HUMAN HIT: AW963629.1, EVALUE 0.00e+00
tcactttctctttcccttttgggtttcctttttgtggcctgaggccaccagttctttgggtactatcaagatacttccatcatgggtacactggagagcatagtggttgggattgactggcctaccttggtcatctcttaatctactaaaaatatcatgataaaggtcatgcagtttctgtttcattatgttaatagctttgttacattgtgcttgctctctcttaagagtttccttctttgcttgcaagttacatacatcatcttctaaattcaaaattatgtccaatttgcgtttacgacagttctgcgcagcaactttatttttccctcttcgtctgatgtcacggataagtgagacttgtaggtctgtcagataatatctacttaacatgctattgaaagaatcaacaggcatgccgacaatttcatctacagaaaaagggatatgcaaagctttagcacgctgttcatcacggctcaagtttctatctgtgtcttcaaggtatctactccttatcttctgtgacttcccaggccacggaaaaggttcagaagtagattctggtgcagttggctgtaagtggtaagtgtggttatgaaatacgtgttgaaatgtaagatctccatggaaatcagaatcactttgatccaagtgacaaagcttactgggttctgggtagtagccacctacagcaccttctaagtcatgatgggaactagattcatggtcagtgcaataacctatagcaccttcatcacacacagagtgagaggaattagacttgatgacagaggtattattgtgacttgaatctaaagaaaggccagaatcagaatctggttcatcaaaaagctgagaaacatcgattggatcaaagttgtcttctgtggccaatgacattaagtttatctcatcaaatatatttatgtcaaggtcatacagtaggtcttggcttgttagattcctcatatgattgtcaaccggtgaaagaaatcctgtcaaattagttccaggaagggtttgctcaggattggtggtatgagaatttaactgcagaaatggttcttgtgactgtgaagtccttgctgttggatctcttctaaatgtattgttgggacaaagcaagatggcctcatgaagattcacatcctgacttatagcctggctgaagtttacatgataatgtgctgaagaattcatgccatcactgatact

SEQ ID NO: 20565 - DNA, 988 bp, Homo sapiens
  MAP TO AC010609.5; EXPRESSED IN FETAL LIVER, SIGNAL = 2.5; EXPRESSED IN PLACENTA, SIGNAL = 2.5; EXPRESSED IN BRAIN, SIGNAL = 3.1; EXPRESSED IN ADULT LIVER, SIGNAL = 3.6; EXPRESSED IN HELA, SIGNAL = 6.1; EXPRESSED IN LUNG, SIGNAL = 3.7; EXPRESSED IN BONE MARROW, SIGNAL = 3.7; SWISSPROT HIT: P26368, EVALUE 1.00e-03; EST_HUMAN HIT: BI828956.1, EVALUE 3.00e-54
gctgcagagctccacagagaaggggatcagagtgagactgggctctacaagccttgtgatgtatctgcagccacctcttctgcttatgctgggggagagggaatccaacatgcctcccacggaacggctagtgcggcttctccatccacgagcactccaggggctgctgaaggaggagcagcaaggacagcaggtggcatggcagtggcaggaacagcaacaggacctagaacagatgtggcaatagcaggggcagcaatgagtcctgcaacaggtgctatgagcatagcaacaaccaaatctgcaggcccaggtcaagtgaccacagcgctggcgggagcagctatcaaaaatccaggagaaaatgaatccagcaagtccatggcaggtgctgccaacatatcctcagagggtattagcttggccttggtgggtgctgcaagcacctccttggaaggtacttccacctcgatggcgggggccgccagtctctcccaagacagcagcttgagtgcggcgtttgcaggcagtattacgaccagcaagtgtgcagcagaaagaactgaaggaccagcagtgggacccctcatctccaccttgcaaagcgaaggctacatgagtgaacgagatggaagccagaaagtttcccagcccagtgctgaagtctggaatgaaaacaaggaaagaagagaaaagaaggacagacatcccagtaggaaaagttctcatcaccgcaaggcaggtgaaagtcaccgcaggagagcgggggacaagaatcagaaagcgtcttcccaccggtccgcatctggccataaaaacacgagagatgacaaaaaagaaaaagggtacagcaacgtaaggggcaagcgacatggctcctctcgcaagagctccacccacagctccaccaaaaaggagtcgagaacaactcaggaactggggaagaaccaatctgcatctagcacaggagctttacaaaagaaagcca

SEQ ID NO: 20566 - DNA, 648 bp, Homo sapiens
  MAP TO AC002347.1; EXPRESSED IN LUNG, SIGNAL = 1.4; EXPRESSED IN BONE MARROW, SIGNAL = 1.6; EXPRESSED IN FETAL LIVER, SIGNAL = 1.8; EXPRESSED IN ADULT LIVER, SIGNAL = 1.5; EXPRESSED IN BRAIN, SIGNAL = 1.4; EXPRESSED IN HELA, SIGNAL =   2; EST_HUMAN HIT: F00884.1, EVALUE 8.00e-63; SWISSPROT HIT: P11055, EVALUE 1.00e-29; NT HIT: gi14771658, EVALUE 0.00e+00
gtcactgcaggagtaattaccatgttggggcagaaaaaattcctgtgaaaggaaatttgcagtattcattggaggggagtctaagactcagtttgtctaatgggaagggaaaccagcctgttcttggcaatcagagtccccgcggtgaacccactgcccacggggtgaacggctgccctccacaggctcgaattgaggagctggaagaggagatagaggcggagagggccacccgcgcgaagacagagaaacagcgcagcgactatgcccgggagctggaggagctgagcgagcggctggaggaggcgggaggcgtcacctccacgcagatagagctcaacaagaagcgggaggcggagttcctgaagctgcgcagggacctggaggaggccacactgcagcacgaagccatggtggccgcgctgaggaagaagcatgcggatagtgtggccgagcttggggagcagattgacaacctgcagcgggtcaagcagaagctggagaaggagaagagcgagttcaagctggagatcgatgacctctccagcagcatggagagtgtgtcgaaatctaaggtgctgcgcggggtgggggtggctcaaggctttccatcagacacactccgtggtcattgaaacctgactttgc

SEQ ID NO: 20567 - DNA, 1701 bp, Homo sapiens
  MAP TO AL160231.1; EXPRESSED IN ADULT LIVER, SIGNAL = 1.5; EXPRESSED IN PLACENTA, SIGNAL = 1.5; EXPRESSED IN BRAIN, SIGNAL = 1.2; EXPRESSED IN HELA, SIGNAL = 1.8; EXPRESSED IN LUNG, SIGNAL = 1.5; SWISSPROT HIT: Q01101, EVALUE 2.00e-69; NT HIT: gi14749988, EVALUE 0.00e+00; EST_HUMAN HIT: BF312968.1, EVALUE 0.00e+00
atgccaaggggattcctggtgaagcgaactaaacggacaggcggcttgtaccgagttcgccttgcggagcgtgtcttccctctgctggggccccagggggcgccgcccttcttggaggaggctcccagcgcctccttgcccggcgcggagcgggcgacaccccccacccgagaggaaccaggaaaggggttgacggcggaggcggcccgggaacagtcggggtcgccatgtcgggcggctggggtgagcccggggacgggcgggcgggaaggcgcggagtggcgggcgggtggcagggaaggtcccgggcccagccccagccccagccccagtccagcgaagccggcaggcgcagagctgcgtcgggcgttcctggagcgctgcctcagctcgcccgtctccgccgagtctttccccgggggcgccgccgccgtggccgctttctcctgctccgtggcgccagcagccgcaccgaccccgggggagcagtttctgctgccgcttcgggcgccgttcccagagcccgcgcttcagccggaccctgcgcccctctcggccgcccttcagagtctgaagcgggcggccggcggcgagcgccgcggcaaggcacccacggactgcgcgtctggacccgcggccgcgggaatcaagaagccaaaggccatgaggaagttgagctttgccgatgaggtgaccacatcccctgtcctgggcctgaagatcaaggaggaggagcccggagcgccgtcccggggcttggggggcagccgcacgccactgggggagttcatctgccagctgtgcaaggagcagtacgcagaccccttcgcgctggcccagcaccgctgctcccgcatcgtgcgcgtagagtaccgctgccctgagtgcgacaaggtgttcagctgtcctgcgaacctggcctcccatcgccgctggcataagccgcgtcctgcggctgcaaacgccgccacagtctcctccgccgacgggaagccgccttcttcgtcgtcttcgtcctcccgggactccggggccattgcatcttttctggcggagggaaaggagaacagccgaatagagcggactgcggatcagcacccgcaggccagggacagctccggggcggatcagcacccggacagcgccccgaggcagggcctccaggtgctgacgcatccagagccaccgctgcctcagggcccctacacggagggggtgttggggcgccgggtacctgtgccgggcagtaccagtggtggcaggggatccgagattttcgtgtgcccatattgccacaaaaagtttcgtcgccaagcctatctgcgcaagcacctgagcactcacgaggcgggctcggcccgtgcgctagcgccgggctttggctccgaacgcggtgccccacttgccttcgcttgcccattgtgcggagcgcacttccctacagcagatatcagggagaagcaccggctgtggcatgctgtccgcgaggagctgctcctgcccgctctggcgggggctcctcccgaaacgtcgggccctagcgggccatctgacgggagtgcccagcaaattttctcgtgcaagcactgcccgtccactttttttagctctccagggctgacccggcacatcaataagtgccacccctcagaaagccggcaagtgctgctgctgcagatgccactgcggcctggctgctga

SEQ ID NO: 20568 - DNA, 875 bp, Homo sapiens
  MAP TO AL049870.3; EXPRESSED IN ADULT LIVER, SIGNAL = 2.1; EXPRESSED IN BRAIN, SIGNAL = 1.8; EXPRESSED IN HELA, SIGNAL = 1.1; EXPRESSED IN BONE MARROW, SIGNAL = 1.5; EXPRESSED IN LUNG, SIGNAL = 1.8; EXPRESSED IN HEART, SIGNAL = 1.6; EXPRESSED IN FETAL LIVER, SIGNAL = 1.6; SWISSPROT HIT: Q48919, EVALUE 7.30e-02; NT HIT: gi14747442, EVALUE 0.00e+00; EST_HUMAN HIT: W52875.1, EVALUE 1.20e+00
gtccttccgccccagagaccgatgatagtcgagttgggggcattatgagaggagagaaaaactactacttccgtggagctgcgggggaccacggttcctgccccactacaacttcgcctctggcctcggccctcttgatgccctcggaggcagtctcaagcagctggtctgagtctggaggcggtttgtcagggggagatgaagaggacactcggctccttcaactcctccgcactgcccgggatccttctgaggccttccaggctttgcaagctgctttgccgcggcggggcggtcgacttggcttcccccgacgcaaggaagctttgtatcgggcactgggccgagtgcttgtggaaggaggtagtgatgagaagcggctctgcttgcaacttctctcggacgttctccggggtcagggggaggcaggccagcttgaagaggcctttagcttagcacttttgcctcaactagttgtctcgttacgggaagagaatccagccctgcggaaagatgcgctgcagatccttcatatatgtctgaaacgtagtcctggagaggtgctgagaacgcttatacaacaaggactggaaagtaccgatgcccgacttagagcttccacagcactactgcttcccatcttgcttactactgaggacttgttgcttggtctggatctcaccgaggtgataatatccctagcccgaaagcttggtgatcaggagacagaagaagaatctgagacagctttctccgcacttcaacaaattggggagcgacttggccaagacaggtttcaatcttacatttctcgtctgccctctgccctgaggagacactacaatcgccgcctggagtcccagtttggaagtcag

SEQ ID NO: 20569 - DNA, 675 bp, Homo sapiens
  MAP TO AL132988.3; EXPRESSED IN ADULT LIVER, SIGNAL = 1.9; EXPRESSED IN HELA, SIGNAL = 0.5; EXPRESSED IN LUNG, SIGNAL = 1.5; EXPRESSED IN FETAL LIVER, SIGNAL = 2.1; SWISSPROT HIT: Q13023, EVALUE 1.00e-109; NT HIT: gi15300039, EVALUE 0.00e+00; EST_HUMAN HIT: BG716428.1, EVALUE 8.00e-94
aatcagagaagttggaatgccaaattgcaattgcagtcagaaacatccagttcaccagcttttactcagagcagtgaatcctctgttggctcagacaacatcatgtctccggtgccacttctttcaaaacacaaaagcaaaaaaggtcaagcctcctctccaagtcacgtcactaggaatggtgaggttgtggaggcctggtatggctctgatgaatacctagcactgccctctcaccttaagcagacagaagtattggctttgaagttggaaaacctaacaaagcttctgcctcagaaacccagaggagaaaccatccagaatattgatgactgggaactgtctgaaatgaattcagattctgaaatctatccaacctatcatgtcaaaaagaagcatacaaggctaggcagggtgtctccaagctcatctagtgacatagcctcttcactaggggagagcattgaatctgggcccctgagtgacattctttctgatgaggagtccagtatgcctctcgctggcatgaaaaagtatgctgatgagaagtcagaaagagcttcatcctctgagaaaaatgagagccattctgccactaaatcagctttaattcagaaactgatgcaagatattcagcaccaagacaactatgaagccatatgggaaaaaatagag

SEQ ID NO: 20570 - DNA, 831 bp, Homo sapiens
  MAP TO AP001709.1; EXPRESSED IN ADULT LIVER, SIGNAL = 1.4; EXPRESSED IN BRAIN, SIGNAL = 1.1; EXPRESSED IN HELA, SIGNAL = 0.96; EXPRESSED IN BONE MARROW, SIGNAL = 1.2; EXPRESSED IN LUNG, SIGNAL = 1.2; EXPRESSED IN HEART, SIGNAL = 1.3; NT HIT: gi6754495, EVALUE 2.00e-14; SWISSPROT HIT: P16749, EVALUE 8.30e+00; EST_HUMAN HIT: BI561140.1, EVALUE 2.00e-05
tcatctgtggtgatgattagcagcaagaggaatagcatcttctgtagcaaaatggtcgacagccccagcagccagagctgtatttacagccgtagggagagccgaatccatatccagagccatatccacagccatagccagaggcagagccatatccacagccatagccacagccagttccatatccagagccatattgacagccggagccatatctacagccagagccatatccacaaccatagccacagccagttccatatccacagccatagccagagccagagccatatccacaaccatagccagagccagagccatatccacaaccatagccacagccagttccatatccacagccatagccagagccagagccatatccacagccatagccagagccagagccatatccataaccatagccacagtcagatccatatccagagccgtattgacagccagagccatatccacagccatagccagagccagagccatatccacagccatagccagagccatatccacagccatagccagagccagagccatatccatagccatagccacagccagatccatatccagagccgtattgatagccagagccatatccagagccagagccagagccatagccatagccatagccagagccatagccatagccagagccagagccatatccatagccatagccacagccagagccatatccatagccatagccacagccatagccatatccataaccatagccagagccatatccacaaccatatccagaaccacaatcatatccacagacagaaccccaggcagagccat

SEQ ID NO: 20571 - DNA, 2376 bp, Homo sapiens
  MAP TO AL109823.6; EXPRESSED IN LUNG, SIGNAL = 1.8; EXPRESSED IN FETAL LIVER, SIGNAL = 1.9; EXPRESSED IN ADULT LIVER, SIGNAL = 1.9; EXPRESSED IN HELA, SIGNAL = 1.7; EXPRESSED IN PLACENTA, SIGNAL =   2; NT HIT: gi16173897, EVALUE 0.00e+00; SWISSPROT HIT: Q9ZDE6, EVALUE 4.30e+00; EST_HUMAN HIT: AL520949.1, EVALUE 0.00e+00
ttacgtccagtctgtgttcagctcacaaagacccagacagtggagaatgtggagcatctgcagacacgactacaagctgtgagtgacagtgcccttcaggaacttcagcagtacatcctcttccctctgcgatttaccctgaagaccccaggtcccaaaagagagcgtttgatccaaagtgtggtggaatgcctcacatttgtcctttcttcaacatgtgtgaaagaacaggagcttctccaggaactcttttcagaactctctgcttgtctgtattcacccagctcccaaaaacctgcggctgtgtccgaggagttgaaattggctgtgatccagggacttagcacattaatgcactcagcttatggggacatcattctgactttttatgagccctccattctgccacgtttaggatttgctgtatctttactgttaggccttgcagaacaggagaaatcaaagcaaattaaaattgctgccttaaaatgtttacaggttctactcttgcagtgtgattgtcaggaccatccaaggtcattggatgaacttgaacaaaagcagctgggggatttgtttgcctcttttttacctggaatctcaactgcactgaccaggcttatcacaggagactttaaacaaggtcacagcattgtcgtatcttccctaaagatcttttacaagacagtgagcttcattatggctgatgaacagctcaaaagaatctcaaaggtccaagcaaaacctgcagttgagcacagagtagcagagctgatggtttacagggaagcagattgggtaaaaaagactggcgacaagttgactatccttattaaaaagataattgagtgtgtttctgttcacccacactggaaggtgagactggaactggtagaacttgtggaggaccttcttttgaagtgcagtcaatcattggtcgaatgtgctggtccccttctgaaggccttagtgggactagtaaatgatgagagtcctgaaatccaagcccagtgcaataaagttctgagacattttgcagatcaaaaagtagtggtgggcaacaaagccctcgctgacatcttgtcagaaagcctgcattcccttgccacatctcttcctcgcctaatgaactcccaagatgaccagggcaaattctctactctttccttgttacttggttatctgaaactcttgggcccaaaaataaactttgtcctcaactctgtggcccatctccagcggctttccaaagcactcatccaagttctagagctagacgtggctgacatcaagattgttgaggaacggcgttggaactctgatgatctgaatgcttctccaaagacctcagccacacagccttggaaccgcatccagaggagatatttccgcttcttcactgatgagagaatcttcatgctcttgaggcaggtttgtcagctacttggttattatgggaatctttatttgcttgtggatcactttatggaactttaccatcaatctgtggtttaccggaagcaagctgccatgatccttaatgaactggttacaggggctgctgggctggaggttgaggatcttcacgaaaaacatattaaaacaaacccagaagaactgagagagattgtgacatctatacttgaagaatacacaagtcaagaaaattggtatttggttacctgtcttgaaactgaggaaatgggagaggagctgatgatggagcacccaggcctccaagccatcacgtctggtgaacacacctgccaagttacatcttttctagccttctcaaagccaagtcccactatttgctccatgaacagtaacatctggcaaatatgcattcagttggaaggaattggccagtttgcatatgcactaggaaaagacttctgtttgctcttgatgtcagccctttatccagtactggagaaggctggagaccaaaccctactcattagtcaggtggctaccagcaccatgatggacgtttgccgtgcttgtggctacgactccctgcagcacctgatcaatcaaaattcagactatttagtgaatgggatctctttaaatctgcgtcatctggctctgcatcctcataccccaaaggtcctggaagtcatgctgcggaactcagatgctaacctgcttcctttggtggcagatgtggttcaagatgtcttggccaccctggaccaattttacgataagagagctgcttcctttgtcagcgttctgcatgctctgatggcagcattaggtacattgagagccctttttaatgctgatgtgtgggggacaggactcagtctcctagtttgcttagcctcgttttttgcattgtttgtggtgatgctatggaggacgttttaa

SEQ ID NO: 20572 - DNA, 965 bp, Homo sapiens
  MAP TO AC012532.3; EXPRESSED IN PLACENTA, SIGNAL = 1.4; EXPRESSED IN ADULT LIVER, SIGNAL = 1.8; EXPRESSED IN HELA, SIGNAL = 0.46; EXPRESSED IN BONE MARROW, SIGNAL = 1.7; EXPRESSED IN LUNG, SIGNAL = 1.8; EXPRESSED IN HEART, SIGNAL = 1.6; EXPRESSED IN FETAL LIVER, SIGNAL = 1.8; EST_HUMAN HIT: BG714759.1, EVALUE 0.00e+00; NT HIT: X63678.1, EVALUE 0.00e+00; SWISSPROT HIT: Q01685, EVALUE 1.00e-129
ctctgaagccagagagtaattaagttccatgttacgtaggcttggatcgtgcaactggacgacagaacagcaattttagctgccaacacatttacatttccagtaagggcatcaggattccgattctgcgatccagccaggtgaaacccaacagtgagtacggaaacaattaaagtcacaagtctacccaagataaacacaatggcccacagagatatgcctttctggtacttttcatcactaaagtaaaacaggccgcacatgtgggaaagtaattcaacaaaataatgcagtaccaaaagaagaagtcccaaatgattcaagtacaagagataagctccagtaatgtggaagaggtgaagaccaatgtagacaagttgacgagggatgtcttgttttttggttttctggaagtagagttcaggaaaagcatgaaaccagtaagccaactgggatatgtagaaaaacttcatttgaaatgtcatcatgctatggggacgagccttccatataagagttgggtctgacaggcagttttcagagattaaaatgaatgtgccccaaatacaagaaaaaaagtagaacacactaaactgaccagactcgttaaacttgttttgtttcgctttggtgaactgcattctcttgttaattttatccaacacatattcctgaattgtggcatgaataatgattgccaccagcatgtagaagaaaaccgtggccaaatctttgacaccataataatagagggactttgagcccgtggcttgttcctctgctgcagggacagcaacactgtgctgaagagtgagaaacacgatggatgcttctgctgttccctcgaacacaagccccagcaggaagaacatccccacgcaggagacgatgtccgcatgattctgcaggatgaattcctggctgagaacgggggggttcttggtgctcttcttacggagccccat

SEQ ID NO: 20573 - DNA, 594 bp, Homo sapiens
  MAP TO AC002054.5; EXPRESSED IN PLACENTA, SIGNAL = 3.8; EXPRESSED IN BONE MARROW, SIGNAL = 9.4; EXPRESSED IN LUNG, SIGNAL = 3.3; EXPRESSED IN ADULT LIVER, SIGNAL = 3.3; EXPRESSED IN BRAIN, SIGNAL = 6.6; EXPRESSED IN HELA, SIGNAL = 3.8; EST_HUMAN HIT: AI805836.1, EVALUE 0.00e+00; NT HIT: gi14777543, EVALUE 0.00e+00; SWISSPROT HIT: Q9Y2N3, EVALUE 2.00e-06
cttgttcttctcatgcccgcatccatgcttgcagctgggaagggggcaggaatcagcgaggtgacctgggctgagtcctgggaatgggaagaggtggcaggaaggggatctgaggaggagaacagggggcctggtggtctgtgcttcttcccagacatgggagctgtagaggggacccctgcagcagatgctaagggggccagtaggcccaggcagtcttgggacttgtgtgtctcctgctgtgcatccatactgggtgctttagaaacgggaggcagaccagaagcccctgttgcaagtgaggacaaagtgtgggaaggccgtgagggtctgcagtccgagatggccttgtcctcaacttgcagtgcactgttgatgcgctggaatgccgcctccttctcccggtcaaggtcttcaacagtgacccggtaccccagctctaagggaggtggcagcatcaaaggctcccctcgcctgcgtggcagcaggggaaacttgtgtgtactgggcctagaggcctcggatgtggaggagtcattcctgagggcgagtgtctgccctggtgctatatctgctgccttttcacactgggtg

SEQ ID NO: 20574 - DNA, 457 bp, Homo sapiens
  MAP TO AC007059.1; EXPRESSED IN PLACENTA, SIGNAL = 1.7; EXPRESSED IN ADULT LIVER, SIGNAL = 2.2; EXPRESSED IN BRAIN, SIGNAL = 1.8; EXPRESSED IN HELA, SIGNAL = 1.1; EXPRESSED IN LUNG, SIGNAL = 2.1; EXPRESSED IN HEART, SIGNAL = 2.5; EXPRESSED IN FETAL LIVER, SIGNAL = 1.9; EST_HUMAN HIT: BG752265.1, EVALUE 0.00e+00; NT HIT: AB012265.1, EVALUE 7.00e-06; SWISSPROT HIT: Q92995, EVALUE 1.80e+00
agaggttgagaggagacggctccacatcagaggcccagaaaatgccggcggctgcggcggccgagaggtcctgcttcccccaggggctggccatacccgcggccttcagcttggccttcttggccggcggtggggggggaagcaaggagagggccgcggaggtgggaggcggccgccccgggtgggccagggcgccgcgcctgggtgggaggcggatctggacgccgtccctcctgatgagcccgtggagcacgtctatgggggatcccttggcgtccggatcgctgacgcccaggtggcgcaggtgggcacgggcgtggctagacaggcccttgcgggtctcaaaccaggcaccgcacagctggcagtccagctctctgcccccgtcactatctaaagctgcggagacaaaacacagggggggttcacggccgccaccttggccggccttgggggc

SEQ ID NO: 20575 - DNA, 929 bp, Homo sapiens
  MAP TO AL035362.1; EXPRESSED IN FETAL LIVER, SIGNAL = 1.1; EXPRESSED IN ADULT LIVER, SIGNAL = 1.4; EXPRESSED IN HELA, SIGNAL = 1.8; EXPRESSED IN PLACENTA, SIGNAL = 1.9; NT HIT: gi14769971, EVALUE 0.00e+00; SWISSPROT HIT: P19706, EVALUE 4.00e-01; EST_HUMAN HIT: BG422462.1, EVALUE 0.00e+00
aaatccgcctcaagtacatttcctcttgcaagcggctgaggtcagacagccggacccccgccttctcacccttcgtgcgggtggagaagcgagacgcgttcaccaccatatgcactgttgtcaactcccctggagatgcgcccaagccccacaggaagccttcctcctctgcctcctcttcctcatcctcgtcctcgttctccttggatgcagccggggcctccctggccacactccctggaggctccatcctgcagccgcggccctccttgcccctctcctccacgatgcacttggggcctgtggtttccaaggccctgagtacctcttgccttgtttgctgcctctgccaaaacccggccaacttcaaggaccttggggacctctgtgggccctactaccctgaacactgcctccccaaaaagaagccaaaactcaaggagaaggtgcggccagaaggcacctgtgaggaggcctcgctgccgcttgagagaacactcaaaggtcccgagtgtgcagctgccgccactgccgggaagccccccaggcctgacggcccagctgacccggccaagcagggcccactgcgcaccagtgcccggggcctgtcccggaggctgcagagctgctactgctgtgatggccgggaggatgggggcgaggaggcagccccagccgacaagggtcgcaaacatgagtgcagcaaggaggctccggcagagcccggcggggaggcccaggagcactgggtgcatgaggcctgtgccgtgtggaccggcggcgtctacctggtggccgggaagctctttgggctgcaggaggccatgaaggtggccgtggacatggtaagaggccagcccagccagggtggggagtgtggggttccaaaggacaggcaggcaggcagtcggggagccccttgtttctag

SEQ ID NO: 20576 - DNA, 1540 bp, Homo sapiens
  MAP TO AC010422.6; EXPRESSED IN FETAL LIVER, SIGNAL = 1.4; EXPRESSED IN BRAIN, SIGNAL = 1.6; EXPRESSED IN ADULT LIVER, SIGNAL = 1.3; EXPRESSED IN PLACENTA, SIGNAL = 1.4; EXPRESSED IN HELA, SIGNAL = 1.8; EXPRESSED IN LUNG, SIGNAL = 1.6; EXPRESSED IN BONE MARROW, SIGNAL = 1.6; NT HIT: gi13652274, EVALUE 6.00e-43; SWISSPROT HIT: O43345, EVALUE 0.00e+00; EST_HUMAN HIT: W26008.1, EVALUE 0.00e+00
ctatcgattgtgcattctcatatgtttttttaaggatgtggacacactgaaggcttttccacattgcttacattcaagaggtttctcataattgtgaattcttgtatgtctttgaaaggaactgtgaagactaaaggccttcccacattctttacatttatagggtttctctccagtatgcattctcatgtgtccttgaaagcttgtgggataaataaaggccttcccgcattccttacattcataaggtttctccccagtgtgagttcttttatgtatccgaatgtaactagaacaactaaaggcttttccacattgtttacattcatagggtttctctccagtgtgagttctttcatgtgttcgtaacgcactaggaaaaatgaacaccttcccacagtccctacatttataaggtccgtctccagtgtgggtgatcatgtgtcttcgaaagttctcaagagaaatgaaggtttttgcacattccttacactcatagggtttttctccagtgtgatttctcttgtggattttcaaatctagaggataattgaaagttttcccacattttttacattcgtagggtttctctccagtgtgagtcctttcatgtattcgaaagtaactgattctactaaaggctttcccacattctttacacttatagggtttctctccagtatgcactctcacgtgtactcgaaaggctgggcgtgcactgaaagatttcccacattctttacatttatagggcttctctccagtatgaattctttcatgaatttgaatggaggtggaacatctgaaggctttaccacattgtttacatttatagggtttctctccagtgtgaattctttcatgtactcgtaaaaaactgggaaaaatgaatgcctttccacattctttgcatttataaggtctatctccgttgtgtgttatcatgtgtgttagaacacttgtgtgggaaatgaaggctttcccacattccttacatgcatagggtttctctccagtgtgagttctttcgtgtactcgaatagaactggaacaactgaaggctttcccacattgtttacattcatagggcttttctccagtgtgaatcctttcatgaactcgaagcgaactggaacaactaagagcttttccacattgcttacattcatagggtttttctccaatgtgagtccgctcatgtctttgaaagggctggtgatatatgaaggtttttccacattgtttacatttatagggtttttctccagtgtgactcctttcatgtctttgaaaggatttgagataactaaaggctttctcacactccttacatttatatggcttctcaaatagctcgtatccagtgtgagacctcatgtgtctagtaagggatgagagacgcatgaaggcttttccacagatagtacactcatatggttttactccggcagtcttcttcgtcacactgagattgggactgaagttttctgcacattgactaccttctttaccttcacagagtctctctcccgtatggctt

SEQ ID NO: 20577 - DNA, 589 bp, Homo sapiens
  MAP TO AC023066.2; EXPRESSED IN LUNG, SIGNAL = 4.5; EXPRESSED IN HEART, SIGNAL =  22; EXPRESSED IN BONE MARROW, SIGNAL =  17; EXPRESSED IN BRAIN, SIGNAL =  15; EXPRESSED IN PLACENTA, SIGNAL = 6.2; EXPRESSED IN HELA, SIGNAL =  22; EXPRESSED IN ADULT LIVER, SIGNAL = 7.9; EST_HUMAN HIT: BG743704.1, EVALUE 0.00e+00; NT HIT: AF261085.1, EVALUE 0.00e+00; SWISSPROT HIT: P04406, EVALUE 5.00e-56
atgattccacccatggccaagttccacggcatcgtcaaggctgaaaacaggaagcttgacatcaatggaaatcccatcaccatcttccaggagcgagatcccaccaaaatcaaacaggatgacgctggtgctgattatgttatggagtccactggcatcttcactaccgtggagaaggctggggctcacttagagggtggagccaaaagggtcattacctctgccccctctgctgatgcccccatgttcgtgatgggcatgagccataagaagtataaaaacctcaagatcatcagcaatgtctcctgtaccaccaactgcttagctccctggtcaagatcatccataacaactctggcatcatgggaggaatcaggatcacagtccatgccatcactgccatctagaagactgtggatggcccctctgggaaactgtggtgtgatggctatggggctctccagaacatcatccctgcatctatctactggtgctgccaaggctgtgggcaaggtcatccccaagtcgaacaggaagctcaatggcgtggcctttcatgtccccactgccaacatgttagtcatgaacc

SEQ ID NO: 20578 - DNA, 1361 bp, Homo sapiens
  MAP TO AC027307.3; EXPRESSED IN ADULT LIVER, SIGNAL = 1.7; EXPRESSED IN PLACENTA, SIGNAL = 2.5; EXPRESSED IN HELA, SIGNAL = 2.2; EXPRESSED IN FETAL LIVER, SIGNAL = 2.1; SWISSPROT HIT: O10296, EVALUE 4.00e-04; EST_HUMAN HIT: AI650529.1, EVALUE 0.00e+00; NT HIT: gi14149961, EVALUE 2.00e-15
ctaggaaaagatatgaatggcctgggtggccggcgtgcggcaggcgggacactcgggctcgctcttgccgcagatgcggacggcgcagtccatgcagaagaggttgtggccgcaggggaccagcgcagccatcacctcgccctcggcgcacaccacgcactctcgcgccagggccggggccgaggacgccgaagggggcttgcggctgttctcggaggcgccggagtccaggggggcgcaggcggcggccgcggggctgctgggcagcgaggtggccgtggagaaggcggcgccgcctgggaaggatacggggccctgcgggggtcgccaggacagcgcgcccaccgggtccggggcgccacggcgagacagcgggagctccaggcggaggccgccgggctcgggcagcgtgggcgagtggcggggggtcccggccccactgctgcgccgggcgccggcggcgggaggtcccggggctccgttgaccgtggagcagccgctgaaggcgggcaagggggcggcgcgctcaaaaggcgcccagatggtggccgcggcgggcacggtcaggtccagcgccaggaagtcgaagtcgaagccgaagtcgcagtcgtcgggggcggccgtccccaccggggcaccgggaccctccgcgccgaaggcgaagcccccgttgccggagccgctgtaggggctggcggggcctgggtccggcacggaggggccgccgcggctgcccgcgtagaaggcctcgggggcgctgggggcgcccagggccgtgtccccgcggaggccggccgtggccgtggggggccgtcgtccctggttgggggtcttggcccagaggctggcggccgccccgagcaggtccaggcagacgtcggtgccgttggcgtggaagtcgctgtcggggcccgcgtcggtgaaggcgccagtgcgcagcgtgatgtgcgcctcgatctcctcgcgcgcgcggtccacgttctcgggcatcccagtgaccgcgaacaccggctccttgtcgcgcccgggcgtcacgatgtaggtgtgcgtccgctgctggatgcgcttgatggtggcgcccttgggccccaccaccagccccaccacccggtagggcacgcgcacctggatggtggtctgtccgggaaggttgggcgggccctgggcggcgccgggcagacccccggccttgctgcgcgtggcgcggatgatggagaagtgttcggccgccgacaggatctcacgcttggccatctccacgtcctccttccggccggtcacgatgaagaccggctcctcgccccgcactggggtcttgatgtaggtgtttgtcttggcccgcagggccttgatcttgcagc

SEQ ID NO: 20579 - DNA, 741 bp, Homo sapiens
  MAP TO AC010253.2; EXPRESSED IN ADULT LIVER, SIGNAL = 2.5; EXPRESSED IN HELA, SIGNAL = 1.6; EXPRESSED IN BONE MARROW, SIGNAL = 1.9; EXPRESSED IN LUNG, SIGNAL = 1.9; EXPRESSED IN FETAL LIVER, SIGNAL = 2.4; NT HIT: gi14733145, EVALUE 0.00e+00; SWISSPROT HIT: Q92685, EVALUE 3.00e-69; EST_HUMAN HIT: BI259077.1, EVALUE 0.00e+00
tcactcccccaggtcctgagagtgcactggagggaaaggggtggatttcagggaactttcttgctgtgttggatgctcttggggaacggctgcaggcccagccagagctgcagcaagaggacagcatggcacacatgctgggcagcagagcagtaggatgtggaggggtatgtgttccaggagagctccatgagccccaccaccagcaacctgagcaggtgtgtgagccagtgtgcagtcctggcccacaggaggtagggcagtgtgtggaaataccagacacagaactggtagtggagggaggtggctaaagcagatgccaatgaagttagaggtgaagagggtagaaacgatctggttggctatgaagggcttgggtggaaccttccttttggagggatccttcatcagtgacaagatacattcccccatcctgggccaccagtagagggtaaacagcaagagcaaggtgaggtgggtggccatcagggccaggtggaaggcacggtgcaggcagagagcccctgggaggaagcaccagttcattgtccagcagaacagaaactggcggccaaggtcaaaggagcgagacaggtagccagtgggcttctccagcaggaagggcagccccagcaccacctgaaggccaacacagatgcccagcttggggaaggccccacggcagccaaactgtgtgaggagaagaaacagtaacccaggggcgaacagcagcactttcat

SEQ ID NO: 20580 - DNA, 2109 bp, Homo sapiens
  MAP TO AC024167.1; EXPRESSED IN ADULT LIVER, SIGNAL = 1.5; EXPRESSED IN PLACENTA, SIGNAL = 1.5; EXPRESSED IN HELA, SIGNAL = 2.7; EXPRESSED IN LUNG, SIGNAL = 1.8; EXPRESSED IN HEART, SIGNAL = 2.4; EXPRESSED IN FETAL LIVER, SIGNAL = 2.8; EXPRESSED IN BRAIN, SIGNAL = 2.4; NT HIT: gi14734735, EVALUE 0.00e+00; SWISSPROT HIT: O75325, EVALUE 0.00e+00; EST_HUMAN HIT: AU132929.1, EVALUE 0.00e+00
atgagctttgttatagcagcttgccaattggtgctgggcctactaatgacttcattaaccgagtcttccatacagaatagtgagtgtccacaactttgcgtatgtgaaattcgtccctggtttaccccacagtcaacttacagagaagccaccactgttgattgcaatgacctccgcttaacaaggattcccagtaacctctctagtgacacacaagtgcttctcttacagagcaataacatcgcaaagactgtggatgagctgcagcagcttttcaacttgactgaactagatttctcccaaaacaactttactaacattaaggaggtcgggctggcaaacctaacccagctcacaacgctgcatttggaggaaaatcagattaccgagatgactgattactgtctacaagacctcagcaaccttcaagaactctacatcaaccacaaccaaattagcactatttctgctcatgcttttgcaggcttaaaaaatctattaaggctccacctgaactccaacaaattgaaagttattgatagtcgctggtttgattctacacccaacctggaaattctcatgatcggagaaaaccctgtgattggaattctggatatgaacttcaaacccctcgcaaatttgagaagcttagttttggcaggaatgtatctcactgatattcctggaaatgctttggtgggtctggatagccttgagagcctgtctttttatgataacaaactggttaaagtccctcaacttgccctgcaaaaagttccaaatttgaaattcttagacctcaacaaaaaccccattcacaaaatccaagaaggggacttcaaaaatatgcttcggttaaaagaactgggaatcaacaatatgggcgagctcgtttctgtcgaccgctatgccctggataacttgcctgaactcacaaagctggaagccaccaataaccctaaactctcttacatccaccgcttggctttccgaagtgtccctgctctggaaagcttgatgctgaacaacaatgccttgaatgccatttaccaaaagacagtcgaatccctccccaatctgcgtgagatcagtatccatagcaatcccctcaggtgtgactgtgtgatccactggattaactccaacaaaaccaacatccgcttcatggagcccctgtccatgttctgtgccatgccgcccgaatataaagggcaccaggtgaaggaagttttaatccaggattcgagtgaacagtgcctcccaatgatatctcacgacagcttcccaaatcgtttaaacgtggatatcggcacgacggttttcctagactgtcgagccatggctgagccagaacctgaaatttactgggtcactcccattggaaataagataactgtggaaaccctttcagataaatacaagctaagtagcgaaggtaccttggaaatatctaacatacaaattgaagactcaggaagatacacatgtgttgcccagaatgtccaaggggcagacactcgggtggcaacaattaaggttaatgggacccttctggatggtacccaggtgctaaaaatatacgtcaagcagacagaatcccattccatcttagtgtcctggaaagttaattccaatgtcatgacgtcaaacttaaaatggtcgtctgccaccatgaagattgataaccctcacataacatatactgccagggtcccagtcgatgtccatgaatacaacctaacgcatctgcagccttccacagattatgaagtgtgtctcacagtgtccaatattcatcagcagactcaaaagtcatgcgtaaatgtcacaaccaaaaatgccgccttcgcagtggacatctctgatcaagaaaccagtacagcccttgctgcagtaatggggtctatgtttgccgtcattagccttgcgtccattgctgtgtactttgccaaaagatttaagagaaaaaactaccaccactcattaaaaaagtatatgcaaaaaacctcttcaatcccactaaatgagctgtacccaccactcattaacctctgggaaggtgacagcgagaaagacaaagatggttctgcagacaccaagccaacccag

SEQ ID NO: 20581 - DNA, 1043 bp, Homo sapiens
  MAP TO L31948.1; EXPRESSED IN PLACENTA, SIGNAL = 1.8; EXPRESSED IN BRAIN, SIGNAL = 1.3; EXPRESSED IN ADULT LIVER, SIGNAL = 1.3; EXPRESSED IN LUNG, SIGNAL = 1.4; NT HIT: gi13629957, EVALUE 0.00e+00; SWISSPROT HIT: Q09472, EVALUE 2.60e-01; EST_HUMAN HIT: BG769583.1, EVALUE 0.00e+00
ccgtccaagaacaagtcacctccaagtgtagccggatcaaggcaagccccccatctagcaagcacttgatgccacccagaactgggcttcttcagaacaatctgagtccaggaatgatcccactcaccaggcaccagagctgcgagggcatgggagtgatctcaccaactctggggaagcggcaaggaattttcacctccagcccccagtgtcccatcctctcacactcaggccagactcccctgggcagacttgactctgtctgccagcatatgcagagccccaaggccaccccaccagaagtgcccctgcctgggttctgtcccagctccctgggcacccagtccttgagtccccaccagctcagacggcctagtgtgccaagaatgcccactgcgttcaacaatgctgcatgggtcacagcggcagcagctgtgaccacagcagtttcggggaaaacacccctcagccaagtggataatagcgttcagcagcactcaccttctggccaggcctgccttcagaggccatctgattgggaggcacaagtgcccgctgcgatgggaacacaagtgcccctggccaacaaccccagcttcagcctgctgggcagccagagcctcaggcagagcccggtacagggcccggtgcctgtagcaaacaccaccaagttcctccagcagggtatggccagctttagtcccctgagccccatacagggcatcgagccaccaagctatgtggctgctgctgccaccgctgctgctgcttctgccgttgctgccagccagttcccaggtccgttcgacagaacggatattccccctgagctgccacctgccgactttttgcgccagccccaacccccactaaatgatctgatttcgtcacctgactgcaatgaggtagatttcattgaagctctcttgaaaggctcctgtgtgagcccagatgaagactgggtgtgcaacttgaggctgatcgacgacattttggaacagcatgctgctgctcaaaatgccacagcccagaattctgggcaa

SEQ ID NO: 20582 - DNA, 926 bp, Homo sapiens
  MAP TO AP000552.1; EXPRESSED IN LUNG, SIGNAL = 1.8; EXPRESSED IN FETAL LIVER, SIGNAL = 1.8; EXPRESSED IN ADULT LIVER, SIGNAL =   2; EXPRESSED IN PLACENTA, SIGNAL = 1.7; EXPRESSED IN HELA, SIGNAL = 1.9; EXPRESSED IN BRAIN, SIGNAL = 1.8; EXPRESSED IN HEART, SIGNAL = 2.3; EXPRESSED IN BONE MARROW, SIGNAL = 2.2; EST_HUMAN HIT: AL110383.1, EVALUE 0.00e+00; NT HIT: gi14756466, EVALUE 0.00e+00; SWISSPROT HIT: P28481, EVALUE 1.00e-10
gctgtcctcattagcaatgtcgtgtacagcgtccacgttagcgtgccttgtcggtgccattagcaatgtcgtataaagcgccctcattggtgatgtcttgtacagtgccctcattagcgatgttgtgtacagtgtacttgttagcgacggcttgtagggtgtcctcgttagcgatgtcgtatacagctcgttggcgatgccgtgggcggcgtcctctttggcgatgccctgggcggcgtcctcgttggcgatgccctgggcggcgtcctcgttggcgatgccctgggcggcatcctccttggcgatgccctggacggcgtcctcgctggcgatgccgtgggcggcgtcctcgctggcgattccgtgggcggcgtcctcgttggcgatgccctgggcggcgtcctcgttggcgatgccatgggcggcgtcctctttggcgatgccctgggcggcgccctcgttggcgatgccctgggcggcgtcctccttggcgatgccctgggcggcgtcctctttggcgatgccctgggcggcgtcctcgttggcgatgccctgggcggcgtcctccttggcgatgccctgggcggcgtcctcgttggcgatgccctgggcggcgtcctcgttggcgatgccgtggacggcgtcctccttggcgatgccctgggcggcgtcctcgttggcgatgccctgggcggcgtcctcgctggcgatgccgtgggcggcgtcctcgctggcgattccgtgggcggcgtcctcgctggcgatgccgtgggcggcgtcctcgttggcgatgccgtgggcggcgtcctcgttggcgatgcccttgtcggcggcctcgttagcgatgtcgtgtacagtatcctcgttagcgatgtcgtgtgtggcgtcctcgttagtgatgtcgtgtacggtgtcctcatggggag

SEQ ID NO: 20583 - DNA, 591 bp, Homo sapiens
  MAP TO AL121778.2; EXPRESSED IN BRAIN, SIGNAL = 1.8; EXPRESSED IN ADULT LIVER, SIGNAL = 6.8; EXPRESSED IN PLACENTA, SIGNAL = 5.5; EXPRESSED IN BONE MARROW, SIGNAL =  11; EXPRESSED IN LUNG, SIGNAL = 8.2; EXPRESSED IN HEART, SIGNAL = 6.4; EST_HUMAN HIT: BE746020.1, EVALUE 0.00e+00; NT HIT: gi14771211, EVALUE 0.00e+00; SWISSPROT HIT: P15880, EVALUE 1.00e-83
ccctggtggccctgggatggggaaccgcggtggcttccgcggaggtttcggcagtggcatccggggccggggtcgcggccgtggacggggccggggccaaggccgcggagctcgcgaaggcaagcccgaggataaggagtggatgcctgtcaccaagttgggccgcttggtcaaggacatgaagatcaagtccctggaggagatatatctcttctccctgcccattaaggaatcagagatcattgactttttcctggggacgtctctcaaggatgaggttttgaagattatgccagtgcagaagcagacccgtgctggccagcgcaccaggttcaaggtgtttgttgctatcggggactacaatggccacgtcggtctgggtgttaagtgctccaaggaggtggccaccgccatccgtggggccatcatcctggccaagctctccattgtccccgtgtgcagaggctactggggcaacaagatcggcaagccccacaccgtcccttgcaaggtgacaggccgctgcggctctgtgctggtgcgcctcatccctgcacccaggggcactggcattgtctccgcacctgtgcc

SEQ ID NO: 20584 - DNA, 882 bp, Homo sapiens
  MAP TO AC006137.1; EXPRESSED IN ADULT LIVER, SIGNAL = 1.8; EXPRESSED IN BRAIN, SIGNAL = 1.1; EXPRESSED IN HELA, SIGNAL = 1.7; EXPRESSED IN HEART, SIGNAL = 1.2; EXPRESSED IN LUNG, SIGNAL = 1.2; EXPRESSED IN FETAL LIVER, SIGNAL = 1.6; SWISSPROT HIT: Q15062, EVALUE 9.00e-75; EST_HUMAN HIT: AV693686.1, EVALUE 0.00e+00; NT HIT: AF314088.1, EVALUE 4.00e-43
tcctgagggtgtagatgagcgggttgagagcaggtgtgaccacggtgtagaagagcgatacgaacttgccccgtgcctggttgtagcgctgcgcgggctgcaggtaggtgtagatggccgagccgtagaacaggcagacggctgtcaggtgggacccacacgtgcccaccgccctcctccggcctccgctgaaccgcatgcaacagacagctcgggccacggcaccgtaggaggccaggatgacggcaaacggcagcagcaggatgaccacgcgggcggcgaacatctggttctcggtagtgtctccgtcgcctccgcaggccagcttgagcaacgccggcagctcacagatgaagtggtccagcaggcggggcgcgcacagcggccgctcagccaggagcgcggtttgcgcaaccgagttggtgaggccgcttagccaggaggcgctggccagcgtgcgacataggcgcggggagacgagccccgcatagcgcagcgggcggcacactgcggccgcgcggtccagagccatcaccgccaggaggacgcattcggccgaacccagagccagcgatgcgcacagctgggccgtgcagtggctgcgcggcagccagagcgctggtccgcgcaggttggccagcagcggcggcaccacgctagtagtgaagcccgcgtctaccaaggccaggtggcagaggaagtagtacatgggcgtgtgcaggcgcgggtcgcgcaccgccagcagcaccagcgccgagttgcccgtcaaggtcaggaggtagcacaggaggacaagggcgaagaggaccggctgcagggaaggccagtcggagaaacccagcaggagaaagcgctcctctgcgctgtagttggcctaaagga

SEQ ID NO: 20585 - DNA, 534 bp, Homo sapiens
  MAP TO AC007014.1; EXPRESSED IN BONE MARROW, SIGNAL = 1.3; EXPRESSED IN LUNG, SIGNAL = 1.4; EXPRESSED IN HEART, SIGNAL = 1.6; EXPRESSED IN FETAL LIVER, SIGNAL = 1.2; EXPRESSED IN ADULT LIVER, SIGNAL = 1.5; EXPRESSED IN BRAIN, SIGNAL = 1.5; NT HIT: gi14781591, EVALUE 0.00e+00; SWISSPROT HIT: P14148, EVALUE 2.00e-40; EST_HUMAN HIT: AL543509.1, EVALUE 0.00e+00
ggcggatgagctgattgatgcgttcaccccgatagccaagtgtgcccatctccttgaggaagcccactctatttttggtagcatgatgggccactgagaggtggaaagggcgcaagaaccatgagatctcctggaaatgcttccctgggaatgcaatttcatgaatgaggtcttccaagcaaatgatgccaaacttccccaggtgctcctcaatcactgtgttgtctgtcagagggatggtcttactcttgaccttggcttgtccacgtttcaaaatgagttctcggacagacttcagatttggaaatccccaggtcacataagtttccactatacgcagcatttgtagattctggggggtgacttttacaaagacaccactaaaaattttctttaggcaaagtcttgcaatggttctctgcaccagtaaactcacgccatcaatcctttcgatgcgtacaacaaaggccaaggaatgtttatctggcaattccacggcatgaggtttcacttctagtcgtctgagatgcacct

SEQ ID NO: 20586 - DNA, 762 bp, Homo sapiens
  MAP TO AC012578.5; EXPRESSED IN BRAIN, SIGNAL = 2.4; EXPRESSED IN ADULT LIVER, SIGNAL = 2.8; EXPRESSED IN PLACENTA, SIGNAL = 1.9; EXPRESSED IN LUNG, SIGNAL = 2.6; EXPRESSED IN BONE MARROW, SIGNAL = 2.4; EXPRESSED IN FETAL LIVER, SIGNAL = 2.2; SWISSPROT HIT: Q02496, EVALUE 3.00e-09; EST_HUMAN HIT: AW905902.1, EVALUE 0.00e+00
ggctatgtttctggacctccgagcccctgacagacatttcctcaagggctccggagtctccactccagacaggcatttcctcaaggcctccggagtctcccctccggacaggcatttcctcaaggcctcacgagtctcccctccagacaggcatttcctcaaggcctccggagtctcccctccagacaggcatttcctcaaggcctccggagtctcccctccagacaggcatttcctcaaggcctccggagtcttccctccagacaggcatttcctcaaggtctccggagtctcccctccagacaggcatttcctcaaggcctccggagtcttccctccagacaggcatttcctcaaggtctccggagtctcccctccagacaggcatttcctcaaggcctcacgagtctcccctccagacaggcatttcctcaaggcctccggagtctcccctccagacaggcatttcctcaaggcctccggagtcttccctccagacaggcatttcctcaaggtctctggagtctccactccagaaaggcatttcctcaaggcctcacgagtctcccctccagacaggcatttcctcaaggcctccggagtcttccctccagacaggcatttcctcaaggcctccggagtctcccctccagacaggcatttcctcaaggcctccggagtctcccctccagacaggcatttcctcaaggcctccggagtctcccctccagacaggcatttcctcaaggcctccggagtctt

SEQ ID NO: 20587 - DNA, 813 bp, Homo sapiens
  MAP TO AL135960.1; EXPRESSED IN ADULT LIVER, SIGNAL = 2.6; EXPRESSED IN PLACENTA, SIGNAL = 4.4; EXPRESSED IN BRAIN, SIGNAL = 2.5; EXPRESSED IN HELA, SIGNAL = 2.2; EXPRESSED IN BONE MARROW, SIGNAL = 3.1; EXPRESSED IN LUNG, SIGNAL = 2.3; EXPRESSED IN HEART, SIGNAL = 2.8; EXPRESSED IN FETAL LIVER, SIGNAL = 2.3; EST_HUMAN HIT: AU118011.1, EVALUE 0.00e+00; NT HIT: AJ131016.1, EVALUE 0.00e+00; SWISSPROT HIT: P36594, EVALUE 9.60e-01
atggcttactactttgtgtctttcagtgtgttggcatgcatcagcccagaagcagtgatctctggattaaactgcatgtcatttgctaatgttggcatgagcggcttaagccccaatggtgtggatttgagcatggaggcaaatgctatagctctgaaatatttaaatgaaaatcagctgtcacaactgtctgtcactcgatcgaaccaaaataattgtgacccattcagccttctccatattaatacagacagaagcacagtggggcttagtttaatttcaccaaacaacatgtcatttgcaaccaaaaaatatatgaagagatatggactcctacaaagcagtgacaatagtgaagatgaagaggaacctcccgacaatgcagatagcaagagtgaatatttattgaatcagaaccttaggtccatacctgaacagcttggtggtcagaaagagccttctaagaatgaccatgaaataattaattgttctaactgtgaatctgtggggaccaacgcagatacgccagtattgagaaatattacaaatgaagttttgcagacaaaagcaaaacagcagttgactgaaaagccagctttcttagtaaagaaccttaaaccaagtcctgcagtgaaccttcgaaccgggaaagcagagttcactcaacatcctgagaaagaaaatgaaggggacattacaatttttcctgaaagtttgcaaccttctgaaacgctaaagcagatgaatagcatgaattcagtaggcaccttcttagatgtaaaacgtctcagacagttaccaaaattattttaa

SEQ ID NO: 20588 - DNA, 528 bp, Homo sapiens
  MAP TO AC000384.1; EXPRESSED IN ADULT LIVER, SIGNAL = 1.4; EXPRESSED IN BRAIN, SIGNAL = 1.4; EXPRESSED IN HELA, SIGNAL = 2.6; EXPRESSED IN LUNG, SIGNAL = 1.6; EXPRESSED IN HEART, SIGNAL = 1.8; EXPRESSED IN FETAL LIVER, SIGNAL = 1.9; EST_HUMAN HIT: BI826397.1, EVALUE 0.00e+00; NT HIT: gi14766181, EVALUE 2.00e+00; SWISSPROT HIT: P33076, EVALUE 3.80e-02
cggtccacgttgaccctgtgatccgcgagagtacccctgatgagctacttcgcccacccggaggagctggccctggagcatcagccaccccaggccgggctccccccactggccttgtctcagctctttaacccggatgcctgtgggcgccgggtgcagacagtggtgctgtatgggacagtgggcacaggcaagagcacgctggtgcgcaagatggttctggactggtgttatgggcggctgccggcattcgagctgctcatccccttctcctgtgaggacgtgtcatccgtgggccgtgccccagcctccatgtgccaacttgtggcccagcgctacacgcccctgaaggaggttctgcccctgatggctgctgctgggtcccacctcctctttgtgctccatggcttagagcatctcaacctcgacttccggctggcaggcacgggactttgtagtgacccggaggaaccgcaggaaccagctgctatcatcgtcaacctgctgcgcaaatacatgctgcctcag

SEQ ID NO: 20589 - DNA, 567 bp, Homo sapiens
  MAP TO AB003151.1; EXPRESSED IN ADULT LIVER, SIGNAL =  13; EXPRESSED IN HELA, SIGNAL =  29; EXPRESSED IN BONE MARROW, SIGNAL =  14; EXPRESSED IN HEART, SIGNAL =   6; EXPRESSED IN LUNG, SIGNAL =  12; EXPRESSED IN PLACENTA, SIGNAL = 6.3; EXPRESSED IN BRAIN, SIGNAL = 6.9; SWISSPROT HIT: P39023, EVALUE 5.00e-73; EST_HUMAN HIT: BG875437.1, EVALUE 0.00e+00; NT HIT: gi14778998, EVALUE 0.00e+00
ggccatagccaaacttggaggtggtgtcagtgaacttaaggtcagtcttctccagagcccatcgtctggtctgcaccagcaaagatgtgcagagaatgagcactcgcttcttggttcccaccacacagcctttcagcataacagagttattggtcacttcaccatagtggacaaagccacccagaaggtcgatgctcttgtcagacaggtcatagtccgtggaggcattgttcttgatcggtttgctgtcctcagtaaggtagccctggtcaatcttacagatcttcttgttgatctcagtgtggtgatggtcgcctttctgcccagcacatgccatggagaaggccacatggtcaggatgccatgccccaatccaggccaccttgcacaggcctcggtgggtcttgtggggcagcttcttggtgtgccaacaactggtgacccctttgtagcctttgcccttggtcaccccgatgatgtcgatcatctcgtccagcccaaacgcttggttcacaggtacctgctgctgtagcccctcctgggctcagtccagcttctcagccatgg

SEQ ID NO: 20590 - DNA, 615 bp, Homo sapiens
  MAP TO AC004204.1; EXPRESSED IN PLACENTA, SIGNAL = 2.5; EXPRESSED IN ADULT LIVER, SIGNAL = 2.5; EXPRESSED IN HEART, SIGNAL = 2.3; EXPRESSED IN FETAL LIVER, SIGNAL = 2.3; EXPRESSED IN LUNG, SIGNAL = 2.3; EXPRESSED IN BONE MARROW, SIGNAL = 2.6; EXPRESSED IN HELA, SIGNAL = 5.6; SWISSPROT HIT: P40818, EVALUE 1.00e-75; EST_HUMAN HIT: BE786679.1, EVALUE 1.00e-130; NT HIT: gi4827053, EVALUE 0.00e+00
tcagcttcttgtttctttttggctttttgctcgtgttcttccctcctcagtttctttctgtttcccttgctgtctttcctgaagttctttttcttgtttgtttttctccattagaagagcagtttctgcatgaatatgagccttttcttcatctgttaacatgagagttggagaggaaactactggcttggtggaacaatcaggaataactttttcattctgaggagactgttgctcatgatttgtactttcagatttgattatatgctcttcaggcaatttgactgccagttttttagtatgatcaatctgtggaacattctttatgctaggcactggctgaatgatgggtgaaacatcagatttagaagcagcaactgattcaactggaattgatatattcagtggtcctgtcctctcattttgatcattatcacttatttgatcacttatcaattctatgtcttcatccacttttataggtggaggtggcatctcggcagcaggtttagaaggaattgattcttccaatgagggataagtaaaatccaatgagatagacaactcttcattctggtgttgtgggggtggagtgaccttagcatttgttgtata

SEQ ID NO: 20591 - DNA, 814 bp, Homo sapiens
  MAP TO AC026805.3; EXPRESSED IN ADULT LIVER, SIGNAL = 1.3; EXPRESSED IN BRAIN, SIGNAL = 1.7; EXPRESSED IN HELA, SIGNAL = 1.8; EXPRESSED IN LUNG, SIGNAL = 1.2; SWISSPROT HIT: O00555, EVALUE 1.00e-120; EST_HUMAN HIT: AL157564.1, EVALUE 3.00e-47; NT HIT: gi14763612, EVALUE 0.00e+00
gaaagagcaacagaagaatcaaaagccagccaagtccgtgtgggagcagcggaccagtgagatgcgaaagcagaacttgctggccagccgggaggccctgtataacgaaatggacccggacgagcgctggaaggctgcctacacgcggcacctgcggccagacatgaagacgcacttggaccggccgctggtggtggacccgcaggagaaccgcaacaacaacaccaacaagagccgggcggccgagcccaccgtggaccagcgcctcggccagcagcgcgccgaggacttcctcaggaaacaggcccgctaccacgatcgggcccgggaccccagcggctcggcgggcctggacgcacggaggccctgggcgggaagccaggaggccgagctgagccgggagggaccctacggccgcgagtcggaccaccacgcccgggagggcagcctggagcaacccgggttctgggagggcgaggccgagcgaggcaaggccggggacccccaccggaggcacgtgcaccggcaggggggcagcagggagagccgcagcgggtccccgcgcacgggcgcggacggggagcatcgacgtcatcgcgcgcaccgcaggcccggggaggagggtccggaggacaaggcggagcggagggcgcggcaccgcgagggcagccggccggcccggggcggcgagggcgagggcgagggccccgacgggggcgagcgcaggagaaggcaccggcatggcgctccagccacgtacgagggggacgcgcggagggaggacaaggagcggaggcatcggaggaggaagtaa

SEQ ID NO: 20592 - DNA, 782 bp, Homo sapiens
  MAP TO AL022157.1; EXPRESSED IN HELA, SIGNAL = 1.1; EXPRESSED IN ADULT LIVER, SIGNAL = 1.2; EXPRESSED IN LUNG, SIGNAL = 1.2; SWISSPROT HIT: Q99865, EVALUE 1.00e-125; EST_HUMAN HIT: BI524653.1, EVALUE 0.00e+00; NT HIT: gi15309593, EVALUE 0.00e+00
caggcatgaagacccccaacgcacaggaagccgaagggcaacaaaccagggcagctgcaggacgggccactgggtctgcaaacatgacaaagaaaaaagtctcccaaaagaagcagagaggccgaccttcatcccagccccgcaggaacatcgtgggctgcagaatttctcatggatggaaggaaggagatgagcccatcacgcagtggaaaggaaccgttctggatcaggtgcctataaatccctctctttatctggtgaaatatgatggaattgactgtgtctatggactggaacttcacagagatgaaagggttttgtctcttaaaattctttctgacagggtggcatcatctcacattagtgatgccaaccttgcaaataccataattggcaaagcagtggaacatatgtttgagggagagcatggttctaaggatgaatggagggggatggtcttagctcaagcacctatcatgaaagcctggttttatattacctatgagaaagatcctgtcttgtacatgtaccagcttctagatgattataaggaaggtgacctccgcatcatgccagaatccagtgagtctcctccaacagagagggagccaggaggagttgtagatggcctaataggtaagcatgtggaatataccaaagaagatggctccaaaaggatcggcatggtcattcaccaagtggaagccaaaccctctgtgtatttcatcaagtttgatgatgatttccatatctatgtctacgatttggtgaaaaagtcctaa

SEQ ID NO: 20593 - DNA, 567 bp, Homo sapiens
  MAP TO AP001054.1; EXPRESSED IN LUNG, SIGNAL = 1.4; EXPRESSED IN FETAL LIVER, SIGNAL = 1.2; EXPRESSED IN BRAIN, SIGNAL = 1.2; EXPRESSED IN HELA, SIGNAL = 2.2; EXPRESSED IN ADULT LIVER, SIGNAL = 1.5; EXPRESSED IN BONE MARROW, SIGNAL = 1.3; NT HIT: AE004794.1, EVALUE 8.40e+00
aggggaggaggctggcaggtgggggtccgcataactcgtttcgctgccttatctaccgggtggtcgagttggcatcttccccggcagaactgtgttggggtgttgtgggtattgtgggtattgtgggggttgtgttgtgggtgttgtgggggttgtgggtgttgtgttgtgggtgttgtaggagttgtgagtgttgtgggggttgtgggggttgtaggggttgcgggtgttgtgggtgttgtagggggtgtgggtgttgtgggtgttgtgggggttgtagggggtgtgggtgttgggggtgttgtgttatgggtgttgtgggggttgtgggtgttgtggatgttggtgttgtaggggttgttggtgttgtgggggttgtgggtgttggggttgtgggtgttgtgggtgttgtgggtgttgtgttgtgggtgttgtgttatgggtgttgtgggggttgtgggtgttggagttgtgggtgttgtgggagttgtgggtgttgtgggagttgtgggtgttgggttgtggaggttgtgggtgttgcggcggttgtgggtgttgtgggtgttg

SEQ ID NO: 20594 - DNA, 618 bp, Homo sapiens
  MAP TO AL133153.2; EXPRESSED IN LUNG, SIGNAL = 1.8; EXPRESSED IN HEART, SIGNAL = 1.8; EXPRESSED IN BONE MARROW, SIGNAL = 1.8; EXPRESSED IN FETAL LIVER, SIGNAL = 2.1; EXPRESSED IN PLACENTA, SIGNAL = 2.1; EXPRESSED IN BRAIN, SIGNAL = 1.8; EXPRESSED IN ADULT LIVER, SIGNAL = 2.6; EXPRESSED IN HELA, SIGNAL = 2.8; NT HIT: gi14748798, EVALUE 0.00e+00; SWISSPROT HIT: P40164, EVALUE 2.00e-12; EST_HUMAN HIT: AU132599.1, EVALUE 0.00e+00
ctgcaacatgccaacaatctctaccttattgaaaaagataaaagagtgaagtgttgataacatgttttcttcaaagaccgaaggagttggtagaaccatatcttgtatatactgaactctgtatgtctgatgaattttttgtttcagctcaggatctgatatgggaatcacttctttaaacttggctgtttttgttagaaattccctgtgttttcgtggttgtgataaagcaggatcatattctaaacatccaatgacgtccattatacattcttcagagaacataacttcaaaaagagcagttcgattcaagagaaagatgcctttgataatttcatacaagtggtgcagtccttcaatattttccaaatcttcacacacatgaaaaagctccaggagctttttaatataaccctcattttctagtgccagtgcaagtttttcacgacgaagaggtgaaggtaaagatgatgccacaagttctgcaatttcttcaaggcgacttaattcacaagatggcaattctaagcctggcgatgacatatcatcaaaacgctcctcttcagattcatccacaaggtcctgagtgatgtccacggaagggtcctttccttgaac

SEQ ID NO: 20595 - DNA, 591 bp, Homo sapiens
  MAP TO AC004175.1; EXPRESSED IN BRAIN, SIGNAL = 1.8; EXPRESSED IN HELA, SIGNAL = 3.3; EXPRESSED IN LUNG, SIGNAL = 1.9; EXPRESSED IN ADULT LIVER, SIGNAL = 1.6; EST_HUMAN HIT: AV741093.1, EVALUE 2.10e-01; NT HIT: gi14784051, EVALUE 1.40e-01; SWISSPROT HIT: Q91857, EVALUE 5.80e-02
atgcaaaggctacttggctattttggctgcaccaaactgagcacttccaacagcgctggctccctgaatcccaggatccagcctgttgtatctactccttggggagcctggctcatgacccaacttggaaatgacattcccaagaccacaaatgacatttccaagtaccaggatgtctctatgcccagtgctggggccacaccagatgccgaggcctctccaccccaggagggctgcctcctcctcctaggtgacaatgaagaatgtactgctcagtcactgggctcagtggtcgtctctgggcatgagctgggtttcaatgagctcaggaatgggaagcatgactctgcccctgaggccacatgccacctccatagcggatcttttcttctggctggaggggaagtcacttcttcccatgaaactattttatctataaatctcctctccttgttggagaccaaagcccagctgctcctgcttggtgccctggtggcctggggtgggccatggagtcctgtttgcagtttctcttctgtcaccatcacgagttctgacaccctggcctgggcacagaaccgcacatcagcc

SEQ ID NO: 20596 - DNA, 679 bp, Homo sapiens
  MAP TO AL121944.10; EXPRESSED IN HEART, SIGNAL = 1.8; EXPRESSED IN LUNG, SIGNAL = 2.1; EXPRESSED IN BONE MARROW, SIGNAL = 2.6; EXPRESSED IN FETAL LIVER, SIGNAL = 2.6; EXPRESSED IN ADULT LIVER, SIGNAL = 2.3; EXPRESSED IN BRAIN, SIGNAL = 2.2; EXPRESSED IN HELA, SIGNAL =   3; NT HIT: gi11177905, EVALUE 7.00e-04; SWISSPROT HIT: Q9GZK3, EVALUE 2.00e-73
atgtattttttcttctccaacctaagctttttggatctgtgttacacaaccggcattgttccacagctcctggttaatctcaggggagcagacaaatcaatctcctatggtggttgtgtagttcagctgtacatctctctaggcttgggatctacagaatgcgttctcttaggagtgatggcatttgaccgctatgcagctgtttgcaggcccctccactacacagtagtcatgcacccttgtctgtatgtgctgatggcttctacttcatgggtcattggttttgccaactccctattgcagacggtgctcatcttgcttttaacactttgtggaagaaataaattagaacactttctttgtgaggttcctccattgctcaagcttgcctgtgttgacactactatgaatgaatctgaactcttctttgtcagtgtcattattcttcttgtacctgttgcattaatcatattctcctatagtcagattgtcagggcagtcgtgaggataaagtcagcaacagggcagagaaaagtgtttgggacatgtggctcccacctcacagtggtttccctgttctacggcacagctatctatgcttacctccagcccggcaacaactactctcaggatcagggcaagttcatctctctcttctacaccatcattacacccatga

SEQ ID NO: 20597 - DNA, 502 bp, Homo sapiens
  MAP TO AL138688.11; EXPRESSED IN ADULT LIVER, SIGNAL = 2.4; EXPRESSED IN BRAIN, SIGNAL = 2.2; EXPRESSED IN HELA, SIGNAL = 4.1; EXPRESSED IN BONE MARROW, SIGNAL = 2.1; EXPRESSED IN LUNG, SIGNAL =   2; EXPRESSED IN HEART, SIGNAL = 1.8; EXPRESSED IN FETAL LIVER, SIGNAL =   2; SWISSPROT HIT: P40477, EVALUE 5.30e-01; EST_HUMAN HIT: BI911812.1, EVALUE 0.00e+00; NT HIT: Y13472.1, EVALUE 0.00e+00
cttacttcttgaaaaactggaagtggagaaatccacatcattggttctgtttttagtctcaggaggtcttcgttcaataaaattggaggaatttttctcttgcccttgatttgtttccatgtcctcttcatcatcaatgacaattgtctcacttacacttcccttctgagatgccaactcttttgaggaaggagtaattttggaatcatttccttgtagttcttcattttttgatgatgtaaatgttatggttctttgatcagctaccactggtacagaaggtgggggaggttgtacaggttcgataaaaacaacatcatcatcatcttccactgacgagttctgaaacttattagatctagacactaaaggattagctggaccactaaatgagtttcctacattcgtgagactagttgccatggccgtactccctaataaaacaggagtctgatcagtcaattctaatcctcccactgaacttgtgtccatgccaaagaac

SEQ ID NO: 20598 - DNA, 784 bp, Homo sapiens
  MAP TO AC020647.9; EXPRESSED IN HELA, SIGNAL =  14; EXPRESSED IN ADULT LIVER, SIGNAL =   4; EXPRESSED IN PLACENTA, SIGNAL = 8.2; EXPRESSED IN LUNG, SIGNAL = 3.3; NT HIT: U76549.1, EVALUE 0.00e+00; SWISSPROT HIT: P05787, EVALUE 1.00e-112; EST_HUMAN HIT: BG830243.1, EVALUE 0.00e+00
agtagatactcatgttctgcatcctagactcttgccagctctcttcaccctccagcagcttcttgtaggtggcagtcttgatgtccagggccagcttgacattcatcagctcctggtatacacgcagctgctgtgccatgtcctgcttggcccactgcagggcggcctccagctccaacagcttggtgttggcatccttaatggccagctccctgcgcttctcggcatctgtgatggtggcctccagggaagccctctggcctttgaggcccttgatctcagcctggagccagctgacattctggttcatctcggagatgtcagtctttgtacacctcaggttatccccgtgcttcctggccagcatctgcaggtcctcatacttgatctggtacatgctgtcagccttagcccagctgcagttggcgatctccttatactgggccttgacctcagtgatgatgttgtccatgtccagggagtggctgctgtctatggacagcaccacagacgtgtccgagatcagggactgcagctcccagatctcctcttcatgcagctgcctgaggaagttgatctcatcagtcagcccttccaggtgagactccagctctaccttgttcttgtaagcttcatccacatccttctcgatgaggacaaattcattctccatctctgtatgcttattgatctcatcatggtacttcttcttgaagtcctccaccagctcctgcatgttgccaagctctgcctccagcttcagcttctcctggcccagagtctc

SEQ ID NO: 20599 - DNA, 492 bp, Homo sapiens
  MAP TO AL021392.5; EXPRESSED IN ADULT LIVER, SIGNAL = 1.9; EXPRESSED IN HELA, SIGNAL = 0.63; EXPRESSED IN BONE MARROW, SIGNAL = 1.8; EXPRESSED IN PLACENTA, SIGNAL = 1.8; EXPRESSED IN BRAIN, SIGNAL = 1.8; SWISSPROT HIT: P17656, EVALUE 1.00e-05
agaatcaaactccatgtcacgacacatgtcaccacacactgccagggatggaccttccagccttcaccaccagggatgggcccgggctacacttccagcctgcgcctgcaccggggtaggggtgccctccgcgacacagcgccagggacgggcccgggctacgcctccagcctgtgcctgcaccggggtaggggtgccctccgcgacacactgccagggatgggcccgggctacgcctccagcctgcgcctgcaccggggtaggggtgccctccgcgacacaccgccagggatgggcccgggctacgcctccagcctgcgcctgcaccggggtaggggtgccctccgcgacacaccgccagggatgggcccgggctacgcctccagcctgcgcctgcaccggggtaggggtgccctccacggccacatgggcagcccccgcactgcactgaagagtgctccactgtacaccagggtgacttcatctcagtga

SEQ ID NO: 20600 - DNA, 464 bp, Homo sapiens
  MAP TO K02402.1; EXPRESSED IN HELA, SIGNAL = 4.2; EXPRESSED IN BONE MARROW, SIGNAL =   2; EXPRESSED IN LUNG, SIGNAL = 1.8; EXPRESSED IN HEART, SIGNAL = 1.7; EXPRESSED IN PLACENTA, SIGNAL = 1.4; EXPRESSED IN ADULT LIVER, SIGNAL = 3.2; NT HIT: gi14769655, EVALUE 0.00e+00; SWISSPROT HIT: P00740, EVALUE 4.00e-90; EST_HUMAN HIT: T28608.1, EVALUE 1.00e-114
gtgaacataatattgaggagacagaacatacagagcaaaagcgaaatgtgattcgaattattcctcaccacaactacaatgcagctattaataagtacaaccatgacattgcccttctggaactggacgaacccttagtgctaaacagctacgttacacctatttgcattgctgacaaggaatacacgaacatcttcctcaaatttggatctggctatgtaagtggctggggaagagtcttccacaaagggagatcagctttagttcttcagtaccttagagttccacttgttgaccgagccacatgtcttcgatctacaaagttcaccatctataacaacatgttctgtgctggcttccatgaaggaggtagagattcatgtcaaggagatagtgggggaccccatgttactgaagtggaagggaccagtttcttaactggaattattagctggggtgaagag

SEQ ID NO: 20601 - DNA, 558 bp, Homo sapiens
  MAP TO AL133551.4; EXPRESSED IN BONE MARROW, SIGNAL = 1.4; EXPRESSED IN ADULT LIVER, SIGNAL = 1.5; EXPRESSED IN BRAIN, SIGNAL = 1.1; EXPRESSED IN HELA, SIGNAL =   3; SWISSPROT HIT: O59923, EVALUE 8.00e-05; EST_HUMAN HIT: N23557.1, EVALUE 0.00e+00; NT HIT: gi14748204, EVALUE 0.00e+00
gttccataccccatgaagtgcctcagatattaattaatagagaacctttgcctcatctgcattttgatgtagagcttcttggagactgtgatgtcataattaatgaattgtgtcataggttaggtggtgaatatgccaaactttgctgtaaccctgtaaagctttcagaaattactgaaaaacctccacgaacacaaaaagaattggcttatttgtcagagttgccacccacacctcttcatgtttcagaagactcaagttcaccagaaagaacttcaccaccagattcttcagtgattgtcacacttttagaccaagcagctaagagtaatgatgatttagatgtgtctgaatcaaaaggttgtatggaagaaaaaccacaggaagtacaaacttctaggaatgttgaaagtattgctgaacagatggaaaatccggatttgaagaatgttggttctagtactggggagaaaaatgaaagaacttcagtggctggaacagtgagaaaatgctggcctaatagagtggcaaaggagcagattagtaggcggcttgatg

SEQ ID NO: 20602 - DNA, 3953 bp, Homo sapiens
  MAP TO AB023048.1; EXPRESSED IN HELA, SIGNAL = 1.7; EXPRESSED IN ADULT LIVER, SIGNAL = 1.2; EXPRESSED IN FETAL LIVER, SIGNAL = 1.2; EXPRESSED IN BONE MARROW, SIGNAL = 1.1; EXPRESSED IN LUNG, SIGNAL = 1.1; SWISSPROT HIT: Q02817, EVALUE 6.00e-63; EST_HUMAN HIT: AW867076.1, EVALUE 0.00e+00; NT HIT: AY026090.1, EVALUE 2.50e-01
caagaagatcaggccaaggaacaccaggaggagaatcacagccaccaggaccacaataactatggcccatgcagggaatgaatcattctctcccatctgtccagcgtggatacctttctgtgagccatctttattgaggtatggatggctctcgtttcctgtggcttctgatgtgatagaactcagcttcgttctagatgtaatgagggtgaaagaaccagtgggcacctgatgagtaacttcagttttatttagatgagaagaggtagtagtgagagatttgtctcctgtgaccttgactgaaggttttatagtctttgtgactgctgctgttttttctgggttttctgtggactttactggggcttttatggtctcagtggtcagtgtggtgttccccaggttttctgtaggcttttctgggactggtgtgtttttccctttggtgcatatggtcttctctgagtatagcgtaggcttttctggggttcttgtggttttctctgtggttgacgtggtcttttctgggtgttctgtggacttttctgtgacttgtgtcatcttctcatgggccaatgtggtcctttttgcatgttttataggctctgctggggctggtgtgatcacattggctgatgtagccctatctctatgttctgtagactctgctgcagatgaggtgatcttgtcattgggtgatgtggtcctttctccatgttctgtaggctttgctagggatggtgtgatcttctcattggccgacgtagtttttgctccatgttctgtaggcccttctggggatagtgtgatcttctcattggccaatgtagtcttttctccatgttctgtaggctttactggggatggtgtggtgttctcattggccgatggggtcatttcttcgtgttctgtaggctttgctggagatggtatggtcttctcattggctgatggtgtcctttctccatgttctgtaggctctgctggggatggtgtggtcttctcattggctgtcctttctccatgttctgtagactctgttggggatgttgtggtgttctcattggccagtggggtcctttctccattttctgtaggctctgctgaggatggtgtggtgtcctcattgactgtcgtttctccatgttctgtaggctttgctggggatggtgtggccttctcattggctatcctttctccatgttctgtaggctctgctcgggatggtgtggtgatctcattggccagtggggtcctttctccatgttctgtaggctctgctgaggatggtgtggtcttctcattggtaaatggggtcctttctccattttctgtaggctctgctggggatagtgtggtcttctcattggccaatggggtcatttcttcatgttctgtaggctctgctggggatagtgtggtgttctcattggctgtccattctctattttctgtaggctctgctgggaatggtgtggtcttctcattggctgtgctttctctattttctgtaggctctgctgggaattgtgtggtcttctcattggctgtcctttctctattttctgtaggctctgctggggatgatgtggtgttctcattggccagtggagtcctttctgcgtgttctgtaggctctgctgaggatgatgtggtcttctcattggcaaatggggtcctttttccattttctgtaggctctgctagagatggtgtggtcttctcattggccaatggagtcctgtctccattttctgtaggctgtgctggggatggtgtggtgttctcattggctgtcctttctctattttctgtaggctctgctgggaatggtgtggtcttctcattggctgtcctttctctattttctgtaggctctgctggggatagtgtggtgttctcattggccagtggggtcctttctccgtgttctgtaggctctgctggggatgatgtggttttctcattggcaaatggggtcctttgtccattttctgtaggctctgctggggatgatgtggtcttctcattggctgtcctttctctattttctgtaggctctgctgggaatagtgtggtcttctcgttggctgtcatttctctattttctgtaggccctgctggggatggtgtggtgttctcattggctgtcctttctctattttctgtaggctctgccggggatggtgtggtgttctcattggccagtggagtcctttcttcgtgttctgtaggctctgctgaggatgatgtggtcttctcattggcaaatggggtcctttgtccattttctgtaggctctgctagagatggcgtggtcttctcattggccaaaggagtcctgtctccattttctgtaggctctgctggggatggtgtggtcttctcattggctgtcctttctctattttctgtaggctctgctggggatggtgtggtgttctcattggccagtggggtcctttctccgtgttctgtaggctctgctgaggatgatgtggttttctcattggcaaatggggtcctttgtccattttctgtaggctctgctggggatggtgtggtcttctcattggctgttgtttctctattttctgtaggctctactggggatagtgtggtcttctcgttggctgtcgtttctctgttttctgtaggccctgctggggatggtgtggtgttctcattggctgtcctttctctattttctgtaggctctgctggggatggtgtggtgttctcgttggccagtggggtcctttctccatgttctgtagactctgctgaggatgatgtggttttgtcattggcaaatggggtcctttctccatgttctgtaggctctgctggggatggtgtagtgttctcattggctgtcctttctccatgttctgtaggctctgctggggatggtgtggtgttctcattggctgtcctttctccatgttctgtaggctctgctgggaatagtgtggtattctcattggctgtcatttctctattttctgtaggccctgctgggaatggtgcggtgttctcattggctgtcctttctctattttctgtaggctctgctggggatagtgtggtgttctcattggctgtcctttctctattttctgtaggctctgctggggatggtgtgttgttctcattggctgtccttcctccatgttctgtaggctctgctagagattgtgtgagctcattggctgatatggtctcttgtatgttttttgtagtttttgtcaggagcttgtctgaggcaactgttgttctggaatcttcagttttttctgactcttctggggttcctgtggtcttgtatgttgtttttgaggctgctgtgattttttctggaaaagatgtgcttttttgcttggtctgtgaattgcctgagttgtggaaggaagttgtagtcttatgtgagctggtacttgtcttatccaaagtactcatggacttttccaaaggtcttccagttttatctgattttcttgttaccgttgatttgcctgttgtggacttacgacagtttattttgctcttgggtgctggcgttatatgtttttttccagcggattctttatgtgtggtagtggagtcagcaggatcaacagagcgctggttccggatcattgggtctttcccttggttgctggagttttcttcagaagtgggaggagcctcatgattatctgtagagcttttgtggtctatagttttggagttgcctgtaggcttgtcagttggcttagaatggcgtgtggtgttgcagtggcgtttttgctcatggatttctgtagatttagggagctctggaggtctttgtcctgaatgcagaacaatgtgatcaaaagggatactataaacaaggcctggagtgaggggaaatatgtgatcggatgttgagagttccccagttttctgatattcttggaatgtagtagcac

SEQ ID NO: 20603 - DNA, 474 bp, Homo sapiens
  MAP TO AC005005.1; EXPRESSED IN LUNG, SIGNAL = 2.4; EXPRESSED IN ADULT LIVER, SIGNAL = 2.5; EXPRESSED IN BRAIN, SIGNAL = 2.2; EXPRESSED IN HELA, SIGNAL = 0.76; EXPRESSED IN BONE MARROW, SIGNAL = 1.9; NT HIT: gi14778298, EVALUE 0.00e+00; SWISSPROT HIT: P04280, EVALUE 9.70e-02; EST_HUMAN HIT: AW025289.1, EVALUE 0.00e+00
gcccccttcctccagcccccgatggccctggggactaggagacaggctgttgggcgccagggcctcccgatcaggtccccaggagccaccaccaccagggtctacagtctctaggcgcaaggcgggcaacaggcccaggcttcgaggcacagctggtgggaaggcccaggggccaggcaacccagagggcccctcttcactactgccccggctgctgccattactgctcctgtcaggagccactcgggacaggcggcggctctggggtgaggggctacggctggcaccacggcgttcacgggatgagggccgtagggcaagcccagggaacctggccagtcccgggctgcggctgcggtgtcgcttggacttgccaggactggggctgcgggacttgggtgcaaggagctccagtgtgctgtcatcctctccctctgagctggtgcctgagctgtctgtgctgctgctggccaa

SEQ ID NO: 20604 - DNA, 536 bp, Homo sapiens
  MAP TO Z68868.1; EXPRESSED IN HELA, SIGNAL = 1.1; EXPRESSED IN ADULT LIVER, SIGNAL = 1.3; EXPRESSED IN BRAIN, SIGNAL = 1.1; EXPRESSED IN BONE MARROW, SIGNAL = 0.93; NT HIT: U09413.1, EVALUE 0.00e+00; SWISSPROT HIT: P52742, EVALUE 1.00e-91; EST_HUMAN HIT: BF347790.1, EVALUE 0.00e+00
ccaacaacagcgaatccacacaggggagaagccctatgaatgcaatgactgtagcaaggcattcagtcacagcttgtccctcaccaaacattagcgaatccacgctggggagaagccagccctacgaatgcaaccagtgtggcagagccttcagccagcttgctcccctcattcagcatcagaggatccacacaggagagaaaccctatgaatgtaaccagtgtggcagagccttcggccagagctcccgtctcatcgaacaccagaggattcacaccaaggaaaagccctatcggtgcaatgagtgtgggaaatccttcagccacagctccttgctcagccagcatgaaaggacgcacactggggaaaagtcccatgggtgtcacgattgcggaaagtcctttaggcagagcacccacctcactcagcaccggaggatccacacaggagagaagccatatgtgtgcagggactgtggaaaggcccttacacacagctcctcccttaccaagcaccagagaattcacactggataa

SEQ ID NO: 20605 - DNA, 593 bp, Homo sapiens
  MAP TO AC002039.1; EXPRESSED IN HEART, SIGNAL = 1.7; EXPRESSED IN BONE MARROW, SIGNAL = 1.4; EXPRESSED IN LUNG, SIGNAL = 1.4; EXPRESSED IN FETAL LIVER, SIGNAL = 1.4; EXPRESSED IN BRAIN, SIGNAL = 2.7; EXPRESSED IN HELA, SIGNAL = 0.48; EXPRESSED IN ADULT LIVER, SIGNAL = 1.3; NT HIT: gi16164488, EVALUE 0.00e+00; SWISSPROT HIT: P98161, EVALUE 3.00e-91; EST_HUMAN HIT: AI014294.1, EVALUE 0.00e+00
gtcaccctccacggccaggatgtcctcatgctccctggtgacctcgttggcttgcagcacgacgctggccctggcgccctcccgcactgctcgccggctcccggccaccctggtccccaggccccgtacctctccgccaacgcctcgtcatggctgccccacttgccagcccagctggagggcacttgggcctgccctgcctgtgccctgcggctgcttgcagccacggaacagctcaccgtgctgctgggcctgaggcccaaccctgggctgcggctgcctgggcgctatgaggtccgggcagaggtgggcaatggcgtgtccaggcacaacctgtcctgcagctttgacgtggtctccccagtggctgggctgcgggtcatctaccctgccccccgcgacggccgcctctacgtgcccaccaacggctcagcctcggtgctccaggtggactctggtgccagcgccacggccacggctcgctggcctgggggcagtgtcagcgcccgctttgagaatgcctgccctgccctggtggccaccttcgtgcccggctgcccctgggagaccaatgataccctgttctcagtggt

SEQ ID NO: 20606 - DNA, 495 bp, Homo sapiens
  MAP TO D86996.1; EXPRESSED IN BONE MARROW, SIGNAL = 1.2; EXPRESSED IN LUNG, SIGNAL = 1.2; EXPRESSED IN ADULT LIVER, SIGNAL = 1.2; EXPRESSED IN BRAIN, SIGNAL = 1.2; NT HIT: gi14777637, EVALUE 0.00e+00; SWISSPROT HIT: O95985, EVALUE 5.00e-73; EST_HUMAN HIT: BG180123.1, EVALUE 0.00e+00
ggcggccagggctgacatcttgtccttgggccgtctggggttgggcttcccagggggcctcctggcccggccccgccctcgaccctgccttctccctggtccaccgcggtgcatggggtggcaggaggccgcatgcttcagctccaccagctcctggaagacggggtcacaaaagacgcagcccatgtgctgcgcctcatcgcccgggagtggggacttggccttgttgaagtccacatcaagcaaggcggcctcacagacactgcaggtgtcggcggacacccgcacgcggtgggcgttctcgaagcagtgcgctaccacgttgcacttgttgcaggccaccttccacttggggcccgaggtggggtccagcaccagcaccccgctctcacattccacgcactggccgatgcccagcatgctcagcgagtgctggcaggaggggtgcgtacactcgttgcagcccatgcctggcgggagaagggagccctgtaa

SEQ ID NO: 20607 - DNA, 548 bp, Homo sapiens
  MAP TO AC011489.3; EXPRESSED IN ADULT LIVER, SIGNAL = 2.1; EXPRESSED IN PLACENTA, SIGNAL = 1.4; EXPRESSED IN HELA, SIGNAL = 3.3; EXPRESSED IN LUNG, SIGNAL = 2.3; SWISSPROT HIT: P17038, EVALUE 4.00e-10; EST_HUMAN HIT: AI335253.1, EVALUE 0.00e+00; NT HIT: gi11967932, EVALUE 9.00e-43
acctgctgtggcggcggctccagccccctcaccaccgctgcatggaagggtgctggtgggggcagcagcatggacagccggctccggaggggctgcagaggcctgctcctggctggtgtcggccatgagggggctctggggcggcacctgccggtgggtcttcttgtggcggttgagcttgctgctctgggcgcaggcgtagggacactggtcgcaagcatagggccgctcgcctgtgtgtgagcgcatgtgcactttgaggttgctgaaggagctgagggtcttcttgcacacaggacaggtggggctccgccgggtgaggccgctgccacttgcacgggggctcttggcctcagctgctggccccaccactgccgacacggctgcagccacctcggccaggcccaggagcggggcctccggggcctctgattctgtctggtagatggacagtccgtggtcccactgggcgtgacgcagcagcttccaggccactgtgaactgtttgccacagcgcaggcagctcaaggccttcagctcctctcgtt

SEQ ID NO: 20608 - DNA, 504 bp, Homo sapiens
  MAP TO AP000354.1; EXPRESSED IN LUNG, SIGNAL = 1.2; EXPRESSED IN HEART, SIGNAL = 1.2; EXPRESSED IN FETAL LIVER, SIGNAL = 1.3; EXPRESSED IN HELA, SIGNAL = 2.2; EXPRESSED IN ADULT LIVER, SIGNAL = 1.5; EXPRESSED IN PLACENTA, SIGNAL = 2.3; SWISSPROT HIT: Q05967, EVALUE 2.10e+00; EST_HUMAN HIT: BE740643.1, EVALUE 1.80e-01; NT HIT: AL161593.2, EVALUE 1.20e-01
tttctctccacatctttcctatctcccactcccttctcagcacattctaatcttacttttgtccccaccagtgtattaattgctctgaccaagattaccagtaacctccatgtcaccgagtgcactcccacgccatcacctgtgtgcttacagtttcgaaacaaaatattcacatcagacttttcttctgcactctctctctcattgcctggtccacatctttccctgggtatctcaaagggttctcaaattaaatgtgttcacgtctcttccttccataatcctcctcacctttcttacctctgtatgtggtacctccttcctttttaccttcatatccatctgtcggcaagtctgttgattctgctgcatcaaagagcccttgaatctgtgtccctcacattggctcccctttgccaactagataaagtccaaacgccttaccctggagtttgcctgcgtgactctcgcttgcctgagctggcccctctggcctacctttga

SEQ ID NO: 20609 - DNA, 612 bp, Homo sapiens
  MAP TO AC005412.5; EXPRESSED IN BRAIN, SIGNAL = 2.4; EXPRESSED IN HELA, SIGNAL = 0.8; EXPRESSED IN ADULT LIVER, SIGNAL = 1.6; EXPRESSED IN BONE MARROW, SIGNAL = 1.8; EXPRESSED IN HEART, SIGNAL = 1.7; EXPRESSED IN LUNG, SIGNAL = 1.6; SWISSPROT HIT: P53668, EVALUE 1.20e-02; EST_HUMAN HIT: AA776190.1, EVALUE 5.00e-64; NT HIT: AB026497.1, EVALUE 1.00e-125
ctcagagcactctgccgccccctcgccacaggtggaggtgaggactctagagggacagctggtgcagcatcctggcccaggcatccctcgaccagggcaccgatcccgagcccctgagctagtgactaaaaagttcccagtcgacctgcgcctgccccccgtggtgcccctgcccccacctaccctccgggagctggagctgcaacgacggcccactggagactttggcttctccctgcggcgcacaaccatgctggatcggggccccgagggccaggcctgtcggcgtgtggtccactttgctgagcctggtgcaggcaccaaggacctggccctggggctggtgccaggagatcgactggtggagattaatgggcacaatgtggagagcaagtccagggatgagattgtggagatgatccggcagtcaggggacagcgtgcggctcaaggtgcagcccattccagagctcagcgagctcagcaggagctggctgcggagcggcgagggacctcgcagggagccatccgatgtgagtgcttccctgggcacctgggctaagcagggatggggaatgtgggcacctcctgcttgactgggtaatcggggtac

SEQ ID NO: 20610 - DNA, 888 bp, Homo sapiens
  MAP TO AC008981.4; EXPRESSED IN HELA, SIGNAL = 8.5; EXPRESSED IN ADULT LIVER, SIGNAL = 6.5; EXPRESSED IN BONE MARROW, SIGNAL =  14; EXPRESSED IN LUNG, SIGNAL = 5.3; EXPRESSED IN HEART, SIGNAL = 7.6; EXPRESSED IN PLACENTA, SIGNAL = 5.6; EXPRESSED IN BRAIN, SIGNAL = 7.1; SWISSPROT HIT: P08865, EVALUE 0.00e+00; EST_HUMAN HIT: BG775820.1, EVALUE 0.00e+00; NT HIT: gi14768073, EVALUE 0.00e+00
ttaagaccagtcagtggttgctcctacccattcagtggcctgagcagtgggagctgcagaccagtcttccatggcaggctgagcgctccagtcttcagtagggaattgctgaataggcacagagggcacctgcacaccttcagaccagtctgcaacctcaggctgagtagcagtgaactcaggagcgggagcagtccattcaccctgaaattcctccttggtcactgccttctcagcagcagcctgctcttctttttcaatctcttcaggatctctgtagaagtacagatcaggcatgacctcccatgggtgttcacgggaaatggtgccacgcatgcgcagaacttcccgagccagcatccaccacatcaaacccactgagtgagctcccttgttgttgcatgggatggcaatgtccacatagcgcagaggagaatctgtgttacacagcgcaatggtaggtaggttaacataagatgcctccgtgagaggctggtggtcagccctggggtcagtaaccacaagaagccgtggctcccagaaggctgcctggatctggttagtgaaggttccaggagtgaagcggccagcaattggagtggctccagtggcagcagcaaacttcagcacagccctctggccagtattcctggaggatataacactgacatcagcagggttttcaatggcaacaatagcacgagctgccagcagaagcttctcccaggtcctcttgagatttatgatatagatgccatcacttttccttttatagatgtactgttccatctggaagtcaagattggtgccacctaagtgggttcctgctgcaaggaacttaaggacatcctcctccttaatttgcaggacatcaagggctccggacat

SEQ ID NO: 20611 - DNA, 481 bp, Homo sapiens
  MAP TO AC002326.1; EXPRESSED IN HELA, SIGNAL = 1.6; EXPRESSED IN ADULT LIVER, SIGNAL = 2.2; EXPRESSED IN LUNG, SIGNAL =   2; EXPRESSED IN HEART, SIGNAL = 1.7; EXPRESSED IN FETAL LIVER, SIGNAL = 1.5; SWISSPROT HIT: P54253, EVALUE 4.00e-73; EST_HUMAN HIT: BI047235.1, EVALUE 0.00e+00; NT HIT: gi4506792, EVALUE 0.00e+00
ccagcacctggtgatccccggcacacagcccctgctcatcccggtcggcagcactgacatggaagcgtcgggggcagccccggccatagtcacgtcatccccccagtttgctgcagtgcctcacacgttcgtcaccaccgcccttcccaagagcgagaacttcaaccctgaggccctggtcacccaggccgcctacccagccatggtgcaggcccagatccacctgcctgtggtgcagtccgtggcctccccggcggcggctccccctacgctgcctccctacttcatgaaaggctccatcatccagttggccaacggggagctaaagaaggtggaagacttaaaaacagaagatttcatccagagtgcagagataagcaacgacctgaagatcgactccagcaccgtagagaggattgaagacagccatagcccgggcgtggccgtgatacagttcgccgtcggggagcaccgagcccag

SEQ ID NO: 20612 - DNA, 868 bp, Homo sapiens
  MAP TO AL136528.9; EXPRESSED IN BRAIN, SIGNAL = 1.6; EXPRESSED IN ADULT LIVER, SIGNAL = 2.1; EXPRESSED IN HELA, SIGNAL = 1.3; EXPRESSED IN BONE MARROW, SIGNAL = 1.6; EXPRESSED IN FETAL LIVER, SIGNAL = 1.5; EXPRESSED IN LUNG, SIGNAL =   2; EXPRESSED IN HEART, SIGNAL = 1.6; SWISSPROT HIT: P17437, EVALUE 2.00e-35
atgtccggggctcagcggggccactggatccccttccgaaggcgcgaccccatgtccggggctcagcggggccgctgggtccccttccgaaggcgcgaccccatgtccggggctcagcggggccgctgggtccccttccgaaggcgcgaccccatgtccggggctcagcggggccgctgggtccccttccgaaggcgcgaccccatgtccggggctcagcggggccgctgggtccccttccgaaggcgcgaccccatgtccggggctcagcggggccgctgggtccccttccgaaggcgcgaccccatgtccggggctcagcggggccgctgggtccccttccgaaggcgcgaccccatgtccggggctcagcggggccgctgggtccccttccgaaggcgcgaccccatgtccggggctcagcggggccgctgggtccccttccgaaggcgcgaccccatgtccggggctcagcggggccgctgggtccccttccgaaggcgcgaccccatgtccggggctcagcggggccgctgggtccccttccgaaggcgcgaccccatgtccggggctcagcggggccgctgggtccccttccgaaggcgcgaccccatgtccggggctcagcggggccgctgggtccccttccgaaggcgcgaccccatgtccggggctcagcggggccgctgggtccccttccgaaggcgcgaccccatgtccggggctcagcggggccgctgggtccccttccgaaggcgcgaccccatgtccggggctcagcggggccgctgggtccccttccgaaggcgcgaccccatttcgggggttagtggggccgctgagtccacttgcgaaggcgccaccccac

SEQ ID NO: 20613 - DNA, 469 bp, Homo sapiens
  MAP TO AC006070.1; EXPRESSED IN LUNG, SIGNAL = 1.2; EXPRESSED IN FETAL LIVER, SIGNAL = 1.3; EXPRESSED IN HELA, SIGNAL = 0.72; EXPRESSED IN ADULT LIVER, SIGNAL = 1.6; EXPRESSED IN BONE MARROW, SIGNAL = 1.1; EST_HUMAN HIT: BE250684.1, EVALUE 4.00e-67; SWISSPROT HIT: P26371, EVALUE 5.50e+00; NT HIT: gi14210533, EVALUE 0.00e+00
atggtcaactcctgttgtggctctgtgtgctctgaccagggctgtggcctagagaactgctgccgtcccagctactgccagaccacctgctgcaggaccacctgctgccgccccagctgctgtgtgtccagctgctgcagaccccagtgctgccagaccacctgctgcaggaccacctgctgccaccccagctgctgtgtgtccagctgctgcagaccccagtgctgccagtctgtgtgctgccagcccacctgctgcagaccccaatgctgccagactacctgctgtaggaccacctgctgccgccccagctgctgcaggccccagtgctgccagtctgtgtgctgccagcccacctgctgctgccccagctactgtgtgtccagctgctgcagaccccagtgctgccagaccacctgctgcagaaccacctgctgccgccccagctgctgtgtgtccaggtgctaca

SEQ ID NO: 20614 - DNA, 804 bp, Homo sapiens
  MAP TO AP000510.1; EXPRESSED IN LUNG, SIGNAL = 2.7; EXPRESSED IN ADULT LIVER, SIGNAL = 2.8; EXPRESSED IN HELA, SIGNAL = 4.8; EXPRESSED IN BRAIN, SIGNAL = 2.6; EXPRESSED IN HEART, SIGNAL = 2.9; EXPRESSED IN FETAL LIVER, SIGNAL = 3.2; SWISSPROT HIT: Q95211, EVALUE 5.00e-02; NT HIT: gi15304372, EVALUE 0.00e+00
gcctctttgcccggagcatcggtgttgtggaggagaaagtttcccaaaacttggggaccaacttgcctcagctcggacaaccttcctccactggcccctctaactctgaacatccgcagcccgctctggaccctaggtctaatgacttggcaagggttcctctgaagctcagcgtgcctgcatcagatggcttcccacctgcaggaggttctgcagtgcagaggtggcctccatcgtgggggctgcctgccatggattcctggccccctgaggatccttggcagatgatggctgctgcggctgaggaccgcctgggggaagcgctgcctgaagaactctcttacctctccagtgctgcggccctcgctccgggcagtggccctttgcctggggagtcttctcccgatgccacaggcctctcacccaaggcttcactcctccaccaggactcggagtccagacgactgccccgttctaattcactgggagccgggggaaaaatcctttcccaacgccctccctggtctctcatccacagggttctgcctgatcacccctggggtaccctgaatcccagtgtgtcctggggaggtggaggccctgggactggttggggaacgaggcccatgccacaccctgagggaatctggggtatcaataatcaacccccaggtaccagctggggaaatattaatcggtatccaggaggcagctggggaaatattaatcggtatccaggaggcagctgggggaatattaatcggtatccaggaggcagctgggggaatattcatctatacccag

SEQ ID NO: 20615 - DNA, 1167 bp, Homo sapiens
  MAP TO AL136105.2; EXPRESSED IN ADULT LIVER, SIGNAL = 2.4; EXPRESSED IN HELA, SIGNAL = 7.7; EXPRESSED IN BONE MARROW, SIGNAL = 2.6; EXPRESSED IN HEART, SIGNAL = 2.5; EXPRESSED IN LUNG, SIGNAL = 2.2; EXPRESSED IN BRAIN, SIGNAL = 2.4; NT HIT: X15277.1, EVALUE 0.00e+00; EST_HUMAN HIT: AL550294.1, EVALUE 0.00e+00; SWISSPROT HIT: P06733, EVALUE 0.00e+00
atgtctattctcaagatccatgccagggagctctttgactctcgtgggaatcccactgttgaggttgatctcttcacctcagaaggtctcttcagagctgctgtgcccagtggtgcttcaactggtatctatgaggtcctagagctccaggacaatgataagactcgctatatggggaagggtgtctcaaagcctgttgagcccatcaataaaactattgcacctgtcctggttagcaagaaactgaacgtcacagaacaagagaagattgacaaacttatgatagagatggatggaacagaaaataaatctaaatttggtgcaaatgccattctgggagtgtccctcgctgcctgcaaagctagtgctgttgagaagggggttcccctgtaccaccacatcgccgacttgtctggcaactccaaagtcatcttgccagtcccggtgttcaatgtcatcaatggcagttctcatgctgtcaccaagctggccatgcaggagttcatggtcctcccagtcggtgcagcaaacttcagggaagccatgcccattggagcggaggtttaccacagcctgaagaatgtcatcaaggagaaatatgggaaagatgccaccggtgtgggggatggaggcgcgtttgctcccaacatcctggagaataaagaaggcctggagctgctgaagactgcgattgggaaagctggctacactgataaggtgatcgtcagcatggacgtagaggcctccgagttcttcaggtctggaaagtatgacctggaattcaagtttctcgacgaccccaccaggtacatctcacctgactgtctggctgacctgtacaagtccttcatcaaaaactacccagtggtgtctactgaagatccctttgaccaggatgactggggagcttggcagaagttcacggccagtgcaggaatccaggtagtggaggatgatctcagagtgaccaacccaaagaggacagcctcggccgtgaatgagaagaagtgcaactgcctcctgctcaaagtgaaccagattcgctctgtgactgagtcccttcaggcgtgcaagctggcccaggccaatggttggtgtgtcatggtgcctcatcattctggggagactgaaaataccttcatcactgacctggtggtggggctgtga

SEQ ID NO: 20616 - DNA, 908 bp, Homo sapiens
  MAP TO AC004174.1; EXPRESSED IN LUNG, SIGNAL = 1.2; EXPRESSED IN ADULT LIVER, SIGNAL = 1.4; EXPRESSED IN HELA, SIGNAL = 1.2; EXPRESSED IN PLACENTA, SIGNAL = 1.6; EXPRESSED IN BRAIN, SIGNAL = 1.3; EXPRESSED IN BONE MARROW, SIGNAL = 1.3; NT HIT: AJ302622.1, EVALUE 0.00e+00; EST_HUMAN HIT: BG111528.1, EVALUE 5.10e+00; SWISSPROT HIT: Q9GZK7, EVALUE 0.00e+00
aaacttggacgatcgacatggaaattgtctccacaggaaacgaaactattactgaatttgtcctccttggcttctatgacatccctgaactgcatttcttgttttttattgtattcactgctgtctatgtcttcatcatcatagggaatatgctgattattgtagcagtggttagctcccagaggctccacaaacccatgtatattttcttggcgaatctgtccttcctggatattctctacacctccgcagtgatgccaaaaatgctggagggcttcctgcaagaagcaactatctctgtggctggttgcttgctccagttctttatcttcggctctctagccacagctgaatgcttactgctggctgtcatggcatatgaccgctacctggcaatttgctacccactccactacccactcctgatggggcccagacggtacatggggctggtggtcacaacctggctctctggatttgtggtagatggactggttgtggccctggtggcccagctgaggttctgtggccccaaccacattgaccagttttactgtgactttatgcttttcgtgggcctggcttgctcggatcccagagtggctcaggtgacaactctcattctgtctgtgttctgcctcactattccttttggactgattctgacatcttatgccagaattgtggtggcagtgctgagagttcctgctggggcaagcaggagaagggctttctccacatgctcctcccacctagctgtagtgaccacattctatggaacgctcatgatcttttatgttgcaccctctgctgtccattcccagctcctctccaaggtcttctccctgctctacactgtggtcacccctctcttcaatcctgtgatctataccatgaggaacaaggag

SEQ ID NO: 20617 - DNA, 1927 bp, Homo sapiens
  MAP TO AC008985.5; EXPRESSED IN BONE MARROW, SIGNAL = 2.8; EXPRESSED IN LUNG, SIGNAL = 2.4; EXPRESSED IN HELA, SIGNAL = 2.7; EXPRESSED IN ADULT LIVER, SIGNAL = 2.2; EXPRESSED IN PLACENTA, SIGNAL = 1.4; EXPRESSED IN HEART, SIGNAL = 2.3; EXPRESSED IN FETAL LIVER, SIGNAL = 2.2; SWISSPROT HIT: P03200, EVALUE 1.00e-03; NT HIT: gi11425304, EVALUE 0.00e+00; EST_HUMAN HIT: BI519285.1, EVALUE 0.00e+00
agtgaggatggccgtgggggtggcagagggcggctgccccaggacgatcttctccgggctagacgccaggccaggggctgggctggggggtggtggcctgaggcggggcggcggcctgtggggtgggggcctgcgggggctgctgcgcctgcggctgctggaggcccaggggcaggggtgtgctgaccgcggggggcgcctggggggcaggctgcaccgtgaggacaggcgcggcctccccggtggcagcggcaggggtggccggctgcaccaggccgtcgggggtgttgagcatggccacggcgctggggggcagggtgaccccctggaggacagtggtggcggccggcccggcgggcgctggctggctctgcgtgggcaggctgcccgccgccagcgacacgggcatctggaagagcgcaggctggcccacctggatgggagcggcggagaggatgtgcgcgctgtgggccccggagtggggggccaacacggggcccaggctcagtgggcccgccaggttctggtttgtgaggatggggttcgcgatgagctgtccacctgtgtggggggcagcggccgccaggatctgcccgcccacgttggccggcagggctgagagctgctgcgggagctggaccgccggggcgccaggcagtaggaactggttctggcccggcagcatgtgctgggcggggatgacgatgctgctgccttggttcaggaggtggacgctcatgggtttgctcagggccccggggggctgcggcggggccgctccggtggtggtggccggtggctgcttgaagacgttcgcttgcagcgcaggcgcggggaagcccgacagcaccacgttctggcccgccttccccgccgccatgaacgtcaggttctgcggggccttgggctgctgcgggagcgcccccggctcgccctggatggtgagcgtggcgcccgcgggcgcaaacggcttgggcgtcagctggtagagcttgggcggcagcacccccgcgggcttgggctggatgggcgtgggtgtgcgatgcaggatcacgttgggcgccgggaccagtggcgacgagccgaggcctggggccaccgccagcggctgtcccgagggcgtcccggtgggagccgaggcggcccccgcgcctccgaacacagagttcccattgagcgtggtggccacagcggccgagaggttcttctggatgaccaggccagccccctgtggcgagacaccggccgacgccagcgtcacgggctccgaggggccagccgccgaggccaggtagccgctgacgggcacctgcttggccaggagctgggaggtgggcgtgttgagcgccatgacgggctggcccaccacctggatgggcgccaggcccagtgtggccgccgtggcacccccagggctgccattgggcaggccttggaggcccgggatgggctgcagtgtcacattgcccaggcccacaggctgcaggaagggctgcacactcagggccttgttgaccacgtcctggggcggcaccagggcctggtgggtcagcacggtaggcgggccctgcagccccagcaggtcggtgctgcctgggaagagggcttggggccccgcagccacggccgctgcccctccagcgcccgtcgggcctgccccgccatccgcaggctgcagggtgggcagctggaagggacccaggtccagctcagcctcggcctccagcgtctgctccgtgatgttggcctcttggaggctctgctggaggatgtcacagggctggtcagcgcccccactgcccccgccgccgccccctgtcgcaggagagcccaggatgtcatcttccaggaagtctaggtccacactgggggccggctggttgggctctgggttcaggtggttgccggaagcttcttgcacatggag

SEQ ID NO: 20618 - DNA, 678 bp, Homo sapiens
  MAP TO AL132795.12; EXPRESSED IN HELA, SIGNAL = 2.1; EXPRESSED IN PLACENTA, SIGNAL = 1.5; EXPRESSED IN BRAIN, SIGNAL = 1.3; EXPRESSED IN ADULT LIVER, SIGNAL = 1.6; EXPRESSED IN FETAL LIVER, SIGNAL = 1.7; EXPRESSED IN HEART, SIGNAL = 1.5; EXPRESSED IN LUNG, SIGNAL = 1.7; EXPRESSED IN BONE MARROW, SIGNAL = 1.5; NT HIT: U73123.1, EVALUE 1.10e-02; EST_HUMAN HIT: AA723541.1, EVALUE 7.00e-48; SWISSPROT HIT: Q01656, EVALUE 4.00e-24
gcagaaaacgctcttccaaatgtaatggagtcagctttttattttgaacaagctggagttggtttgggcacagatgagacataccgcatatttcttgccctcaagcagcttactgatacccacccaatccaaagatgccgcttctggggaaagatcttgggtctggaaatgaattatattgtagctgaagtggaatttcgtgagggggaagatgaagaggaagtggaagaggaagatgtagctgaagagagggacaatggagaaagtgaagctcatgaagatgaggaagatgaattaccaaagtccttttacaaggccccacaggctataccaaaagaagaaagtagaacaggtgccaacaaatatgtctattttgtttgcaatgaaccaggaagaccatgggtgaagttaccaccagttatacctgcacaaattgttattgcaagaaaaatcaagaaatttttcactgggcgattggatgctcccatcataagctacccacctttcccaggaaatgagagtaattatttacgagcacaaattgcccgaatttcagcaggaacccacgtcagtcctctaggattttatcagtttggtgaagaggaaggagaggaggaggaagaggcagaaggtgggcgaaatagctttgaggaaaaccctgattttgaaggcatccaa

SEQ ID NO: 20619 - DNA, 506 bp, Homo sapiens
  MAP TO AC002070.1; EXPRESSED IN LUNG, SIGNAL = 1.1; EXPRESSED IN HELA, SIGNAL = 0.79; EXPRESSED IN ADULT LIVER, SIGNAL = 1.2; EXPRESSED IN BRAIN, SIGNAL = 0.91; EXPRESSED IN BONE MARROW, SIGNAL = 1.2; EXPRESSED IN FETAL LIVER, SIGNAL = 1.1
accatcatcatcatcaccatcatcctcatcaccatcatcaccatcaccatcatcatcatcatcaccatcaccatcattatcaccatcatcatcaccagcatcatcatcatcaccatcatcctcaccaccattatcatcaccatcatcctcaccaccaccatcatcaccaccatcatcatcaccatcatcctcaccatcatcatcatcaccatcatcatcaccatcatcatcaccaccatcgtcaccatcatcctcaccaccatcatcaccaccatcatcctcaccaccatcatcactgtcatcatcaccatcaccatcatcatcaccaccatcatcaccaccatcctcaccatcaccatcatcatcaccatcatcatcaccaccatcatcaccatcatcaccatcaccatcattatcaccatcatcatcaccagcatcatcatcatcaccatcgtcctcaccaccatcatcatcatcaccatcatcctcaccaccatcatcatcat

SEQ ID NO: 20620 - DNA, 1669 bp, Homo sapiens
  MAP TO AL136109.1; EXPRESSED IN ADULT LIVER, SIGNAL = 3.5; EXPRESSED IN HELA, SIGNAL = 5.2; EXPRESSED IN PLACENTA, SIGNAL = 3.1; EXPRESSED IN BRAIN, SIGNAL = 3.6; EXPRESSED IN FETAL LIVER, SIGNAL = 4.3; SWISSPROT HIT: O18326, EVALUE 6.00e-05; NT HIT: gi14738240, EVALUE 0.00e+00; EST_HUMAN HIT: AU131035.1, EVALUE 0.00e+00
gagagaagacagaagttgatggaggaaattcgtgaattgaaagaacttcaggatgaaggaagaagtgcacgattacagtgtcctcagtgtgtgtttggtaccaattgccctaaaacatttgtgcaacatgctaaaacccatgaaaaagataaaaggtactactgctgtgaagagtgtaacttcatggcagtgacagaaaatgaattggaatgccatcgaggcattgcacatggggcagtggtaaaatgccctatggtcacttctgatattgcccagagaaaaacacaaaaaaagactttcatgaaagactctgtagtaggatcatccaaaaaatcagctacctacatatgtaagatgtgtccttttactacttcagccaaaagtgttttaaaaaagcacacggagtacttgcattcatcatcatgtgttgattcatttggtagtcctcttggacttgataaaagaaaaaatgacatccttgaagaacctgtagatagtgatagcactaaaacattaactaaacaacagtcaaccacatttccaaagaactctgctttaaaacaagatgtgaagcgaacatttggatcaacctcacaatcaagtagtttttcaaaaattcataagcggccacacagaatacagaaagctcggaaaagcattgcccaatcaggtgtaaacatgtgcaatcaaaacagctctcctcataagaatgttacaattaaaagcagcgttgaccaaaaacctaagtatttccatcaagcagcaaaagaaaagtctaatgccaaggcaaatagccactatttgtatagacacaaatatgaaaactataggatgatcaaaaaatcaggtgaatcatatcctgtgcatttcaaaaaagaagaagctagttcattaaattctttacacctgttttcatcatcaagtaattctcacaacaattttatttcagaccctcataagcctgacgccaaaaggcctgaaagcttcaaagatcacagacgtgtagctgtaaagagagtaattaaggaatctaagaaggaaagttctgttggaggggaagacttggatagctatccagattttttgcataaaatgactgttgtcgttttgcaaaaacttaattctgctgaaaagaaagatagttatgaaacagaagatgaaagttcctgggataatgttgagttaggagactacactacacaggccatagaagatgaaacctatagtgatattaatcaagagcatgtaaatttattccctttatttaagagcaaagtggaaggtcaggagcctggagaaaatgctactcttagttatgaccaaaacgatggcttttattttgaatactatgaagatactggaagtaacaactttttgcatgagatacatgatcctcagcatttagaaactgcagatgcttcattgtcaaagcatagttctgtttttcattggactgatttgtctcttgagaagaaatcgtgtccttactgcccagcaacatttgaaacaggtgttgggttatcaaatcatgtcagggggcatcttcacagagcaggattaagctatgaagcccgtcatgttgtatcaccagaacaaatagccacaagtgacaaaatgcagcatttcaaaagaactggcacaggaacacctgttaaacgagttagaaaag

SEQ ID NO: 20621 - DNA, 596 bp, Homo sapiens
  MAP TO AC002404.1; EXPRESSED IN HELA, SIGNAL = 4.2; EXPRESSED IN ADULT LIVER, SIGNAL = 1.4; EXPRESSED IN BONE MARROW, SIGNAL = 1.4; EXPRESSED IN LUNG, SIGNAL = 1.5; EST_HUMAN HIT: AI133574.1, EVALUE 0.00e+00; SWISSPROT HIT: P17010, EVALUE 2.00e-81; NT HIT: AF045780.1, EVALUE 0.00e+00
aggaaatcataaggtagtcctcacagttgcctttgtcatcatcctgctggtccacagggatcccattggcatctatgactgcttcagaggcacagtctgctaccaatacttcttctgaaactacgtcggtagtcagaggatcagtgacaatttctgcttccactacactatcatgaaccacatgttcaacatgtccaacatgtccaacatgtccaacgtcagacacatgtatagaatcacccgtcaagacgtgttctggcatagacattgaggctgaagtaatgtcagaagctaaaacatcatctgggactgtgcaatgtgctaaagaaacttcttcagttacatctgagtccagcacttgctcaggaatgatgaccgtttcagacacatctgcttcttccatgatatctgggcactgaacatcttctataacaacgtcctcaataacatcttggattacaactgaatctgggtcatcaggaacaaagttatgcacagttatgtctgaatccacaacatctgaaacaaaaacagtttcttgtacttccacaacaatttgatcaccatccatgtgtgtaccatcagctccttaaaaa

SEQ ID NO: 20622 - DNA, 512 bp, Homo sapiens
  MAP TO AL356017.1; EXPRESSED IN PLACENTA, SIGNAL = 1.7; EXPRESSED IN BRAIN, SIGNAL = 1.6; EXPRESSED IN ADULT LIVER, SIGNAL = 1.5; EXPRESSED IN HELA, SIGNAL = 1.8; EXPRESSED IN LUNG, SIGNAL = 1.4; EST_HUMAN HIT: BG035976.1, EVALUE 0.00e+00; SWISSPROT HIT: P34529, EVALUE 4.00e-14; NT HIT: gi14748176, EVALUE 0.00e+00
ctttttgcttctcatatatgaaaggcggccctcatgcgcatcagggtaagtgcaaaatagatatgtggtgatggcatgctttaaaaaggagtcgccaagcatttcaagccgctccaggttaaatccatcactagcgtttgacagagtcaaagcctgaagaataagtccaggattggggccaagagtccttgaggagtacccaatagaagggctctgctcagaatccatcctgcccttgagcacttgaatagtgtctgtcgtaccaggcattacggccatcacaggacttccatctgaggtagatttgttagcatttccatcaaggtatttattactcaggagagtacattcatcgctgggctggggctggttctcgtaactgtataaattctgaatggaatatgaggtagttggttgcacgggtatttcctgcttgtagtaatttagctgatttccttggcaaaagtctctgttagctaaatcataactgccattggcgagattttgattgt

SEQ ID NO: 20623 - DNA, 453 bp, Homo sapiens
  MAP TO AC012478.1; EXPRESSED IN ADULT LIVER, SIGNAL = 4.5; EXPRESSED IN PLACENTA, SIGNAL = 5.3; EXPRESSED IN BRAIN, SIGNAL = 5.4; EXPRESSED IN BONE MARROW, SIGNAL = 5.9; EXPRESSED IN LUNG, SIGNAL = 3.3; EXPRESSED IN HEART, SIGNAL = 7.3; NT HIT: gi14753295, EVALUE 0.00e+00; EST_HUMAN HIT: BG338855.1, EVALUE 0.00e+00; SWISSPROT HIT: P02272, EVALUE 7.00e-42
aggggatcacgccacccccagctgtggtagccttgataagagaatccaactcttcatcaccacggactgcaagctgccagtgacgcggagtgatacgctttgctttgagacccttagaagcattacctgccagctccagcacctctgcagtgaggtaccccggaatcgcagccctgtgcacggcagcagtggcacccacccttccatggcttgtggtgcgagtcttcaagtgtctgtggatgcggcccacaggaaactgtagcccagctctctgtgagcgagatactgccttagccttggccttcccactgtcctttccagctttgcctccggccatgttctcggcgccgactccgcctccgcctccgccccgccgcgcgccctcccgctgccgacccgcgccgccgccgccgctctccttcacctcactttaaaagaaaagacagaagccat

SEQ ID NO: 20624 - DNA, 526 bp, Homo sapiens
  MAP TO AC008701.5; EXPRESSED IN ADULT LIVER, SIGNAL = 2.5; EXPRESSED IN BRAIN, SIGNAL =   2; EXPRESSED IN HELA, SIGNAL = 0.86; EXPRESSED IN BONE MARROW, SIGNAL = 2.2; EXPRESSED IN LUNG, SIGNAL = 2.5; NT HIT: AY005817.1, EVALUE 5.00e-01; EST_HUMAN HIT: AU134159.1, EVALUE 0.00e+00; SWISSPROT HIT: P16818, EVALUE 2.50e-01
gaaaggaacgaaggcaaggagggaagtgacccggggcccccttaccttgtccttggggccgaggttctgcaacacctctttgccggtggcgctccggatctctaccccggcgggggcgggggaggcgggcgcgggctccctgctctcttcccggccttggcccctgcgcggggtgtccccctcgatcccgggccgactccccgatcctcggtcgctgccctggccgctccgaggagtcttcgcgccccgctgccccacgctgagggcatcgaaatccagcgtcttgctctcgaaggcgccctccacgttgcagaacatgccgccgtatttctgccgcgggacctggtccgtggtgcccggcctggccaggtacacgggcagatcgtcttcgtgggagctgtcccagcccctccggcccgaggccatggttcaagcacgaaagcggcccgcgggtttttcttccccagaggcggaaagggcagccgccggcagcgtgcgccgagccacagtgactgtggcgggagga

SEQ ID NO: 20625 - DNA, 1042 bp, Homo sapiens
  MAP TO AC002401.1; EXPRESSED IN LUNG, SIGNAL =   2; EXPRESSED IN FETAL LIVER, SIGNAL = 1.9; EXPRESSED IN ADULT LIVER, SIGNAL = 1.6; EXPRESSED IN HELA, SIGNAL =   2; EXPRESSED IN PLACENTA, SIGNAL = 1.6; EXPRESSED IN HEART, SIGNAL = 2.8; NT HIT: gi14773216, EVALUE 0.00e+00; EST_HUMAN HIT: AI475690.1, EVALUE 0.00e+00; SWISSPROT HIT: O35274, EVALUE 3.00e-86
caggcgctgaagccgcccgacgcgcccgggcccgacgaggcacccaagggggcccaccacaagaaatatggctccaacgtccaccgcatcaaaagtatgttcctgcagatgggcacgacggcggggccctcgggcgaggcgggcggcggcgcgggcctggccgaggccccacgggcgtccgagcgcggcgtgcgcctgtcgctgccgcgggccagcagcctgaacgagaacgtggaccacagcgccctgctgaagctgggcaccagcgtgtcggagcgcgtgagccgcttcgactccaagcccgcgccctccgcgcagcctgcgccgccgccgcacccgccgtcccggctgcaggagacgcggaagctgttcgaacggagcgccccagcgcgcaggcggcgacaaggagcgcggcgcggcggctgctgaggcaggagcgcgccggcctgcaggaccggaagctggacgtcgtggtgcgcttcaacggcagcaccgaggcgctggacaagctggacgctgacgccgtgtcccccacggtcagccagctcagcgccgtcttcgagaaggccgactcgaggaccggcctccaccgcgggcccgggctccccagggccgcaggggttccccaggtcaactcgaagctggtcagcaagcggtcccgggtgttccagcccccgccgccgccgccgcccgccccgtcgggggatgccccggccgagaaagagcgatgccccgcagggcagcagcccccgcagcaccgagtggcccctgcccggccgccccccaagccccgggaggtgcgcaagattaagccggtggaggtggaggagagcggggagtcggaggccgagtcggcgcccggggaggtgatccaggccgaggttacggtccacgcggccctggagaatggcagcaccgtggcaactgcagccagccccgcgcccgaggagccaaaggcccaagcggccccggagaaggaggcggcggcggtagcgccgccagagaggggggtgggcaatggccgggccccggacgtggcccc

SEQ ID NO: 20626 - DNA, 884 bp, Homo sapiens
  MAP TO AC011802.4; EXPRESSED IN HEART, SIGNAL = 1.7; EXPRESSED IN ADULT LIVER, SIGNAL = 1.7; EXPRESSED IN PLACENTA, SIGNAL = 2.3; EXPRESSED IN BONE MARROW, SIGNAL = 2.5; EXPRESSED IN FETAL LIVER, SIGNAL = 1.3; EXPRESSED IN LUNG, SIGNAL = 2.2; EXPRESSED IN HELA, SIGNAL =   2; EXPRESSED IN BRAIN, SIGNAL = 0.95; EST_HUMAN HIT: BE875039.1, EVALUE 0.00e+00; SWISSPROT HIT: P16884, EVALUE 4.00e-05; NT HIT: gi14728822, EVALUE 0.00e+00
ttaggacatggtacagtcttctttgcttttgcccttctcattccctcctctggtatcttctctgctttctggattgaagtgccctggctctcttcctggtgccgacaagtcatcgttctctaggctattgctgtctaaagctttcctgacggtctgacttggatgttctgacatctcacacctctctgtactttctgcttcacaggcatcactaatgtcctgtgagggactttcatgttcgggcagggtgcagcgatctgcgtcttcgctctttggttctgcaggactgctttgagtggcaccatctattttagcattatcttttgcaacaccttcatctaattcttcaccaccagccctcgggcctgatgattgaacggtgtcatcctcaaaatctaatgtgtctccatcagctagtacctcctcagctgctgtttgtacatcatcaccttcttggtcaagttttccatccaacttaattttaggattctccggacaatcaacattttcactgctttctgctgcaattttctgttttggattttcagtcacctcgttttgggcttccactgctgactttctgtcagtagactttacctgctcttcttccttaatttcacttaaatctgtgttctgatacgttaactcttttttaacatctttaagggtttctacgggtactggggattttttcttcttgtttttctttttcttgttctttgtcttcttctgcgatgagtccaatgcctctccctgttggtcactcttttcttcatcgggctctttcatatctaagggttcattttgagtgtctactgtacttggacctgtcgcttcctgacagttgccctcagttcctgctggagaaccaggaacttctgtct

SEQ ID NO: 20627 - DNA, 637 bp, Homo sapiens
  MAP TO AL050348.19; EXPRESSED IN HEART, SIGNAL =   5; EXPRESSED IN BONE MARROW, SIGNAL = 4.3; EXPRESSED IN LUNG, SIGNAL = 4.7; EXPRESSED IN ADULT LIVER, SIGNAL = 4.9; EXPRESSED IN BRAIN, SIGNAL = 3.9; EXPRESSED IN HELA, SIGNAL = 0.52; SWISSPROT HIT: Q9NRS6, EVALUE 2.00e-05; NT HIT: gi15553098, EVALUE 0.00e+00; EST_HUMAN HIT: AL521241.1, EVALUE 0.00e+00
gcttggagccgagcctctgattgacgtttgtccaggcccaggcgccaggagagccggacatgggcctccagaaagggtgccagcaaagggtggaggctcttgtccccaagcagctgcagggccttctcacagcatgcccgggcctctccagggtcttccagctcctggtggcacacggccagcccagccagggtcagcagggggcggtctgggccagagggggtgcccagctgggcttgcagctgccaggcattggcccagagtgccagagcctcacgatagaggccagtacaggtgaggctctgtgcccgccgcagctccggcagcacgaagaagtcctgcaggtccggggcatggcgcagctcaggcactgcctgcaggtgacccaaaaactgctcaaaggcccggctacggcgggcaatggtctctgcagtaaaattccggcgcagccgcttacgggggaaggagatggcagccattgggccccggaattgccgctgcaggtttcggtgcagccgctcaaagtccgagtaacggcgagagatctgggctggctggcaatctggcggtcctgggccgatcacggcgagggtgtagagctgcagggagggtgggtgtcagggcaaatgcaagttgt

SEQ ID NO: 20628 - DNA, 1069 bp, Homo sapiens
  MAP TO AC004126.1; EXPRESSED IN ADULT LIVER, SIGNAL = 1.5; EXPRESSED IN BRAIN, SIGNAL = 1.2; EXPRESSED IN HELA, SIGNAL = 1.4; EXPRESSED IN BONE MARROW, SIGNAL = 1.2; EXPRESSED IN LUNG, SIGNAL =   1; EXPRESSED IN FETAL LIVER, SIGNAL = 1.4; EST_HUMAN HIT: AW339977.1, EVALUE 0.00e+00; SWISSPROT HIT: Q9Z2J6, EVALUE 0.00e+00; NT HIT: gi11435643, EVALUE 0.00e+00
agccccacgatgtcggccaacgccacactgaagccactctgccccatcctggagcagatgagccgtctccagagccacagcaacaccagcatccgctacatcgaccacgcggccgtgctgctgcacgggctggcctcgctgctgggcctggtggagaatggagtcatcctcttcgtggtgggctgccgcatgcgccagaccgtggtcaccacctgggtgctgcacctggcgctgtccgacctgttggcctctgcttccctgcccttcttcacctacttcttggccgtgggccactcgtgggagctgggcaccaccttctgcaaactgcactcctccatcttctttctcaacatgttcgccagcggcttcctgctcagcgccatcagcctggaccgctgcctgcaggtggtgcggccggtgtgggcgcagaaccaccgcaccgtggccgcggcgcacaaagtctgcctggtgctttgggcactagcggtgctcaacacggtgccctatttcgtgttccgggacaccatctcgcggctggacgggcgcattatgtgctactacaatgtgctgctcctgaacccggggcctgaccgcgatgccacgtgcaactcgcgccaggcggccctggccgtcagcaagttcctgctggccttcctggtgccgctggcgatcatcgcctcgagccacgcggccgtgagcctgcggttgcagcaccgcggccgccggcggccaggccgcttcgtgcgcctggtggcggccgtcgtggccgccttcgcgctctgctgggggccctaccacgtgttcagcctgctggaggcgcgggcgcacgcaaacccggggctgcggccgctcgtgtggcgcgggctgcccttcgtcaccagcctggccttcttcaacagcgtggccaacccggtgctctacgtgctcacctgccccgacatgctgcgcaagctgcggcgctcgctgcgcacggtgctggagagcgtgctggtggacgacagcgagctgggtggcgcgggaagcagccgccgccgccgcacctcctccaccgcccgctcggcctcccctt

SEQ ID NO: 20629 - DNA, 1230 bp, Homo sapiens
  MAP TO AL138691.2; EXPRESSED IN ADULT LIVER, SIGNAL = 3.2; EXPRESSED IN HELA, SIGNAL =   1; EST_HUMAN HIT: AW239184.1, EVALUE 2.80e-02; SWISSPROT HIT: Q00130, EVALUE 7.00e-39
atgcttttctgcaagtgggcgatagacccaaagaagatgaaatcaccacctcttacagcctgcacttccctgacccttgcagcgttactcccagtgggcacttccctgacccttgcagcgttactcccagtgggcgcttccgtgaccgccgcagcgttactcccagtgggcgcttccgtgaccgccgcagcgttactcccagtgggcgcttccgtgaccgccgcagcgttactcccagtgggcgcttccgtgaccgccgcagcgttactcccagtgggcgcttccgtgaccgccgcagcgttactcccagtgggcgcttccgtgaccgccgcagcgttactcccagtgggcgcttccgtgaccgccgcagcgttactcccagtgggcgcttccgtgaccgccgcagcgttactccccgtgggcgcttccgtgaccgccgcagcgttactcccagtgggcgcttccgtgaccgccgcagcgttactcccagtgggcgcttccgtgaccgccgcagcgttactcccagtgggcgcttccgtgaccgccgcagcgttactcccagtgggcgcttccgtgaccgccgcagcgttactcccagtgggcgcttccgtgaccgccgcagcgttactcccagtgggcgcttccgtgaccgccgcagcgttactcccagtgggcgcttccgtgaccgccgcagcgttactccccgtgggcgcttccgtgaccgccgcagcgttactccccgtgggcgcttccgtgaccgccgcagcgttactccccgtgggcgcttccgtgaccgccgcagcgttactccccgtgggcgcttccgtgaccgccgcagcgttactccccgtgggcgcttccgtgaccgccgcagcgttactcccagtgggcgcttccgtgaccaccacagcgttactcccagtaggtacttccgtgacccttgcagcgttactcccagtaggtacttccatgaccaccgcagcgttactcccagtgggcgcttccttgaccaccgcagcattactcccagtgggcacttccgtgacccttgcagcattactcccagtgggcacttccgtgaccaccgcagcattactcccagtgggcgcttccgtgaccaccgcagcgttactcccagtaggcgcttccgtgaccaccgcagcattgctcccagtgggcacttctgtgaccaccgcagcgttactcacagtaggcaggataccgaaatag

SEQ ID NO: 20630 - DNA, 515 bp, Homo sapiens
  MAP TO AP000885.1; EXPRESSED IN BRAIN, SIGNAL = 1.1; EXPRESSED IN ADULT LIVER, SIGNAL = 1.4; EXPRESSED IN HELA, SIGNAL = 2.6; EXPRESSED IN BONE MARROW, SIGNAL = 1.1; EXPRESSED IN LUNG, SIGNAL = 1.2; EXPRESSED IN FETAL LIVER, SIGNAL = 1.3; SWISSPROT HIT: P08131, EVALUE 4.00e-05; EST_HUMAN HIT: H55746.1, EVALUE 0.00e+00; NT HIT: AL163252.2, EVALUE 0.00e+00
attattcactggaacaaagaagctgctggtttcacagtccagagcaagatggacgacacgtgctgaacacatgggtcagaggttggcaaccactgaacagaggccccagaggtctgaggctgctggacacaacgtgaagactttgaggacgataggccaagcaactcgagggttggcatccagaagtgaggaggttttggggctggcaactcttggacaagcagaattgggggcgataggcattgggcacacagtctcctatgggctggtaactattgagcagcggcctcagtggacgacagccgctggacacatacctctgtggtctacaggatactggaaggcaggaactggagaagaaagaagcaggaagaaaactgcttccttggcaaggcctgggcacgtagtaagcagtggaagaaccgcaagaggtttcaagattgccggtctcacagtggaccggctggcagctggttggttcaccgcaggtctcttggcagttgtctgtgacccag

SEQ ID NO: 20631 - DNA, 646 bp, Homo sapiens
  MAP TO AC002550.1; EXPRESSED IN ADULT LIVER, SIGNAL =   2; EXPRESSED IN BRAIN, SIGNAL = 1.9; EXPRESSED IN HEART, SIGNAL = 2.6; EXPRESSED IN BONE MARROW, SIGNAL = 1.5; EXPRESSED IN LUNG, SIGNAL = 1.3; EXPRESSED IN HELA, SIGNAL = 1.3; EST_HUMAN HIT: BI917585.1, EVALUE 0.00e+00; SWISSPROT HIT: O15016, EVALUE 9.70e-01; NT HIT: gi12963566, EVALUE 2.00e-10
gaatgatcaccaagacacacaaagtagaccttgggctcccagagaagaaaaagaagaagaaagtggtcaaagaaccagagactcgatactcagttttaaacaatgatgattactttgctgatgtttctcctttaagagctacatccccctctaagagtgtggcccatgggcaggcacctgagatgcctctagtgaagaaaaagaagaagaaaaagaagggtgtcagcaccctttgcgaggagcatgtagaacctgagaccacgctgcctgctagacggacagagaagtcacccagcctcaggaagcaggtgtttggccacttggagttcctcagtggggaaaagaaaaataagaagtcacctctagccatgtcccatgcctctggggtgaaaacctccccagaccctagacagggtgaggaggaaaccagagttggcaagaagctcaaaaaacacaagaaggaaaaaaagggggcccaggaccccacagccttctcggtccaggacccttggttctgtgaggccagggaggccagggatgttggggacacttgctcagtggggaagaaggatgaggaacaggcagccttggggcagaaacggaagcggaagagccccagagaacacaatgggaaggtgaagaagaa

SEQ ID NO: 20632 - DNA, 1766 bp, Homo sapiens
  MAP TO AC010328.4; EXPRESSED IN PLACENTA, SIGNAL = 3.6; EXPRESSED IN ADULT LIVER, SIGNAL =   3; EXPRESSED IN BRAIN, SIGNAL = 3.1; EXPRESSED IN HELA, SIGNAL = 2.7; EXPRESSED IN FETAL LIVER, SIGNAL = 3.9; EXPRESSED IN LUNG, SIGNAL =   3; EXPRESSED IN HEART, SIGNAL = 3.3; EST_HUMAN HIT: BE253605.1, EVALUE 0.00e+00; SWISSPROT HIT: P51522, EVALUE 0.00e+00; NT HIT: gi8922743, EVALUE 1.00e-128
atagctctttaaaatccatgatggagttctcatcaaccaggcacagtattacaggagaagtgatccacacagggacgttgcaaagacataaaagtcatcacattggagatttttgcttcccagaaatgaagaaagatattcatcactttgagtttcagtggcaagaagttgaaagaaatggccatgaagcacccatgacaaaaatcaaaaagttgactggtagtacagaccgaagtgatcacaggcatgctggaaacaagcctattaaagatcagcttggattaagctttcattcgcatctgcctgaactccacatgtttcagactaaagggaaaattagtaaccaattggacaagtctatcggtgcttcctcagcttcagaatcccaaagaatttcttgtaggctcaaaactcatatttctaataagtatgggaagaatttcctccattcttcattcacacaaatacaggaaatatgcatgagagaaaaaccttgccaaagtaatgagtgtggcaaagcctttaattatagctcactcttaaggagacaccacataacccattcaagagagagagaatataaatgtgatgtatgtggcaagatctttaatcagaagcaatacattgtatatcatcatagatgtcacactggtgagaaaacttacaagtgtaatgagtgtgggaagaccttcactcagatgtcatcccttgtatgccatcgtagacttcatactggagagaaaccttacaagtgtaatgagtgtggcaagaccttcagtgagaagtcatcccttagatgccatcgtagacttcatactggagagaaaccttacaagtgtaatgagtgtggcaagacttttggtcgaaattcagcccttgtaattcataaggcaattcatactggagagaaaccttacaagtgtaatgagtgtggcaagaccttcagtcagaaatcatcccttcaatgccatcatatacttcacactggagagaaaccttacaaatgtgaagaatgtgacaatgtttacattcgcagatcacaccttgaaagacataggaagattcatactggagagggatcatacaaatgtaaggtttgtgacaaggttttccggagtgattcataccttgcagaacatcagagagttcatactggagagaaaccatacaagtgtaataaatgtggcaggagtttcagtcggaagtcatcccttcaataccatcatacacttcacactggagagaaaccttacacatgtaatgaatgtggcaaggtttttagtcgaagagaaaaccttgcacgtcatcatagacttcatgctggagagaaaccttacaaatgtgaagaatgtgacaaagttttcagtcgcagatcacaccttgaaagacataggagaattcatactggggaaaaaccatacaaatgtaaggtttgtgacaaggctttccggagtgattcatgccttgcaaaccatacgagagttcatactggagagaaaccttacaagtgtaataaatgtgcgaaggtttttaatcaaaaaggaatccttgcacaacatcagagagttcatactggagagaaaccttacaagtgtaatgaatgtggcaaggtttttaatcaaaaagcaagccttgcaaaacatcagagagttcatactgcagagaaaccttacaagtgtaatgagtgtggcaaagcctttactggacagtcaacacttattcaccatcaagcaatccatgggtgtagggaaactttacaaatgtaa

SEQ ID NO: 20633 - DNA, 1284 bp, Homo sapiens
  MAP TO AL031055.1; EXPRESSED IN HELA, SIGNAL = 0.64; EXPRESSED IN ADULT LIVER, SIGNAL = 2.2; EXPRESSED IN LUNG, SIGNAL = 1.5; EXPRESSED IN HEART, SIGNAL = 1.7; EXPRESSED IN FETAL LIVER, SIGNAL = 1.7; EXPRESSED IN BRAIN, SIGNAL = 2.5; EST_HUMAN HIT: AL554162.1, EVALUE 0.00e+00; NT HIT: gi14786187, EVALUE 0.00e+00; SWISSPROT HIT: O52733, EVALUE 2.00e-28
gccactccccacctgtcctgcctttgtgtgcctctgtgtctttgctgggtggcctgacctttggttatgaactggcagtcatatcaggtgccctgctgccactgcagcttgactttgggctaagctgcttggagcaggagttcctggtgggcagcctgctcctgggggctctcctcgcctccctggttggtggcttcctcattgactgctatggcaggaagcaagccatcctcgggagcaacttggtgctgctggcaggcagcctgaccctgggcctggctggttccctggcctggctggtcctgggccgcgctgtggttggcttcgccatttccctctcctccatggcttgctgtatctacgtgtcagagctggtggggccacggcagcggggagtgctggtgtccctctatgaggcaggcatcaccgtgggcatcctgctctcctatgccctcaactatgcactggctggtaccccctggggatggaggcacatgttcggctgggccactgcacctgctgtcctgcaatccctcagcctcctcttcctccctgctggtacagatgagactgcaacacacaaggacctcatcccactccagggaggtgaggcccccaagctgggcccggggaggccacggtactcctttctggacctcttcagggcacgcgataacatgcgaggccggaccacagtgggcctggggctggtgctcttccagcaactaacagggcagcccaacgtgctgtgctatgcctccaccatcttcagctccgttggtttccatgggggatcctcagccgtgctggcctctgtggggcttggcgcagtgaaggtggcagctaccctgaccgccatggggctggtggaccgtgcaggccgcagggctctgttgctagctggctgtgccctcatggccctgtccgtcagtggcataggcctcgtcagctttgccgtgcccatggactcaggcccaagctgtctggctgtgcccaatgccaccgggcagacaggcctccctggagactctggcctgctgcaggactcctctctacctcccattccaaggaccaatgaggaccaaagggagccaatcttgtccactgctaagaaaaccaagccccatcccagatctggagacccctcagcccctcctcggctggccctgagctctgccctccctgggccccctctgcccgctcgggggcatgcactgctgcgctggaccgcactgctgtgcctgatggtctttgtcagtgccttctcctttgggtttgggccag

SEQ ID NO: 20634 - DNA, 482 bp, Homo sapiens
  MAP TO D86994.1; EXPRESSED IN BONE MARROW, SIGNAL =  13; EXPRESSED IN LUNG, SIGNAL = 3.2; EXPRESSED IN HEART, SIGNAL = 1.6; EXPRESSED IN HELA, SIGNAL = 1.5; EXPRESSED IN ADULT LIVER, SIGNAL = 1.5; EXPRESSED IN PLACENTA, SIGNAL = 1.5; EXPRESSED IN BRAIN, SIGNAL = 1.1; EST_HUMAN HIT: H62289.1, EVALUE 0.00e+00; NT HIT: L29162.1, EVALUE 0.00e+00; SWISSPROT HIT: P01717, EVALUE 4.00e-29
tctctgtggcctcctatgagctgacacagccatcctcagtgtcagtgtctccgggacagacagccaggatcacctgctcaggagatgtactggcaaaaaaatatgctcggtggttccagcagaagccaggccaggcccctgtgctggtgatttataaagacagtgagcggccctcagggatccctgagcgattctccggctccagctcagggaccacagtcaccttgaccatcagcggggcccaggttgaggatgaggctgactattactgttactctgcggctgacaacaatctcacagtgacacaggcagatggagaaatgagacacaaaccccttgccatctgtgtcaccttcttcctccagccccaggaggactgtggacaaagccacgaacaggtctggcccagtacacccagatcagagactctgaggcctccttccttccagatctctacggaggccctacagaaggtggatcaa

SEQ ID NO: 20635 - DNA, 914 bp, Homo sapiens
  MAP TO AC025588.1; EXPRESSED IN ADULT LIVER, SIGNAL = 1.7; EXPRESSED IN PLACENTA, SIGNAL =   2; EXPRESSED IN HELA, SIGNAL = 0.94; EXPRESSED IN BONE MARROW, SIGNAL = 1.7; EXPRESSED IN LUNG, SIGNAL = 1.7; EXPRESSED IN FETAL LIVER, SIGNAL = 1.9; EST_HUMAN HIT: AF150239.1, EVALUE 1.00e-09; NT HIT: AF365931.1, EVALUE 0.00e+00; SWISSPROT HIT: P51523, EVALUE 8.00e-76
atggatttttttatgttgaatgaggtttttcttctggataaaggtatttccacatagatcacactcataagctctcttcccagtgtgaattttctcatgatcgatgacattggatttctgggaaaaggccttctcacatatgctacatttatagggtttctctcccgtgtgtattctctggtgtttcacaagatctgacttgtaaatgaaagcctttccacagtccgtacattgaaagggtttttgtccagtgtgaacttttttatgttgaatgagggttgagttctgcctgaaggatttctcacattcattacactgataggatttcttggcattatgaattttctcatgattaatgcaggatgatttccaggaaaaggcttttccacatgtcttacactgatagggtttctctttagtatgcattttctgatgttgaaagagatttgacttctgcttgtaggcatttccacagttctcacatttatagggcctttcctctgcgtgagttttctgatgtttatcaagcttccacttctccccgaatgctcttccacagctatgacattcaaagggtttttgacaggcatgcctcctcaggtgactttgaaggcgtgactttgaactgaataactttctacaggcattacatttcagttgttgtcctacaaatttggatggattattgccaactaattttctgtatccattatcatcgtgagaattattttgtacatagtgttgcaaggaagatacatcatctatgcccagtggaagtattttcttagatccgtcacattctacacctttctgcgtagtcagcgtttccttattgattgatgggacttctcttgcgagactctctttcacatcctttggcttccaaatctgccctccaatgtccccattttttt

SEQ ID NO: 20636 - DNA, 646 bp, Homo sapiens
  MAP TO AC019162.3; EXPRESSED IN ADULT LIVER, SIGNAL = 2.1; EXPRESSED IN PLACENTA, SIGNAL = 2.3; EXPRESSED IN HELA, SIGNAL =   4; EXPRESSED IN BONE MARROW, SIGNAL = 5.5; EST_HUMAN HIT: BI522565.1, EVALUE 0.00e+00; SWISSPROT HIT: P32512, EVALUE 1.70e-02; NT HIT: gi16172300, EVALUE 0.00e+00
atgttcccacttgctgtctctgtggctcctctctacggccatcagggtacatatgcttgtaaaaacagttctctccaaatgggcagctcccacgtccttcatcaaaatacttgcatgccttgttgctcattgcctccttgtatttctgaatgagtttctgcttctcttctttctcctccacccagtactcacttggaatgacaaagttagatgtgattcggcattgtgggcaggacttgacgatcctgctctcaaattccttagcactcctccacttgcgaatgcacttgagacagaaggtgtggttgcagttggagaggatcccgaagcggtgctcgttggggttggctttctcatagaccacctccatgcagatcccacacaccttgtccttgctgcgctgcacagcaaatgagaactccatgtctttctcatgggcttcaatgcacgcttgtatatgctgtgatctctgggcagcatccatcggatgcaggacctgcagcccacacatgtcacataaatctccgtggagatacacacagttctccccatatcggcactgtcccactgcagcataggggcacagctgcttctttgtttccacggcggtttgctcttcctctgattcttccttggtcactgagcc

SEQ ID NO: 20637 - DNA, 476 bp, Homo sapiens
  MAP TO M63544.1; EXPRESSED IN BONE MARROW, SIGNAL = 0.97; EXPRESSED IN LUNG, SIGNAL =   1; EXPRESSED IN HELA, SIGNAL = 0.81; EXPRESSED IN ADULT LIVER, SIGNAL = 1.3; EXPRESSED IN BRAIN, SIGNAL =   1; EST_HUMAN HIT: AL555494.1, EVALUE 0.00e+00; SWISSPROT HIT: Q60837, EVALUE 1.10e+00; NT HIT: gi14729294, EVALUE 0.00e+00
gctactatgtgggcatgtgccttgcggcttcagaaaagcggatccacgccctcagccaggcccctgaggcctggcggctcttcctgctgctggccgtgaccctcccctccatcgcctgcatcctgatctactactggtcccgtgaccggtgggcctgccacccactggcgcgcaccctggccctctacgccctcccacagtctggctggcaggctgttgcctcctctgtcaacactgagttccggcggattgacaagtttgccaccggtgcaccaggtgcccgtgtgattgtgacagacacgtgggtgatgaaggtaaccacctaccgagtgcacgtggcccagcagcaggacgtgcacctgactgtgacggagtctcggcagcatgagctctcgccagactcgaacttgcccgtgcagctcctcaccatccgtgtggccagcaccaaccctgctgtgcaggcctttgacatctgg

SEQ ID NO: 20638 - DNA, 505 bp, Homo sapiens
  MAP TO AL049557.19; EXPRESSED IN ADULT LIVER, SIGNAL = 3.6; EXPRESSED IN PLACENTA, SIGNAL = 4.9; EST_HUMAN HIT: AW842069.1, EVALUE 0.00e+00; SWISSPROT HIT: Q9UHI6, EVALUE 2.00e-94; NT HIT: gi14251211, EVALUE 0.00e+00
atcccattccttctggtctgatggaagaatgtgtggattgggatgtggaagttaaagctgctgtgcatacatatggtatagcaagtgtacctaaccaacccttaaaaaagcaaattcagaaaatagagagaacccttcaaattcagaaagctcatggtgaccacatggcttcctctagaaataattctgtatctggactatcagtcaaatcaaaaaataataccaaacaaaagcttcctgtgaaaagccactcagaatgtggaatcatagaaaaagcaacgtcaccaaaagaactgggctgtgacaggcaatccgaagagcaaatgaagaattctgttcagactcccgttgaaaactccaccaacagtcagcaccaggtcaaagaagctttacctgtgtcactcccccagattccttgtctgtcttcctttaaaatccatcagccatacacgttgacttttgctgaattggtagaggattatgaacattatattaaagaggggtt

SEQ ID NO: 20639 - DNA, 462 bp, Homo sapiens
  MAP TO AL163303.2; EXPRESSED IN ADULT LIVER, SIGNAL = 1.4; EXPRESSED IN BRAIN, SIGNAL = 1.6; EXPRESSED IN HELA, SIGNAL = 1.7; EXPRESSED IN BONE MARROW, SIGNAL = 1.9; EXPRESSED IN LUNG, SIGNAL = 1.6; EXPRESSED IN HEART, SIGNAL = 1.5; EXPRESSED IN FETAL LIVER, SIGNAL = 1.6; EST_HUMAN HIT: Z47311.1, EVALUE 1.00e-36; SWISSPROT HIT: Q00130, EVALUE 5.00e-12; NT HIT: AL163303.2, EVALUE 0.00e+00
cgccacacggtgttgtcagcatcaccgtgtcagtccattgacgtagcgcacacggtgttgtcagcatcgccgtgtcagtccattgacgtagcgcacacggtgttgtcagcatcgccgtgtcagtccattgacgtagcgcacacggtgttgtcagcatcgccgtgtcagtccattgacgtagcgcacacggtgttgtcagcatcgccgtgtcagtccattgacgtagcgcacacggtggtgtcagcatcgccgtgtcagtccattgacgtagcgcacacggtggtgtcagcatcgccgtgtcagtccattgacgtagcgcacacggtggtgtcagcatcgccgtgtcagtccattgacgtagcgcacacggtggtgtcagcatcgccgtgtcagtccattgacgtagcgcacacggtggtgtcagcatcgccgtgtcagtccattgacgtagcgcacacggtg

SEQ ID NO: 20640 - DNA, 489 bp, Homo sapiens
  MAP TO AC015897.3; EXPRESSED IN ADULT LIVER, SIGNAL = 1.2; EXPRESSED IN BRAIN, SIGNAL = 1.1; EXPRESSED IN HELA, SIGNAL = 1.4; EXPRESSED IN BONE MARROW, SIGNAL =   1; EST_HUMAN HIT: AA682200.1, EVALUE 1.00e-128; SWISSPROT HIT: P21817, EVALUE 8.80e-01
aacaacaacaatgtcatcacttttattttttgtagatatgaaaactgcttcatcaacctcatccagaagtcacccttattctagtgacagtgaggatgaatctgcagtgggggacagggaagcccacactgacagcagcacagatgaaagtgccagaaggtcatcttctcaggaactgagtgaaaatgataagccaagaaagtctcaccttccaattgaggaatccttagaaattgaaattgaagaccaagaaataacaaaagcagatgtggagaccaagccgatgccaatagacgaaagctttgagaatgttcttaaagaaggaacggagaaaggaacccaagagattgcagagggtttatctgagaagtccgggaaacatgtttctgcagaagaaaaggaaaaggataagagtaagctttgggaagaaagcactgctcaggtgaaggacaaaaaggcaggtctccctgggttggaggaaggtggtaa

SEQ ID NO: 20641 - DNA, 732 bp, Homo sapiens
  MAP TO AC009336.2; EXPRESSED IN LUNG, SIGNAL =   2; EXPRESSED IN BONE MARROW, SIGNAL =   2; EXPRESSED IN FETAL LIVER, SIGNAL = 2.4; EXPRESSED IN ADULT LIVER, SIGNAL = 2.1; EXPRESSED IN BRAIN, SIGNAL = 1.9; EXPRESSED IN HELA, SIGNAL = 1.9; EST_HUMAN HIT: BG104816.1, EVALUE 2.00e-05; NT HIT: S34322.1, EVALUE 3.00e-71; SWISSPROT HIT: Q03828, EVALUE 3.00e-75
gtgtggttccagaaccggcgcatgaaggacaagcggcagcgcctggccatgtcctggccgcacccagccgaccccagcttctacacctacatgatgacgcacgcggccgccaccggaagcctgccctaccccttccactcgcacgtgccgctgcactactacccgcacgtgggcgtcacggcggcggcggccgcggctgcagcctcaggcgcggcggccgcggcttcgtcgcccttcgctacttccatccggccactggacaccttccgcgccctctcgcacccctactctcggccggagctgctgtgtagcttccgccaccctggtctctaccaggctcccgcggccgccgcggggctcaacagcgcggcctctgccgcggcagccgcggcagccgcagcggctgcggcctcctcggcggcggcggccggcgcgccccccagcggcggctctgcaccctgctcgtgcctcagttgccacagcagtcagtcggcggcggcagccgcggcagcagctgccgcagccctgggttcccggggtggcggtggcggcggcggtggtggtggtggcggcggcggcgggggcgccggggccgggggaggctcggacttcggctgcagcgcggcggcgccgcgttccgagagcggcttcctgccctactcggccgcggtgcttagtaagacggccgtgagcccgccggaccagagggacgaggctccgctcaccagataa

SEQ ID NO: 20642 - DNA, 1071 bp, Homo sapiens
  MAP TO AF205588.1; EXPRESSED IN BRAIN, SIGNAL = 2.2; EXPRESSED IN HELA, SIGNAL = 2.6; EXPRESSED IN ADULT LIVER, SIGNAL = 1.9; EXPRESSED IN HEART, SIGNAL = 1.9; EXPRESSED IN FETAL LIVER, SIGNAL = 2.5; EXPRESSED IN LUNG, SIGNAL = 2.3; SWISSPROT HIT: Q06730, EVALUE 0.00e+00; EST_HUMAN HIT: BG435830.1, EVALUE 1.00e-19; NT HIT: AJ245588.1, EVALUE 0.00e+00
gaaatctctcctcactctacatcagagagtccacacaggagagaaaccctatgtaaggaatgtgggaaatgcttttctaggaattcacacctcataatacatcagagaactcacacaggagagcaaccctgtgaatgcaaggaatgtagaaaaagcttctatcataagtcatatcttacagtacatcagagaattcacacaggggagaaaccctatgaatgtaatcaatgtggaaaaaccttcataagcaactctgttctcacaatacatcgtaaaacatatacaggtgagaaaccctatgaatgtaatgaatgtgggaaatctttctctaggagttcatatcttacaatacatcagagaactcacccaggcgagaaaccctatgaatgtaaggtatgtagaaaaaccttttgccacaagtctgatgccactaaacatcagaagactcacctagggggaaaaccctatgaatgtactcaatgtgggaaaacttttagtcgtaactcaggcctaaaagtacatcagagaacacatgcaaaggagaaaccctatgaatatactgagtgtgggaaatccttctctgagaaatcagtcctcacagtacatcagagaatacacacaggggaaaaaccttataaatgtaatgcacgtggaaaaaccttctacaataaatcagacctaaccaaacatcagagaacacacacaggtgagaagccctgtgaatgtaaggaatgtgggaaattcttctctaggaattcataccttacaatacaccagagaatgcatacaggagacaaaccctatgtgtgtaaaaaatgtgggaaaaccttctaccataaggcagactatacagtacataagagaacacacagaggggagaaatcttattactgtaataaatgtgggaaaacctttatttgcaactcagtcctcaaatcacatcagagaacacacacaggggagaagccctatggatgtaatgagtgtgggaagtccttctctgagaaatcagtccttactgtacatcagagaatacacacaggggaaaaaccttataaatgtaatgaatga

SEQ ID NO: 20643 - DNA, 756 bp, Homo sapiens
  MAP TO AP000053.1; EXPRESSED IN ADULT LIVER, SIGNAL = 2.1; EXPRESSED IN PLACENTA, SIGNAL = 1.9; EXPRESSED IN BRAIN, SIGNAL = 2.3; EXPRESSED IN HELA, SIGNAL = 5.2; EXPRESSED IN BONE MARROW, SIGNAL = 2.4; EXPRESSED IN LUNG, SIGNAL = 2.4; NT HIT: gi15302072, EVALUE 1.80e-01; SWISSPROT HIT: P46486, EVALUE 1.40e-01; EST_HUMAN HIT: AW664693.1, EVALUE 0.00e+00
tttcccatctccgtactttgctagttaatgttctccacttgcttgcgtttatcctttcaattcctttgctaattaaattgctgaaaagtatacattggtaagaatagccactgtcaatggactgcaaacaaaactcgtttctgttattgatgataaaccatttcagagaagaccaggctgagtctaaagggttcagataattacaaggggaaggcagagagagtagttcatggccacaggacttggccacctctgggcaacacataatgcttgctaagctaatgactgtagggatatagaactggccctcagcctctctgtcttcctttggcctctgctcttcctgctgccttctctctttgaccacgatgacacactttccataggccttcctcaccacatcacagaactcagagaagaggctgtcttcttgtttgatacacagctcgtctcttaggaacacccgatatttccaaggcacccatccttgactacccgcagcatgcacaatacaccaagttggggtttgtatgaaatatccatcactaatatcttccccagttacgagactttctgggatattggtttccccaaaatatacggtcttaaatccatcatattgcagtgttctcagggttttcagatattggaggcattgcttcctcttgatgccatcaaattgacttctgataatgacatttcttaaaagagggcttgcaaagcgaggcatggtggcttctcaagtgtttttaaaag

SEQ ID NO: 20644 - DNA, 1636 bp, Homo sapiens
  MAP TO AP000512.1; EXPRESSED IN BONE MARROW, SIGNAL = 3.8; EXPRESSED IN LUNG, SIGNAL = 2.8; EXPRESSED IN ADULT LIVER, SIGNAL = 1.7; EXPRESSED IN PLACENTA, SIGNAL =   2; EXPRESSED IN BRAIN, SIGNAL = 2.1; EXPRESSED IN HELA, SIGNAL =   2; EST_HUMAN HIT: BG389602.1, EVALUE 0.00e+00; SWISSPROT HIT: Q02817, EVALUE 3.00e-28; NT HIT: gi15304463, EVALUE 0.00e+00
ggcgatcaggaatctccagatgcttgtctgcctcctacagtacctgaagccccagccccaccccaaaagccccttaactctcagagccagaaacatcttgcacctccgccccttctttctccccttttaccttctatcaagccaaccgttcgtaagaccaggcaagatgggagtcaggaagctccagaggctcccttgtcctcagagctggagcctttccacccaaagcctaaaattagaactcggaagtcctccagaatgacaccctttccagctacctctgctgcccctgagccccacccttccacctccacagcccagccagtcactcccaagcccacatctcaggccactaggagcaggacaaataggtcctctgtcaagacccctgaaccagttgtccccacagcccctgagctccagccttccacctccacagaccagcctgtcacctctgagcccacatctcaggttactaggggaagaaaaagtagatcctctgtcaagacccctgaaacagttgtgcccacagcccttgagctccagccttccacctccaccgaccgacctgtcacctctgaacccacctctcaggctactaggggaagaaaaaatagatcctctgtcaagacccctgaaccagttgtccccacagcccctgagctccagccttccacctccacagaccagcctgtcacttctgagcccacatatcaggctactaggggaagaaaaaatagatcctctgtcaagacccctgaaccagttgtgcccacagcccctgagctccggccttccacctccacagaccgacctgtcacccccaagcccacatctcggaccactaggagcaggacaaatatgtcctctgtcaagacccctgaaacagttgtccccacagcccctgagctccagatttccacctccacagaccaacctgtcacccctaagcccacatctcggaccactaggagcaggacaaatatgtcctctgtgaagaaccctgaatcaactgtccctatagcccctgagctcccaccttccacctccacagagcagcctgtcacccctgagcccacatctcgggctactaggggaagaaaaaatagatcctctggcaagacccctgaaacacttgtccccacagcccctaagctcgagccttccacttccacagaccaacctgtcactcctgagcccacatctcaggccaccaggggcaggacaaataggtcctctgtgaagacccctgaaacagttgtccccacagcccctgagctccagccttccacctccacagaccagcctgttacccctgagcctacgtctcaggctactaggggaagaacagatagatcctctgtcaagactcctgaaacagttgtccccacagcccctgagctacaggcttccgcctccacagaccagcctgtcacctctgatcccacatctcggaccactaggggaagaaaaaatcggtcctctgtcaagacccctgaaacagttgtgcccgcagcccctgagctccagcctcccacctccacagaccaacctgtcacccctgagcccacatctcgggccactaggggcaggacaaataggtcctctgtcaagacccctgaatcaattgtcccta

SEQ ID NO: 20645 - DNA, 649 bp, Homo sapiens
  MAP TO AL078594.14; EXPRESSED IN BRAIN, SIGNAL = 1.3; EXPRESSED IN HELA, SIGNAL = 0.87; EXPRESSED IN ADULT LIVER, SIGNAL = 1.6; EXPRESSED IN PLACENTA, SIGNAL = 1.8; EXPRESSED IN LUNG, SIGNAL = 1.4; EXPRESSED IN HEART, SIGNAL = 2.2; EXPRESSED IN BONE MARROW, SIGNAL = 1.6; EXPRESSED IN FETAL LIVER, SIGNAL = 1.6; NT HIT: gi14759041, EVALUE 0.00e+00; SWISSPROT HIT: Q9TSZ2, EVALUE 7.00e-21; EST_HUMAN HIT: BG929440.1, EVALUE 0.00e+00
agcataggattccgagagtgcctaacagaagttgcgcggtacctgagctccgtggaaggcctggactcctcggatccgctgcgggtgcggcttgtgtctcatctcagcacttgcgccacccagcgggaggcggcggccatgacatcctccatggcccaccaccatcatccgctccacccgcatcactgggccgccgccttccaccacctgcccgcagccctgctccagcccaacggcctccatgcctcagagtcaaccccttgtcgcctctccacaacttcagaagtgcctcctgcccacggctctgctctcctcacggccacgtttgcccatgcggattcagccctccgaatgccatccacgggcagcgtcgccccctgcgtgccacctctctccacctctctcttgtccctctctgccaccgtccacgccgcagccgcagcagccaccgcggctgcacacagcttccctctgtccttcgcgggggcattccccatgcttcccccaaacgcagcagcagcagtggccgcggccacagccatcagcccgcccttgtcagtatcagccacgtccagtcctcagcagaccagcagtggaacaaacaataaaccttaccgaccctgggggacagaagttggagctttttaaa

SEQ ID NO: 20646 - DNA, 3744 bp, Homo sapiens
  MAP TO AC008895.4; EXPRESSED IN BONE MARROW, SIGNAL = 5.9; EXPRESSED IN FETAL LIVER, SIGNAL = 5.8; EXPRESSED IN ADULT LIVER, SIGNAL = 5.7; EXPRESSED IN PLACENTA, SIGNAL = 6.2; EXPRESSED IN HELA, SIGNAL = 3.7; EXPRESSED IN LUNG, SIGNAL = 5.7; EXPRESSED IN HEART, SIGNAL = 6.5; EST_HUMAN HIT: AU140400.1, EVALUE 0.00e+00; NT HIT: gi14758744, EVALUE 0.00e+00; SWISSPROT HIT: O74650, EVALUE 8.00e-05
atgatgatggcaagaaagcaagatgtccgaattcccacctacaacatcagtgtggtgggattatctgggaccgagaaggaaaagggccagtgtgggattggaaagtcttgtttgtgcaaccgcttcgtgcgcccgagtgctgacgagtttcacttggaccatacctccgtcctcagcaccagtgactttggagggcgagtggtcaataatgaccactttctctactggggagaagttagccgctccctggaggattgtgtggaatgtaagatgcacattgtggagcagactgaatttattgatgatcagacttttcaacctcatcgaagcacggccctgcagccctatatcaagagagctgctgcgaccaagcttgcatcagctgaaaaactcatgtacttttgcactgaccagctggggctggagcaggactttgagcagaaacaaatgccagacggaaagctgctggttgatggttttcttcttggtattgatgttagcaggggcatgaataggaactttgatgaccagctcaagtttgtctccaatctctacaatcagcttgcaaaaacaaaaaagcccatagtggtggtcctgactaagtgtgacgaaggtgttgagcggtacattagagatgcacatacttttgccttaagcaaaaagaacctccaggttgtggagacctcagcgagatccaatgtaaacgtggacttggctttcagcaccttagtgcaactcattgataaaagtcggggaaagacaaaaatcattccttattttgaagctctcaagcagcagagtcagcagatagctacagcaaaagacaagtatgagtggctggtgagtcgcattgtgaaaaaccacaatgagaactggctgagtgtcagccgaaagatgcaggcctctccagaataccaggactatgtctacctggaagggactcagaaagccaagaagctgtttctacagcacatccaccgcctcaagcatgagcatatcgagcgtaggagaaagctgtacctggcagccctgccattagcttttgaagctcttatacctaatctagatgaaatagaccacctaagctgcataaaagccaaaaagctcttagaaaccaagccagaattcttgaagtggtttgttgtgcttgaagagaccccatgggatgccaccagtcacattgacaacatggaaaacgaacggattccctttgatttaatggataccgtccctgcagagcagctatacgaggcccacttagagaagctgaggaacgaaaggaaaagagttgagatgcgaagggcgtttaaagaaaacctggagacttctcctttcataactcccggaaagccttgggaagaggcccgtagttttattatgaatgaggatttctaccagtggctggaggaatctgtatacatggatatttatggcaaacaccaaaagcaaattatagataaagcaaaggaagaatttcaggagttgcttttggaatattcagaattgttttatgaactggagctggatgctaagcccagcaaggagaagatgggtgttattcaggatgttctgggagaggaacagcgatttaaagcattacaaaagctccaagcagagcgtgatgcccttattctgaaacacattcattttgtgtaccacccaacaaaggagacatgccccagctgcccagcttgtgtggacgctaagattgagcacttgattagttctcggtttatccggccgtctgaccggaatcagaaaaattcactctctgaccctaacattgatagaatcaacttggttatattgggcaaagacggccttgcccgagagttggccaatgagattcgagctctttgtacaaatgatgacaagtatgtgatagatggtaaaatgtatgagctttccctgaggccaatagaggggaatgtcaggcttcctgtgaactctttccagacgccaacatttcagccccacggctgtctctgcctttacaattcaaaggaatcgctatcctatgtagtggaaagtatagagaagagtagagagtccacgctgggccggcgggataatcatttagtccatctcccccttacattaattttggttaacaagagaggagacaccagtggagagactctgcatagcttaatacagcaaggtcaacaaattgctagcaaacttcagtgtgtctttctcgaccctgcttctgctggcattggttacggacgcaacattaatgaaaagcaaatcagtcaagttttgaagggactcctggactctaagcgtaacttaaacctggtcagttctactgctagcatcaaagatttggctgatgttgatctgcgaattgttatgtgtctgatgtgtggagatccttttagtgcagatgacatactttttcctgtccttcagtcccaaacctgtaaatcttcccattgtggaagcaacaactctgttttacttgaactaccaatcggactgcacaagaagcggattgaactgtctgttctttcataccattcctcctttagcatcagaaagagccggttggttcatgggtacattgttttttattcagccaaacgtaaggcctctttggctatgttacgtgcctttctttgtgaagtgcaggatattatccctattcagcttgtagcactcactgatggcgctgtagatgtcctggacaatgacttaagtagggaacagctaactgagggggaggagattgctcaagaaattgacggaaggttcacaagcatcccctgtagccaaccccagcataaacttgagatctttcacccattttttaaagatgtggtggaaaaaaagaacataatcgaggctactcatatgtacgataatgctgccgaggcctgtagcaccaccgaagaggtgtttaactccccccgggcaggatcaccgctctgcaactcaaacctgcaggattcagaagaagatatcgagccatcttacagcctgtttcgagaagacacatcactgccttctctgtccaaagaccattctaagctctctatggaactggagggaaatgatgggctgtctttcattatgagcaattttgagagtaaactgaacaacaaagtacctccgccagtcaaaccaaagcctcctgtccattttgaaattacaaagggggatctatcttatttagaccaaggccatagggatggacagaggaagtctgtgtcttctagcccctggctgcctcaggatgggtttgatccttctgactatgctgaacccatggatgctgtggtgaagccaaggaatgaagaagaaaacatatactccgtgccccatgacagcacccaaggcaaaatcatcaccattcggaatatcaacaaagcccagtccaacggcagcgggaatggttctgacagtgaaatggacaccagctctctagagcgagggcgcaaggtttccatcgtgagcaagccagtgctgtacaggacgagatgcacccggctggggcggtttgctagttaccggaccagcttcagcgtggggagtgatgatgagctggggcccatccggaagaaagaggaggatcaggcatcccagggttataaaggggacaatgctgtcattccatacgaaacagacgaagacccgcggaggaggaatattcttcgcagcctaaggaggaacactaaggtaagacaccagtctaggattagtcatagtgttttgtacagcgtctcggtgagggttgattga

SEQ ID NO: 20647 - DNA, 1032 bp, Homo sapiens
  MAP TO AC022027.2; EXPRESSED IN PLACENTA, SIGNAL = 2.1; EXPRESSED IN ADULT LIVER, SIGNAL = 1.9; EXPRESSED IN HELA, SIGNAL =   3; EXPRESSED IN BONE MARROW, SIGNAL = 2.2; EXPRESSED IN LUNG, SIGNAL =   2; EXPRESSED IN HEART, SIGNAL =   2; EXPRESSED IN FETAL LIVER, SIGNAL = 1.9; EST_HUMAN HIT: AA301375.1, EVALUE 0.00e+00; SWISSPROT HIT: O15374, EVALUE 6.00e-12; NT HIT: gi14747075, EVALUE 0.00e+00
ttatatcaaagcagtcttgaataaatcattaccatgagatgttccatgcagatttcttttgtacaaatctgtgctactattacaatctggacctctatatctggagatatgacaaggaagaacagtaaaatgggatgattttaagataaatatcttaccaacgatgggtggtcctaggctatttccaagtccagcaaagaacattaatatcccataggcatgggctaatttttcaattcccacagtcttcgtggtcacatatggaaagatggaccaattaccagtaagaaaccctaggatcccagaaagcaacgccaatgtgacatagcttttggcaaatggaattgcacacaaggctaggcccatgatgattaaggtagcaacataaagatacaaggtattaatccacttgaagtcagccagtatccctaaaagcagtttaccaactgctgtcataatgcctataatggaaataagtggcataataaactcttcttctttcacgtttgaacttcttgctacatcttccataagtaatgaaggtggaaaccctccgatgtcaaagagtaagatagcaatgaaaagggctgaaaatactttgtttttaaaaagagccacagtttcaccacagtagtttttatataactgccacttcctcttggcaagctgtttgcaaaaatatgtctgttctgcaactttctttttgtacgtttcaggctcttttgtgtgtgtcactgtggggtttttatgaagtaggctgtcttgtttccagtcaccattggctaacgtgatcctgcatttttcctcactactgtagctcttgtcaagaatgtttatgttttcttccagattctttcctttttcattgtaaatggagtatttatctggtagatcttctggagctatttttttaggcaaaggacaatcagaagattggaggggtctcatcagactgccacaggctaatatatttaaagctaaagcacccacaatcagcaagcatccatccagtccatagaactcaaccagcat

SEQ ID NO: 20648 - DNA, 1025 bp, Homo sapiens
  MAP TO AC005366.1; EXPRESSED IN ADULT LIVER, SIGNAL = 1.5; EXPRESSED IN HELA, SIGNAL = 1.5; EXPRESSED IN LUNG, SIGNAL = 1.5; EXPRESSED IN HEART, SIGNAL = 1.6; EXPRESSED IN FETAL LIVER, SIGNAL = 1.2; EST_HUMAN HIT: AI214146.1, EVALUE 4.00e-90; SWISSPROT HIT: Q9Y5I4, EVALUE 2.00e-45; NT HIT: gi14861871, EVALUE 0.00e+00
ctggctccgctcccgcagcgtattagagcgggaccggatggcgtcaggctccagcgccagagctgtgggctgctgaacgctgaggggtcttagaaaagtgaagtcactgccgtccgaggccggtgaaaagcacgtcctgtagcagtggctctgcgagtctgtgggccgcagcgtcacctccatgtacttgagcgtgccgtccgagctcacctgcaggttggggctggactgcttatagaagtccggggagggtgagtcctggcgcctgcagcactgccctccacccccgtccccgtctgcgtttccctgaaggcacttcgctgacagaaaggtgaaggtgactagggataagagactgacggtcgctagagccacaatgaggtaaagggtaaggtctgaacgctcaggagggtgtatgaggaagtcactggatttgggcatttcctcagggtcctcatcctccagaaccagcagcactgtggctgtggaggagagtgaagggtcaccattgtccctcaccaggaccaccacctgctgggtgtcagagtcatcctccagtaaggcccgggctgtgcgcacctcaccagtgtgtgtagacacgaggaacagtcctggggctgtggactgtggcaacagtgagtaggagagccacgcattgtggcctgcatcagcatccacggctgtcaccttggtgaccaaggagccaggaggagcagagcgagggagacgctggggggctgagtgttcccagtctggccgtgggtgcagcacagctggggcattatcattctcgtctaggacaaacacatgcagagatgtgttggcatgcaatgggggagagccggagtctcgaacccccaccacaatctgcagcatctgcagcaattcatagtcaaaggtacgctgggcaaagatccgtccatcctctgggttgacatacacaaaggaggaggctggggctccctgaacctgatttcctacaatggagtaggtgaggcgggcattatccccagtgtctggatctg

SEQ ID NO: 20649 - DNA, 932 bp, Homo sapiens
  MAP TO AF036405.1; EXPRESSED IN ADULT LIVER, SIGNAL = 2.1; EXPRESSED IN HELA, SIGNAL = 4.3; EXPRESSED IN BRAIN, SIGNAL = 1.8; EXPRESSED IN FETAL LIVER, SIGNAL = 2.3; EXPRESSED IN LUNG, SIGNAL = 2.1; EXPRESSED IN BONE MARROW, SIGNAL = 2.2; EST_HUMAN HIT: BG913643.1, EVALUE 0.00e+00; SWISSPROT HIT: Q03164, EVALUE 0.00e+00; NT HIT: AF036405.1, EVALUE 0.00e+00
ttaaaactagtcctcgaaaacctcgtgggagacctagaagtggctctgaccgaaattcagctatcctctcagatccatctgtgttttcccctctaaataaatcagagaccaaatctggagataagatcaagaagaaagattctaaaagtatagaaaagaagagaggaagacctcccaccttccctggagtaaaaatcaaaataacacatggaaaggacatttcagagttaccaaagggaaacaaagaagatagcctgaaaaaaattaaaaggacaccttctgctacgtttcagcaagccacaaagattaaaaaattaagagcaggtaaactctctcctctcaagtctaagtttaagacagggaagcttcaaataggaaggaagggggtacaaattgtacgacggagaggaaggcctccatcaacagaaaggataaagaccccttcgggtctcctcattaattctgaactggaaaagccccagaaagtccggaaagacaaggaaggaacacctccacttacaaaagaagataagacagttgtcagacaaagccctcgaaggattaagccagttaggattattccttcttcaaaaaggacagatgcaaccattgctaagcaactcttacagagggcaaaaaagggggctcaaaagaaaattgaaaaagaagcagctcagctgcagggaagaaaggtgaagacacaggtcaaaaatattcgacagttcatcatgcctgttgtcagtgctatctcctcgcggatcattaagacccctcggcggtttatagaggatgaggattatgaccctccaattaaaattgcccgattagagtctacaccgaatagtagattcagtgccccgtcctgtggatcttctgaaaaatcaagtgcagcttctcagcactcctctcaaatgtcttcagactcctctcga

SEQ ID NO: 20650 - DNA, 563 bp, Homo sapiens
  MAP TO AL133338.2; EXPRESSED IN HELA, SIGNAL = 4.7; EXPRESSED IN BRAIN, SIGNAL = 3.9; EXPRESSED IN ADULT LIVER, SIGNAL = 4.1; EXPRESSED IN BONE MARROW, SIGNAL = 5.7; EXPRESSED IN FETAL LIVER, SIGNAL = 4.6; EXPRESSED IN LUNG, SIGNAL = 4.7; EST_HUMAN HIT: AA563682.1, EVALUE 0.00e+00; SWISSPROT HIT: P41877, EVALUE 1.80e+00; NT HIT: AP003136.2, EVALUE 8.40e+00
ttggaactgataatgggagagaagcaattgaaagtggggctgcatttctcttcatgacatttcacttgaaggactctgttggtcacaaggaaacaaaggctatcaaacagatgtttggcccctttccttcatcatctgccactgcagcttgtaatgctactaatcgaattatttctcattttagtcaagatgatcttactgctcttgtgcagatgacagaaaaagaacatggcgatagggttttttttggtaaaaatttagcattttcatttgacatgcatgatttggaccactttgacgaactgccaataaatggtgaaactcagaaaactataagcctagattataagaagtttctgaatgaacatctccaggaggcttgcaccccagaactcaagcctgtggaaaaaacaaatggctcctttttgtggtgtgaagttgaaaagtacctaaattcaactttgaaggaaatgactgaagtgccaagagtagaagatctttgctgtactttatatgatatgcttgcttctattaaaagtggtgatgaacttcaggatgaggta

SEQ ID NO: 20651 - DNA, 848 bp, Homo sapiens
  MAP TO AC004131.1; EXPRESSED IN ADULT LIVER, SIGNAL = 1.3; EXPRESSED IN PLACENTA, SIGNAL = 2.3; EXPRESSED IN HELA, SIGNAL = 0.6; EST_HUMAN HIT: BE047783.1, EVALUE 0.00e+00; SWISSPROT HIT: Q24738, EVALUE 5.00e-09; NT HIT: gi14777384, EVALUE 0.00e+00
tatctgggtcagtttcagcccaggagtcaacatttgtgggttctgatctgctaggactgccccaggtactgggaccgcccatccccactgaagaggaagaagagtatcttttgagatgaatggtcccccggcctgacccagccgggtggtgcccactttacctgcattgtgttcatccatggagaaggccttgttctccatataggcccgcggcagctgcacgtcctcctcgaaggccgtctcccgcatcctgggctgcgacgtgtcgaagtagttgggcgtgttctcctgcagggctggcagaagggtgcagtggatctcagggatggcgtggaagatgacgaagacccagccgctggccgccagcgtgatggccaaggtggggtcgttccaggcatccccctgctgcagcttgacattgccgaagaggtacatggtcatccaggccacccagatgagcacagagaggaaggctgtgatgaggaggaaggccccgttcagcttccacctcttgaacttgccgcacagagtgaagagggccagccccagggtgaccacaagcagtaccatgtcgtagatgagggccatcacaaagtccatgggctcgtaggcgcaggctggccttgtgtcacgcagcacggtgagcaccagccactccacagcgatgatgacttgcaccagcatcaggcacagcgccaggcccaccagctgccagcccgcggggcccgtgccatgccgcaccagcctccgcacgcgccatgcctggctcagcaggcaggagaagcagagcgcaaagaggacgccccagaggaagcggcggacagagcagatggtctcgtcctcctgga

SEQ ID NO: 20652 - DNA, 467 bp, Homo sapiens
  MAP TO Z82192.1; EXPRESSED IN BRAIN, SIGNAL = 3.2; EXPRESSED IN ADULT LIVER, SIGNAL = 3.6; EXPRESSED IN PLACENTA, SIGNAL =   3; EXPRESSED IN HELA, SIGNAL = 7.5; EXPRESSED IN BONE MARROW, SIGNAL = 3.7; EXPRESSED IN LUNG, SIGNAL =   3; EXPRESSED IN HEART, SIGNAL = 3.4; EXPRESSED IN FETAL LIVER, SIGNAL = 3.7; SWISSPROT HIT: P10388, EVALUE 9.50e-02; EST_HUMAN HIT: BI761027.1, EVALUE 0.00e+00
aagggccggcggcccaggaggcctgggtgaaggtgctgtcccgggcaagctttggctacatgcgcctggtggtacgcgagttggagagccagttgcaggacgcacgccagagcctggctttgcaacgccgctcatcctggaagtctgttgccagccgctgtaagccccaggctcctaaccaccgagctgcgggcctggagaatggccactgcctctccaaggacagcagccctgtgggcttggttgaagaagcgggcagcaggtctgcagggtgggggttggctgagtgggagctgcagggccctgccagcctcctcctaggcaaggggcagagccctgtgtcccctgagacctcctgcttctctaccctgcatgactggtatggccaggagatcgtggagctgcggcagtgttggcagaagagggcccaggggagccactcaaaatgtgaggaacaggataggccc

SEQ ID NO: 20653 - DNA, 663 bp, Homo sapiens
  MAP TO AJ009613.3; EXPRESSED IN PLACENTA, SIGNAL =  11; EXPRESSED IN HELA, SIGNAL =  20; EXPRESSED IN BRAIN, SIGNAL = 8.1; EXPRESSED IN HEART, SIGNAL = 5.7; EXPRESSED IN LUNG, SIGNAL =  16; EXPRESSED IN ADULT LIVER, SIGNAL = 5.3; NT HIT: gi11038618, EVALUE 1.00e-113; SWISSPROT HIT: P53505, EVALUE 6.00e-77; EST_HUMAN HIT: BG830927.1, EVALUE 1.00e-113
gatgccccagtacatggtggtgccgccagacagcacgtgttggcatataagtctttgcagatgtccacatcacacttcatgatggagttgaaggtggtcttgtggatgctgcaacattccatgcccaggaaggaaggctggaacagtgcctccagacactggaactgcttgttgccaatggcgatgacctggccatgggcacctcacagctattctccagggaggaggaggatgcggcggtggccatctcctgctcgaagggcaacacagcttctccttgtcatgcatgatctcccactcggccgtggtgatcaagctgtagccaagcttggtgaggattttcatggggtagtcaggtcctggccagccaggtcgacacaggatgccatgggggagggtatagcccttgtagatgggcaccatgtgggtgaccccatctccagagtccaggacaatgccagtggtgtgcccagaggtgtagagggacagcatggcctggatggccacgtacatggcccaggtgttaaaggtctcaaacatgatctgagttatcttctctctgttgaccttggggttcaggggggccttggtcagcagcactaggtgctcctctggggccacgtgcagctcactgcagaaggtgtggtgccagatcttctccat

SEQ ID NO: 20654 - DNA, 1431 bp, Homo sapiens
  MAP TO AF038458.1; EXPRESSED IN BRAIN, SIGNAL = 1.8; EXPRESSED IN ADULT LIVER, SIGNAL = 1.4; EXPRESSED IN HELA, SIGNAL = 3.2; EXPRESSED IN BONE MARROW, SIGNAL = 1.7; EXPRESSED IN LUNG, SIGNAL = 1.7; EXPRESSED IN HEART, SIGNAL = 1.5; EST_HUMAN HIT: AI830569.1, EVALUE 0.00e+00; SWISSPROT HIT: O75325, EVALUE 3.00e-21; NT HIT: gi14767170, EVALUE 0.00e+00
gacacccctgcccgcgatggccatcctcccgttgctcctgtgcctgctgccgctggcccctgcctcatccccaccccagtcagccacacccagcccatgtccccgccgctgccgctgccagacacagtcgctgcccctaagcgtgctgtgcccaggggcaggcctcctgttcgtgccaccctcgctggaccgccgggcagccgagctgcggctggcagacaacttcatcgcctccgtgcgccgccgcgacctggccaacatgacaggcctgctgcatctgagcctgtcgcggaacaccatccgccacgtggctgccggcgccttcgccgacctgcgggccctgcgtgccctgcacctggatggcaaccggctgacctcactgggcgagggccagctgcgcggcctggtcaacttgcgccacctcatcctcagcaacaaccagctggcagcgctggcggccggcgccctggatgattgtgccgagacactggaggacctcgacctctcctacaacaacctcgagcagctgccctgggaggccctgggccgcctgggcaacgtcaacacgttgggcctcgaccacaacctgctggcttctgtgcccgccggcgctttttcccgcctgcacaagctggcccggctggacatgacctccaaccgcctgaccacaatcccacccgacccactcttctcccgcctgcccctgctcgccaggccccggggctcgcccgcctctgccctggtgctggcctttggcgggaaccccctgcactgcaactgcgagctggtgtggctgcgtcgcctggcgcgggaggacgacctcgaggcctgcgcgtccccacctgctctgggcggccgctacttctgggcggtgggcgaggaggagtttgtctgcgagccgcccgtggtgactcaccgctcaccacctctggctgtgcccgcaggtcggccggctgccctgcgctgccgggcagtgggggacccagagccccgtgtgcgttgggtgtcaccccagggccggctgctaggcaactcaagccgtgcccgcgccttccccaatgggacgctggagctgctggtcaccgagccgggtgatggtggcatcttcacctgcattgcggccaatgcagctggcgaggccacagctgctgtggagctgactgtgggtcccccaccacctcctcagctagccaacagcaccagctgtgaccccccgcgggacggggatcctgatgctctcaccccaccctccgctgcctctgcttctgccaaggtggccgacactgggccccctaccgaccgtggcgtccaggtgactgagcacggggccacagctgctcttgtccagtggccggatcagcggcctatcccgggcatccgcatgtaccagatccagtacaacagctcggctgatgacatcctcgtctacag

SEQ ID NO: 20655 - DNA, 553 bp, Homo sapiens
  MAP TO AC007463.3; EXPRESSED IN ADULT LIVER, SIGNAL = 1.6; EXPRESSED IN HEART, SIGNAL = 1.2; EXPRESSED IN LUNG, SIGNAL = 1.5; EXPRESSED IN HELA, SIGNAL =   3; EXPRESSED IN BRAIN, SIGNAL = 1.3; EST_HUMAN HIT: BF315747.1, EVALUE 7.80e-01; NT HIT: AB024519.1, EVALUE 1.30e-01
atctgtttacattttctacattttgtggataggaactgttaacttctaacttcccccaaaagggcaccaaaacaacccattgatatagtaaagctgagtttactgcttgctgcagcaaggaatccactaaaccattatgacagcatctaaatagcatctgaggggagttctatggttttggcgagggttgagtttctgttttaagataagtcttttcatgctattaggaatgggctaattgggattatgtaaagcgcatgcattatagtttgggaccagtgggtgcagcaaaaggagactttgaagaaagtttccaagaataggccattgtttggtgagaaaacagttatttactgagactagttaagcaatctattgcctgagatggggataaggactcagttgacaagtctattctccagataaatatatttttgagaagacccagataccataaagtaatttgtaagtttatcatctcggcaaaggtttcctagaagagaaaaattacattaatatagacagtcaaaggctaaagtcttgctaatgtgga

SEQ ID NO: 20656 - DNA, 706 bp, Homo sapiens
  MAP TO AC009288.12; EXPRESSED IN LUNG, SIGNAL = 1.2; EXPRESSED IN HEART, SIGNAL = 1.5; EXPRESSED IN BRAIN, SIGNAL = 1.1; EXPRESSED IN HELA, SIGNAL = 0.91; EXPRESSED IN ADULT LIVER, SIGNAL = 1.2; EXPRESSED IN BONE MARROW, SIGNAL = 0.75; EST_HUMAN HIT: BE531263.1, EVALUE 7.00e-11; SWISSPROT HIT: P23462, EVALUE 4.80e-01; NT HIT: gi11427757, EVALUE 0.00e+00
aaagtgggccctgggcagcctgagggcagctctcacctctggccagcaaacttctagactgcaccttgagggccaaaaacgtccagatttcctgctcaatgctgtcgtcgctgtccacggagctactgtcaccatcagagcgggaaggcacgttgggggagtagaagagtgggcttgcggacagggacccatcgctgccctccatagggccggcaggatcgtcttgaaaatgtccaggactgcttctacacacatcagctcagcggaggtgtctgcctggcaagaggaccattccacaaacttgctcctggaagccgggctcgttggaggtggagctttggtttcctttgggatcttgggggaatggtcagcgtccagatcccctggaccagggtccgtggtcttggtgggcactggcttcttcttgctgggtgttttcctgtgggtctctggcaaggcactttttgtggcgctgcttgtgctgtgtgcgggaggggcaggtgctctttcctcttggagctggaccctctggggcgggtccccgtcggcctccttgtgtgttttctgcacctggtacagctggatggcctcctcaatgccgtcgtcgctgctggagtcggacgcctcgggcgcctgtatggcgctcgtgactcgctttcccctccttgcggtgctggcgttccttttaatcccacttttattctgt

SEQ ID NO: 20657 - DNA, 588 bp, Homo sapiens
  MAP TO AC005362.1; EXPRESSED IN PLACENTA, SIGNAL = 2.4; EXPRESSED IN ADULT LIVER, SIGNAL = 1.9; EXPRESSED IN HELA, SIGNAL = 0.62; EXPRESSED IN LUNG, SIGNAL = 1.4; EXPRESSED IN HEART, SIGNAL = 2.3; EXPRESSED IN BONE MARROW, SIGNAL = 1.7; EST_HUMAN HIT: AL521690.1, EVALUE 0.00e+00; SWISSPROT HIT: Q15697, EVALUE 1.00e-109; NT HIT: gi14777793, EVALUE 0.00e+00
atgagaagtgacaacaaggaaaatccacaacaggaaggggctaaaggagcaaagccatgtgcagtgtcagctggcagatccaaagggaatggtctgcagaatcctgaaccaagaggggcaaatatgagtgaacctcggttgtcacggaggcaggtcagctccccaaatgctcaaaagccatttgctcactaccagagacattgcagggtggaatacatcagcagccccctaaaaagccacccactgagagagctaaagaaaagcaaaggaggtaaacggagtctgagcaaccgtttgcaacatcttggtcaccagcccacccgctcagcaaagaaaccctacaaatgtgatgactgtgggaaaagcttcacgtggaattcagagctgaagagacacaagagagtccacacaggagagagaccctacacgtgcggagagtgtggaaactgctttgggcggcagtcaaccctgaagctgcaccagaggatccacactggagagaagccataccagtgtggccagtgtgggaaaagctttcgccagagctcaaaccttcaccagcatcaccgacttcaccatggggactaa

SEQ ID NO: 20658 - DNA, 584 bp, Homo sapiens
  MAP TO AC013593.3; EXPRESSED IN HELA, SIGNAL = 2.7; EXPRESSED IN ADULT LIVER, SIGNAL = 1.9; EXPRESSED IN PLACENTA, SIGNAL = 1.8; EXPRESSED IN LUNG, SIGNAL = 1.7; EXPRESSED IN FETAL LIVER, SIGNAL = 1.7; SWISSPROT HIT: Q92212, EVALUE 1.70e-01; EST_HUMAN HIT: BI462021.1, EVALUE 0.00e+00
ctacagttctgaaggaaaaggcttggcattgaagctatggtcttcctgggccagattcaggagggaatggaagagaacattcctttcaggacaggtggccaaaggataggagacagagtggttcagcagggggggtaggttgcacaagggtggggcaaagggcacctcctgaaagatgggaagtgggaatggggatctggcctggggctgctgtggagccagctgcagtgcaggttgcaggggagcaggggcttccgccttggggttgctgtcttggtcagcatggctcctgccttcggggatgtccaaatcccacagaacatctggattctggacctcagtctcagtcttggtgacagcaggggcagggcccgtgttgatggctgcattcatgccgtagcgccgtcgcttgttaatccagtacaacaatgggctgtaggtgaatgtggcagctctcatcacctccacccactgctgggcatgctcttcccgcctcaagttcttcctccagtgcagaaagataatgcaccctccagttatcacagaacacagccccaggattccaaagtacaatgagacccaca

SEQ ID NO: 20659 - DNA, 648 bp, Homo sapiens
  MAP TO AC006273.1; EXPRESSED IN HEART, SIGNAL = 2.1; EXPRESSED IN BONE MARROW, SIGNAL =   3; EXPRESSED IN ADULT LIVER, SIGNAL = 1.8; EXPRESSED IN PLACENTA, SIGNAL = 2.8; EST_HUMAN HIT: BG686696.1, EVALUE 2.00e-91; NT HIT: gi16163419, EVALUE 1.00e-91; SWISSPROT HIT: Q29099, EVALUE 7.00e-54
gccttcatcgagatgaacacggaggaggctgccaacaccatggtgaactactacacctcggtgacccctgtgctgcgcggccagcccatctacatccagttctccaaccacaaggagctgaagaccgacagctctcccaaccaggcggtgcgtggccccgcggcggaccccagcagcccggggacctcgggggtgggcccagccgcaggggccggggactcacggctgtgcctcccacagcgggcccaggcggccctgcaggcggtgaactcggtccagtcggggaacctggccttggctgcctcggcggcggccgtggacgcagggatggcgatggccgggcagagccccgtgctcaggatcatcgtggagaacctcttctaccctgtgaccctggatgtgctgcaccaggtgaggtggtcccatcaccgccagggcaggtcggctgctattgctgtgggcacaggcacacgggaggggcctggcagggctggtgggcaccgggcaggagctcatgctgtggcccgggacctgcagattttctccaagttcggcacagtgttgaagatcatcaccttcaccaagaacaaccagttccaggccctgctgcagtatgcggaccccgtgagcgcccagcacgccaagctg

SEQ ID NO: 20660 - DNA, 525 bp, Homo sapiens
  MAP TO AC006137.1; EXPRESSED IN FETAL LIVER, SIGNAL = 8.1; EXPRESSED IN ADULT LIVER, SIGNAL = 8.1; EXPRESSED IN PLACENTA, SIGNAL =  15; EXPRESSED IN HELA, SIGNAL = 4.7; EXPRESSED IN HEART, SIGNAL =  10; EXPRESSED IN LUNG, SIGNAL =   8; EXPRESSED IN BONE MARROW, SIGNAL = 9.5; EST_HUMAN HIT: N79066.1, EVALUE 4.70e-02; SWISSPROT HIT: P35410, EVALUE 6.00e-26; NT HIT: AB001523.1, EVALUE 2.00e+00
gtttctctcagtgttctctgggaagctggattgggacaacaggacagagaccccaggacaagtgaacatgagtcatacgggaggcgagtggttggtgggcaaacaggtggttttcatcctgacagtgctggtggccttctgtgggctggtgggcaatggtgtggtgtgctggcttttctgcttccaggtcaggagcagcccctacatgacctatgtccttaacctggccgctgctgatatggtcaacctctcctgtgtaactgtgatcctgttggagaaaatcctcatgctgtatcaccaggtgacattgcaggtggccatgtttctggagcctgtgtcctatttctctgacacagtgagtctctgtctcctggtggccatgaatattgagagctttctgtgtgtcctctgtcccacctggtgctgccaccgcccaaagcacacctctgctgtgatgagcatcctgagctgggccctggccctttctttgcatgtggttagccaggtttgtgagtaatgggagaa

SEQ ID NO: 20661 - DNA, 611 bp, Homo sapiens
  MAP TO AC009533.9; EXPRESSED IN LUNG, SIGNAL = 1.9; EXPRESSED IN HEART, SIGNAL =   2; EXPRESSED IN PLACENTA, SIGNAL = 2.3; EXPRESSED IN ADULT LIVER, SIGNAL = 1.8; EST_HUMAN HIT: AI654705.1, EVALUE 1.00e-104; SWISSPROT HIT: P21416, EVALUE 3.00e-32; NT HIT: Z70664.1, EVALUE 1.00e-126
gcaggaagagagctttagatgattttcaccagtatctccttgcgggtatcaaaggagctgctcgaaaacccataaatttgtctaagacatttgaagttgtccagggacctgatgagccaccgggggcgtttttggaacgcctccaggaggcctaccggagttacaccccttttgacccggcggctcccgagaatagctgtgctattaatttggcatttgtggctcaggcaggccctgatattaaaagaaaattacaaaaactggaaggatttgctggaatgaacattagccaacttctagagatagcccagaaagtttttgacaatcgagagtttgaaaagcgaaaacgggcagctcaggcaactgaaaaggccgccgataaggcatccaaaagacatgcgaaaatcttagtggcggccatccaggaagccaagaaggaaaggcccccatcacagaggaatggccagggaaccccaggtccccgccagaaaggcaagaaaggcgagcaggctcccctggagaaaaaccaacatgcttattgcaagcagactagacactggaaaaaagaatgcccattaaagccagaggaaaaaccagaaaagaaaaattaa

SEQ ID NO: 20662 - DNA, 544 bp, Homo sapiens
  MAP TO AC004081.1; EXPRESSED IN ADULT LIVER, SIGNAL = 2.6; EXPRESSED IN HELA, SIGNAL =   5; EXPRESSED IN BRAIN, SIGNAL = 2.7; EXPRESSED IN HEART, SIGNAL = 2.3; EXPRESSED IN BONE MARROW, SIGNAL = 2.9; EXPRESSED IN LUNG, SIGNAL = 2.9; EST_HUMAN HIT: AL515609.1, EVALUE 0.00e+00; NT HIT: AF395203.1, EVALUE 0.00e+00; SWISSPROT HIT: P54102, EVALUE 3.00e-91
gatattggcttctggaatgcttcaaccagctgtatgtccatacacatgaaaaggtcttctccttgtcgagtaaaaacagcatcgtccttctgatctaacacaatgataatatcttctccctccagtcctggttcttggtatccttcaccatggaatgttatcttctggccatatttcatgcctttgtcaatatgaaattctagaatcttcttctctcgaagtatcttccttccattgcagctttcacatctatctttaggactgatctgctccccatggccctggcactccacgcacacagactgaatttgctgaacctttccaggtcctatctgatgaattcttatttgcattccagtacctcggcaattgggacagtactctactcctcctttcttacctcctctatcttcacatttgtcacaaattgcattcttttgcagagccagttttcttgttgcactattatataagtcttctagggttactgagagctgatgtacaacatttttacctctcctttctctgtgcatccttcctcctc

SEQ ID NO: 20663 - DNA, 478 bp, Homo sapiens
  MAP TO AL121907.2; EXPRESSED IN HELA, SIGNAL = 0.85; EXPRESSED IN BRAIN, SIGNAL = 1.8; EXPRESSED IN ADULT LIVER, SIGNAL = 2.2; EXPRESSED IN FETAL LIVER, SIGNAL = 1.9; EXPRESSED IN BONE MARROW, SIGNAL = 2.3; EXPRESSED IN LUNG, SIGNAL = 2.7; NT HIT: gi14769955, EVALUE 0.00e+00; SWISSPROT HIT: P22544, EVALUE 1.30e-01; EST_HUMAN HIT: BI550265.1, EVALUE 0.00e+00
gctttaagcaggccaccaagagcaaggtctggcgcgtggtgggctgccggcccaccttcccaaggcccctgtgctaccaagtctgccactactacagccctgggctcggctgccggcgccaccgaaaccggtgcacctttgcccgcagtcgcgaggaggccctggtctggaccttcgagcgtcagcacaacctccagcgcctatggctgaaggcggaggtgcagggcagcggggcccagggaggggcaggccgggcggccgacgccatccttacggagtttggcggccgcttcgagctgctttgctccctctgcttcaggcgctgtcccccatgcatctgtcgcgtggacccccaggggcagtgccctgagcacggagcctgcccctccctcctggcccacgtgagcgccgagggccgccgcaagcaacagtttgtggtggtgaggccgcggccccgggccggccagcctcctgccta

SEQ ID NO: 20664 - DNA, 653 bp, Homo sapiens
  MAP TO AC020709.2; EXPRESSED IN ADULT LIVER, SIGNAL = 3.8; EXPRESSED IN PLACENTA, SIGNAL =   4; EXPRESSED IN HELA, SIGNAL = 1.3; EXPRESSED IN HEART, SIGNAL = 3.9; EXPRESSED IN BONE MARROW, SIGNAL = 3.1; EXPRESSED IN FETAL LIVER, SIGNAL = 1.5; EST_HUMAN HIT: T97677.1, EVALUE 2.30e-01; SWISSPROT HIT: Q99583, EVALUE 9.90e-01
gtcagcctggtgtgacagctgcacgctacatgtttgaaagcagcaacaaggctgtctttgtacggcaggggtggtgctggcagctctgtggcggtgccgggctgcagagtacggcaggggtggtgctggcagctctgtggcggtgccgggctgctgggtacggcaggggtggtgctggcagctctgtggcggtgccgggctgcagggtacggcaggggtggtgctggcagctctgtggcggtgccgggctgctgggtaaaggcaggggtggtgctggcagctctgtggcggtgccgggctgctgggtacggcaggggtggtgctggcagctctgtggcggtgccgggctgcagggtacggcaggggtggtgctggcagctctgtggcggtgccgggctgctgggtacggcaggggtggtgctggcagctctgtggcggtgccgggctgctgggtacggcaggggtggtgctggcagctctgtggcggtgctgggctgctgggtacggcaggggtggtgctggcagctctgtggcggtgctgggctgctgggtacggcaggggtggtgctggcagctctgtggcggtgctgggctgctgggctgctgggctgcagagctgggctggcgccacttggggcgggtgcggccggcat

SEQ ID NO: 20665 - DNA, 1710 bp, Homo sapiens
  MAP TO AC005622.1; EXPRESSED IN BRAIN, SIGNAL = 3.3; EXPRESSED IN ADULT LIVER, SIGNAL = 4.4; EXPRESSED IN HELA, SIGNAL =   3; EXPRESSED IN HEART, SIGNAL = 3.7; EXPRESSED IN BONE MARROW, SIGNAL = 3.8; EXPRESSED IN FETAL LIVER, SIGNAL = 3.5; NT HIT: gi11426204, EVALUE 0.00e+00; EST_HUMAN HIT: BI826173.1, EVALUE 0.00e+00; SWISSPROT HIT: P75678, EVALUE 3.10e-02
atgcccattacccagagaggtgcttcattttgcccctggtcacacagcaagttagtggcagaaaagggatgtgaacctgggcctgccagaccccaaagccctctaacttgtgccaaaaatgtgtccccaattcttgaaggaaaaagagagctgtgggcttccagggcgactcccttcacatccgtggtatctgtctctccctgccccatgccaaggcccaggaggtgtgaatggctcccttctcctctgcaggcgctgaggatcacgcatcctgtgactctcccctgtcccccgccaccctctgaaccactggccaccatggctacttcaaagttgcccgtggtgcctggggaggaggaaaacaccatccttatggccaaggaaaggctggaggccctgcgcacagcctttgagtcgggtgacctcccccaggccgcctctcacctccaggagctgctggcctccacggaaagcatccgcctggaggtgggcgtcacgggcgagtcgggcgcgggcaagtcctccctcatcaatgccctgcgtggcctggaggccgaggaccctggcgcggctctcacgggcgtcatggagaccacgatgcaaccgtcgccctatccacacccacagttccctgacgtgaccctctgggacctgccaggagccggctctccaggctgcccggctgacaagtacctaaagcaggtagacttcagccgctatgacttcttcctgctggtctccccccgccgctgcggggccgtcgagacccgcctggccgctgagatcctgtgccagggcaagaagttctactttgtgcgcaccaaggtggacgaggacctggcggccacgcgcacccagcggccgtcgggcttcagagaggccgctgtcctgcaggagatccgagaccactgtgccgagcggctgcgggaggccggcgtggctgaccctcgcatcttcctggtgtccaacctctcgccggcccgctacgactttcccacgctggtgtccacctgggagcacgacctgccctcccaccggcgccacgctggcctgctgtcgctccccgacatctcgctggaggccttgcagaagaagaaggccatgcttcaagagcaagtcctcaagaccgccctggtgttgggcgtcatccaggccctgccggtcccagggctggcggccgcctacgatgatgcgttgctcatccactcactgcgtggctaccaccgcagctttggtctggacgacgactcgctggccaagctggccgagcaggtgggcaaacaggcaggtgacctgcgctcggtcatccgctccccactggccaacgaggtctcgcctgagactgtcctgcggctctattcccagtcgtccgacggcgccatgcgggtggcccgcgcctttgagaggggcatccctgtgtttgggacgctggtggctggcggcatcagctttggcgctgtctacaccatgctccagggctgcctcaacgagatggctgaggacgcccagcgtgtccgcatcaaggccctggaggatgacgagccgcagccggaggtcagcttggaagtggccagtgacaatggcgtggaaaaggggggctccggggagggaggtggggaggaagccccactctcaacctgcaggaagctcggcctccttcttaagtacattctggacagctggaagaaacacgactcagaagagaaataa

SEQ ID NO: 20666 - DNA, 565 bp, Homo sapiens
  MAP TO AL035460.13; EXPRESSED IN LUNG, SIGNAL = 1.6; EXPRESSED IN ADULT LIVER, SIGNAL = 1.5; EXPRESSED IN HELA, SIGNAL = 1.3; EXPRESSED IN BRAIN, SIGNAL = 1.6; NT HIT: AL389894.4, EVALUE 8.40e+00; EST_HUMAN HIT: BI826281.1, EVALUE 0.00e+00; SWISSPROT HIT: O75690, EVALUE 6.00e-03
tcaacagacacaggcagtgggatggggttgcccttctattgatccaaatcctgagtgtcgcctgggtgagtcatggaggtgaggaggcccacaaggctcagcagtgtggagaagagcagcaggaaggaggccgtgaagaggagggcaggcagagcactgagcaccagcagcaggagagccggtagcaggtggcgccacaccgcggccacgacaggccacaaggagctcagcaggtgggagccagtggtgaagagtgcatggcacaacatcagtgccagcagcaggtagagtatcccctccagaccccacagcaggcgctgcagcggttgccgccagttcgaggtgctccaccactggatccagctcgggggcatgtggctcacccaccagcgcacccagccatgcctcgtgacccaggctgaccagggcactgcctgctgtggcccctcgccagccccgatggtatctgtctccactcgcggctgctgcatcatgtctggtgcacctggggagagggccagggtcttgaagatgcctgggaccttggggggggggggcagagagg

SEQ ID NO: 20667 - DNA, 984 bp, Homo sapiens
  MAP TO AC004865.1; EXPRESSED IN LUNG, SIGNAL = 0.92; EXPRESSED IN BONE MARROW, SIGNAL = 0.87; EXPRESSED IN HELA, SIGNAL = 0.45; EXPRESSED IN ADULT LIVER, SIGNAL = 1.4; NT HIT: AB020882.1, EVALUE 0.00e+00; EST_HUMAN HIT: BE882911.1, EVALUE 0.00e+00; SWISSPROT HIT: P05997, EVALUE 5.50e-01
accctcacctgcagcaggtagtggataacagcccctatggcctccttcatgacgctcacgagctgcaccttctgtggctccttaagcagtgactgctcacagcgagtgcattcctggatccccaactccatgagggcatagcaggcggtcaccacatcctctttcacctccgtgcccgtctcctccagtgccagccgcacttccacgcacgccagattcaccagcagggccaggaacttgctcccggagctgcccgccgggatccagtcggagccgcaggcgtgtgccaggcgggctgccagcttcagtgcagggttgcgctgccaggagctcagcttgcttcccaggatgcgtgccagcccggcctgcagatcccggtagcattcagggggcacggttgtcgggggcaaaaagaggggcagcagctggcagagctcaaacttgctggcatcctcagctttctggaaatcctcactgaggccccgcaacacggccagcaggtcgggctccgcctccttccagcactgtgtctcggcagcagccagcagccccaccaggagtgccagggcctggtcaaagccatagccgtgccccaggtatgcctggcatagggcagacacggtgccaccagcaatgaggtgccgaggccctctgggtgtgcctgctacagccgtcaggcactggtaggtgtcatcaatcatggagcggcgggcagcatcgtccgggtccccccgggctgtgaggaaggtgctaagaatgggaatcttgttcaggacttggggatgggcggccagttcagggtcactgcagaagcaggccagcagggccacacccaaagcccgcagaacatggtcagggcagccatccggcgcctccttggtggtcaggagacgattggggaaggtgaagccgacagcatcgaagatccgccgccgagttttggcatctatgtcacctgctttgactgccttggtcacctatagg

SEQ ID NO: 20668 - DNA, 556 bp, Homo sapiens
  MAP TO AC002553.1; EXPRESSED IN LUNG, SIGNAL = 1.7; EXPRESSED IN ADULT LIVER, SIGNAL = 1.6; EXPRESSED IN BRAIN, SIGNAL = 1.6; EXPRESSED IN BONE MARROW, SIGNAL = 1.3; EXPRESSED IN HEART, SIGNAL = 1.7; EXPRESSED IN FETAL LIVER, SIGNAL = 1.3; NT HIT: gi5454137, EVALUE 0.00e+00; EST_HUMAN HIT: BI045285.1, EVALUE 0.00e+00; SWISSPROT HIT: O75376, EVALUE 3.00e-84
gtgcagaaaatagttctgatacagaaagtgctccttctccttcaccagttgaagctgtcaagcccagcgaggacagtcctgaaaatgctacttctcgaggaaacacagaacctgcggttgagcttgagcccaccacggaaactgcacccagtacatctccctccttagcagttccaagtacaaaaccagctgaagatgaaagtgtggagacccaggtgaatgacagcatcagtgctgagacagcagagcagatggatgtagatcagcaggagcacagtgctgaagagggttctgtttgtgatcccccacccgctaccaaagctgactctgtggacgttgaagtgagggtgccagaaaaccatgcatctaaagttgaaggtgataataccaaagaaagagacttggatagagccagtgagaaggtggaacctagagatgaagatttggtggtagctcagcaaataaatgcccaaaggcccgagccccagtcagacaatgattccagtgccacgtgcagcgctgatgaggatgtggatggagagccagagaggcagag

SEQ ID NO: 20669 - DNA, 487 bp, Homo sapiens
  MAP TO AC009963.2; EXPRESSED IN PLACENTA, SIGNAL = 4.7; EXPRESSED IN BRAIN, SIGNAL = 3.4; EXPRESSED IN ADULT LIVER, SIGNAL = 2.1; EXPRESSED IN HELA, SIGNAL = 4.9; EXPRESSED IN LUNG, SIGNAL = 2.7; EXPRESSED IN BONE MARROW, SIGNAL = 2.2; NT HIT: gi14720742, EVALUE 0.00e+00; EST_HUMAN HIT: AU140420.1, EVALUE 0.00e+00; SWISSPROT HIT: P49792, EVALUE 1.00e-85
caaatttctgcttgaattcttcagccagctctggtgttttaaattttgctgctaaccgctctagtttggcatcaccatcagagaaatcactggctgaccacatccatgctctatctgatccagacaggggcttcaggttcattgtagtcgttatccaatgattagcacacacttttagtacttgttctcttcgcatcagcattcttggtttgccattgacctcgtttttgagaatttttaagttccccaagcccctttctttccactgccttacctcagcatcaaatctaaatagttttaccccctgtgaatacagaactttttcaccttcttctcctattacaagttctactttttcaggcatttgaactactggttcaaaatggatgtcatcgctgtcctcagtcttataggcatcatcatctttctcaaagtcaccggaagtgtttgctttattggccattttaccgcattgtgatgagaataa

SEQ ID NO: 20670 - DNA, 830 bp, Homo sapiens
  MAP TO AC010644.6; EXPRESSED IN HELA, SIGNAL =   4; EXPRESSED IN ADULT LIVER, SIGNAL = 2.4; EXPRESSED IN PLACENTA, SIGNAL = 1.7; EXPRESSED IN LUNG, SIGNAL =   2; EXPRESSED IN BONE MARROW, SIGNAL = 2.2; EXPRESSED IN FETAL LIVER, SIGNAL = 1.9; SWISSPROT HIT: P34657, EVALUE 2.00e-51; NT HIT: gi14769150, EVALUE 0.00e+00; EST_HUMAN HIT: BI754142.1, EVALUE 0.00e+00
ccgccagctggagacgatggtggaccacttggccaacacggagatcaacagccagcgcatcgcggcagtggagagctgcttcggggcctcggggcagccgctggcgctgccaggccgagtgctgctgggcgagggcgtgctgaccaaagagtgccgcaagaaggccaagccgcgcatcttcttcctctttaacgacatcctggtgtatggcagcatcgtgctcaacaagcgcaagtaccgcagccagcacatcatccccctggaggaggtcacactggagctgttgccggagacgctgcaggccaagaaccgctggatgatcaagacggccaagaagtcctttgtggtgtcggccgcctccgctacggagcgccaggaatggattagccacatcgaggagtgcgtgcggcggcaactgagggccacgggccgcccgcccagcacggagcacgcggcaccctggatccccgacaaggccacggacatctgcatgcgctgcacgcagacgcgcttctctgccctcacgaggcgccaccactgccgcaagtgcggcttcgtggtctgcgctgagtgctcgcgccagcgcttcctgctcccgcgcctgtcccccaagcccgtgcgcgtctgcagcctctgctaccgcgaactggccgcccagcagcggcaggaggaggcggaggagcagggcgcggggtccccagggcagccagcccacctggcccggcccatctgcggagcgtccagtggagatgacgatgactccgacgaggacaaggagggcagcagggacggcgactggcccagcagcgtggagttctacgcctcggggg

SEQ ID NO: 20671 - DNA, 1630 bp, Homo sapiens
  MAP TO AP001725.1; EXPRESSED IN BONE MARROW, SIGNAL = 2.1; EXPRESSED IN FETAL LIVER, SIGNAL = 1.5; EXPRESSED IN ADULT LIVER, SIGNAL = 1.5; EXPRESSED IN PLACENTA, SIGNAL = 1.6; EXPRESSED IN BRAIN, SIGNAL = 1.8; EXPRESSED IN HELA, SIGNAL = 2.7; SWISSPROT HIT: Q9Y3R5, EVALUE 0.00e+00; NT HIT: gi14780351, EVALUE 0.00e+00; EST_HUMAN HIT: AW379450.1, EVALUE 0.00e+00
atgacttgcaccgttggtttaacaggaagaaaacctctttcagagaggcatgcgcagtgcccgagcctcaggagagcggctctgaagagcacctgcctctgagccagttcaccacagtggaccgtgaagccatttgggccgaagtggagaaggagcccgagaagtacccgctgcgaggcgagctgagcgaggaagagctgccctactacgtggagcttccagacaggacggcccacggcgccccggacagcagcgagcacaccgagtctgcagatacaagctcctgccacacggacagcgagaacacgtcctccttctcctccccttcccacgacctgcaggagctgagcaacgaagagaactgctgtgcacccatccccatggggggcagggcgtaccccaagcgctcggccctgctggcggccttccagtcagaaagcttcaaggctggggccaagttaagcctggtgcgggtggactcggacaagacgcaggcttctgagtcgttctccagcgacgaggaggcggacttggagctccaggccctcaccacatccaggctgctaaagcagcagcgggaaaggcaggaggccgtcgaggccttgttcaagcacatcctgctctacctgcagccctacgactctcggcgggtcctctatgccttctcggtgctggaggctgtgctcaaaaccaaccctaaggaattcatcgaggctgtgtccaggactagcatggataccagctccaccgcgcacctcaacctcatctccaacctcctcgctcgccaccaggaggccctcattggccagagtttctacggaaagctccagacccaggtccccaacgtgtgcccccactctctgctcctggagctgctcacctacctctgcctgagcttcctgcgctcctactacccttgctatttgaaggtctcgcaccgagacattctcggcaaccgggacgtgcaggtcaaaagtgtcgaggttttgatcaggataatgatgcagctggtctcagtggccaagtcttcggaagggaagaacgtggagttcatccacagcttgctgcagaggtgcaaagttcaggagtttgtcctgctctccctgtcggcgtccatgtacacgagccagaagcgctacgggctggccaccgcccaccacggcagggccctgccagaggacagcctctttgaggagagtctcattaacttgggtcaggaccagatctggagtgagcacccgctgcagattgagctgctgaagctgctgcaggtgctgattgtcttggaacaccacctgggtcgggcccatgaggaggcggaaaaccagcccgacctgtcccgggagtggcagagagccctgaacttccagcaggccatcagcgccctgcagtacgtgcagccccaccccctcacctcccagggtcttctggtctctgcggtggtgaggggtctgcagcccgcctacggttacggcatgcatccggcctgggtgagcttggtcacgcattccttgccctacttcggaaagtccctgggctggacggtgacaccctttgttgtccagatttgcaaaaacttggatgacttggtcaagcagtatgaaagcgaatctgtgaagctctctgtcag

SEQ ID NO: 20672 - DNA, 673 bp, Homo sapiens
  MAP TO Z68289.1; EXPRESSED IN PLACENTA, SIGNAL = 1.7; EXPRESSED IN HELA, SIGNAL =   2; EXPRESSED IN ADULT LIVER, SIGNAL = 1.2; EXPRESSED IN BONE MARROW, SIGNAL = 1.5; EXPRESSED IN LUNG, SIGNAL = 1.4; EXPRESSED IN HEART, SIGNAL = 1.5; EXPRESSED IN FETAL LIVER, SIGNAL = 1.4; NT HIT: AB008681.1, EVALUE 0.00e+00; EST_HUMAN HIT: T59247.1, EVALUE 5.00e-98; SWISSPROT HIT: P26805, EVALUE 5.00e-03
ctaattctccttagtccttctagaacacaggtcaacagatgtttgcaattccagtccccatgatctgagtcgaggtcccagtagggatccattaccggggatggcttgctgaccagtagggaatttgtccctttcttcagctgtcattctatcatttacttgactaagataccagatatcttcaaactcttgggctgcagctaaaactgcattgttttcattaaaggccagggtttgatctaacaatagcatgacatctctccaagtgagatcaaaggtttgctctaggctgtgtaggacatctatatacctatcgggattgtctgaaaacttccccaggtctgccttgatctgctttaaatcagagagggagaaggggacatgtacccaggttgggccaaattcccttccccctacagcttgaaggggacataaccgatagcccaggggtttttgtggtcccttggagatttctttgcttgcttccttctgggtgggggagattagaggaggcttatcattaataggaaggggagctgtagaaaggctagtatatggaggtaagctgagaggttctgctgtgggatgtaaattgcatgctttgcatagttgtggattctccttcaatgaaaagaaagcttgggcataaggtatttcactccatttgccctcc

SEQ ID NO: 20673 - DNA, 954 bp, Homo sapiens
  MAP TO AC025249.2; EXPRESSED IN ADULT LIVER, SIGNAL = 2.1; EXPRESSED IN LUNG, SIGNAL = 1.7; EXPRESSED IN HELA, SIGNAL = 1.8; EXPRESSED IN BRAIN, SIGNAL = 1.6; EXPRESSED IN PLACENTA, SIGNAL = 2.1; EXPRESSED IN FETAL LIVER, SIGNAL = 1.7; EXPRESSED IN BONE MARROW, SIGNAL = 2.1; EXPRESSED IN HEART, SIGNAL = 2.3; NT HIT: gi7305348, EVALUE 7.00e-11; EST_HUMAN HIT: BF679294.1, EVALUE 0.00e+00; SWISSPROT HIT: Q9H344, EVALUE 6.00e-89
ctagggctctgaagcgtgtgtggccacatggaaaagtcgaaggatgcgctgtcgaatctcctttgtcttcactccatagacaattgggttgagcacaggaggaaccagcagatagatattggccaagatgacgggcagcggagagtcacgccgcttgctaaagcgatgcaccatggacaatccaatgaaaggtacatagaatatgaacacagcacacacatgagagacgcaagtgccaaatgccttggcctgggcttcacgtgtcaagcccaacacagtcttaagaataagcagatatgagaaggagatgagaagtgagtccaggccaatggcggagatgatgacgataaggccatagacgacattgacccggatatcatcacaggccagcttcatgacatcttggtgtaggcagtaggaatgggaaaggatattggagcggcagaagggcagctgcttgatgaagacaggaaggggtgccatcagtgcagccccccgcaccacagcagccacaccaattttggtgacacgaggcaacgtaagtactgtggcatggcgcagtgggtgacagatggccacatagcggtcaaaagccatggccagcagcactgtggattccatgccagataaggagtggatggcaaacatctgtagcagacaagcatcaaactggatggtagtggaattgaaccagaagatggccagcattttgggcatggatgaggtggagatgaggatgtcaatgcctgaaagcatgcaaagaaatatatacatgggctcatgcaggctgtgctcagtccgcacaatgtagatgattgtcaagttacctagcacagcaataaggtagagggagcacaatgggaaggccaaccagaactgagcctcttctaaaccagggaggcctattaggatgaagtatgtagcactggattcattgccattgggatccaccat

SEQ ID NO: 20674 - DNA, 1339 bp, Homo sapiens
  MAP TO AC009079.4; EXPRESSED IN ADULT LIVER, SIGNAL = 1.2; EXPRESSED IN HELA, SIGNAL = 1.9; EXPRESSED IN BONE MARROW, SIGNAL = 1.2; EXPRESSED IN FETAL LIVER, SIGNAL = 1.4; EXPRESSED IN LUNG, SIGNAL = 1.2; NT HIT: gi14774585, EVALUE 0.00e+00; EST_HUMAN HIT: AU123703.1, EVALUE 0.00e+00; SWISSPROT HIT: O43313, EVALUE 0.00e+00
gccaataagtactggtgttcaagtgaactttggtaaaagtccatctaatcctttacaagaactagggaacacgtgtcaaaagaatagcatttcttcaatcaacgtgcagacagatctgtcttatgcctcacaaaactttataccttctgcacagtgggccactgctgattcctctgtgtcgtcttgttctcaaactgatttgtcgtttgattctcaagtgtctcttcccattagtgttcacactcagacatttttgcccagctctaaggtaacttcatctatagctgctcagactgatgcatttatggacacctgtttccagtcaggtggggtctccagagaaactcaaaccagtgggatagaaagtccaacggatgaccatgtacagatggaccaagctggaatgtgcggagacatttttgagagtgttcattcatcatataatgttgctacaggtaacattataagcaacagtttagtagcagagacagtaactcatagtttgttacctcagaatgagcctaagactttaaatcaagatattgagaaatctgcaccaattataaatttcagtgcacagaatagtatgcttccttcacagaacatgacagataatcagacccaaaccatagatttattaagtgatttggaaaacatcttgtcaagtaatctgcctgcccagacattggatcatcgtagtcttttgtctgacacaaatcctggacctgacacccagctcccatctggcccagcccagaaccccggaatcgattttgatatcgaagagttcttttcggcctcaaatatccagactcaaactgaagagagtgaacttagcaccatgaccaccgagccagtcttggagtcactggacatagagactcaaacggacttcttactcgcagatacctctgctcagtcctatgggtgtaggggaaattctaacttcttaggccttgagatgtttgacacacagacacagacagacttaaactttttcttagacagtagccctcatctgcctctgggaagtattctgaaacactccagcttttccgtgagtactgattcatctgacacagagacccaaactgaaggagtctccactgctaaaaatatacctgctctagaaagcaaagttcagttgaacagtacagaaacacagaccatgagttctgggtttgaaaccctggggagcttgttcttcaccagcaacgaaactcagacagcaatggatgactttcttctggctgatctggcctggaacacgatggagtctcagttcagctctgtagaaacccagacttctgcggaaccacacacagtctccaacttctaa

SEQ ID NO: 20675 - DNA, 925 bp, Homo sapiens
  MAP TO AC004889.1; EXPRESSED IN HELA, SIGNAL = 1.3; EXPRESSED IN ADULT LIVER, SIGNAL = 1.5; EXPRESSED IN LUNG, SIGNAL = 1.2; EXPRESSED IN HEART, SIGNAL = 1.2; EXPRESSED IN BONE MARROW, SIGNAL = 1.1; SWISSPROT HIT: O15320, EVALUE 1.00e-122; NT HIT: gi16189466, EVALUE 0.00e+00; EST_HUMAN HIT: BG719803.1, EVALUE 0.00e+00
atggaggagcctggtgctacccctcagccctacctggggctggtcctggaggagctacgcagagttgtggcagcactacctgagagtatgagaccagatgagaatccttatggttttccatcggaactggtggtatgtgcagctgttattggattttttgttgttctcctttttttgtggagaagttttagatcggttaggagtcggctttacgtgggaagagagcaaaaacttggtgcaacgctttctggactaattgaagaaaaatgtaaactacttgaaaagtttagccttattcaaaaagagtatgaaggctatgaagtagagtcatctttagaggatgccagctttgagaaggcggcagcagaagaagcacgaagtttggaggcaacctgtgaaaagctgaacaggtccaattctgaacttgaggatgaaatcctctgtctagaaaaagacttaaaagaagagaaatctaaacattctcaacaagatgaattgatggcggatatttcaaaaagtatacagtctctagaagatgagtcaaaatccctcaaatcacaaatagctgaagccaaaatcatctgcaagacatttaaaatgagtgaagaacgacgggctatagcaataaaagatgctttgaatgaaaattctcaacttcagacaagccataaacagctttttcagcaagaagctgaagtatggaaaggagaagtgagtgaacttaataaacagaaaataacatttgaagactccaaagtgcacgcagaacaagttctgaatgataaagaaaatcacatcaagaccctgactggacacttgccaatgatgaaagatcaggctgctgtgcttgaagaagacacaacggatgatgataacctggaattagaagtgaacagtcaatgggaaaatggtgctaacttagatg

SEQ ID NO: 20676 - DNA, 849 bp, Homo sapiens
  MAP TO AP000323.1; EXPRESSED IN LUNG, SIGNAL = 1.4; EXPRESSED IN HEART, SIGNAL = 1.3; EXPRESSED IN BONE MARROW, SIGNAL = 1.2; EXPRESSED IN FETAL LIVER, SIGNAL = 1.2; EXPRESSED IN PLACENTA, SIGNAL = 1.4; EXPRESSED IN HELA, SIGNAL =   1; EXPRESSED IN ADULT LIVER, SIGNAL = 1.3; EXPRESSED IN BRAIN, SIGNAL = 0.95; SWISSPROT HIT: P21333, EVALUE 6.10e-01
tcatccgatggtgcccgcattccctgctctgtctagatggtgcccacattccctgctctgtctagatggtgccgacataccctgatctgtccagacagtgcctacattccctgctccatctggatggtgcccacattccctgctctgtccagacggtgcccacattccctgctctgtctggacggtgcccacattccctgatctgtccggacagtgcccacattccctcctccgtccggaaggtgcccacattccctgctgtgtctggacggtgcccacatttcctgctccgtccagacagtgcccacattccctgctgtgtctagatggtgcccacattccctgctccgtccagacagtgcccacattccctgctctgtctagatggtgcccacattccctgctccgtccggacggtgcccacattccctgctccatccggacggtgcccacattccctgctccgtccggacggtgcccacattccctgctccgtccggacggtgcccacattccctgctctgtccagatggtgcccacattccctgctccatctggacggtgcccacattccctcctctgtctagacagtgcccacattccctgctccgtccggacggtgcccacattccctgctctgtctggacggtgctcacattccctgctctgtctagacagtgcccacattccctgctccatccagacggtgcccatactccctgctctgtctagatggtgtccacattccctgctccgtctagactgtgcccatattcgctgctggctgcaaatgcgaggagttgacagcagcctcccctttacaaggcaggaggtgccactgttcgccat

SEQ ID NO: 20677 - DNA, 3738 bp, Homo sapiens
  MAP TO AL121919.19; EXPRESSED IN LUNG, SIGNAL = 1.9; EXPRESSED IN HELA, SIGNAL = 0.9; EXPRESSED IN ADULT LIVER, SIGNAL = 2.1; EXPRESSED IN BONE MARROW, SIGNAL = 1.4; EXPRESSED IN FETAL LIVER, SIGNAL = 1.9; SWISSPROT HIT: P15822, EVALUE 5.00e-24; NT HIT: gi16161651, EVALUE 4.00e-09; EST_HUMAN HIT: BI911264.1, EVALUE 1.40e+00
atggaggttccagaacccacctgccctgcccctcctgcgagggaccagccagctcccactcctggccctccaggggccccaggtggccaggcctcacctcacctgaccctgggccctgtccttctgccgccagagcagggcctggccccccccactgtgttcctgaaggccctgcccatcccactgtaccacacggtgcctcccgggggcctccagccccgcgccccgctagtgacgggcagcctagatgggggcaacgtgcccttcatactcagccctgtgctgcagcctgaagggcctggccccacccaggtggggaagccggcggcccctacgctgacggtgaacatcgtgggcactctgcctgtcctgtcgccgggcctgggccccacgctgggcagcccaggcaaggtgcggaatgcgggcaagtacctgtgtccgcactgtggtcgcgactgcctgaagcccagtgttctagagaagcacatccggtcccacacgggtgagaggcccttcccgtgtgccacctgcggcatcgcctttaagacccagagcaatctctacaagcacaggcggacgcagacgcacctcaacaactcccggctgtcctcagagtccgagggcgccgggggcggcctcctggaggaaggggacaaggccggagagccccccagaccagagggcaggggcgagagcaggtgccaggggatgcacgaaggcgcctcggagagacccctttctccgggtgcccacgtgcccctacttgccaagaacctggatgtgaggaccgaagctgctccctgtccagggtccgcatttgccgacagagaggctccttgggactctgcccccatggcgtcacctgggctcccagcggccagcacacaaccctggcgtaagttgccagagcagaagtcgccgaccgccgggaagccgtgcgccctgcagcggcagcaggcgacggcagcggagaagccctgggatgccaaggcccccgagggccggctgcggaagtgtgagagcaccgactcggggtacctgtcgcgctccgacagcgcggagcagccgcatgcgccctgcagccccctgcacagcctttcggagcacagcgccgagtccgagggggagggcggcccgggcccggggccaggggtcgcaggggccgagcccggggcgcgagaagccggcctggagctggagaagaagcggctggaggagcgcatcgcccagctcatctcccacaaccaggcggtggtggacgatgcccagctggacaacgtgcggccccggaagaccgggctgtccaaacagggcagcatcgacctgcccacgccctacacctacaaggactccttccactttgacatccgcgcgctggagccaggccgtaggagggccccgggccccgtgcgctccacctggacgcccccagacaagtctcggcccctcttcttccactccgtccccactcagctctccaccaccgtggaatgtgtccccgtcaccaggagcaactcgctgcccttcgtcgagggctccaggacgtggctggagcccagggagccccgggacccctggtccaggacgcagaagcctctgagccccaggcccggcccagcccgcctgggctgccgctcgggactaagctcgactgacgttcccagtgggcatccccgggccctggtcagacaggccgcggtggaggacctgccaggcacccccattggcgatgccctggtgcccgcagaggacacagacgcaaagagaactgctgcgcgggaggccatggccggcaagggcagagcgggcggcaggaagtgcggccagagaaggctgaagatgttctcccaggagaagtggcaggtgtacggggatgagacgttcaaaaggatctaccagaaaatgaaagccagtccccatggaggcaagaaagccagggaggtgggaatgggcagtggggcagaactgggctttcctctgcagaaagaggcagcagggagctcaggcacagtccccacccaagacaggaggacccctgtccatgaggacatatccgcaggggcaacgccagagccttggggaaatccaccagccctggaggcctccttggtgactgaacccactaagcatggggagacggtggccaggagaggagacagtgaccgacccagggtggaagaggctgtgtcatcccctgcactgggtggcagagacagtccctgttcaggcagtaggagccccctggtctctccaaatgggaggctggaactggggtggcagatgcccccagcacctggccccctcaaagggggtgatgtagaggctcccaggccagtttggccggaccccaagctggaaggaggtgcccgaggtgtgggggatgttcaggagacctgcctgtgggcccagactgtcctgagatggcccagcaggggctcaggggaggacaagctcccctcagagaggaagaagctgaaagtggaggacctgcacagctggaagcaaccagagcctgtgagcgcagagaccccaggtgggcccacgcagcctgcctctttgtcatcccagaagcaggatgccgatcccggggaggtgccagggggctcaaaggagagtgccaggcaggtgggcgagcctctggagtcctctggagcctccttggctgctgcttctgttgccctgaagagggtggggccaagggacaaggctaccccactgcatcctgcagccccagcccccgcagagcacccctcgctggccaccccacctcaggctcctagagtgctctctgccctggcagataatgccttttcccccaagtacctcctcaggttacctcaggcagagacccccttaccactgcccattccctggggaccaaggcacagccaggactctctctgcagcagtgggtggcctgaagaacgggcatcatttgttgggtcaggactggggacccctctttctcccagcccagcctcaggcccctccccaggtgaggcggacagcatcctggaggaccccagctgttccaggccacaggatgggagaaaaggggcacagttggggggggacaagggggacaggatggccactagcaggccagcagccagggagttgcccatctcagcaccaggggctcccagggaggctacctcctccccgcccactccaacgtgtgaggcacacttagttcaggacatggagggtgacagccaccgtatccatcgcctctgcatgggcagcactttggcaagggccaggctctctggggatgtcctgaatccctgggtacccaactgggagctgggggagcctcctgggaatgccccagaagatccttcttcagggcccctggtgggccccgacccgtgttcccccctccagcctggctccttcctcactgccctcactcggcctcagggtgtgcccccaggctggccagagctggccttgtcttcccactcagggacgtcccggagccacagcacccgcagtccccacagcacccaaaacccctttccctcactgaaggctgagccgcggctcacgtggtgttgcctgagccgcagtgtccctctgcccgcggagcagaaggcaaaggcggcatctgtgtacttggcggtgcactttcctggtagcagcctccgagatgagggtcccaatggccctcctgggagcaatggaggatggacctggacaagccctggagaaggagggccggcgcagatgtccaag

SEQ ID NO: 20678 - DNA, 476 bp, Homo sapiens
  MAP TO Z73420.1; EXPRESSED IN LUNG, SIGNAL = 3.6; EXPRESSED IN HEART, SIGNAL = 4.4; EXPRESSED IN BONE MARROW, SIGNAL = 4.2; EXPRESSED IN ADULT LIVER, SIGNAL = 3.6; EXPRESSED IN PLACENTA, SIGNAL = 4.1; EXPRESSED IN BRAIN, SIGNAL = 3.2; EXPRESSED IN HELA, SIGNAL = 2.9; NT HIT: U07000.1, EVALUE 1.10e-01; EST_HUMAN HIT: BI829995.1, EVALUE 0.00e+00; SWISSPROT HIT: P26550, EVALUE 2.00e-03
ctatgacacctgctcctcggagaccagctggtccaccacattgctcccaaacttgtggcgaatgttgttaggaatgatgctgcccttctggttcgtgggcgtgctcctctggtcctgagcccccaagctgggaccgtcatccgtcccctggcatggctgagccccctctcccgaggtggccctgttctctctcgaggaggatcgagagcccgcattcttcagggacctggactgtgggtccatgcccagagaatccctgctggcagcagtcgggggtggagggggaatctccttcaagtggcactgccctagggagctgccttgagcgctggctcccaggggcaggggctgtggggatgacagaccctggttcttgaacttggaggtgtccaaggaactgtaggccgctttccaggggtccaagtcctgttggccctccttgtcattcagatgggccctggtgaaagtggttgtac

SEQ ID NO: 20679 - DNA, 576 bp, Homo sapiens
  MAP TO AL035668.15; EXPRESSED IN ADULT LIVER, SIGNAL = 1.8; EXPRESSED IN HELA, SIGNAL = 1.3; EXPRESSED IN HEART, SIGNAL =   2; EXPRESSED IN FETAL LIVER, SIGNAL = 1.4; NT HIT: gi11421640, EVALUE 0.00e+00; EST_HUMAN HIT: AA488503.1, EVALUE 0.00e+00; SWISSPROT HIT: P12643, EVALUE 1.00e-115
tcacctcagcagagcttcaggttttccgagaacagatgcaagatgctttaggaaacaatagcagtttccatcaccgaattaatatttatgaaatcataaaacctgcaacagccaactcgaaattccccgtgaccagacttttggacaccaggttggtgaatcagaatgcaagcaggtgggaaagttttgatgtcacccccgctgtgatgcggtggactgcacagggacacgccaaccatggattcgtggtggaagtggcccacttggaggagaaacaaggtgtctccaagagacatgttaggataagcaggtctttgcaccaagatgaacacagctggtcacagataaggccattgctagtaacttttggccatgatggaaaagggcatcctctccacaaaagagaaaaacgtcaagccaaacacaaacagcggaaacgccttaagtccagctgtaagagacaccctttgtacgtggacttcagtgacgtggggtggaatgactggattgtggctcccccggggtatcacgccttttactgccacggagaatgcccttttcctctggctgatcatc

SEQ ID NO: 20680 - DNA, 638 bp, Homo sapiens
  MAP TO AL133227.7; EXPRESSED IN ADULT LIVER, SIGNAL = 2.1; EXPRESSED IN BRAIN, SIGNAL = 1.6; EXPRESSED IN HELA, SIGNAL = 1.4; EXPRESSED IN BONE MARROW, SIGNAL = 1.7; EXPRESSED IN LUNG, SIGNAL = 1.7; EXPRESSED IN HEART, SIGNAL =   2; EXPRESSED IN FETAL LIVER, SIGNAL =   2; NT HIT: gi14760582, EVALUE 3.00e-03; EST_HUMAN HIT: AA989230.1, EVALUE 1.00e-115; SWISSPROT HIT: P15620, EVALUE 1.00e-61
accttcaaaggttattcaacatcagagcatgcacagtggactgaagccatacaaatgtgatgtatgtcaaaaggcctttaggtttctctcatccctctctatacatcagagatttcatgttggcaacagagtaaacctgactcggcatcaaaaaactcatactcaaaggaagcccttttcctgtaacttttgtggaaaaacctttcaccgtttctcagaaaaaactcaacatctattaattcatactagaaagaaatattatacatgtaattattgcaaaaaggaattcaatccgtactccaaatttattctacatcaaagaactcatacaggagagaaaccccacaagtgtgatgtttgtgagaaatcctttaaaagcatctcaaatcttaataaacatcagaaaactcatactggagagaagcccttttcatgtaatgaatgtaagaaagcctttgcccagcgcacggatcttgctcgccaccaacaaatccataccggaaagaagtcttttatttgcagtagttgtaaaaagacctttgtccgtctgtcagatctaacacaacataaaggaactcatacgggagagagaccttaccaatgtacgacttgtgaaaaagcctttaaatatcggtcaa

SEQ ID NO: 20681 - DNA, 563 bp, Homo sapiens
  MAP TO AL133316.2; EXPRESSED IN ADULT LIVER, SIGNAL = 1.6; EXPRESSED IN HELA, SIGNAL = 2.4; EXPRESSED IN BONE MARROW, SIGNAL = 1.5; EXPRESSED IN LUNG, SIGNAL = 1.6; SWISSPROT HIT: P51513, EVALUE 4.00e-53; NT HIT: gi14746410, EVALUE 0.00e+00; EST_HUMAN HIT: BE612586.1, EVALUE 0.00e+00
gtttaggtctcagtcaagcagcagcaacaggggctttggctgcagcagctgccagtgccaacccagcagcagcagcagccaatttattggccacctatgccagtgaagcctcagccagtggcagcacagctggtggtacggcggggacatttgcattaggtagcctggctgctgctactgctgcaaccaatggatattttggagctgcttctcccctagctgccagtgccattctaggaacagaaaagtccacagatggatccaaggatgtagttgaaatagcagtgccagaaaacttagttggtgcaatacttggcaaaggagggaaaacattagtggaataccaggagttgactggtgcaaggatacagatctccaaaaaaggagaattcgtacctggcacaaggaatcggaaggtaaccattactggaacaccagctgcaacacaggctgctcaatatttaattacacaaaggatcacatatgagcaaggagttcgggctgccaatcctcagaaagtgggttgagtgccccagttacacatcagattgttttaacccctc

SEQ ID NO: 20682 - DNA, 1505 bp, Homo sapiens
  MAP TO AC010203.13; EXPRESSED IN ADULT LIVER, SIGNAL = 1.4; EXPRESSED IN HELA, SIGNAL = 2.6; SWISSPROT HIT: P32583, EVALUE 1.50e-02; NT HIT: gi14754105, EVALUE 0.00e+00; EST_HUMAN HIT: BI094480.1, EVALUE 0.00e+00
tttgtcattccttctgaagtgaaatctgaatgtcatcaagatcagccacgtgcaatttctattcagagttctgaaatgattgccacaaatacaaggcactgtccaaactgtcgacattctgacctagaagctttgtttcaagactttaaagattgtgatttttttagtaaaacatataccagcttccccaaatcttgtgacaattttaatcttctacatccaattttccagagacatgctcatgaacaagataccaaaatgcatgaaatttataaaggaaatattactccccaattgaataaaaacactcttaaaacttctgctgccacggatgtttgggctgtgtacttttctcaattttggatagattatgaagggatgaaaagtggaaaaggacggccaataagttttgtagactcattccctctttccatttggatttgtcaaccaacaagatatgcagagtcacaaaaagagccgcagacttgtaatcaggtatctctaaatacatcacaaagtgaatctagtgatctggctggccgattgaagcggaagaagctcttgaaggagtattatagtacagagtctgagcctttgacaaatggtggtcagaagccttcttcatcagatacatttttcagattttccccttcctcgtcagaggcagatattcatctcctagttcatgttcataaacatgtcagtatgcagattaatcactaccagtatctgcttctacttttcctgcatgagtcacttatcctgctttcagagaacttaaggaaagatgtagaagctgtaactggcagtcctgctagtcagacatccatttgtattggaattttacttagaagtgcagaactggctcttttgctccatccagtggatcaagcaaatactcttaagtctcctgtttctgaaagtgtgagcccagtggtacctgattatttgcctacagaaaatggggattttttgtcttcaaaaagaaaacaaattagtagggatataaatagaattagaagtgtaactgttaatcatatgtcagacaacagatctatgagtgttgaccttagccatatccctttaaaggatcctttgctttttaaatcagctagtgatacaaatctgcaaaaaggcatttcttttatggactatttatcagataaacatttagggaaaataagtgaagatgaaagtagtggacttgtttacaaaagtggctcaggagaaattggatcagaaacaagtgacaaaaaggattcattttatacagattcaagtagtatcttaaactacagagaagattcgaatatactttcatttgatagtgatggtaatcaaaacatactttcaagtactttaactagtaaaggaaatgaaaccatagagtccatctttaaagctgaagatttgcttccagaagcagcttcactctctgaaaacctggatatcagtaaagaagagacccccccagttagaacacttaaatcacagtcatctttaag

SEQ ID NO: 20683 - DNA, 555 bp, Homo sapiens
  MAP TO AC005618.1; EXPRESSED IN LUNG, SIGNAL = 1.4; EXPRESSED IN HEART, SIGNAL = 2.2; EXPRESSED IN BONE MARROW, SIGNAL = 1.1; EXPRESSED IN FETAL LIVER, SIGNAL = 1.1; EXPRESSED IN ADULT LIVER, SIGNAL = 1.5; EXPRESSED IN BRAIN, SIGNAL = 2.2; EXPRESSED IN HELA, SIGNAL = 0.97; SWISSPROT HIT: Q9Y5I2, EVALUE 1.00e-44; NT HIT: gi14724436, EVALUE 0.00e+00; EST_HUMAN HIT: BG818832.1, EVALUE 2.00e-78
gaaatcctatgccaactaaaaggaaacttcccctttaaaatcgttcaagataccaaaaacacatacaggttggtgacagatggagccctggaccgggagcagatcccagaatacaatgtgacgatcacagctaccgacaaaggcaatccaccgctctcctccagcaagaccatcactctgcacatccttgatgtcaacgacaacgttcccgttttccaccaggcctcctacaccgtgcatgtagctgagaacaatccgcctggagcctccattgcgcatgtcagagcctcggatcccgacttgggacctaatggccttgtctcctactacatcgtggccagtgacctggagccgcgggagctgtcgtcctacgtgtccgtgagcgcgcggagcggggtggtgttcgcgcagcgagccttcgaccacgagcagctgcgtgccttcgagctcactctgcaggcccgcgaccagggctcgcctacgctcagcgccaacgtgagcctgcgcgtgttggtggacgaccgcaacgacaatgcaccgctggtgctgtaccca

SEQ ID NO: 20684 - DNA, 917 bp, Homo sapiens
  MAP TO AL121747.19; EXPRESSED IN BONE MARROW, SIGNAL = 1.4; EXPRESSED IN LUNG, SIGNAL = 1.3; EXPRESSED IN FETAL LIVER, SIGNAL = 1.1; EXPRESSED IN HELA, SIGNAL = 2.2; EXPRESSED IN ADULT LIVER, SIGNAL = 1.6; EXPRESSED IN BRAIN, SIGNAL = 1.8; EXPRESSED IN HEART, SIGNAL = 1.4; NT HIT: gi13654113, EVALUE 0.00e+00; EST_HUMAN HIT: AI821693.1, EVALUE 0.00e+00; SWISSPROT HIT: O15370, EVALUE 6.00e-68
atggtgcagcagcggggcgcgagggccaagcgggacggcgggccgccgcccccgggacccgggccggccgaggagggggcgcgcgagcccggctggtgcaagaccccgagcggccacatcaagaggccgatgaacgcattcatggtgtggtcgcagcacgaacggcggaagatcatggaccagtggcccgacatgcacaacgccgagatctccaagcgcctgggccgccgctggcagctgctgcaggactcggagaagatcccgttcgtgcgggaggcggagcggctgcggctcaagcacatggcggattacccggactacaagtaccggccgcgcaaaaagagcaagggggcgcccgccaaggcgcggccccgcccccccggtggtagcggtggcggcagccggctcaagcccgggccgcagctgcctggccgcgggggccgccgagcagcgggagggcctttggggggcggggcggcggcgcccgaggacgacgatgaagacgacgacgaggagctgctggaagtgcgcctggtcgagaccccggggcgggagctgtggaggatggtcccggcgggacgggccgctcggggacaagcggagcgcgcccaagggccgtcgggcgagggggcggccgccgccgccgccgcctccccgacaccgtcggaggacgaggagccggaggaagaggaggaggaggcggcagcggctgaggaaggtgaagaggagacggtggcgtcgggggaggagtcgctgggctttctgtccaggctgccccctggcccggccggcctggactgcagcgccctggatcgcgacccggacctgcagcctccctcgggcacgtcgcacttcgagttcccggactactgcacccccgaggttaccgagatgatcgcgggggactggcgcccgtc

SEQ ID NO: 20685 - DNA, 2481 bp, Homo sapiens
  MAP TO AC000066.1; EXPRESSED IN HELA, SIGNAL = 0.87; EXPRESSED IN ADULT LIVER, SIGNAL = 1.4; EXPRESSED IN BRAIN, SIGNAL = 1.1; EXPRESSED IN HEART, SIGNAL = 1.6; EXPRESSED IN LUNG, SIGNAL = 1.3; EXPRESSED IN BONE MARROW, SIGNAL = 1.3; NT HIT: AJ010770.1, EVALUE 0.00e+00; EST_HUMAN HIT: BG402933.1, EVALUE 0.00e+00; SWISSPROT HIT: Q99996, EVALUE 0.00e+00
gccagaagctaaaaatgccattcttacattttcattttttttcctaaaggaacaagataaaaaagtagaaaactcaaataaagaagaaatacaggaaaaggagacaatcattgaagaattaaacacaaaaataatagaagaagaaaagaaaactcttgagctaaaggataaattaacaactgctgataaattactaggagaattacaagaacagattgtgcaaaagaaccaagaaataaaaaacatgaaattagagctgactaattctaagcaaaaagaaagacagtcttctgaagaaataaaacagttaatggggacagtcgaagaacttcagaagagaaatcataaagacagccagttcgaaactgatatagtacaacgaatggaacaagaaacacaaagaaagttagaacaactccgggcagagctggatgagatgtatgggcagcagatagtgcaaatgaaacaagaattaataagacaacacatggcacagatggaggaaatgaaaacacggcataagggagaaatggagaatgctttaaggtcatattcaaatattacagttaatgaagatcagataaagttaatgaatgtggcaataaatgaactgaatataaaattgcaagatactaactctcaaaaggaaaaactcaaggaagaactaggactaattttagaagaaaagtgtgctctacagagacagcttgaagaccttgttgaagaattgagcttttcaagggaacagattcagagagctagacagacaatagctgaacaagaaagtaaacttaatgaagcacataagtcccttagtacagtggaagatttgaaagctgagattgtttctgcatctgaatccagaaaggaactagaattaaaacatgaagcagaagttacaaattacaagataaaacttgaaatgttagaaaaagaaaagaatgctgtgttagacagaatggctgaatcacaagaagctgaattagagaggctgagaacacagcttctatttagtcacgaagaagagctttccaaactgaaggaagatttagaaattgaacatcgaataaatattgaaaaacttaaagataatttaggcattcactataaacagcagatagatggtttacagaatgaaatgagtcaaaagatagaaaccatgcagtttgaaaaggacaatttgataactaagcagaatcaattaattttggaaatttcaaagctaaaagatttacagcagtctcttgtaaattcaaagtcagaagaaatgactcttcaaatcaatgaacttcaaaaagaaattgaaatactcagacaagaagaaaaagaaaagggtacacttgaacaagaagttcaagaattacaacttaaaacagaattgttagaaaaacagatgaaggaaaaagagaatgatcttcaagaaaaatttgcacaacttgaagcagagaatagcattcttaaagatgaaaagaaaacccttgaagacatgttgaaaatacatactcctgttagccaagaagaaagattgattttcttagactccattaagtccaaatccaaagactctgtgtgggaaaaagaaatagaaatacttatagaggaaaatgaggacctcaaacaacaatgtattcagctaaatgaagagattgaaaagcaaaggaacactttttcatttgctgaaaaaaactttgaagttaactatcaagagttacaagaggagtatgcttgccttctcaaagtaaaagatgatttagaagacagtaaaaataaacaggaattagagtataaaagtaaacttaaagcacttaatgaagagcttcatttgcaaagaataaatccaactacagtgaaaatgaaaagttctgtctttgatgaagacaaaacttttgtagcagaaacattggaaatgggtgaggttgttgaaaaggatacaacagaactcatggaaaaacttgaggtaaccaagcgagagaaattagagctgtcacagagactgtctgatctttctgaacaattgaaacagaaacatggtgagattagttttctaaatgaagaagttaaatctttaaagcaagagaaagaacaagtttcattgagatgtagagagctagaaatcattattaaccacaacagggcagaaaatgtacagtcatgtgatactcaagtaagctctttattagatggagttgtgaccatgacaagcaggggtgctgaaggatcagtttctaaagtaaataaaagttttggtgaagaatcaaaaataatggtggaagataaagtttcttttgaaaatatgactgttggagaagaaagtaagcaagaacagttgattttggatcacttaccatctgtaacaaaggaatcatcacttagagcaactcaaccaagtgaaaatgataaacttcagaaagaactcaatgtacttaaatcagaacaggtatgtttacttcttcatatatggtaaagcacaatgaaaaaaat

SEQ ID NO: 20686 - DNA, 923 bp, Homo sapiens
  MAP TO AL009172.1; EXPRESSED IN BONE MARROW, SIGNAL = 1.6; EXPRESSED IN PLACENTA, SIGNAL = 1.9; EXPRESSED IN BRAIN, SIGNAL = 1.4; EXPRESSED IN HELA, SIGNAL = 1.1; EXPRESSED IN ADULT LIVER, SIGNAL = 1.6; EXPRESSED IN HEART, SIGNAL = 1.7; EXPRESSED IN FETAL LIVER, SIGNAL = 1.4; SWISSPROT HIT: P09951, EVALUE 6.00e-19; NT HIT: M55301.1, EVALUE 0.00e+00; EST_HUMAN HIT: AI929645.1, EVALUE 0.00e+00
gtagggaacaggtacgcagcaggtgcctgataattgctccctggatccatcaaggtttaaggggcggaggggggcgacaagggcggggcacagaggaagcatccagcttaataatttaaaggaaaaagatttaggtgagagggccaggtgtcaggcacacaagcggcgctcgataattgctcattcgcagaagaacgatctggggacccaggcccacgggagacgtccgcggcagtggcttaccagtcggtgtgcggctcgtcgatgaccagcagcaccctggaggcggctcccccgcggcctgcgcccccagagccgccgcccacctgctcgctgaaggtggcagctgccgccgccgtggtctgcttgaccgcgttggacagcgacgagaagaagccaccgccccccgaggacccggggctaggggcggccggagaggccgctggggcgaccccggaggacctctcggcagtggcggtcccgggaccgggcgtggctccggggctgtgggcaccgggcggcggtgggggcggctgcggacgctgcaggtctgtcatgtacccatttggcagattggccataaagttgctgtccgacaggcggcgccgcaggtagttcatggctgcgacttggggcagggggtcctaggggtggtctggccaggagccgcgggggcggactgcgcggtgcccaggagcacagctgcgctctcaggcacgacacgactcctccgctgcccaccgcagactgaggcagcgctgagtcgccggcgccgcagcgcagatggtcgcgcccgtgcccccctatctcgcgcctcgcgtggtgcggtccggctgggccggcggcggcgcggacgcgaccaaggtggccgggaaggggagtttgcgggggaccggcgagtgacgtcagcgcgccttcagtgc

SEQ ID NO: 20687 - DNA, 859 bp, Homo sapiens
  MAP TO AC005263.1; EXPRESSED IN BRAIN, SIGNAL = 1.4; EXPRESSED IN ADULT LIVER, SIGNAL = 1.5; EXPRESSED IN HELA, SIGNAL = 2.6; EXPRESSED IN BONE MARROW, SIGNAL = 1.7; EXPRESSED IN FETAL LIVER, SIGNAL = 1.5; SWISSPROT HIT: P03971, EVALUE 7.00e-91; NT HIT: gi11426452, EVALUE 0.00e+00; EST_HUMAN HIT: AI811492.1, EVALUE 0.00e+00
gccatccgcggaactcgaggagtcgccacccagcgcagaccccttcctggagacgctcacgcgcctggtgcgggcgctgcgggtccccccggcccgggcctccgcgccgcgcctggccctggatccggacgcgctggccggcttcccgcagggcctagtcaacctgtcggaccccgcggcgctggagcgcctactcgacggcgaggagccgctgctgctgctgctgaggcccactgcggccaccaccggggatcctgcgcccctgcacgaccccacgtcggcgccgtgggccacggccctggcgcgccgcgtggctgctgaactgcaagcggcggctgccgagctgcgaagcctcccgggtctgcctccggccacagccccgctgctggcgcgcctgctcgcgctctgcccaggtggccccggcggcctcggcgatcccctgcgagcgctgctgctcctgaaggcgctgcagggcctgcgcgtggagtggcgcgggcgggatccgcgcgggccgggtcgggcacagcgcagcgcgggggccaccgccgccgacgggccgtgcgcgctgcgcgagctcagcgtagacctccgcgccgagcgctccgtactcatccccgagacctaccaggccaacaattgccagggcgtgtgcggctggcctcagtccgaccgcaacccgcgctacggcaaccacgtggtgctgctgctgaagatgcaggtccgtggggccgccctggcgcgcccaccctgctgcgtgcccaccgcctacgcgggcaagctgctcatcagcctgtcggaggagcgcatcagcgcgcaccacgtgcccaacatggtggccaccgagtgtggctgccggtga

SEQ ID NO: 20688 - DNA, 714 bp, Homo sapiens
  MAP TO AL034344.19; EXPRESSED IN LUNG, SIGNAL = 4.3; EXPRESSED IN FETAL LIVER, SIGNAL = 5.3; EXPRESSED IN ADULT LIVER, SIGNAL = 3.6; EXPRESSED IN HELA, SIGNAL =  10; EXPRESSED IN HEART, SIGNAL = 6.8; SWISSPROT HIT: Q12948, EVALUE 1.00e-104; NT HIT: gi11419172, EVALUE 0.00e+00; EST_HUMAN HIT: AI761460.1, EVALUE 0.00e+00
gggagtggtgccctacctcggcggcgagcagagctactaccgcgcggcggccgcggcggccgggggcggctacaccgccatgccggcccccatgagcgtgtactcgcaccctgcgcacgccgagcagtacccgggcggcatggcccgcgcctacgggccctacacgccgcagccgcagcccaaggacatggtgaagccgccctatagctacatcgcgctcatcaccatggccatccagaacgccccggacaagaagatcaccctgaacggcatctaccagttcatcatggaccgcttccccttctaccgggacaacaagcagggctggcagaacagcatccgccacaacctctcgctcaacgagtgcttcgtcaaggtgccgcgcgacgacaagaagccgggcaagggcagctactggacgctggacccggactcctacaacatgttcgagaacggcagcttcctgcggcggcggcggcgcttcaagaagaaggacgcggtgaaggacaaggaggagaaggacaggctgcacctcaaggagccgcccccgcccggccgccagcccccgcccgcgccgccggagcaggccgacggcaacgcgcccggtccgcagccgccgcccgtgcgcatccaggacatcaagaccgagaacggtacgtgcccctcgccgccccagcccctgtccccggccgccgccctgggcagcggcagcgc

SEQ ID NO: 20689 - DNA, 1201 bp, Homo sapiens
  MAP TO AP000533.1; EXPRESSED IN ADULT LIVER, SIGNAL = 1.2; EXPRESSED IN BRAIN, SIGNAL = 1.6; EXPRESSED IN HELA, SIGNAL = 0.64; EXPRESSED IN HEART, SIGNAL = 1.4; EXPRESSED IN LUNG, SIGNAL = 1.1; EXPRESSED IN FETAL LIVER, SIGNAL = 0.99; SWISSPROT HIT: Q14694, EVALUE 0.00e+00; NT HIT: gi14775394, EVALUE 0.00e+00; EST_HUMAN HIT: BG773609.1, EVALUE 0.00e+00
atggccctccacagcccgcagtatatttttggagattttagccctgatgaattcaatcagttctttgtgactcctcgatcttcagttgagcttcctccatgcagtggaacagttctgtgtggcacacaagctggggataaactacctgatggacaagaatatcggagaattgagtttggtgtcaatgaagtcattgaacccagtgacactttgctgagaacccccagctacagtatttcaagcacactgaaccctcaggcccccgaatttattctcggttgtacagcttccaaaacaacccctgatggtatcactaaagaagcaagctatggctccatcgaccagtacccaggctgtgccctcgctttggatggaagttctagtgtggaggcggaagttttggaaaatgatggtgtctcaggtggtcttggacaaagggagcgtaaaaagaagaaaaagcagccacctggatattacagctgtttgaaagatggtggcgatgatagtatttccacagaagccctggtcaatggccatgccaactcagcagtcccgaacagtgtcagtgcagaggatgcagaatttatgggtgacatgcccccgtcagttacgcccaggacttttgacagcccccagaactccacggactctgtcagtgacattgtgcctgacagtcctttccccggagcactcggcagtgacaccgggactgcagggcagcaggaggggggtcccggggttgattttggtcagtcctgcttccctgcaggggctggcagagacaccctgtcaaggacagctggggctcagccctgcgttggtaccgatactactgaaaaccttggagttgctaatggacaaatactcgaatcctcgggtgagggcacagctaccaacggggtggagttgcacaccatggaaagcatagacttggacccagccaaacccgagagtccatcacctcctgctgacggcacgggctctgcatcaggcacccttcctgtcagccagcccaggtcctggaccagtctctttcacgattctaagccctcttcctcctggccggtggcctatgtggaagctaagtattcccctcccgctatatctcccctggtttctgaaaagcaggttgaagtcaaagaagggcttgttccagtttcaggggatcctgtagccaggcattggttgctttcccgacaat

SEQ ID NO: 20690 - DNA, 1179 bp, Homo sapiens
  MAP TO AC015805.3; EXPRESSED IN ADULT LIVER, SIGNAL = 1.5; EXPRESSED IN FETAL LIVER, SIGNAL = 1.6; EXPRESSED IN HEART, SIGNAL = 1.7; EXPRESSED IN BONE MARROW, SIGNAL = 1.4; EXPRESSED IN PLACENTA, SIGNAL = 2.4; EST_HUMAN HIT: BF511334.1, EVALUE 0.00e+00; SWISSPROT HIT: P40603, EVALUE 3.00e-06
atggctgaccctccctggtcttcagtgcaggtcaacaagtatgattcaggcctcctctcttctgtctctgcagagcctttggcaagttcagcctcctcccaccccggaatgagtgacaatgcacctgcttccttggagagcggcagcagctccacccctactaattgcagtacctcctcggccatcccgcagcccggtgcagccaccaagccttggcgcagcaaatccctcagcgtgaagcacagtgccacggtatccatgctctcggtcaagcctcctgggcctgaggcccccaggcccacacctgaagccatgaagccggcccccaacaatcagaagtccatgctggaaaagctgaaacttttcaacagtaaagggggctcaaaggcaggtgaggggccggggtcccgggacacaagctgtgagcggctggagactctgcccagcttcgaagagagcgaggagctggaggccgccagtcgcatgctcaccaccgtgggccctgcttccagcagccccaagattgcactcaagggcattgcccagaggacttttagccgggcactgaccaacaagaagagttctctgaaaggcaatgagaaagagaaggagaaacaacagcgggagaaggataaggagaaaagcaaggaccttgccaagagagcctctgtgacggagaggctggacctcaaggaggagccaaaagaagaccccagtggagcagctgtgcccgagatgccaaaaaagtcctccaagattgccagcttcatccccaaaggggggaagctcaacagtgccaagaaggagcccatggccccttcccacagtggaataccaaaaccaggaatgaaaagcatgcccgggaaatccccaagtgccccagcgccttccaaggaaggggagcggagccggagtgggaagctgagctcaggactcccccagcagaagccccagctggacggcagacactccagttcctcttccagcctggcgtcctcagaaggaaaaggcccaggagggaccaccctgaaccacagcatcagcagccagactgtcagtgggtctgtcgggaccacccagaccacaggaagcaataccgtcagtgttcagctacctcagccccagcagcaatacaaccatcccaacactgccacggttgcacctttcctgtacaggtag

SEQ ID NO: 20691 - DNA, 509 bp, Homo sapiens
  MAP TO AF146191.1; EXPRESSED IN ADULT LIVER, SIGNAL = 1.5; EXPRESSED IN HELA, SIGNAL = 0.41; EST_HUMAN HIT: BF341761.1, EVALUE 2.00e-66; SWISSPROT HIT: Q99969, EVALUE 8.00e-11; NT HIT: AY028079.1, EVALUE 0.00e+00
cagcgaaccatcctgcccagaaccttatcctcacagtccattttgacgcaggtcaggcatttctgcttcctcctctcgggctgggctttgcacttgggtttcttccaggccttcctccagccgcttccctgtctgccggagcttaaattccagcctcacagatgttccagctgggaagggcgtgtccagggcgctgtccacactggtctcccggaaggcccgctgcacgggcgggtgcttgcagattcctccagggccacctgcaggccccggcgctggccccgtgagctcggcccctcccgcgtcccccgcgcccacccacggggccagcgagatccgcagccgtctcaggcttcccctgtcaccccggccctgcgaagcgggtgtgcgccccttagttctccgagcccgccgggagccacctcctcccctgcccctggagggggccacgcccgcagaacgctgggcagagacgaaggaaccgggaaacgtccctttctccacactga

SEQ ID NO: 20692 - DNA, 680 bp, Homo sapiens
  MAP TO AL158091.7; EXPRESSED IN BRAIN, SIGNAL = 1.8; EXPRESSED IN HELA, SIGNAL =   1; EXPRESSED IN ADULT LIVER, SIGNAL = 1.5; EXPRESSED IN PLACENTA, SIGNAL =   2; EXPRESSED IN LUNG, SIGNAL = 1.7; EXPRESSED IN HEART, SIGNAL = 2.3; EXPRESSED IN BONE MARROW, SIGNAL = 1.6; SWISSPROT HIT: Q60821, EVALUE 1.00e-24; EST_HUMAN HIT: AW629462.1, EVALUE 0.00e+00
tgaagaaacatcatcagggccatcggccttgggctcctgatcctctttcccgtagctgctccctccgtcgtgacagctggcgatggccgagtctccggaagaattggcaggactcgttcgccgtgccagccacggggagatgctcctcccagccatcacggccgagatgagagcttccgtgctgctgctggacgaggcgccgatctcgaactccgcaagctcatctgaggcgtccgacttgatgctgatgtccagcgccgccttgatgaagtcgtggcaggcttgcacgatgtccgtcatctgcaggaagctggcggctgacatcacctcgatgacgttcctgctggtgagcgccaggtgcgctgagtacatgaagtcgatgatggccttgaagccctgggccgtgacgatgtccaggtgcgtgaccgtggcctgctccgacgtcttctgcacctggcagtagagcgtcttgaagtagcggctgctgcccagcaggacgttcttgtgcgccttgaagaccttgccctccacgaccacgcagacgtcgcacaggacgccgtgctgcctctgctcgttgagctcccgcagcaggtgccggtagtgggacgtgatttccatatcttcctttcggttgttcatttggaagccctggtgtcgcctcttctacagactctgtggag

SEQ ID NO: 20693 - DNA, 675 bp, Homo sapiens
  MAP TO AP001712.1; EXPRESSED IN HEART, SIGNAL = 2.8; EXPRESSED IN BONE MARROW, SIGNAL = 2.8; EXPRESSED IN FETAL LIVER, SIGNAL = 2.3; EXPRESSED IN ADULT LIVER, SIGNAL = 2.5; EXPRESSED IN PLACENTA, SIGNAL = 3.1; EXPRESSED IN BRAIN, SIGNAL = 2.7; EXPRESSED IN HELA, SIGNAL = 1.8; NT HIT: gi14780177, EVALUE 0.00e+00; SWISSPROT HIT: P57058, EVALUE 1.00e-109; EST_HUMAN HIT: BF529471.1, EVALUE 0.00e+00
atgctttcttggtgtgcagattcctttggctgccgcaatattttccgcaaaacctcagattccaattgtgtggcttcttcttccatggagttcatccccgtgccaccgcccaggaccccgaggattgtgaagaaaccggagccccatcagccagggcccggaagcactggcatcccccacaaggaagaccccctgatgctggacatggtgcgctccttcgagtctgtggatcgcgacgaccacgtagaagtgctgtctccctctcatcactacaggattctgaactccccggtcagcttggctcgcagaaattccagcgagaggacgctgtccccgggtctgccatccggaagcatgtcgcctctccatactcctttgcatccaactctggtctcttttgctcacgaagataagaacagccccccaaaagaggagggcctgtgttgcccacctccggttcccagcaatggccccatgcagcctctggggagccccaattgtgtgaaaagccgaggccggttccctatgatgggcatcggacagatgttaaggaagcgccatcagagtctgcagccatctgcagataggcccctggaggccagcctgcccccactgcagcccctagcccctgtgaaccttgcctttgacatggccgatggggtcaagacccagtgc

SEQ ID NO: 20694 - DNA, 484 bp, Homo sapiens
  MAP TO AC005908.1; EXPRESSED IN ADULT LIVER, SIGNAL = 8.6; EXPRESSED IN PLACENTA, SIGNAL = 8.3; EXPRESSED IN HELA, SIGNAL = 5.7; EXPRESSED IN HEART, SIGNAL = 9.4; EXPRESSED IN BONE MARROW, SIGNAL =  11; EXPRESSED IN LUNG, SIGNAL =  10; SWISSPROT HIT: P06916, EVALUE 5.70e+00; NT HIT: AL163227.2, EVALUE 2.00e-65; EST_HUMAN HIT: BE420422.1, EVALUE 5.00e-54
aaatgctgatagtgatatagacaatgaagtccaggctgaggtggtctatgatggagatgaggaacttcttgggaactggagcaaaggtgactcttgttacattttagcaaagaggctggtggcattttgcccctgccttagagatctgtgtaactttgaacttgagagagatgatttagggtatctgacagaagaaatttctaagtggcaaagcattcaagaggaagcagagcataaaagtttggaaattttgcagcctgacaatgcaataaaaaagaaaaatcaattttctgggaaaaaattcaagtccactacagaaatctgcataagtaacgaggagccaaatgttaatcaacaagacaatgaggaaaatgtctccagggcaatgtcagagaccttcacagcagcccctcccatcacaggccaagaggccaaggagggaaaaatggttttgtgggccaagttcagggccccctgctgtgtg

SEQ ID NO: 20695 - DNA, 677 bp, Homo sapiens
  MAP TO AF196971.1; EXPRESSED IN LUNG, SIGNAL =   1; EXPRESSED IN BONE MARROW, SIGNAL = 1.2; EXPRESSED IN ADULT LIVER, SIGNAL =   3; EXPRESSED IN BRAIN, SIGNAL = 1.2; EXPRESSED IN HELA, SIGNAL = 0.55; EST_HUMAN HIT: BI918415.1, EVALUE 0.00e+00; SWISSPROT HIT: Q9UBN7, EVALUE 1.00e-121; NT HIT: gi16171680, EVALUE 0.00e+00
aggtagaagacagagaaggaccctccagttctaagttggtcaccaagaaggcaccccaaccagccaaacctaggttagctgagcggatgaccacacgagaaaagaaggttctggaagcaggcatggggaaagtcacctcggcatcatttggggaagagtccactccaggccagactaactcagagacagctgtggtggccctcactcaggaccagccctcagaggcagccacagggggagccactctggcccagaccatttctgaggcagccattgggggagccatgctgggccagaccacctcagaggaggctgtcgggggagccactccggaccagaccacctcagaggagactgtgggaggagccattctggaccagaccacctcagaggatgctgttgggggagccacgctgggccagactacctcagaggaggctgtaggaggagctacactggcccagaccacctcggaggcagccatggagggagccacactggaccagactacgtcagaggaggctccagggggcaccgagctgatccaaactcctctagcctcgagcacagaccaccagacccccccaacctcacctgtgcagggaactacaccccagatatctcccagtacactgattgggagtctcaggaccttggagctaggcagcgaatctcag

SEQ ID NO: 20696 - DNA, 1739 bp, Homo sapiens
  MAP TO AC002039.1; EXPRESSED IN BONE MARROW, SIGNAL = 1.9; EXPRESSED IN FETAL LIVER, SIGNAL = 1.9; EXPRESSED IN PLACENTA, SIGNAL =   3; EXPRESSED IN ADULT LIVER, SIGNAL = 1.9; EXPRESSED IN HELA, SIGNAL = 3.7; SWISSPROT HIT: P98161, EVALUE 0.00e+00; EST_HUMAN HIT: AW884000.1, EVALUE 0.00e+00; NT HIT: U24497.1, EVALUE 0.00e+00
gggggtcctgccatctctttacaccttccgctccgtgggcaccttcaatatcatcgtcacagctgagaacgaggtgggctccgcccaggacagcatcttcgtctatgtcctgcagctcatagaggggctgcaggtggtgggcggtggccgctacttccccaccaaccacacggtacagctgcaggccgtggtcagggatggcaccaacatctacagctggactgcctggagggacaggggcccggccctggccggcagcggcaaaggcttctcgctcactgcgctcgaggccggcacctaccatgtgcagctgcgggccaccaacatgctgggcagcgcctgggctgactgcaccgtggacttcgtggagcctgtggggtggctgatggtggccgcctccccgaacccagctgccgtcaacacaagtgtcaccctcagtgccgagctggctggtggcagtggtgtcgtatacacttggtccttggaggaggggctgagctgggagacccccgagccatttaccacccacagcttccccacacccggcctgcacttggtcaccatgacggcagggaacccgctgggctcagccaacgccaccgtggaagtggatgtgcaggtgcctgtgagtggcctcagcatcagggccagcgagccgggaggcagcttcgtggcggccgggtcctctgtgcccttttgggggcagctggccacgggcaccaatgtgagctggtgctgggctgtgcccggcggcagcagcaagcgtggccctcatgtcaccatggtcttcccggatgctggcaccttcaacatccggctcaatgcctccaacgcagtcagctgggtctcagccacgtacaacctcacggtggaggagcccatcgtgggcctggtgctgtgggccagcagcaaggtggtggcgcccgggcagcttgtccattttcagatcctgctggctgccggctcagctgtcaccttccgccggcaggtcggcggggccagccccgaagtgctccctgggccccgtttctcccacagcttcccccgcatcggagaccacgtggtgagcgtgcagagcaaaaaccacgtgagctgggcccaggcgcaggtgcgcatcgtggtgctggaggccgtgagcgggctgcaggtgcccaactgctgtgagcctggcatcgccatgggcactgagaggaacttcacagcccgcgtgcagcgcggctctcgggtcgcctacgcctggtatttctcgctgcagaaggtccggggcgactctctgttcatcctgtcgggccgcgacgtcacctacacgccgtggccgcggggctgttggagatccaggtgcgtgccttcaacgccctgggcagtgagaaccgcacgctggtgctggaggttcaggacgccgtccagtatgtggccctgcggagcggcccctgcttcaccaaccgcttggcgcagtttgaggccgccaccagccccagcccccggcgcgtggcctaccactgggactttggggatgggtccccagggcaggacacagataagcccagggccgagcactcctacctgaggcctggggactaccgcgtgcaggtgaacgcctccaacctggtgagctttttcgtggcgcaggccacggtgaccgtccaggtgctggcctgccgggagccggaggtggacgtggtcctgcccctgcaggtgctgatgcgacgatcacagcgcaactgcctggatgcctacgt

SEQ ID NO: 20697 - DNA, 864 bp, Homo sapiens
  MAP TO AC009487.3; EXPRESSED IN HELA, SIGNAL = 3.5; EXPRESSED IN ADULT LIVER, SIGNAL =   2; EXPRESSED IN PLACENTA, SIGNAL = 2.1; EXPRESSED IN BRAIN, SIGNAL = 3.8; EXPRESSED IN LUNG, SIGNAL = 2.1; EXPRESSED IN FETAL LIVER, SIGNAL = 2.6; NT HIT: gi11429971, EVALUE 0.00e+00; SWISSPROT HIT: Q16650, EVALUE 0.00e+00; EST_HUMAN HIT: AI201654.1, EVALUE 0.00e+00
gatctacaccggctgtgacatggaccgcctgaccccctcgcccaacgactcgccgcgctcgcagatcgtgcccggggcccgctacgccatggccggctctttcctgcaggaccagttcgtgagcaactacgccaaggcccgcttccacccgggcgcgggcgcgggccccgggccgggtacggaccgcagcgtgccgcacaccaacgggctgctgtcgccgcagcaggccgaggacccgggcgcgccctcgccgcaacgctggtttgtgacgccggccaacaaccggctggacttcgcggcctcggcctatgacacggccacggacttcgcgggcaacgcggccacgctgctctcttacgcggcggcgggcgtgaaggcgctgccgctgcaggctgcaggctgcactggccgcccgctcggctactacgccgacccgtcgggctggggcgcccgcagtcccccgcagtactgcggcaccaagtcgggctcggtgctgccctgctggcccaacagcgccgcggccgccgcgcgcatggccggcgccaatccctacctgggcgaggaggccgagggcctggccgccgagcgctcgccgctgccgcccggcgccgccgaggacgccaagcccaaggacctgtccgattccagctggatcgagacgccctcctcgatcaagtccatcgactccagcgactcggggatttacgagcaggccaagcggaggcggatctcgccggccgacacgcccgtgtccgagagttcgtccccgctcaagagcgaggtgctggcccagcgggactgcgagaagaactgcgccaaggacattagcggctactatggcttctactcgcacagctaggccgc

SEQ ID NO: 20698 - DNA, 998 bp, Homo sapiens
  MAP TO AF024533.1; EXPRESSED IN LUNG, SIGNAL = 1.7; EXPRESSED IN BONE MARROW, SIGNAL = 2.4; EXPRESSED IN ADULT LIVER, SIGNAL = 1.6; EXPRESSED IN BRAIN, SIGNAL = 1.7; EXPRESSED IN HELA, SIGNAL =   2; EST_HUMAN HIT: BG827156.1, EVALUE 0.00e+00; SWISSPROT HIT: P39880, EVALUE 1.00e-126; NT HIT: gi15299631, EVALUE 0.00e+00
cacaggctgcgggatagatacttggtcctcagcaaggagaagagatgggagaaccaaagcccccagagcagatcccttaccttctccccgaagattctctggcagatgccgttcttggccagcttttccttaacctgccgggtgagctcgatggtgtccacctcctggtacatgtagacctcgtactgctcgggggtcagcggggggaccgagggcttggtgggcttggacatgggcacgatcggggaggatggcagggggctgttctgtggtgtctcgctgcggctggccccggtcagactcagctctgagctctgggagtatggggactcagcgctgggccactccttccagtactctgacgacgagggtccctggagctgactgcgctcggcccgaggctggctgccacctccgctgccaccgctgcccttctctttcccgccgcccgtttcttcggccttggcctcctcggaggaggcggcatttcttctctccggctgcaccgcgctccaccagtggtccttccaggcaccgctgcggcccacctcatttttcacctgtctcaggaccccttgtgcacaatcggctgctccctgggggtccagcccgggggcgtcctgggcctcctttttgagggccggggggttcggcagagcagaggcaccggcctcaggagctgcggagggcttcttcagggagatggcgagaggtgggtagctggacacggtgggcatgggcgaggtggacagaagcttgggggtgaggatggtgatgtcactctgggacagtggtgcctgctttaaggcagggtcgagggcagcctgctgggcctccatctcccggcgggcttgctgcaggatggagcggatggcgtcatcagagttcccgctgccggatgcggaggaaggctgggccggctctgctgcatggagaaacaggggtgagagtgtggcagggcggcccccttcagctggggacatgcttctcatcctaac

SEQ ID NO: 20699 - DNA, 708 bp, Homo sapiens
  MAP TO AC010615.5; EXPRESSED IN HELA, SIGNAL = 0.56; EXPRESSED IN ADULT LIVER, SIGNAL = 1.2; EXPRESSED IN HEART, SIGNAL = 1.3; EXPRESSED IN BRAIN, SIGNAL = 1.1; EXPRESSED IN FETAL LIVER, SIGNAL = 1.5; EXPRESSED IN LUNG, SIGNAL = 1.3; EST_HUMAN HIT: AW302149.1, EVALUE 0.00e+00; SWISSPROT HIT: P31735, EVALUE 5.50e+00
tcagctcagcttcgccacgcacacggctagggccacagccgccagcagcacggcgccgaaaaggatggcggccagggccttcctggggtcgcaaccccccccgcgctcctgcaaggacacgaccgaggaggggccggcgctgaccgtggacaggagctcggcgcccgccgcctgccgggcttgcacggtccagcggggcacgttgaccttcatctccatgttgtcgatcatctcgcccacctgaaggacctcgcgctccagctcccgcaggtccgcgacgtcgaagtcgccctccgcctcgagccgcaggctgcgggtgctcagcgcgcgcgccgccacgccggaggaggcgccagccacacctgtgcgcaccagcggccgccgcggcgcgtgcagcgggaacgcggcgcccagctccagcgagcgtcgcatgtccgcttccagcaggtccaggcagcccgagaaggccacccagagccgctcgaactcggcgcgctcgtcggcggccaggccccggtcgcgcagcacagcagtcagccgggcgcaggtggacaccgccagctcctgcgccttctggcgcgtcttttgcagctcctgccgcaggttctgcgagtccgccgagccaccgacggtcagcaccaggtggtggtagcacgcagtcgtcttgttgagcccgtccagcagcgccttgcactcctccctcgccat

SEQ ID NO: 20700 - DNA, 651 bp, Homo sapiens
  MAP TO AC021260.4; EXPRESSED IN ADULT LIVER, SIGNAL = 1.3; EXPRESSED IN BONE MARROW, SIGNAL = 1.3; EXPRESSED IN FETAL LIVER, SIGNAL = 1.4; EXPRESSED IN HELA, SIGNAL =   2; SWISSPROT HIT: P39922, EVALUE 3.00e-14; EST_HUMAN HIT: BF795066.1, EVALUE 1.00e-118
cttcagagtcctgatatgattctcagcctcactcttttctttcttaaagtgcttcataagctcctggatattctgttcgtgttttgttttcacactctgcaatgatgatgtgagatctttcagctccctctggtgcacatctcgttccagctttaactgtgtgatgattgtagctgtttcttcatccctggattttgcctgtgcagtgaggtcagaaaggtccttaagcactgctttcttggctctctcttcctcagccaatttattagcaagatctgctcggatggcactcaggtccttgatggactcttgcatctcaagaagtttagctttgtcctgggcctggctcttcttgagctctgcaatttcttcctccaagtgagctttctcaactttcatctggctttggatcttactctgctttttcaattcgctctccagtctatggatggtatccagggaattcttaacttccaattcaaggtcagcttgatgagacttaatatcacgtaatttctcctccttggagtgaagctcctcctcctgaagggcacgctttgttaggacatcattcaattcctttcgaagattctctatttgttgtaatgctgcatacagctgggttttcaattcatccttttcttttaaaat

SEQ ID NO: 20701 - DNA, 534 bp, Homo sapiens
  MAP TO AP001717.1; EXPRESSED IN ADULT LIVER, SIGNAL = 4.5; EXPRESSED IN PLACENTA, SIGNAL = 5.2; EXPRESSED IN BRAIN, SIGNAL = 2.1; EXPRESSED IN HELA, SIGNAL = 6.5; EXPRESSED IN HEART, SIGNAL =   3; EXPRESSED IN LUNG, SIGNAL = 3.8; EXPRESSED IN BONE MARROW, SIGNAL = 7.6; SWISSPROT HIT: P46782, EVALUE 2.00e-76; EST_HUMAN HIT: BG749501.1, EVALUE 0.00e+00; NT HIT: gi14755544, EVALUE 0.00e+00
tcagcggttggacttgtccccacactccagctcatccttcttgttgatggcataggagctggaggaggccttggtggcattgatgagctcatccgccaggcactcagcaatggtcttgatgttccagaaggcagcctcacgagtgcctgtgcacagcagccagacgacctgattcacacagtgcagtggggacatgtccacagcctgttgtctcacagtccctgctcgcccaatgcatgtggagtcctcccagggaccactgttgatgatggcgttcaccaggacctggagagggttctcgcctgtgagcaggtggatgaaatcgaaggcatgcttgatgatgcacatgatcatgagcttgttgctgttgttgcagccgtgcatcatcatggagttagtgaggggctccacaatggggcactgagctttgcggaagcatttggctgcataccacccagcactgtgaggcaggtacttggcatacttctccttcactgcagtgtaatcctgcagggaaatgccattgatctgcat

SEQ ID NO: 20702 - DNA, 674 bp, Homo sapiens
  MAP TO AL031387.4; EXPRESSED IN PLACENTA, SIGNAL = 1.4; EXPRESSED IN BRAIN, SIGNAL = 1.3; EXPRESSED IN ADULT LIVER, SIGNAL = 1.6; EXPRESSED IN HEART, SIGNAL = 1.7; EXPRESSED IN BONE MARROW, SIGNAL = 1.4; EXPRESSED IN LUNG, SIGNAL = 1.3; EXPRESSED IN FETAL LIVER, SIGNAL = 1.7; SWISSPROT HIT: P51841, EVALUE 0.00e+00; EST_HUMAN HIT: W78949.1, EVALUE 9.50e-01; NT HIT: gi13648689, EVALUE 0.00e+00
gaaactgctgggacaccatggccttgcatctgccaagttcctgtggtgcttgtgccttctgtctgtcatgtcccttccgcagcaggtgtggacactcccctacaagataggggtggtgggcccttgggcttgtgattcgctgttttcaaaggccctgcctgaggttgctgcgcgattagccattgagcgaatcaaccgggacccatcttttgacctgagttattcttttgaatacgtgattctcaatgaagactgccagacttcgagggctctctccagtttcatttcccaccaccagatggcctcaggatttattggacctaccaaccctggctactgcgaggcagcctcgctcctgggaaacagctgggacaaaggaattttctcttgggcttgtgtgaattatgaattagacaataaaattagctacccgaccttttctcggacactcccttctcccatccgggtgcttgtaactgtcatgaaatatttccagtgggctcatgctggagtcatttcctcagatgaagacatttgggtgcatacagccaatcgagtcgcaagtgctcttcggagccacggcttacctgtaggggtcgtcctgaccacaggacaagacagccaaagcatgcggaaagccctccagaggattcaccaggcagacagaattcgca

SEQ ID NO: 20703 - DNA, 801 bp, Homo sapiens
  MAP TO AC010525.4; EXPRESSED IN ADULT LIVER, SIGNAL = 1.7; EXPRESSED IN HELA, SIGNAL = 1.2; EXPRESSED IN PLACENTA, SIGNAL = 2.5; EXPRESSED IN LUNG, SIGNAL = 1.4; EXPRESSED IN HEART, SIGNAL = 1.8; EXPRESSED IN BONE MARROW, SIGNAL = 2.1; NT HIT: M38314.1, EVALUE 3.00e+00; SWISSPROT HIT: P46526, EVALUE 8.00e-11
aggtccctgctgtccgtgcaccctgctgtcccgtgcaccctgctgtccgtgcaccctgctgtccgtgcaccctgctgtccgtgcaccctgctgtcccgtgcaccctgctgtcccgtgcaccctgctgtcccgtgcaccctgctgtccgtgcaccctgctgtccctgcaccctgctgtcccgtgcaccctgctgtcccgtgcaccctgctgtccgtgcaccctgctgtcccgtgcaccctgctgtcccgtgcaccctgctgtcccgtgcaccctgctgtccgtgcaccctgctgtcccgtgcaccctgctgtcccgtgcaccctgctgtcccgtgcaccctgctgtcccatgcaccctgctgtccgtgcaccctgctgtccgtgcaccctgctgtcccgtgcaccctgctgtcccgtgcaccctgctgtcccgtgcaccctgctgtcccgtgcaccctgctgtcccgtgcaccctgctgtccgtgcaccctgctgtcccgtgcaccctgctgtccgtgcaccctgctgtccgtgcaccctgctgtccgtgcaccctgctgtccgtgcaccctgctgtccgtgcaccctgctgtcccgtgcaccctgctgtccgtgcaccctgctgtccgtgcaccctgctgtcccgtgcaccctgctgtcccgtgcaccctgctgtccgtgcaccctgctgtccgtgcagctgttagaggacctgcatgccgtattgagtcggggcaggggccgcattcctgggtgtactgttcgttcagggtggtcaaggtcaagaggtggcagtgagcag

SEQ ID NO: 20704 - DNA, 464 bp, Homo sapiens
  MAP TO AC004821.2; EXPRESSED IN ADULT LIVER, SIGNAL = 1.2; EXPRESSED IN BRAIN, SIGNAL = 1.4; EXPRESSED IN BONE MARROW, SIGNAL = 0.9; EXPRESSED IN HEART, SIGNAL = 1.2; EST_HUMAN HIT: BG703535.1, EVALUE 1.00e-79; NT HIT: gi7706140, EVALUE 4.00e-35; SWISSPROT HIT: Q10010, EVALUE 2.00e-03
tttcacctgagggacagagggaagcgctggctggggcacggggctgaggggccagggacacccaggaccccagctctgcctgttgaacatgcctgggctggggagaacaccaaggaccccacttctgcctgccagccatgttggaggcactgtgtgggacacccagggccctcctttgctggtgggtcttgttagtggctgacagtgttggtgcaaagtcacccccatctgtaataggacccagtgccctcccctctctgtgccatgtgggttgggtagggggtgaagggtcatccactcacatattccttcacgttttttgtcttcacggccttgtaggaagaataggctgggtacagggtgccaaagatgagcctagggaggcaggcatggttactgggcctctcagccaagggcagtggcctctccctcccagctccgcatcagcccctgggtaagtaatg

SEQ ID NO: 20705 - DNA, 596 bp, Homo sapiens
  MAP TO AL031186.8; EXPRESSED IN LUNG, SIGNAL = 1.4; EXPRESSED IN HEART, SIGNAL = 1.6; EXPRESSED IN BONE MARROW, SIGNAL = 1.7; EXPRESSED IN FETAL LIVER, SIGNAL =   1; EXPRESSED IN HELA, SIGNAL = 0.97; EXPRESSED IN ADULT LIVER, SIGNAL = 1.3; EST_HUMAN HIT: BF345502.1, EVALUE 0.00e+00; NT HIT: Y07848.1, EVALUE 0.00e+00; SWISSPROT HIT: Q62227, EVALUE 3.40e+00
ttacattgtaattggcacctccaccaggccataagaccccaggtcccagcccagagcatgtcccagaggaagactcagagaagctcctggaatgtgtgtgcacggctccttggtattgcttgggccttcacccctttgtgccacttccttcccaggcacccacccacagaacccacacatccccacgggccctgggctcaggcaaaggatacaggccaggccggcaaggaggccgcaaaggagctgcaggaagggtggctcagagctgagcagtggggtcagggcaagcagcagccacggcgacagccacggtggcagtgccccacggggccgtctagggcggtgtccctccccagccagcatggccaggtggacaggcatgtatccacagctgccggctgcactggacagcccaaggcctgccagcagcactgccagcagcccagaagccagggcgagcagggctgaggcatgcaggaatctcagcgtgcccaggtggcactcctgctgccagcccacagtgggcaggagcagcaggctcaggagcaggcctggcagggccgtgtggcccagggcatgggtcagcagccggtgca

SEQ ID NO: 20706 - DNA, 858 bp, Homo sapiens
  MAP TO AL161722.2; EXPRESSED IN ADULT LIVER, SIGNAL = 1.3; EXPRESSED IN BRAIN, SIGNAL = 1.3; EXPRESSED IN HELA, SIGNAL = 2.3; EXPRESSED IN BONE MARROW, SIGNAL = 1.8; EXPRESSED IN LUNG, SIGNAL = 1.2; EXPRESSED IN HEART, SIGNAL = 1.4; EXPRESSED IN FETAL LIVER, SIGNAL = 1.2; NT HIT: AF163865.1, EVALUE 6.00e-11; SWISSPROT HIT: P43363, EVALUE 4.00e-48; EST_HUMAN HIT: AI954607.1, EVALUE 1.00e-03
gcagtgattcttcattgcctgccctcctgtccacactcctgcctactgccacccacaagggtcatcatgtctcaggatcaggagagtccacgatgcacacatgatcagcaccttcagaccttcagtgagacccagagcctggaggttgcacaggtctccaaggctctggagaagaccctcctctcctcctcccatcctctagtgcctggcaaactgaaggaagctcctgctgctaaggcagagagtcctcttgaggttcctcagagtttctgctcctcttccattgccgtcacaaccacctcatcaagtgaatctgatgaggcttccagcaatcaagaagaggaagatagtccaagctcctcagaggatacatcagaccccaggaatgtgcccgcagatgctctcgaccagaaagtggcttttttggtgaatttcatgctgcacaagtgtcagatgaaaaagccaataacaaaggcagatatgttgaagattatcatcaaagatgatgagagccacttctctgagatcctcctgagagcttctgagcacctagagatgatatttggccttgatgtggtggaggtggaccccaccacccattgctatggcctcttcatcaaactgggcctcacctatgatgggatgctgagtggtgaaaagggtgtgcccaagactggcctcctgataattgtcctgggtgtgatcttcatgaagggcaaccgtgccactgaagaggaagtctgggaagtgctgaatttgacgggagtatattctgggaagaagcacttcatctttggagagcccagaatgctcatcaccaaagattttgtgaaggagaagtacctggagtaccagcag

SEQ ID NO: 20707 - DNA, 628 bp, Homo sapiens
  MAP TO AL121997.7; EXPRESSED IN LUNG, SIGNAL =   1; EXPRESSED IN HEART, SIGNAL = 1.3; EXPRESSED IN BONE MARROW, SIGNAL = 1.5; EXPRESSED IN FETAL LIVER, SIGNAL = 1.2; EXPRESSED IN HELA, SIGNAL = 1.1; EXPRESSED IN ADULT LIVER, SIGNAL = 1.2; EXPRESSED IN BRAIN, SIGNAL = 1.1; NT HIT: gi15298936, EVALUE 0.00e+00; SWISSPROT HIT: Q99698, EVALUE 1.00e-118; EST_HUMAN HIT: AV682260.1, EVALUE 0.00e+00
gagagaattcctctaatattattccacaacagatggccgcccatatgctgcgttctagaagcctaccagcattccctacttcttcactactaacgcaatcacaaaaactgactggaagtttgggttgtagtatcgacaggttacaaaatattgcagatacttatgttgccacccaatcaaagaaacaaaattctttggggagttccgacacactgaaaaaaggcaaagaggacgcattcatcagtagctgtgagtctgcaaaaactgtttgtgaaatggaagctgtcctctcagcccaggtctctgtcagtgatgtcccaaagggagtgctgggatttccagtggtcaaagcagatcataaacagttgggagcagaacccaggtcagaagatgacagtcctggggatgagtcctgcccacgccgacctgattacctaaagggattggcctccttccagcgaagccacagcactattgcaagccttgggctagcttttccttcacagaacggatctgcagctgttggccgttggccaagtcttgttgatagaaacactgatgattgggaaaactttgcctattctcttggttatgagccaaattacaaccgaactgcaagtgctcacag

SEQ ID NO: 20708 - DNA, 1039 bp, Homo sapiens
  MAP TO AC005630.1; EXPRESSED IN HEART, SIGNAL = 3.1; EXPRESSED IN BONE MARROW, SIGNAL = 2.7; EXPRESSED IN LUNG, SIGNAL = 2.8; EXPRESSED IN FETAL LIVER, SIGNAL = 2.6; EXPRESSED IN ADULT LIVER, SIGNAL = 2.4; EXPRESSED IN BRAIN, SIGNAL = 2.6; EXPRESSED IN HELA, SIGNAL = 1.6; EST_HUMAN HIT: BF530254.1, EVALUE 0.00e+00; SWISSPROT HIT: Q00657, EVALUE 0.00e+00; NT HIT: gi16161051, EVALUE 0.00e+00
ttcacccttctggacgtggtgaactgcaaggcccgcttcattcacgatggccctgaggacacctctgaccagctggtgctggaggtgtcagtgatggcttgggtgcctatgccctcatgcctgcggaggggccaaacagacctcctgcccatccaggtcaaccctgtcaatgacccaccccacatcatcttcccacatggcagccttatggtgatcctggaacacacacacaagcctctggggcctgaggttctccaggcctatgacctggactctacctgtgagggcctcaccttccagctccttggcaccccctctggcctccccgtggagcaccgagaccagcctggggagccggtgactgagttctcctgctgggagttggaggccggcagcctagtctatgtccactgcggtggccctacacaggacttgacattccgggtcagcaatggactgcaggccagccccccggccatgctgaaggtggtggctgtccagctggccatacaaatccaccgcagcacagggctgcatctggcccagggctctgccatgcccatcttgcctaccaacctgttggtggagaccagcgccgtggggcaggatgtgaccgtgctgttccatgtcactggaggcctgccgttcagggagctgcagaagcagggggctggtggggtggaggatgctgagtggtgggtcacacaggcgttccaccagcaggatgtggagcagggccacgtgagatacctgagcactgacccacagcactacaccgaggacaccgtggagaacctggatctgcaggtgcaggtgagctgggaaatcctgagcaatctgtccttcctagtgaccatccagagagccactgtgtggatgctgcagctggagccactgcacactcagaacacccagcaggaggccctcaccacagcccacctggaggccaccctggaggaggcaggcccaagccccccaaccttccactgtgaggtggttcaggctcccaggaaaggcaaccttcaactacagggcacga

SEQ ID NO: 20709 - DNA, 706 bp, Homo sapiens
  MAP TO L39891.1; EXPRESSED IN HELA, SIGNAL =   3; EXPRESSED IN ADULT LIVER, SIGNAL = 1.7; EXPRESSED IN BRAIN, SIGNAL =  12; EXPRESSED IN BONE MARROW, SIGNAL = 3.9; EXPRESSED IN LUNG, SIGNAL = 4.4; EST_HUMAN HIT: BG675854.1, EVALUE 1.00e-110; SWISSPROT HIT: P98161, EVALUE 7.00e-54; NT HIT: L39891.1, EVALUE 0.00e+00
gtaccacggcccacgtgggcatcatgctgtatggggtggacagccggagcggccaccggcacctggacggcgacagagccttccaccgcaacagcctggacatcttccggatcgccaccccgcacagcctgggtagcgtgtggaagatccgagtgtggcacgacaacaaaggtttgtgcggaccctgccaagctctgcccctctgcccccgcattggggcgccctgcgagcctgacctccctcctgcgcctctgcagggctcagccctgcctggttcctgcagcacgtcatcgtcagggacctgcagacggcacgcagcgccttcttcctggtcaatgactggctttcggtggagacggaggccaacgggggcctggtggagaaggaggtgctggccgcgagtaaggcctcgttccatggtcccactccgtgggaggttgggcagggtggtcctgccccgtggcctcctgcagtgcggccctccctgccttctaggcgacgcagcccttttgcgcttccggcgcctgctggtggctgagctgcagcgtggcttctttgacaagcacatctggctctccatatgggaccggccgcctcgtagccgtttcactcgcatccagagggccacctgctgcgttctcctcatctgcctcttcctgggcgccaacgccgtgtggtacggggctgttggcgactctgcctacag

SEQ ID NO: 20710 - DNA, 749 bp, Homo sapiens
  MAP TO AL359400.1; EXPRESSED IN ADULT LIVER, SIGNAL =   2; EXPRESSED IN HELA, SIGNAL = 3.8; EXPRESSED IN PLACENTA, SIGNAL = 2.2; EXPRESSED IN BRAIN, SIGNAL = 2.2; EXPRESSED IN HEART, SIGNAL = 2.2; EXPRESSED IN BONE MARROW, SIGNAL = 2.1; EXPRESSED IN LUNG, SIGNAL =   2; EXPRESSED IN FETAL LIVER, SIGNAL = 1.5; EST_HUMAN HIT: AV731083.1, EVALUE 0.00e+00; SWISSPROT HIT: P03355, EVALUE 8.00e-51; NT HIT: AJ278581.1, EVALUE 0.00e+00
cttgtacccttgattagctagaaagttcaagagatctagagtagcttgctggcacgaggcttctgaactggtagccaaaagtaaatcatccacgtactgaaggaccagagtgcctggacttgagaagtaacctagatcttgggccagtgcctgaccaaacagatgagggctatccttaaacccttggggcaagactgtccacataagttgggacatgtggtctgtgggatcctcaaaggcaaaaagaaactgggagtcagagtgcgggggaatacagaagaaggcatccttgaggtccagaacagtgaaccattctgcttcctctggtatttgagagagcaggatataggggttgggtacaactggatatagaggaattactgcctcattgatgagtctaagatcttggactagtctccactgactgtttggtttttgtactcctagaattgggctgttgcagggactgctgcatttctttactaaggcttgagcttttaaatatttaacaatatcctttaatcctttatgagcttcaggccttaagggatattgcctttgataaggaaaagtggtggggtcttttagcctgatttggactgggtgggcattttttgcttttccaaattgtccttccaatgcccagacttcagggtttattccctcttcaggtaggggacaacaaatgggtaacttgttccccatattcatgtagataatagctccagctttggctaatgtatccctct

SEQ ID NO: 20711 - DNA, 588 bp, Homo sapiens
  MAP TO AC008272.1; EXPRESSED IN HELA, SIGNAL = 1.2; EXPRESSED IN ADULT LIVER, SIGNAL = 1.4; EXPRESSED IN BRAIN, SIGNAL = 1.3; EXPRESSED IN HEART, SIGNAL = 1.6; EXPRESSED IN LUNG, SIGNAL = 1.4; EXPRESSED IN BONE MARROW, SIGNAL = 1.3; EXPRESSED IN FETAL LIVER, SIGNAL = 1.4; EST_HUMAN HIT: BF369415.1, EVALUE 0.00e+00; SWISSPROT HIT: Q86917, EVALUE 3.30e+00; NT HIT: gi15296247, EVALUE 5.00e-32
gggactatctgaaattgtcaaaacagttactaaagggataaaaacttcagaaatattgtttacaatataagcattatgagagtaagtgttacaaagctgaaaagatggaactagtaaccctcgtttcagtgctactgccacgagacagttagcactcaaaaggtgaactggtaaccacgtcaacagcaatggagtaacaataagagatagccaatggaactggaaaaagagagaatacagagcagagcgaacagcacgttaaaaatgcttaccagtttgaagtcttgaatgctacagatgaaatacggtgtgtttggcctccgactcgcgatatacacacagtctctaaaagaaaaagaaattttaaaacaatggcatttacctttaaggaacaaagacaaggcccataaagccactgcataaataagtgacaaaacatatatcttttatcgtaaatttttttccaaaagatgatattaaattgcaaatatctttaggctaaaggaaaacagccctttggttctttctgattatttttctaataatttaaagaatctgatgaagcctaaattattttcttcagagtcc

SEQ ID NO: 20712 - DNA, 599 bp, Homo sapiens
  MAP TO AC004080.1; EXPRESSED IN HELA, SIGNAL = 3.4; EXPRESSED IN ADULT LIVER, SIGNAL = 1.9; EXPRESSED IN BRAIN, SIGNAL = 1.5; EXPRESSED IN BONE MARROW, SIGNAL = 1.4; EXPRESSED IN FETAL LIVER, SIGNAL = 1.8; EXPRESSED IN LUNG, SIGNAL = 1.8; NT HIT: gi11421578, EVALUE 0.00e+00; SWISSPROT HIT: P31271, EVALUE 9.00e-75; EST_HUMAN HIT: AA160421.1, EVALUE 1.00e-92
tggacttccagaggtggggaggctgcgcctgctctttggggcagtacatttggccgttccagccgttgggcagcgcccagggctggtagctttccatgggaagacccaagggttcgtggcgcgactcgccggggcccccgaggcccggcaccactggcatatccaggtagccaggcatgggctgatggtggtggtaaggcccggctgcgtagccctggtggtagaaggcgaactccttagcgcgggagctgaactcctcggcagctgggccggcggtatccatgtacttgtccgcgaaggcggcggcggcggcggccgaggcgggctgcgcgcacgacttgatggcgttggggtgcgggcccatgcgggcgcacgggtagtagccgctgccgaagtagccatagggcagcgccgcgggccccgacgagctctgcgccgctgccgagcaggggctgcattgcttggcggcctctgcgcccgccgggcccgccgggccgggacctcccgaggacgacgcggcggcggcggcggcggctgcagcggcagccgcggcagcagcggcggcagccgacgggggcgcctccccgggggcgctgctg

SEQ ID NO: 20713 - DNA, 597 bp, Homo sapiens
  MAP TO AL157393.1; EXPRESSED IN PLACENTA, SIGNAL = 1.6; EXPRESSED IN BRAIN, SIGNAL = 1.2; EXPRESSED IN HELA, SIGNAL = 0.93; EXPRESSED IN ADULT LIVER, SIGNAL = 1.3; EXPRESSED IN BONE MARROW, SIGNAL = 1.3; EXPRESSED IN LUNG, SIGNAL = 1.3; EXPRESSED IN FETAL LIVER, SIGNAL = 1.3; NT HIT: L13203.1, EVALUE 3.00e-49; SWISSPROT HIT: Q63248, EVALUE 4.00e-35; EST_HUMAN HIT: AW271332.1, EVALUE 0.00e+00
ctaaggtgctcccacccccggagtgcccgcggcccggcgggaagatggggagtcctggacggagcgagccggcgcgccgctgttacctgggtcgtcctcgtcgcggggcaccttcttgaagcagtcgttgagcgacaggttgtggcggatggagttctgccagcccgccttgctgcgcttgtagaaagggaagttaccagccacgtactggtagatctggctgagcgtcagcttccgcagcggcgcgctctggatggccatggcgatgagcgccgagtaggagtagggcggccgcaccagcctcagcagctcctgctggccggagaggctcagccaggcgaggtcggcgcccgccaggccgcccggggcgccgaggagcgggccgggagccccgtagctcggggccgcgtagggcggcgcaggcccgggacccgaagcgtaggacttggggctgagcgctggcgcgttcacccacaggagggggcccccgcccaccgcgcccagatcccctggctcatagcccggggggtgcgcggtggcctgggcctggccgggcggggccgaggaggggcccaggtcgtcgcagtaggtggccat

SEQ ID NO: 20714 - DNA, 688 bp, Homo sapiens
  MAP TO AC008567.3; EXPRESSED IN ADULT LIVER, SIGNAL = 2.8; EXPRESSED IN BRAIN, SIGNAL = 2.3; EXPRESSED IN HELA, SIGNAL = 5.3; EXPRESSED IN HEART, SIGNAL = 1.5; EXPRESSED IN BONE MARROW, SIGNAL = 2.5; EXPRESSED IN LUNG, SIGNAL = 2.8; NT HIT: gi14756474, EVALUE 0.00e+00; SWISSPROT HIT: P17024, EVALUE 2.00e-58; EST_HUMAN HIT: BG289117.1, EVALUE 0.00e+00
gaaggaaaacacaatggaagggaactctgtgactgtgagcaatgtggagaagtcttcagtgaacactcatgccttaagacgcacgtgagaactcaaagtacagggaacactcatgactgtaatcagtatggaaaagatttccttaccctgtgtgagaaaacctctactggtgagaaactttctgagtttaatcagagtgaaaaaatcttcagcctgacaccaaatattgtataccagagaactagcacacaagaaaagtcatttgaatgtagtcactgtggaaaatccttcattaatgagtcataccttcaggcacatatgagaactcacaatggagaaaaactctacgaatggaggaattatgggccaggttttattgactctacaagcctttctgtgcttatagaaaccctcaatgcaaaaaagccctacaaatgtaaggaatgtggaaaaggctatagatacccagcctacctcagtattcacatgcgaacccacactggggagaaaccatatgaatgtaaggaatgtgggaaagccttcaattattccaactcatttcagatacatggaagaactcacactggagagaaaccctatgtatgtaaggaatgtgggaaagccttcactcagtactcgggccttagtatgcatgtacgatctcacagtggagacaagccctatgaat

SEQ ID NO: 20715 - DNA, 2301 bp, Homo sapiens
  MAP TO AL078591.18; EXPRESSED IN ADULT LIVER, SIGNAL = 1.4; EXPRESSED IN BRAIN, SIGNAL = 1.3; EXPRESSED IN HELA, SIGNAL = 1.5; EXPRESSED IN BONE MARROW, SIGNAL = 1.3; EXPRESSED IN LUNG, SIGNAL = 1.6; NT HIT: gi14755993, EVALUE 0.00e+00; SWISSPROT HIT: P19541, EVALUE 8.00e-03; EST_HUMAN HIT: AU138527.1, EVALUE 0.00e+00
ataaatatgagactgaagaaagctctgtagcaggactttctagcccagagttgaaagtcagacctgctggtgcctccagtatttggtatacagaaggtgaaaagcagctaacaaaatctctaaaaggaaagaatgaagaatcaaataaatccaaagttaaggttactaagcttatgaaaacaatgaaatctgaaaacacaaaaaaattaataaaacagaactctaaggattctgtggttttggtaggctacaaatgtttgaaaagtacagcatcaaatgatctcattaaatgctttgaaggcaatccttcacatagtcagaaggaaggtctggatcccacaatatgtggatataattttgacccaaagacctacatgagacagacaagtcaaaaggaagctagctgtttgccaactaatacagagagaactgaacaaaagtctccagatattgaaaatgttcaaccagaccagtttgatcctttgaactctggcaacctaaatctttgtgcaaatttgtccatttcaggtaaacttgatatctcccaggacgatagtgaaattacacaaatggaacacaatctggcatccagaaggtcatcagacgattgccatgatcatcaaacaaccccatctttgggagttagaacaattgaaataaagcccagtaataaagatcctttcagtggagagaatataactgtcaaactaggaccttggacagagcttcgacaagaggaaatacttgtggataatttactacccaactttgagtccttagaatctaatggtaaatctaaatctatagaaataacatttgaaaaggaagctttgcaagaagcaaagtgtctttctattggagaatcattaactaaattacgaagtaatctacctgccccttctacaaaagaatatcatgttgtagtaagtggagatacaattaagttaccagatattagtgccacatatgcctcatctagattttcagattcaggtgttgaaagtgaaccgagttcttttgcgacacatccaaacactgatttagtctttgaaactgtgcaagggcaaggtccttgcaatagtgaaagattatttcctcagcttttgatgaaacctgattataatgtaaaattttcattaggaaatcattgtactgagagtacaagtgctataagtgaaatacagtcatctttgacatccataaactctctaccctccgatgatgaactgtcacctgatgaaaattctaagaaatctgttgtacctgaatgccatctaaatgatagcaaaactgtattaaatctaggaacgactgatttgccaaaatgtgatgatactaaaaagtcaagtatcactttgcaacagcagagtgttgtattttcagggaacttggacaatgaaactgtagcaatacattccttaaattcaagcattaaagaccctttacaatttgttttttcagatgaagagacttccagtgatgtgaaaagtagttgcagctccaaacctaacttggatactatgtgtaaaggcttccagagtcctgataaatctaataactctacagggacagcaattacattaaattcaaaactgatttgtttaggcactccttgtgtcatttcaggttccatttctagtaatacagatgttagtgaagatagaactatgaaaaaaaatagtgatgtattaaatctcacacagatgtattcagaaatccctacagttgaaagtgaaactcatctgggtacaagtgatcctttttcagccagtactgatatagtaaagcaagggcttgtggaaaattattttggttctcaaagcagtacggatatttctgacacatgtgctgttagctacagcaatgcacttagccctcagaaggaaacttctgaaaaagaaattagtaatcttcagcaggaacaggataaagaggatgaggaggaagagcaggatcaacaaatggttcaaaatgggtactatgaagaaacagattattcagctttggatggaacaataaatgctcactatacaagcagagatgaactaatggaagaaagacttacaaaatctgaaaaaataaacagtgactatctgagagatggtataaacatgcctactgtctgtacttctggttgtttgtccttcccgtctgcaccacgagagtctccttgtaatgttaaatattcttccaaaagtaaatttgatgccattacaaagcagccaagcagtacttcttacaacttcacttcttcgatttcctggtatgaaagttcaccaaaacctcaaatacaagcgtaag

SEQ ID NO: 20716 - DNA, 714 bp, Homo sapiens
  MAP TO AJ003147.1; EXPRESSED IN ADULT LIVER, SIGNAL = 1.3; EXPRESSED IN HELA, SIGNAL = 1.4; EXPRESSED IN BONE MARROW, SIGNAL = 1.3; EXPRESSED IN LUNG, SIGNAL = 1.3; EXPRESSED IN HEART, SIGNAL = 1.6; EST_HUMAN HIT: BI117748.1, EVALUE 0.00e+00; NT HIT: gi14777853, EVALUE 0.00e+00; SWISSPROT HIT: O14771, EVALUE 4.00e-69
gttttgggctcaaaggccaaagtgagaagtccctgctgcaggagatggtgccggtggtgccaggccagacaggcagcgacgtgactgtgtcctggagccccgaggaggctgaggcctgggagagcgagaaccggccgagggcggccctgggcccagtggtgggcgcgcgacgggggcggccacccactcgccggcgccagttccgggacctggcagccgagaagccgcacagctgcgggcagtgtggaaagcgcttccgctggggctcggacctggcgcggcaccagcgcacgcacacgggcgagaagccacacaagtgccctgagtgcgacaagagcttccgcagctcctcggacctggtgcgccaccaaggcgtgcacacgggcgagaagcccttctcctgttccgagtgcggcaagagcttcagccgcagcgcctacctggccgaccaccagcgcatacacacgggcgagaagcctttcggctgcagcgactgcggcaagagcttctcgctgcgctcctacctgctggaccatcggcgtgtgcacaccggtgagcggcccttcggctgcggagagtgcgacaagagcttcaagcagcgcgcgcacctcatcgcgcatcagagcctgcacgccaagatggcccagcccgtggggtgagcagctggcttggccggaaacccgggggaggcccagccacggcacatcctgcttt

SEQ ID NO: 20717 - DNA, 4726 bp, Homo sapiens
  MAP TO AC005069.2; EXPRESSED IN BONE MARROW, SIGNAL = 1.4; EXPRESSED IN LUNG, SIGNAL = 1.5; EXPRESSED IN HEART, SIGNAL = 1.6; EXPRESSED IN FETAL LIVER, SIGNAL = 1.5; EXPRESSED IN ADULT LIVER, SIGNAL = 1.3; EXPRESSED IN BRAIN, SIGNAL = 1.6; EXPRESSED IN HELA, SIGNAL = 2.3; EST_HUMAN HIT: BI603821.1, EVALUE 0.00e+00; NT HIT: gi14755650, EVALUE 0.00e+00; SWISSPROT HIT: Q61602, EVALUE 1.00e-06
atggaaagtttgtttattttttgccatcaccggtgaacagctcaaatccattttttacatcacagaccaaagccaatgggaatcctgcttgttcggcccagttgcagcatgtctcgccacccatttttccagctcatttagcaagtgtgtcaactccattgttgtcctcaatggaaagtgtcataaatccaaatataacttctcaggataaaaatgaacaaggtggtatgttatgttcccaaatggaaaatttacctagtactgccttgccagcacaaatggaagatctaaccaaaacagttctgcctttgaatattgacagtggctcagatcctttccttcctttacctgcagaaagtagttcaatgtctctcttcccttcaccagcagatagtgggactaattctgttttttcccaactggaaaataatacaaatcattattcctcacagattgaaggaaacactaattcctcctttctaaaggggggtaatggtgaaaatgcagtttttccttcacaagtgaatgttgcaaataacttcagtagcaccaatgcccaacagtctgcacctgaaaaagttaaaaaagaccgtgggcggggcccaaatgggaaggaaagaaaacctaagcacaacaaaagggctaaatggcctgcaattatcagagatgggaaatttatctgtagcaggtgttacagggcttttactaatcccagatcactgggtgggcacttatccaagcgatcttactgtaaaccactggatggagccgaaattgctcaagaacttctacagagtaatggacagccttctcttcttgccagcatgattctctccacaaatgcagtaaatttgcagcagccacaacaatctaccttcaatccagaagcatgttttaaagatccatcatttctacagcttcttgctgaaaatcgctcgccagcatttttaccaaatacatttcctcgatctggtgtgactaactttaataccagtgtcagtcaagaaggtagtgaaattattaaacaggctttggaaactgctggcattcccagtacatttgagggtgccgaaatgctttctcatgtttcaacaggttgtgtctctgatgcatcacaagtaaatgcaacggtgatgccaaatccaactgtaccacccctgttgcacactgtatgccatccaaacaccttgctgaccaaccagaataggacgtcaaactccaaaacttcctccattgaggaatgtagcagcttgcctgtttttccaacgaatgacttactactgaagactgttgaaaatggtttgtgctctagttcatttcctaattctggtgggccatcacaaaattttaccagtaacagttctcgtgtttctgttataagtggtcctcagaacacaagatccagtcatttaaataaaaagggaaacagtgcttctaagagaagaaagaaagttgctcctccactaattgcacctaacgcttcccaaaacttggtaacaagtgacttaacaacaatgggactcatagcaaagagtgttgaaatcccaactactaaccttcattcaaatgtaattccaacttgtgaacctcagagtttggtggaaaatctaacacagaaattaaataatgttaacaatcagttatttatgactgatgtaaaagagaatttcaaaaccagtcttgagtcccatacagtgttagcccctttaacattaaaaactgaaaatggtgattcccaaatgatggctttgaattcatgcacaacttcaataaattctgatttgcagatttctgaagacaatgttatacaaaactttgaaaagactcttgaaattattaaaactgctatgaattctcaaatacttgaggtaaaaagtggatctcagggtgctggtgaaacttcacaaaatgctcaaataaattataacattcagcttccttcagtaaacactgtgcaaaataacaaattacccgattcttctccgttttcctcctttataagtgtcatgccaacaaaaagtaacattcctcagtctgaagtatcacataaggaggatcaaatacaggaaattttagaaggcttacagaaattaaaattagaaaatgacctatccactccagcatcccaatgtgtactgataaatacatcagtgacactgactcccacgcctgttaaatcaactgcagatatcacagttattcagccagtttctgaaatgataaacattcaatttaatgacaaagttaataaaccctttgtgtgtcaaaaccaaggctgtaactacagtgctatgacaaaggatgcactatttaagcactatggtaaaattcatcaatacactccagaaatgattcttgaaattaagaagaatcaattgaaatttgctccctttaaatgtgtagtacctacatgtacaaaaacatttacaagaaattctaacctccgggcacactgtcagttggtgcatcattttacaactgaagaaatggtaaagttaaaaattaaaaggccttatggaagaaaatctcagagtgaaaatgtgccggcctcacgaagtacacaagtgaaaaaacagctagctatgacagaggaaaataaaaaggaatctcagcctgctttagaattgagagcagagacccaaaatacccacagtaatgtagcagtgatcccagaaaaacaacttgtagaaaaaaaaagtcctgacaaaacagaaagttctttacaagtgattacagttacttcagaacaatgtaatacaaatgcactcacaaacacacaaaccaaaggacggaagattaggaggcataaaaaagaaaaggaggagaaaaaacgaaagaagccagtttcccaatcccttgagtttccaacaagatacagtccttacagaccttatcgatgtgttcaccagggatgctttgctgcctttacgatacagcaaaacttgattctccattaccaggctgtacacaaatcagatctacctgcattttcagcagaggtcgaagaggaaagtgaagctggtaaagaaagtgaagaaactgaaactaaacaaactttgaaagaatttcgatgtcaggtaagtgactgttctcgaattttccaagcaattactggcctaatacaacactacatgaaacttcatgaaatgactcctgaagaaattgaaagtatgactgcttcagtggatgttgggaagtttccatgtgaccagttagagtgtaaatcttcatttactacatatttgaactatgttgttcatctagaggcagaccacgggattggactaagggcaagtaaaacagaagaagatggtgtatacaaatgtgattgtgaaggctgtgaccgtatatatgcaacccggtcgaatctcctccgacacatttttaataagcataatgacaaacataaggctcatttgattcgtccaagaagattaacaccaggccaggaaaatatgtcaagcaaggcaaaccaagaaaaatcaaagtctaaacatcgggggaccaagcacagcagatgtggaaaggaaggaataaaaatgcccaagaccaaacgaaagaaaaaaaataatttagaaaacaagaatgcaaagattgtgcagattgaagaaaataagccttattctctgaaacgtgggaagcatgtatattctataaaggctagaaatgatgccctgtctgagtgtacaagcagatttgtaacccagtatccatgtatgataaagggatgtacttcagttgttacaagtgaaagcaatataattagacattataagtgccataaattatctaaggcatttacatcacaacaccgaaatcttcttattgtattcaaacggtgttgcaactcacaagtaaaggaaacgtctgagcaagaaggtgctaagaatgatgtgaaagattctgacacgtgtgtatcagagagcaatgataattcaagaacaacagctacagtttcacaaaaggaagttgaaaaaaatgaaaaagatgaaatggatgaactaacagaattgtttattacaaaattaataaatgaagatagcacaagtgtagagacccaagctaatacttcttcaaatgtaagtaatgattttcaggaagataacctctgccagtcagaaagacaaaaagcaagtaatttgaagagagttaataaggaaaaaaatgtctcacaaaataaaaaaaggaaagttgaaaaagctgaaccagcatcagcagctgagttaagtagcgtgcgtaaagaagaagaaactgctgttgccattcaaaccattgaggagcatcctgcatcttttgactggagctcttttaagccaatgggatttgaagtatcatttctgaagtttcttgaggagtctgcagtgaagcagaagaaaaatactgacaaagaccatccgaatactggaaacaaaaaaggatcccattcaaattcaagaaaaaatattgataagactgctgtgactagtggaaatcatgtatgtccttgtaaagaaagcgaaacgtttgtacagtttgccaatccatcacagcttcagtgcagtgataatgtaaaaattgttttagacaagaatcttaaagattgcactgagcttgtcttaaagcaacttcaggaaatgaaacctaccgtcagtctgaaaaaacttgaagtacattcaaatgatccagatatgtctgttatgaaagatatcagtataggtaaagccacaggcagaggtcagtactgata

SEQ ID NO: 20718 - DNA, 725 bp, Homo sapiens
  MAP TO AP001730.1; EXPRESSED IN ADULT LIVER, SIGNAL = 4.1; EXPRESSED IN PLACENTA, SIGNAL = 5.1; EXPRESSED IN BRAIN, SIGNAL = 7.6; EXPRESSED IN HELA, SIGNAL = 4.2; EXPRESSED IN LUNG, SIGNAL = 4.9; EXPRESSED IN BONE MARROW, SIGNAL =   6; EXPRESSED IN HEART, SIGNAL = 4.4; EXPRESSED IN FETAL LIVER, SIGNAL = 3.6; NT HIT: AL163210.2, EVALUE 1.00e-104; SWISSPROT HIT: Q04018, EVALUE 1.50e+00; EST_HUMAN HIT: BE420422.1, EVALUE 1.00e-105
aggcttgttgaatggctttgaccaaaatgctgataataatatgaacaatgaaatccaggctgaggtggtctcagatggagatgaggaacttgttgggaactggagcaaaggtgattgttatgttttagcaaagagactggtggcatttttcccctaccctagagatttgtggaactttgaacttgagagagatgatttagggcatctggtggaagaaatttctaagcagcagagcattcaagatgtgacttgggtgctgttaaaggcattcagttttataaaggaagcagagcataaaagttcagaaaatttgcagtctgacaatgcaatagaaaaaaaaaattcattttctgaggagaaatccaaatcagctgcagaaatttgtgtaatgagcagccaaatgttaatccccaagaccatgcggaaaatgtctctaggccatgtcagagatcttcatggcagcccctctcatcacaggcctggaggcctagaaggaaaaagtgattttgtgggctgggcccagggtccccatgctgtgtgcagcctagggatttggtgccctgcatcccagccgctccagctgtggctgaaaggggccaatgtagagctcaggctgtggcttccgtggatgcaagccccaagccttggcagtgtggtgttgagcctgcaggtgcacagaagtcaagaactgaggtttggacacctctgcctagatttcacaggat

SEQ ID NO: 20719 - DNA, 1231 bp, Homo sapiens
  MAP TO AL132639.2; EXPRESSED IN BRAIN, SIGNAL =   8; EXPRESSED IN HELA, SIGNAL =  11; EXPRESSED IN ADULT LIVER, SIGNAL = 6.3; EXPRESSED IN BONE MARROW, SIGNAL =  10; EXPRESSED IN FETAL LIVER, SIGNAL = 8.9; EXPRESSED IN LUNG, SIGNAL = 7.4; EXPRESSED IN HEART, SIGNAL = 6.7; NT HIT: gi16189460, EVALUE 0.00e+00; SWISSPROT HIT: P41891, EVALUE 3.10e-01; EST_HUMAN HIT: BG433358.1, EVALUE 2.00e-49
gaatctgactttctttgtcttcttggagtaagttacacatttgacaatgaagatagtgaattaaacggtgattatggtgaaaatatatatccttatgaagaagataaagatgaaaaatctagtatatatgaaagtgattttcagatagaacctggattttatgcaacttatgaaagtactttgtttgaagaccaagttccagcattagaggctcctgaagatatcggaagtaccagtgaatcaaaagactgggaagaagtagttgttgaaagtatggaacaggatcgtattccagaagtgcatgtcccaccatcttcagctgtgtctggagtcaaagaatggtttggattgggaggagaacaagctgaagagaaggcttttgaatcagttattgaacctgtacaagaaagctcatttcggagtagaaaaatagcagtggaagatgagaatgacctagaggaattaaataatggtgagcctcaaacagaacatcagcaagaatctgaatcagaaattgattcagtgccaaagacacagtctgaactagcatctgagtcagagcacattcccaaacctcaatccactggttggtttggtggaggatttacaagttatttaggttttggagatgaggatacagggcttgaattaatagctgaagaaagcaatccaccactacaagattttcccaattccatatcatctgataaagaagccacagttccatgtacagaaatattaacagaaaaaaaagacacaatcactaatgatagcttgagtctcaagccaagttggtttgattttggttttgctatactaggctttgcatatgccaaggaagataaaattatgttagatgacaggaaaaatgaagaagatggtggggcagatgaacatgaacatcctctaacaagtgaattagaccctgaaaaagaacaagaaatagaaacgataaaaattatagaaacagaagatcaaatagacaagaaaccagtctcagaaaaaacagacgaatctgatactataccatatttgaaaaagttcttgtataattttgacaacccttggaacttccagaacattccaaaggaaacagaattgccatttcccaaacagatactggatcaaaataatgtaattgaaaatgaagaaactggagaattttccattgataattatcccacagataatacaaaagttatgatattcaaaagttcatacagtctgtcag

SEQ ID NO: 20720 - DNA, 455 bp, Homo sapiens
  MAP TO AL135960.1; EXPRESSED IN LUNG, SIGNAL = 2.1; EXPRESSED IN ADULT LIVER, SIGNAL =   2; EXPRESSED IN PLACENTA, SIGNAL = 2.8; EXPRESSED IN HELA, SIGNAL = 1.3; EXPRESSED IN HEART, SIGNAL = 2.6; EXPRESSED IN BONE MARROW, SIGNAL = 4.2; NT HIT: AJ131016.1, EVALUE 0.00e+00; SWISSPROT HIT: P17542, EVALUE 2.00e-75; EST_HUMAN HIT: BI826659.1, EVALUE 2.00e-16
gtccccacaccaaagttgtgcggcgtatcttcaccaacagccgggagcgatggcggcagcagaatgtgaacggggcctttgccgagctccgcaagctgatccccacacatcccccggacaagaagctcagcaagaatgagatcctccgcctggccatgaagtatatcaacttcttggccaagctgctcaatgaccaggaggaggagggcacccagcgggccaagactggcaaggaccctgtggtgggggctggtgggggtggaggtgggggagggggcggcgcgcccccagatgacctcctgcaagacgtgctttcccccaactccagctgcggcagctccctggatggggcagccagcccggacagctacacggaggagcccgcgcccaaacacacggcccgcagcctccatcctgccatgctgcctgccgccgatggagccggccctcggtga

SEQ ID NO: 20721 - DNA, 453 bp, Homo sapiens
  MAP TO AL138976.3; EXPRESSED IN LUNG, SIGNAL = 1.2; EXPRESSED IN ADULT LIVER, SIGNAL = 1.5; EXPRESSED IN HELA, SIGNAL = 1.5; EXPRESSED IN BRAIN, SIGNAL = 1.4; EXPRESSED IN BONE MARROW, SIGNAL = 1.3; EST_HUMAN HIT: AW470018.1, EVALUE 0.00e+00; NT HIT: gi15789340, EVALUE 1.70e+00; SWISSPROT HIT: P10114, EVALUE 2.00e-16
gaccacgctggacacgcagttcgcgtgcggccgctccccgagcagtgcgcggcgtgggcggaggagcggctccgcgaggagatcgaggcaaacgcggcgcccgcgctgctggaaatcgtggacgcggcggacgccgagcacctggtcacgctccaggacctggacatccgccacggcgacggcttcgcggtgctccggggcgtgtgcagcgaggcctcgttcccggccgtgaggccgctgcgcgagcgcctgcgcgggctgtgggaacccggggccgtcctgctggtgctggtgggcacccaggccgaccgggactccgagcgccaggtgctgatggcgcgggcccgcgaggggccctgcccgttcccgggggtcacggccaagatccagcggaggatggaccaggtgttcacgctggcggtgcgcgagacggaggccctgatcccgcccgag

SEQ ID NO: 20722 - DNA, 1975 bp, Homo sapiens
  MAP TO AC010150.2; EXPRESSED IN PLACENTA, SIGNAL = 2.4; EXPRESSED IN BRAIN, SIGNAL = 2.3; EXPRESSED IN HEART, SIGNAL = 2.7; EXPRESSED IN BONE MARROW, SIGNAL = 2.7; EXPRESSED IN FETAL LIVER, SIGNAL = 3.2; EXPRESSED IN HELA, SIGNAL = 2.2; EXPRESSED IN ADULT LIVER, SIGNAL = 2.4; EXPRESSED IN LUNG, SIGNAL = 2.4; SWISSPROT HIT: P08640, EVALUE 7.00e-07; EST_HUMAN HIT: BF798170.1, EVALUE 0.00e+00; NT HIT: gi14730709, EVALUE 0.00e+00
atcccggtctccagaatctcccccatgccgtttcatccatcgcaggtctctcccagggctcgttttccagtctccatcactagtcctaacagaacaggagccagaactcttgcagacatcaaagcaaaagcccaactggtcaaagcacagagggcagcagctgccgctgccgccgcagctgctgcagccgcctcagttggagggaccattccaggacctggcccagggggtggacaaggtccaggagagggtggtgaagggcagactgctagaggaggcagtccaggctcagacagagtcagtgaaactggaaagggccccacactggaactggcaggaactggaagcaggggaggtacgagagagcttttaccctgtggtccagagactcagccccagtctgagaccaagaccaccccaagccaggcacagcctcatagtgtctctggagcacaactacagcaaacccccccagtgcctccaacacctgccgtcagtggagcatgcacaagtgtcccatcaccagcccacatagagaaattggataatgaaaaactgaaccccaccagagcaacagccacagtggcctctgtcagccatccacaagggcccagtagttgcagacaggagaaagcaccttctccaacaggtcctgctctaatctcaggtgcctcacctgttcattgtgcagctgatggcacagttgagctcaaagcaggtcctagtaagaatatacctaacccttcagcctcatcaaagacagatgctagtgtgccagtggctgtaactccctcccctttaacatctttattgaccacagccactttagaaaagcttcctgtaccccaggtcagtgcaactacagcacctgctggatcagctccaccctcgagcactttgccagcagcttctagccttaaaaccccaggaacttctttaaacatgaatggacccactttaagaccaacctctagtatccctgctaataatcctttagtgactcagctgcttcaaggcaaagatgttcccatggagcaaattctgcctaaacctctcaccaaagttgaaatgaaaacggttccactgactgcaaaagaggaaagggggatgggagcgctcatagctaccaacacaacagaaaatagcaccagagaggaagttaatgagagacagtcccatccagctacgcagcagcagctgggcaaaaccttgcaaagtaagcagctcccccaggttccaaggccccttcagctcttttcagctaaggagctgagggactccagcattgacacacaccaataccacgaaggactaagtaaagcaacccaagatcagatccttcagactctcattcagagggttcggaggcagaatcttctctcagttgtgccgccctcacagttcaacttcgctcactcaggtttccagctggaagacatctccacaagccagaggttcatgctgggttttgctggcagaaggacatccaaacctgcaatggcagggcactacttactgaatatttctacctacggccggggctcagagagctttaggaggacccattctgtaaaccctgaagatcgtttttgtctaagcagccccactgaagccttgaaaatgggatatacagactgtaaaaatgcaacaggagagagtagcagcagcaaagaagatgacactgatgaggaaagtactggtgatgagcaggaatctgtcacagtgaaagaggagccccaggtttcccagagtgctggcaagggtgacacaagttcaggacctcacagcagggaaactctatctaccagtgattgcttagctagcaagaatgtgaaggctgagataccattgaatgagcaaaccactttaagtaaggagaattacctgttcactagaggccaaacatttgatgaaaagaccctagccagagatttaattcaggcagcacagaagcagatggctcatgcagtgagag

SEQ ID NO: 20723 - DNA, 1083 bp, Homo sapiens
  MAP TO AL049849.1; EXPRESSED IN ADULT LIVER, SIGNAL = 8.5; EXPRESSED IN PLACENTA, SIGNAL =  14; EXPRESSED IN HELA, SIGNAL =  12; EXPRESSED IN LUNG, SIGNAL =  10; EXPRESSED IN HEART, SIGNAL = 8.6; EXPRESSED IN FETAL LIVER, SIGNAL =   9; NT HIT: AL163201.2, EVALUE 2.00e-05; EST_HUMAN HIT: AW794072.1, EVALUE 6.10e+00
ttaatgcctctgctgtattatcccccctgtgcataaaaccatcactaccaccaccaccaccatcaccactaaaaccacaaccaccaccaccaccactaccaccaccaccaccaccaccaccaccaccaccaccactaccactaccaccaccaccaccactaccaccaccactaccaccaccactaccaccaccaccactaccaccaccaccagcaccaccaccatcaccaccaccactaaaaccacgaccaccaccaccaccactaccaccaccaccaccatcaccactaccactaccaccaccaccaccaccaccaccaccaccactaccaccaccaccactaccaccaccaccaccaccatcaccactaccaccaccaccaccactaccaccaccaccaccaccaccaccaccaccactaccaccaccaccaccaccaccatcaccactaccaccaccaacaccactaccaccaccaccaccaccaccatcaccatcaccaccaccaccatcaccaccactaccaccaccactaccaccaccaccaccactaccaccatcactaccaccactaccaccattaccactcccaccaccacccccagcaccagcaccatcatcaccaccaccaccatcaccactaaaaccacgaccaccaccaccaccaccactaccactaccaccaccaccatcaccaccaccaccaccaccactaccaccaccaccaccactaccaccaaaaccaccaccaccactaccaccatcactaccaccatcatcaccaccaccaccaccactaccaccaccagtaccaccaccatcaccaccaccaccaccactatcaccactaaaaccatgaccaccaccaccaccaccaccactaccaccatcactaccaccacgaccaccaccaccaccaccactaccactaccactaccaccaccaccatcaccactaccaccaccaccactaccaccaccaccactaccaccaccaccaccactaccactatcaccaccaccaccatcaccactaccaccaccaccaccagcatcaccaccaccaccaccatcaccaccat

SEQ ID NO: 20724 - DNA, 939 bp, Homo sapiens
  MAP TO AF134726.1; EXPRESSED IN ADULT LIVER, SIGNAL =  11; EXPRESSED IN BRAIN, SIGNAL = 9.6; EXPRESSED IN HELA, SIGNAL = 3.6; EXPRESSED IN BONE MARROW, SIGNAL =  31; EXPRESSED IN LUNG, SIGNAL = 1e+02; EXPRESSED IN HEART, SIGNAL =  17; NT HIT: gi16174860, EVALUE 0.00e+00; SWISSPROT HIT: P08107, EVALUE 0.00e+00; EST_HUMAN HIT: BG697380.1, EVALUE 0.00e+00
gaagtcgatgccctcaaacagggagtcgatctccaggctggcctgggtgctggacgacagggtcctcttggccctctcgcaggcggtgcgcagccgcctcacggctcgcttgttctggctgatgtccttcttgtgttttctcttgaactcctccacgaagtggttcaccagcctgttgtcaaagtcctccccacccaggtgggtgtccccggccgtggccttcacctcgaagatgccgtcgtcgatcgtcaggatggacacgtcgaaggtgcccccgcccaggtcaaagatgagcacgttgcgctcccccttgcccgttctgtccaggccgtaggcgatggcggcggccgtgggctcgttgatgatccgcagcacgttgagccccgcgatcacacccgcatccttggtggcctggcgctgcgagtcgttgaagtaggccggcacggtgatcaccgcgttggtcaccgggtagcccaggtacgcctcggcgatctccttcatcttggtcagcaccatggacgagatctcctcggggtagaatgccttggtgtcccccttgtagctcacctgcaccttgggcttgtctccgtcgttgatcacctggaaaggccagtgcttcatgtccgactgcaccaccgggtcgccgaacttgcggccgatcagccgcttcgcgtcaaacacggtgttctgcgggttcagcgccacctggttcttggccgcatccccgatgagccgctcggtgtccgtgaaggccacgtagctgggggtggtgcggttgccctggtcgttggcgatgatctccaccttgccgtgttggaacacccccacgcaggagtaggtggtgcccaggtcgatgccgatcgccgcggctttggccatgccggttccctgctctctgtcggctcggctctgagattgggggctggaaacggaacactg

SEQ ID NO: 20725 - DNA, 569 bp, Homo sapiens
  MAP TO AC002472.3; EXPRESSED IN HEART, SIGNAL = 1.7; EXPRESSED IN BONE MARROW, SIGNAL = 2.3; EXPRESSED IN FETAL LIVER, SIGNAL = 1.6; EXPRESSED IN LUNG, SIGNAL = 1.9; EXPRESSED IN ADULT LIVER, SIGNAL = 1.8; SWISSPROT HIT: P15502, EVALUE 4.20e+00; EST_HUMAN HIT: H55715.1, EVALUE 7.00e-23; NT HIT: gi5803073, EVALUE 3.00e-27
aaaccacatcctcacacacgtggcactctgcccatccaaagcaccaaacctcgaatcactgtgcagccacagtgaggaactggtcgtgaaggcccgcaggtcaccagggaggagagcgaggctcaggtcgaggctgggctttgcaaggggaagaaagcagcctcgacccccagcctggctccccctgcctcccacctccctccacctgcaccctgtctccccatgcccctcacctcctccacctgcgccctggctccccacgcccctcacctcctcccagcaggtgagctctcggtcctggaggccaattgtccacatgtcattcaacctgtattaggacagaccagtgaggaccccttgggtctggtggtcagggtgggcctagtcctggctggaagggatggctgcagggaggagccccacccccacacagggtaggagacttgtgcggccatgaggcgggaacttctgtgtggggtggcagccactgcctcaaatccctgctgtgccaggccccctgcccggcccagacagaacaagtactctcatgcatgacatcagggcagtgt

SEQ ID NO: 20726 - DNA, 1225 bp, Homo sapiens
  MAP TO AC013648.3; EXPRESSED IN ADULT LIVER, SIGNAL = 1.7; EXPRESSED IN HELA, SIGNAL = 7.6; EXPRESSED IN HEART, SIGNAL = 3.3; EXPRESSED IN BONE MARROW, SIGNAL = 1.6; EXPRESSED IN FETAL LIVER, SIGNAL = 1.4; SWISSPROT HIT: gi1351900, EVALUE 6.00e-38; EST_HUMAN HIT: BE906852.1, EVALUE 0.00e+00
agggccccaacgtggacctgaaaggccccaaggcggaagtgacagcccccgatgtgaagatgtctctgtccagcatggaggtggacgtccaggccccgagagcaaagctggatggtgcgcggctggagggggacctgtccctggccgacaagggcatgacagccaaagacagcaagttcaaaatgcccaagttcaagatgccgtcattcggggtgtcggccccaggcaagtccatcgaggcctcggtggatgtgtctgagctgaaggtggaagctgacgggagcttcccctccatgcaaggggatcttaagaccactgacatcagcattcagcccccctccgcccaactggaggtccaggctggccaggtggacgtgaaactcccagagggccacgttcccgagggagccggcctcaaagggcacctgcccaaggtgcagatgcccagtttcaagatgcccaaagtggatctcaagggcccccagatagacgtcaagggccccaagctggacctgaaaggccccaaggcggaggtgacggcccccgacgtggaggtgtctctgcccagcgtggaggtggacgtcgaggccccgagagcaaagctggatggtgcacggctggagggtgacctgtccctggccgacaaggatgtgactgccaaagacagcaagttcaaaatgcccaagttcaagatgccgtcgttcggggtgtctgccccaggcaagtccattgaggtctcggtggatgtgtctgcgccgaaggtggaggccgaagtgagcctcccctccatgcagggggacctgaagaccactgacatcagcattgagcccccctctgcccaactggaggtccaggctggccaggtggacctgaagctcccagagggccacgttcccgagggagctggcctcaaagggcacctgcccaagttgcagatgcccagtttcaagatgcccaaagtagatcgcaagggaccccagatagatgtcaagggccccaagctggacctgaaaggcccgaagacggacgtgacggcccccgacgtggaggtgtctcagcccggcatggaggtggatgtcgaggccccaggagccaagttggatggtgcacggctggagggggacctgtccctggccgacaaggatgtgactgccaaagacagcaagttcaaaatgcccaagttcaagatgccgtcgttcggggtgtctgccccaggcaagtccat

SEQ ID NO: 20727 - DNA, 828 bp, Homo sapiens
  MAP TO AC020709.2; EXPRESSED IN FETAL LIVER, SIGNAL = 1.3; EXPRESSED IN HELA, SIGNAL = 1.3; EXPRESSED IN ADULT LIVER, SIGNAL = 1.3; EXPRESSED IN BRAIN, SIGNAL = 1.2; EXPRESSED IN LUNG, SIGNAL = 1.2; EXPRESSED IN BONE MARROW, SIGNAL = 1.2; SWISSPROT HIT: Q00725, EVALUE 4.00e-16
tcacagctgagtgacccacatcccctctcccctcgcagctgagtgaccggtgtcccccgctccttgcacatgtggagctcccagctgcagcatctcggggggaggcatgggcagagccagctctgcaggagggcggctgcctgtgtccatctgtccatccagctctgcaggagggcggctgcctctgtccatctgtccatccagctctgcaggagggcggctgcctgtgtccgtctgtccatccagctctgcaggagggcggctgcctgtgtccatctgtccatccagctctgcaggagggcggctgcctgtgtccatctgtccatccagctctgcaggagggcggctgcctgtgtccatctgtccatccagctctgcaggagggcggctgcctccgtccatctgtccatccagctctgcaggagggcggctgcctccgtccatctgtccatccagctctgcaggagggcggctgcctccgtccatctgtccatccagctctccaggagggcggctgcctccgtccatctgtccatccagctctgcaggagggcggctgcctccgtccatctgtccatccagctctgcaggagggtggctgcctctgtccatctgtccatccagctctgcaggagggcggctgcctctgtccatctgtccatccagctctgcaggagggtggctgcctctgtccatctgtctatccagctctgcaggagggcagctgcctttgtccatccatctgggctctggggccgagttgggctcccctgtccgtccatccagctgtgcaggagggcaattgcctctttcaatccatccgtccat

SEQ ID NO: 20728 - DNA, 1626 bp, Homo sapiens
  MAP TO AL117187.3; EXPRESSED IN LUNG, SIGNAL = 2.6; EXPRESSED IN FETAL LIVER, SIGNAL =   2; EXPRESSED IN HELA, SIGNAL = 2.1; EXPRESSED IN BRAIN, SIGNAL = 2.5; EXPRESSED IN PLACENTA, SIGNAL = 3.2; EXPRESSED IN ADULT LIVER, SIGNAL =   3; EXPRESSED IN BONE MARROW, SIGNAL = 2.6; EXPRESSED IN HEART, SIGNAL = 2.8; NT HIT: gi15300658, EVALUE 0.00e+00; SWISSPROT HIT: P08116, EVALUE 5.00e-04; EST_HUMAN HIT: BG576121.1, EVALUE 0.00e+00
gaagatattttcgattcagataaagaagttcctatcgaatccacttttgttcgcatcaaagaaactccttctgaacaggagagcaaagtcttcgttctgactgaaaatggggagcgtacctacactgttaaccatgaaaccagccacccaccaccctccaaagtctttgtctgtgacaagcccgagagcatgaaggaattccgcctggatggtgtttccagccatgcgctgtcagacagctccaccgagttcatgcaccagattattgaccaggtcctgcaagggggcccaggtaagaccagcgacatcagtgagccatctccagaatcctccattttatcatccagaaaggagaacgggaggtccaactctttgccgatcaagaaaacagttcactttgaggctgacacctacaaggatcctttctgcagtaagaacctgtccctttgctttgaagggagcccaagagtggcaaaggaatcattgaggcaggatggacatgtcttggcagttgaggttgctgaggaaaaggaacagaaacaggaatcctcgaagattccagaatcctcctctgacaaggtcgctggtgacatttttttggtggagggcacaaacaataattctcagtcttcttcctgtaatggtgctttagagagtacagcccgccacgatgaagaaagtcactctctttcacccccaggagaaaatactgtgatggccgattccttccagatcaaggttaacctgatgactgtagaagctttagaggagggagactattttgaagccatcccattaaaagcctcaaaatttaacagcgacctaatagattttgcttctaccagccaggctttcaacaaagttccttcacctcatgagacaaaacctgacgaggatgctgaggcttttgagaatcatgctgaaaaactaggtaaaaggagtattaaatctgctcacaaaaagaaggattcgccagagcctcaagttaagatggacaaacatgaacctcatcaggactccggagaagaagctgaaggctgtccttcagccccagaagagacaccagtggataaaaagccagaggtgcatgaaaaggccaagagaaagtccacccgtcctcattatgaggaagagggagaagacgatgacctccagggtgtgggcgaggaattatcttccagccccccaagcagctgtgtcagcttggagacccttgggagtcacagcgaagaaggcctggatttcaagccctccccacccctctcaaaggtttccgtcattccccacgacctcttctatttcccacactatgaggttcccctggctgcagttttggaggcttatgtagaagacccggaggatctaaaaaatgaagaaatggatctcgaagagccagagggctatatgccagacctggactccagggaggaggaggccgatggctctcagagcagctccagttcctcggtgccaggagagagcctccccagtgccagcgaccaggtgctgtatctcagcaggggtggtgtgggtaccacaccagcctcagaacccgctccactggccccccatgaggaccaccagcaaagggagaccaaagagaatgaccccatggacagccatcag

SEQ ID NO: 20729 - DNA, 533 bp, Homo sapiens
  MAP TO AP001621.1; EXPRESSED IN ADULT LIVER, SIGNAL =   2; EXPRESSED IN PLACENTA, SIGNAL = 2.1; EXPRESSED IN HELA, SIGNAL = 1.5; EXPRESSED IN BRAIN, SIGNAL = 1.6; EXPRESSED IN HEART, SIGNAL = 1.9; EXPRESSED IN FETAL LIVER, SIGNAL = 1.9; EXPRESSED IN LUNG, SIGNAL = 1.8; EXPRESSED IN BONE MARROW, SIGNAL =   2; NT HIT: AF009222.1, EVALUE 8.00e-03; SWISSPROT HIT: Q60974, EVALUE 8.60e+00; EST_HUMAN HIT: AA412609.1, EVALUE 1.90e-01
ttaggggttccccaaggccagtgggccttgggctcctggggttctgggtccctggaggttctcatgttcagacactattgggatctcaatcttcctggcccaggatcccaagctgtgaatcactggaaagtggaagatctgatggaggtggagggtctgatggaagagaatctgatggaggagggtctgatggaggtgaaggctctgatggaggagggtctgatggcgggggagggtctgatggaactggagaattactggggctttccatgggccctctggcccaggttgcatctctccatgctggccactagatggcgacattagctggagtccacgctggaaaccgaatgtcccctgagtttccgcagcaaccacatccctgggttctcttgtttgttctctttcactggatttgagcctcttgcgtgtctgaaattgttctgcagacctgcaggctccggggcacatgtgtgcaaaggtggtgccctggaggccctgtaaatagctcagaaagtgaggctggtcttctt

SEQ ID NO: 20730 - DNA, 621 bp, Homo sapiens
  MAP TO AL138842.2; EXPRESSED IN ADULT LIVER, SIGNAL = 1.7; EXPRESSED IN HELA, SIGNAL = 0.79; EST_HUMAN HIT: AV682627.1, EVALUE 0.00e+00; SWISSPROT HIT: P70478, EVALUE 4.70e+00
ctcaccatcatatttaagaacatgcaggaatgcattgatcagaaggtgtatcaggctgaggtggataatcttcctgtagcctttgaagatggttctatcaatggaggtgaccgacctgggggatccagtttgtcgattcaaactgctaaccctgggaaccatgtggagatccaagctgcctacattggcacaactataatcattcggcagacagctgggcagctctccttctccatcaaggtagcagaggatgtggccatggccttctcagctgaacaggacctgcagctctgtgttggggggtgccctccaagtcagcgactctctcgatcagagcgcaatcgtcggggagctataaccattgatactgccagacggctgtgcaaggaagggcttccagtggaagatgcttacttccattcctgtgtctttgatgttttaatttctggtgatcccaactttaccgtggcagctcaggcagcactggaggatgcccgagccttcctgccagacttagagaagctgcatctcttcccctcagatgctggggttcctctttcctcagcaaccctcttagctccactcctttctgggctctttgttctgtggctttgcattcag

SEQ ID NO: 20731 - DNA, 563 bp, Homo sapiens
  MAP TO AL121883.13; EXPRESSED IN BONE MARROW, SIGNAL = 1.6; EXPRESSED IN FETAL LIVER, SIGNAL = 1.5; EXPRESSED IN ADULT LIVER, SIGNAL = 1.4; EXPRESSED IN HELA, SIGNAL = 1.4; SWISSPROT HIT: P05790, EVALUE 7.90e-01; EST_HUMAN HIT: AL525826.1, EVALUE 0.00e+00; NT HIT: gi14757952, EVALUE 0.00e+00
atgggccgcactcgggaagctggctgcgtggccgctggtgtggttatcggggctggtgcctgctactgtgtatacagactggcttggggaagagacgagaacgagaaaatctgggacgaagacgaggagtctacggacacctcagagattggggttgagactgtgaaaggagctaaaactaacgctggggcagggtctggggccaaacttcagggtgattcagaggtcaagcctgaggtgagtttgggactcgaggattgtccgggtgtaaaagagaaggcccattcaggatcccacagcggaggtggcctagaggccaaggccaaggcccttttcaacacgctgaaggaacaggcaagtgcaaaggcaggcaaaggggctagggtgggtaccatctctgggaacaggacccttgcaccgagtttaccctgcccaggaggcaggggtggaggctgccaccccaccaggagtggatctagggccgggggcagggcaagtggaaaatccaagggaaaggcccgaagtaagagcaccagggctccagctacaacatggcctgtccg

SEQ ID NO: 20732 - DNA, 1097 bp, Homo sapiens
  MAP TO AC005754.1; EXPRESSED IN ADULT LIVER, SIGNAL = 1.4; EXPRESSED IN FETAL LIVER, SIGNAL = 1.2; EXPRESSED IN LUNG, SIGNAL = 1.2; EXPRESSED IN HELA, SIGNAL = 2.4; NT HIT: gi16171257, EVALUE 0.00e+00; SWISSPROT HIT: Q9Y5E1, EVALUE 0.00e+00; EST_HUMAN HIT: BG718561.1, EVALUE 0.00e+00
agaaactttaactggctctcagagctttctgccaggtaaacttcatactgataattctgggacagggtcctggtgccactcacgtccaccagatgccctggaaaggggccctcgggcaccgagtagcgacccaccgaggccgccctgctccttctgcacagccgcaccgccacgaacaggagcaccgagaagaggaagagcgaagacaccgaagccaacgccaccaccaggtagacggtgagcgagtcggcctgggcctgggccggggccgcctcagggagaggcaggtagggctgggagaagccgtccaccaggagcacgtgcagcgtggcggtggccgagcgcggaggctcgccattgtccttgaccagcaccaccagcctgtgcttggccgcgtcgcgctcgctcagcagcctggcggtgcgcacctcgccattgtgcgcccacacgccgaatagcccgggctccgtggccttgagcagctggtacgacagccaggcgttctggcccgagtcgccgtccaccgccaccaccttggtcaccaggtagcccggctcggccgcccggggcaccagctcggtgcagggcgcggagccgttctgcagcgggtacagcacgaagggcgagttgtcgttggcgtccagcacaccagcacgcgcaccagcgcctcgctgctcaaagccggagaaccgcggtctgaggcgcccacgcggaactcgaactcctgcagggcctcgtagtccagcgacctgagggcaaacaggtggccgttgtctgtgttgatggagaccagggaggcgaggggcaggtgcgggttctggggcggcagcagcgagtaggtgacctgagcgttggtgcctgagtctctgtctgtggcgctgacactgccgatgtgcagggcggggctgttgttctcgcggacgaacagggtgtaggaggtttgggtgaaggcgggggcgttgtcattgacgtcggagacccgcagggttatgttgtactcggttttcagcctgggtgtccccaagtctgtgacagtaatggtgatgttgtactcggccctgctctctctgtctagcgctccttctgttaacaaagtg

SEQ ID NO: 20733 - DNA, 883 bp, Homo sapiens
  MAP TO AL157377.1; EXPRESSED IN ADULT LIVER, SIGNAL = 2.1; EXPRESSED IN HELA, SIGNAL = 1.2; EXPRESSED IN PLACENTA, SIGNAL = 2.4; EXPRESSED IN BRAIN, SIGNAL = 1.6; EXPRESSED IN HEART, SIGNAL = 2.3; EXPRESSED IN LUNG, SIGNAL = 1.9; EXPRESSED IN BONE MARROW, SIGNAL =   2; NT HIT: gi16189466, EVALUE 0.00e+00; SWISSPROT HIT: O15320, EVALUE 1.00e-119; EST_HUMAN HIT: BG719803.1, EVALUE 0.00e+00
attccaggttatcatcatccgttgtgtcttcttcaagcacagcagcctgatctttcatcattggcaagtgtccagtcagggtcttgatgtgattttctttatcattcagaacttgttctgcgtgtactttggagtcttcaaatgttattttctgtttattaagttcactcacttgtcctttccatacttcagcttcttgctgaaaaagctgtttatggcttgtctgaagttgagaattttcattcaaagcatcttttattgctatagcccgtcgttcttcactcattttaaatgtcttgcagatgattttggcttcagctatttgtgatttgagggattttgactcatcttctagagactgtatactttttgaaatatccgccatcaattcatcttgttgagaatgtttagatttctcttcttttaagtctttttctagacagaggatttcatcctcaagttcagaattggacctgctcagcttttcacaggttgcctccaaacttcgtgcttcttctgctgccgccttctcaaagctggcatcctctaaagatgactctacttcatagccttcatactctttttgaataaggctaaacttttcaagtagtttacatttttcttcaattagtccagaaagcgttgcaccaagtttttgctctcttcccacataaagccgactcctaaccgatctaaaacttctccacaaaaaaaggagaacaacaaaaaatccaataacagctgcacataccaccagttccgatggaaaaccataaggattctcatctggtctcatactctcaggtagtgctgccacaactctgcctagctcctccaggaccagccccaggtagggctgaggggtagcaccaggctcctccat

SEQ ID NO: 20734 - DNA, 464 bp, Homo sapiens
  MAP TO AF009663.1; EXPRESSED IN ADULT LIVER, SIGNAL = 1.5; EXPRESSED IN BRAIN, SIGNAL = 1.4; EXPRESSED IN HELA, SIGNAL = 1.8; EXPRESSED IN HEART, SIGNAL = 1.5; EXPRESSED IN LUNG, SIGNAL = 1.4; SWISSPROT HIT: P04213, EVALUE 2.00e-23; EST_HUMAN HIT: BI912376.1, EVALUE 0.00e+00; NT HIT: AF009663.1, EVALUE 0.00e+00
actcagaccccaaaattccaggtcctgaagacaggacagagcatgacactgcagtgtgcccaggatatgaaccatgaatacatgtcctggtatcgacaagacccaggcatggggctgaggctgattcattactcagttggtgctggtatcactgaccaaggagaagtccccaatggctacaatgtctccagatcaaccacagaggatttcccgctcaggctgctgtcggctgctccctcccagacatctgtgtacttctgtgccagcagttactccacagcgctacaaggccgtctcctctctgcacataaaggcagggaggttctgccctcctcccccacccaagactcagggatgccctgggcagagatctctgcgccaggaaccttggaacccacagtggccccaagtggcctggacagtatgagccttgctctgtgccaggtgcctctgcaggcatctca

SEQ ID NO: 20735 - DNA, 646 bp, Homo sapiens
  MAP TO AL132708.3; EXPRESSED IN LUNG, SIGNAL = 6.2; EXPRESSED IN ADULT LIVER, SIGNAL =  39; EXPRESSED IN HELA, SIGNAL = 0.95; EXPRESSED IN BONE MARROW, SIGNAL = 1.8; EST_HUMAN HIT: AI133596.1, EVALUE 0.00e+00; SWISSPROT HIT: P01009, EVALUE 1.00e-122; NT HIT: gi16191125, EVALUE 0.00e+00
atgccgtcttctgtctcgtggggcatcctcctgctggcaggcctgtgctgcctggtccctgtctccctggctgaggatccccagggagatgctgcccagaagacagatacatcccaccatgatcaggatcacccaaccttcaacaagatcacccccaacctggctgagttcgccttcagcctataccgccagctggcacaccagtccaacagcaccaatatcttcttctccccagtgagcatcgctacagcctttgcaatgctctccctggggaccaaggctgacactcacgatgaaatcctggagggcctgaatttcaacctcacggagattccggaggctcagatccatgaaggcttccaggaactcctccgtaccctcaaccagccagacagccagctccagctgaccaccggcaatggcctgttcctcagcgagggcctgaagctagtggataagtttttggaggatgttaaaaagttgtaccactcagaagccttcactgtcaacttcggggacaccgaagaggccaagaaacagatcaacgattacgtggagaagggtactcaagggaaaattgtggatttggtcaaggagcttgacagagacacagtttttgctctggtgaattacatcttctttaaag

SEQ ID NO: 20736 - DNA, 634 bp, Homo sapiens
  MAP TO AC006126.1; EXPRESSED IN BRAIN, SIGNAL = 2.5; EXPRESSED IN ADULT LIVER, SIGNAL = 2.4; EXPRESSED IN HELA, SIGNAL = 1.9; EXPRESSED IN FETAL LIVER, SIGNAL = 2.4; EXPRESSED IN LUNG, SIGNAL = 2.6; EXPRESSED IN HEART, SIGNAL = 2.6; EXPRESSED IN BONE MARROW, SIGNAL = 2.9; SWISSPROT HIT: Q03169, EVALUE 2.00e-04; NT HIT: gi16124256, EVALUE 6.10e-01
ctggggtagacctgattgtgccagtgcagcagcgcgtagcggtcggccagcggcagcctgcgacgggcggaggcccccagccactcggccagggccccgtggtagccgcgcaggtagacgccgaaggcgcccaggccggcggggtaggcgggcgccaggcggccccgcaccacggccatatcctccagcagccgcgcccgcagcgcctccagctgcccggccaggcccccgggcgccccgggagccgctgcctctaggcgctcccgggccgcgcgcgccacggcttcggcccagcgtgcgcgtagtttgcgggccgccccgggaccccgacgcccgtcggccgcctcctcctgtaccagcacctggcccagctgcgccaccgcgccagccccggcgcacgctcccggcccggggcccgccagcgtctcgcgcaccagcgcccacagctcgcgctgcagggcctcgtacagcagcgccacgtcccgcgcccggcggcccccgccagcgccctcggccttgggaggcccaggcgcgccgcccctcgacggcgccagctcctcggcctctagctccaggatgtgctcgtccgcacgcgctagttcgcgctgctggatcaggctcaggatctccagca

SEQ ID NO: 20737 - DNA, 889 bp, Homo sapiens
  MAP TO AP001725.1; EXPRESSED IN HELA, SIGNAL = 1.4; EXPRESSED IN BONE MARROW, SIGNAL =   2; EXPRESSED IN LUNG, SIGNAL =   2; EXPRESSED IN ADULT LIVER, SIGNAL = 1.6; EXPRESSED IN PLACENTA, SIGNAL = 1.7; EXPRESSED IN BRAIN, SIGNAL = 1.3; EST_HUMAN HIT: BG288981.1, EVALUE 0.00e+00; SWISSPROT HIT: Q14149, EVALUE 0.00e+00; NT HIT: gi14780353, EVALUE 0.00e+00
cttgaaacggagactttctactcgttcctcaattttgaatgcaaagaatcggagattgagtagtcagtttgaaaattcagtttataaaggtgatgatgatgatgaagatgtcatcatcttagaagaaaacagtacccccaaacctgcagtagatcatgatattgacatgaaatcagaacagagtcacgttgagcaaggtggtgttcaggttgagtttgtgggtgacagtgaaccttgtggccagactggttcaacaagcacctcatcatcccgatgcgaccagggaaatactgcagctacccagactgaagtaccaagtttagttgttaaaaaagaagaaactgttgaagacgagatagacgtaagaaatgatgcagtgattctgccctcctgtgtagaagctgaagcaaagatacatgaaacccaggaaaccaccgataaatctgcagatgatgcaggctgccaattacaagaactgagaaaccagctactccttgtcactgaggaaaaagagaattataaaagacagtgtcatatgtttactgatcaaatcaaagtgttacaacagaggatactagaaatgaatgacaagtatgttaagaaagaaacttgccatcagtccactgaaaccgatgctgtatttttacttgaaagtattaatggcaaatctgaaagtccagaccatatggtatctcagtatcagcaagctttggaagaaatagaaaggctgaaaaaacaatgtagtgctttgcaacatgtaaaggctgaatgcagccagtgttccaataatgagagtaaaagtgaaatggatgagatggctgtgcagcttgacgatgtgtttagacaactggacaaatgcagtattgagagggaccagtataaaagtgag

SEQ ID NO: 20738 - DNA, 498 bp, Homo sapiens
  MAP TO AC005670.1; EXPRESSED IN ADULT LIVER, SIGNAL = 1.6; EXPRESSED IN PLACENTA, SIGNAL = 1.8; EXPRESSED IN HELA, SIGNAL = 1.5; EST_HUMAN HIT: AI657076.1, EVALUE 0.00e+00; SWISSPROT HIT: O60309, EVALUE 6.00e-53; NT HIT: gi12740329, EVALUE 0.00e+00
cattcacacctgactcaagccaccgttcaacctctggacctggagcttaccataactacaatacctactacagaggttaaaccatctccaaccacggaggagacctcaactcagcctccagacctagggcttgccataactccagagcccactacagagattggacattctacagccctggagaagactacagctcctcatccagatcagcttcagactctgcatcgaaaactgactgaagtcacaggtccacctactgtgctagaacctagtcaggattcattggtgcagtctgaaagttacatccaagataaggctttaactgcaccagaggaacagaaggcctccacaagcaccaacatatgtgagctctgtacctgcggagatgagatgttgtcatgtattgatctcaacccagagcagaggctccgcaagtgcctgtgccagagcccaacacccacaatggcaccttcaccatcttgtaagaatcacctttcc

SEQ ID NO: 20739 - DNA, 1397 bp, Homo sapiens
  MAP TO AC012313.5; EXPRESSED IN ADULT LIVER, SIGNAL = 1.3; EXPRESSED IN HELA, SIGNAL = 0.31; EXPRESSED IN PLACENTA, SIGNAL = 1.4; EXPRESSED IN LUNG, SIGNAL = 1.2; NT HIT: gi16162719, EVALUE 0.00e+00; EST_HUMAN HIT: BI770452.1, EVALUE 0.00e+00; SWISSPROT HIT: Q14585, EVALUE 3.00e-96
tcagaccttcgctggcttcaggactgggcttggcttccctccccggcgcaccttccgatgatgtccctgaaggaaacctggccccggggtgcagtctggtgctgcggcattggtcttctctgtggtgtggatcctctggtggtgcaagagggcagggcgctcacggaaggcgcggccacactgcgtgcacacgaagggcttctcgcccgtgtgaatgcgccggtggctgagcagcacggcgcccttggcgaaacccttgccacagtccacgcagcggaagggccgctcgcccgtgtgcaggagctggtgctgggtgaggttggagctgcggctaaaggagcggccgcactgggcgcaggcgaagggcttctcgcctgtgtgcacgcgctggtgcaaaaagagcgaggagccctggctgaaggcagcaccgcagagcgcgcatacgaagggcttctcgcctgtgtgcgtacgctcgtgctggatcaggtgcgagttgcggcagaagcggcggccacactgtgcgcaagcataaggacgcccacccgcgtggatcttgcggtgctggctgaggttggagccgtggctgaaggccttgccgcactcggagcagcggaaggacttctcggccgtgtggatgcgctggtgccgcaccagcgaggagctatgccggaaggccttgccgcacacggggcacgcgtagggcgtctcgccgctgtggatgcgctggtgctgcgtcaagtgcgacgtctggctgaaggccttgccgcactgggtgcactcgtagggccgctccccggtgtgggtgcgtaggtgcttgaggaggtcggagctcttcacgaacactttgctgcacgccctgcattcgaaggacttctccccagcgtgaagagcctcgcccagctcgtcccaggtcgagggctcctggccaccgaggagtctatgaggctcctgccaagctgcgcccattctgcgatccctgccaccactggcggccttcaggtccgaggcattcccgaaggctctcccagggacctcctgtgcacatggcttctgccgctcaggcgtcctgggctgcctcccaggcacccggtactctgtgaaggtcttttccctgggccggctgctcttggggggcctgagtggggaggtcagtcgcaggctgatgctggcctggtcactgcgcgagcctagcaggagcctctcccagtagatcaccgacacccccgtgggttttctctcctgagatggggaggcacccggttgtcgctgcaggctttttacactgtggcaggcatcggcaactgggaagacgctagtagtcatcccaggtggggtatctgggaaagctcgtggccattctccagaaacatctctatcctctgtcaaactccaggaac

SEQ ID NO: 20740 - DNA, 520 bp, Homo sapiens
  MAP TO AL356805.2; EXPRESSED IN ADULT LIVER, SIGNAL = 2.1; EXPRESSED IN PLACENTA, SIGNAL = 1.9; EXPRESSED IN BRAIN, SIGNAL = 1.9; EXPRESSED IN HELA, SIGNAL = 0.67; EXPRESSED IN LUNG, SIGNAL = 2.6; EXPRESSED IN BONE MARROW, SIGNAL = 1.8; EXPRESSED IN HEART, SIGNAL = 3.3; EXPRESSED IN FETAL LIVER, SIGNAL = 1.2; NT HIT: gi4885136, EVALUE 0.00e+00; EST_HUMAN HIT: BE676347.1, EVALUE 0.00e+00; SWISSPROT HIT: O00409, EVALUE 2.00e-95
ctgactcctctctttgtccactttcttaaaacacttattcaatgataaattgtgtctcactgagtttttccacccagtaggtgcatttgcaaaatacggaaaatgttccaagatccagttgtagatatccttcactggcaggcgcttggttggagagtcctcgatggccataaatatgaggcagctgaaggagtaggggggtttgcagttggggttctgcctggcatcgtagggcatgtcagagtgggcaggggatgggggggtgtcatcgtccaggtcctggacggggctgacactcctgaggaccgactccccaaagctcttcagcaagttcttgctctcgtgcagccagttcaggttggtcagctcttcatcttccatggccccctcttctaatcggatgtcaggcagagaaaagtcgaggtcatcgtcttcctgaagggccttggagaaaccgctgcccccgtaacactgactcagtccactggagacactaattcctgagctttctggcttctta

SEQ ID NO: 20741 - DNA, 1128 bp, Homo sapiens
  MAP TO AC006111.2; EXPRESSED IN HEART, SIGNAL = 2.6; EXPRESSED IN BONE MARROW, SIGNAL = 3.4; EXPRESSED IN LUNG, SIGNAL = 3.2; EXPRESSED IN ADULT LIVER, SIGNAL =   2; EXPRESSED IN PLACENTA, SIGNAL = 2.6; EXPRESSED IN HELA, SIGNAL = 2.4; EXPRESSED IN BRAIN, SIGNAL = 2.6; EST_HUMAN HIT: R81095.1, EVALUE 0.00e+00; SWISSPROT HIT: Q92793, EVALUE 1.00e-119; NT HIT: gi14778081, EVALUE 0.00e+00
cgggtttgatttgagaatgttcagcacctgctgttgctgctgaggggagctgggcgacttcagggtccgcagcaggtcttgcagagcgctgggtgagatgctcctgggtggctgcacgctgggcatccggggcccagccacggccgcctgggcctgcatggatatcacaggcctgggcaagcctggcatgggctgctgctggggaaggggcgcctgctgccactgcccgggaggcatgctgggcatgacgggcccgctcacctggttgggtcggggcacattcaggctcacgggggccatctggctccccggggtccccatgcccgtgcgtcctgggggcatgctgttgttgatgttcacccggtacaggtgctgctgctgctgggcctcacgctcgatctgccgagccgcttccaccgctgcaggagggggctgggccgggggtgggggggccggcacctggctggtaggcttccctgtggacaccgtggtggggggctgagtccgggccacgctggggaagccagctggtgacatgctcacgggtgagggttggggctgggcagggggctgcggcgtctggggtgtgctgggctgctgtgtgggggtcccgggcggtgctgaggtaggagaaggcagactctgctgaggcacgttgcgggtgttcatggtggccatccgccggcgcatgagctgggcctgctgcaggcggtgctggatctgctgctggcggagcttgtgtttgatgttgaggcagaagggcacggggcatttgttttcttggcagtgcttggcgtggtagcagcagagggcgatgagctgcttgcacaccgggcagcccccgttggtcttgcgtttgcagcccttggtgtgctgcaccacccgcttcatcttctggcaggatggcagcgagcagttggcgttgcggcactggcacgcgtgcaccagcgactggatgcagcgctggatgctcagccggcgtgactcctgggggctctttgactgtggctcgccctggctgctgccctcgtcatccaggcccagcccccacttcaccatcttatgggcatggctcttcgtgttatagcagttgatgcagaggtcgtagtcctgcaagcaaggaaaggg

SEQ ID NO: 20742 - DNA, 937 bp, Homo sapiens
  MAP TO Z49250.1; EXPRESSED IN LUNG, SIGNAL = 1.2; EXPRESSED IN BONE MARROW, SIGNAL = 1.3; EXPRESSED IN FETAL LIVER, SIGNAL = 1.6; EXPRESSED IN ADULT LIVER, SIGNAL = 1.5; EXPRESSED IN HELA, SIGNAL = 1.2; EST_HUMAN HIT: AU124548.1, EVALUE 0.00e+00; SWISSPROT HIT: Q9K802, EVALUE 6.80e-01; NT HIT: gi14724355, EVALUE 0.00e+00
atacaacaaaattggggtagttaaaaccatgagttgtggaaatgagtttgtggaaacattaaaaaaaattggttatcccaaagctgataatcttaatggagaagactttgactggttgtttgagggcgttgaagatgaatcgtttctgaagtggttttgtgggaatgtgaatgaacagaacgtgttgtctgaaagagaattggaagcttttagcattcttcagaaatcaggcaagcctattctagaaggggcggcattggatgaagctcttaaaacgtgtaaaacttctgatttgaagacacctagactggatgataaagagctggagaaattagaggatgaggttcaaactctactgaaattaaagaacctaaaaattcagcgacgtaataaatgtcaattgatggcttcagtaactagccacaaatctctgaggttaaatgctaaagaagaagaagccactaaaaagctgaagcagagtcaaggaattctaaatgcaatgatcactaagatcagtaatgaacttcaggctcttactgatgaagttacacaattgatgatgttcttcagacattctaatttaggtcaagggacaaatccactggtatttttatcgcaattttccttggaaaaatacctaagtcaggaagagcaaagcacagcagcattaactttgtataccaaaaaacagttctttcagggtatacatgaagtagttgaaagttcaaatgaagacaattttcaacttttagatatacagacaccatctatttgtgataatcaagaaatccttgaggagagacgactagagatggctagactgcagctcgcatacatttgtgctcaacatcagttaattcacttaaaagcaagtaattcgagcatgaagtcaagtataaaatgggcagaggagagtcttcacagcctaaccagcaag

SEQ ID NO: 20743 - DNA, 785 bp, Homo sapiens
  MAP TO AL136139.4; EXPRESSED IN HEART, SIGNAL = 3.3; EXPRESSED IN BRAIN, SIGNAL = 1.3; EXPRESSED IN BONE MARROW, SIGNAL = 1.4; EXPRESSED IN FETAL LIVER, SIGNAL = 1.4; EXPRESSED IN ADULT LIVER, SIGNAL = 1.4; EST_HUMAN HIT: AL600202.1, EVALUE 0.00e+00; SWISSPROT HIT: Q14511, EVALUE 0.00e+00; NT HIT: gi14757672, EVALUE 0.00e+00
ctgtaggtggacgtaatcgtagtcatccatccagctcctctcagaaccatcactgctgctacagtcaggggcctgctccttgctcaggcctgggggcagtgccttgttgtgggcctgggccttgtggtcaccaggatgcagcagctgtccctgggagccaccgtgtgggtactccgttgagttcatgatgctctccggcccattcttcagatgcaagctgccagggccgggtctgaagagggcctctgcgttggtgttgatggttgtggtgagctgcttggcgtcatcgggcaccgtctttgccaccatcacaaaccggtccagatcgtcacacttgttctggggcttgttgatggccaagatattcagggaccagctgcactcatttaagtcatggctggtttgactcaggatctggtgggagtcttcaactcgttgcagctcccgcttcatcttgttgtggaggatgagttccgggaggcaggcagcatttgcaacagctcccttgacaaagtggaggtactccttcaggaacagctccaccttgtccactgctgtgcgtatttcattgatgtgtctttccatatatccgtaacaccgccagtcggtagtgaccagtgccattaggctggagacacccatctcaagggcctgctggagccgctgaagtctctcaatagctgtgtctggatccaggaagagccttttgtcctgagctggggaggctgacagtgaggactccttggaggaggtggaagacgtggacatgttactccgggtgctgc

SEQ ID NO: 20744 - DNA, 466 bp, Homo sapiens
  MAP TO AP000962.2; EXPRESSED IN PLACENTA, SIGNAL = 5.3; EXPRESSED IN ADULT LIVER, SIGNAL = 3.4; EXPRESSED IN HELA, SIGNAL = 3.7; EXPRESSED IN BONE MARROW, SIGNAL = 4.4; EXPRESSED IN FETAL LIVER, SIGNAL = 3.5; EST_HUMAN HIT: AI831462.1, EVALUE 1.00e-124; SWISSPROT HIT: O43759, EVALUE 3.20e+00; NT HIT: AL163227.2, EVALUE 1.00e-109
taaactagtaccagtagagtggggagttgctgaaaagataccagaaaatgtggatgtgactttggaactaagtaacaggcaaaggttggaacagtttagagagatgagaagaagacaggaaaatgtaggaaagtttggaactcctagagacttgttgaatagctttgaccaaaatactgataatagtatggtcaatgaaatccaggctgaagtggtctcagatggagatgaggaatgtgttgggaactggaacaaaggtgacacttgttatgttgtagcgaagagactggcagcattttgcccctgccctagagatttgtggaactttgaacttgagagagatgatttagggtatctggcagaagaaatttctaagcagcaaaggattcaagaggtgactagagtgctattaaaggcaatcagttttataagggaagaagagcataaaactggaaaatttgaagcc

SEQ ID NO: 20745 - DNA, 1214 bp, Homo sapiens
  MAP TO AC008119.6; EXPRESSED IN LUNG, SIGNAL =   2; EXPRESSED IN BONE MARROW, SIGNAL = 2.4; EXPRESSED IN HELA, SIGNAL = 1.1; EXPRESSED IN PLACENTA, SIGNAL = 1.4; EXPRESSED IN BRAIN, SIGNAL = 1.6; EXPRESSED IN ADULT LIVER, SIGNAL = 1.5; SWISSPROT HIT: Q14242, EVALUE 1.00e-120; NT HIT: gi14764461, EVALUE 0.00e+00; EST_HUMAN HIT: AL583011.1, EVALUE 0.00e+00
aggtcatccccctcacggtcctccctgggctctggcgtcaggcccgggctcttggccttggacaggcccccattggctgtggcagagggcccctcacccccatcaggcaacagggatgagatgcagaccatctcggtgggggagtaattacgcacggggtacatgtggcccttgcgggagaggcggaccgccagcaccacagtgcacacgaagaagatagtggccaccagcgccaagattaggatggccagcaggcactgcttcacagagatgtggtctggggcccccactgggtagttgacggacaaattgctggctgccatgggaatgcccttgtgagtaacagaggacacagaaaagggtatgaacagacctcttttggtagtaggttccatggacagggcctctgtggcactgggttctgtggacagggcctccatggctgccagtggagtggtctgtgcctccgtggctgtgggttgagtggtctgtgcctccgtggcttctggtgcagtggtctgtgcctccatggctgtggtttgagtggtctgtgcctccatggctgctggtggagtggtctgtgcttccatggctgctggtgcagtggtctgtgcctccatggctgctggtgcagtggtctgtgcctccaggcctgtgggttgagtggtctgtgcttccgtggctgctggtggagtggtctgtgcctctgtggctgccagtggagtggtctgtgcctccgtggccgtcagtcgagttgtctgtgcctctgtggctgccagtggagtggtctgtgcctccgtgggcactggttgagtggtctgtgcctccgtggctgctggttgagtggtctgtatctccatagctgctgaatccgtggacaggttccccatgttggccagctccgtggtcagctctgtgactgcccctcctgcatccaggccagtagaacgccttgcagcaggctccacagtggtagactcaggggttccaggcccagtcagaggagtggtgtcagtgctgttcctcagcatttctggaggctccgtttctggcaggaaatcataatctaggtactcatattcggtggcctgtctccggtcccgggcaagcaggggacccaaggctttctcggcttcatctgcccaggtgtcccacagctgcaagctgttgccagggcccagtaggatcagcaacaggaggagttgcagaggcat

SEQ ID NO: 20746 - DNA, 543 bp, Homo sapiens
  MAP TO AL163247.2; EXPRESSED IN ADULT LIVER, SIGNAL = 1.8; EXPRESSED IN HELA, SIGNAL = 3.1; EXPRESSED IN BRAIN, SIGNAL = 1.6; EXPRESSED IN HEART, SIGNAL = 1.5; EXPRESSED IN BONE MARROW, SIGNAL = 1.8; EXPRESSED IN LUNG, SIGNAL = 1.6; EST_HUMAN HIT: BI492299.1, EVALUE 5.00e-79; SWISSPROT HIT: P08548, EVALUE 9.00e-34; NT HIT: AL163247.2, EVALUE 0.00e+00
atggaagttcaaaaaagaaacaatgaatttaaactataccctacaacaaaaatggacttaacagatatttacagaacattctacccaacaactgcagaatttacattctatccatcagcatatggaacattccccaagatagaccatatgataggccacaaaacaaatctcaacaaatttaagaaaatcaaaactatagcaagtactctctcagaccaaagtggaataaaattggaaatcaactccaaaaggaactctcaaaataatgcaaatacgtggaaattaaataacttgttcctgaatgatcattgggtcaataatgaaatcaaggtagaatttaaaatattctttgaactgaatgatagtagtgacataacctatcaaaacctcttggatactgcaaccgatattacaactgataccacagaaatacaaaagatcattcaaggctactatggacatctttacatgcataaactagaaaacctagaggagatagataaatgcctagaaatatacaaccatgcaagagtaaaccaaaaa

SEQ ID NO: 20747 - DNA, 530 bp, Homo sapiens
  MAP TO AL355075.2; EXPRESSED IN HELA, SIGNAL = 4.1; EXPRESSED IN ADULT LIVER, SIGNAL = 1.9; EXPRESSED IN BRAIN, SIGNAL = 2.1; EXPRESSED IN LUNG, SIGNAL = 1.9; EXPRESSED IN HEART, SIGNAL = 1.7; EXPRESSED IN BONE MARROW, SIGNAL =   3; EST_HUMAN HIT: BE940121.1, EVALUE 9.00e-56; SWISSPROT HIT: P34268, EVALUE 4.40e-01; NT HIT: gi13649630, EVALUE 0.00e+00
acatcctctccttggagaaccggtgcctggctatgctccctgacttacagcccttggagaaactacatcagcatgtatctacccactcagatatcctctccttgaagaaccagtgcctagccacgcttcctgacctgaagaccatggaaaaaccacatggatatgtgtctgcccacccagacatcctctccttggagaaccagtgcctggccacactttctgacctgaagaccatggagaaaccacatggacatgtttctgcccacccagacatcctctccttggagaaccggtgcctggccaccctctctagtctaaagagcactgtgtctgccagccccttgttccagagtctacagatatctcacatgacgcaagctgatttgtaccgtgtgaacaacagcaattgcctgctctctgagcctccaagttggagggctcagcatttctctaagggactagacctttcaacctgccctatagccctgaaatccatctctgccacagagacagctcaggaagcaactttg

SEQ ID NO: 20748 - DNA, 980 bp, Homo sapiens
  MAP TO NM_006777.1; EXPRESSED IN PLACENTA, SIGNAL = 1.9; EXPRESSED IN ADULT LIVER, SIGNAL = 1.7; EXPRESSED IN BRAIN, SIGNAL = 1.7; EXPRESSED IN HELA, SIGNAL = 1.2; EXPRESSED IN LUNG, SIGNAL = 1.6; EXPRESSED IN BONE MARROW, SIGNAL = 1.7; EXPRESSED IN HEART, SIGNAL =   2; EST_HUMAN HIT: AI762551.1, EVALUE 0.00e+00; SWISSPROT HIT: Q9ULJ3, EVALUE 4.00e-16; NT HIT: gi11422608, EVALUE 0.00e+00
atggagagtagaaaactgatttctgctacagacattcagtactctggcagtctgctgaactccttgaatgagcaacgtggccatggactcttctgtgatgttaccgttattgtggaagaccgaaaattccgggctcacaagaatattctttcagcttctagtacctacttccatcagctcttctctgttgctgggcaagttgttgaactgagctttataagagcagagatctttgcagaaattctcaattatatctatagttctaaaattgttcgtgttagatcagatttgcttgatgagttaattaaatcagggcagttattaggagtgaaatttatagcagagcttggtgtcccattgtcacaggttaaaagcatctcaggtacagcgcaggatggtaatactgagcctttacctcctgattctggtgacaagaaccttgtaatacagaaatcaaaagatgaagcccaagataatggggctactataatgcctattataacagagtctttttcattatctgccgaagattatgaaatgaaaaagatcattgttaccgattctgatgatgatgatgatgatgtcattttttgctccgagattctgcccacaaaggagactttgccgagtaataacacagtggcacaggtccaatctaacccaggccctgttgctatttcagatgttgcacctagtgctagcaataactcgccccctttaacaaatatcacacctactcagaaacttcctactcctgtgaatcaggcaactttgagccaaacacaaggaagtgaaaaattgttggtatcttcagctccaacacatctgactcccaatattattttgttaaatcagacaccactttctacaccaccaaatgtcagttcttcacttccaaatcatatgccctcttcaatcaatttacttgtgcagaatcagcagacaccaaacagtgctattttaacaggaaacaaggccaa

SEQ ID NO: 20749 - DNA, 1574 bp, Homo sapiens
  MAP TO AC006130.1; EXPRESSED IN ADULT LIVER, SIGNAL = 1.7; EXPRESSED IN PLACENTA, SIGNAL = 1.7; EXPRESSED IN BRAIN, SIGNAL = 1.8; EXPRESSED IN HELA, SIGNAL = 2.8; EXPRESSED IN LUNG, SIGNAL = 1.6; EXPRESSED IN BONE MARROW, SIGNAL = 1.9; EXPRESSED IN FETAL LIVER, SIGNAL = 1.8; EST_HUMAN HIT: BE904252.1, EVALUE 0.00e+00; SWISSPROT HIT: Q05481, EVALUE 0.00e+00; NT HIT: gi14760087, EVALUE 3.00e-14
gtagaaatcatgggttggagagactctgtgaaagtaatgatcaatgtggagaagccctcagccagattccacatcttaatctgtacaagaaaattccacctggagtaaaacagtatgaatacaacacgtacggaaaagtcttcatgcatcgccgcacatccctcaagagtcccatcacagttcacactggacacaaaccatatcagtgccaggaatgtgggcaggcctacagttgtcgttcacacctaagaatgcatgtgagaacccacaatggagagagaccctatgtgtgtaaattatgtgggaaaacctttcctcgtacttcctccctcaatcggcatgtaaggattcacactgctgagaaaacctacgaatgtaagcaatgtgggaaagcctttattgacttctcaagtcttactagtcatctcagaagtcacaccggagagaagccatataagtgtaaggaatgtgggaaagctttcagttattcctcaacgtttcgaagacacacaataacacacactggcgagaagccatataaatgtaaggaatgtgcggaagcctttagttattcctcaacttttcgaagacatatgatttcacacactggagagaagccacataaatgtaaagaatgtggggaggccttcagttattcttcggcttttcgaagacacatgataacacacactggagagaaaccctacgaatgcaaacaatgtgggaaaaccttcatttatctccagtcctttcgaagacatgaaaggattcacactggagagaaaccctacgaatgcaaacagtgtgggaagaccttcatttatccccagtcctttcgaagacatgaaaggactcatggtggagagaaaccctatgaatgcaaccagtgcgggaaagcattcagtcacccctcctcctttcgaggacacatgagggtgcacactggagagaaaccctatgagtgcaagcaatgtgggaaaactttcaattggcccatatctttacgaaaacatatgagaacacatactagagagaaaccctatgaatgtaagcagtgtgggaaagccttcagcttgtctgcttgctttcgagaacatgtgagaatgcaccctgaagacaaatcctatgaatgcaagctatgtgggaaagctttctattgccacatatccttacaaaaacatatgagaagacataccgcagagaaactctataaatgcaagcagtgtgggaaagctttcagttggcctgaacttttgcaacaacatgtgagaacgcacactgtagagaagccctatgaatgtaaggaatgtgggaaggtcttcaaatggccatcatctttaccaatacatatgagactgcacactggagagaaaccttatcaatgtaagcattgtgggaaagcattcaattgttcctcatccttaaggcgacatgtgagaatacacactacagaaaaacagtataagtgtaatgtaggacatcctcctgcaaatgaattcatgtgcagtgcttcagaaaagtcacaccaggagagagatctgatcaaagttgtaaatatggtgttgcctttatga

SEQ ID NO: 20750 - DNA, 523 bp, Homo sapiens
  MAP TO AC009819.2; EXPRESSED IN ADULT LIVER, SIGNAL =   2; EXPRESSED IN PLACENTA, SIGNAL =   3; EXPRESSED IN LUNG, SIGNAL =   2; SWISSPROT HIT: Q13442, EVALUE 2.00e-43; EST_HUMAN HIT: BE746861.1, EVALUE 0.00e+00; NT HIT: gi14768105, EVALUE 0.00e+00
tttcctttcctcttccttcttccgggcagcctcctcccgctgtttccggatgatggccagcgggccaggtcagccttggcttgctctgtcttcccggccaagtgcattttcatgtaacgctcttttgccttctgcttctcaatctcttctcgttctctcctcgaaagctcctttggcccatccagatacagttgtgtgacctttttggttgtctgtgccacctggttggggttctcgatgttgaagagcccttcaacgcctttgcggttttgctggtagtcatcttcttcatcctcactctcatctgagtctagagatttcttctcctttttggggtcacctgcagccccatctccaccttctttttgctcctcttcttccctggccttctgcttctcagcctgcagctgtacgtcgatctcctcagggctcctatactgcctcgcccagcctttgtggcctccctttctccctcctttaggcatcgcggctccgcgcaacattactttaagccacagcattg

SEQ ID NO: 20751 - DNA, 636 bp, Homo sapiens
  MAP TO AL160176.3; EXPRESSED IN ADULT LIVER, SIGNAL = 4.7; EXPRESSED IN LUNG, SIGNAL = 5.7; EXPRESSED IN HEART, SIGNAL = 4.5; EXPRESSED IN PLACENTA, SIGNAL = 2.3; EST_HUMAN HIT: BI335554.1, EVALUE 0.00e+00; SWISSPROT HIT: P07155, EVALUE 1.00e-81; NT HIT: gi14786453, EVALUE 0.00e+00
ttattcatcatcatcatcttcttcatcttcttcatcttcctcctcctcatcctcttcatcttcctcatcttcctcctcttccttctttttcttgcttttttcagctttgacaactcccttttttgctgcctcaggctttcctttagcttgatatgcagcaatatccttttcgtatttttccttcagcttcgcagccttcttttcaccaggctgcttgtcatctgcagcagtgttattccacatctctcccagtttcttcgcaacatcaccaatggacaggccaggatgttctcctttgatttttgggtgatactcagagcagaacaggaagaaggccgaaggaggcctcttgggtgcattgggatccttgaacttcttttttgtctcccctttgggagggatataggttttcatttgtctttcataatgggtcttgtccgcctttgccatatcctcaaattttcctttctctttagcagacatggtcttccacctctctgagcacttgttagaaaactctgagaagttgactgaagcatctgagtgcttcttcttatgctcctcccgacaagtttgcacaaaaaatgcatatgatgacattttgcctctcggcttcttaggatctcctttgcccat

SEQ ID NO: 20752 - DNA, 575 bp, Homo sapiens
  MAP TO Z93242.1; EXPRESSED IN ADULT LIVER, SIGNAL = 1.8; EXPRESSED IN HELA, SIGNAL = 0.52; EXPRESSED IN FETAL LIVER, SIGNAL = 1.8; NT HIT: gi13629551, EVALUE 0.00e+00; EST_HUMAN HIT: AA770598.1, EVALUE 0.00e+00; SWISSPROT HIT: Q9Y5P3, EVALUE 1.00e-105
gaagatgcagccctagacctgtcagtggcagcccaccggaaatccgagcctccccctgagacactgtatgacagtggtgcatcagtggacagctcaggtcacacagtgatggagaaacttcccagtggcatggaaatttcttttgcccctgccacgtcccatgaggccccagccatgatggatagtcacatcagcagcagtgatgctgctaccgagatgctcagccagcccaaccaccccagcggcgaagtcaaggctgaaaataacattgagatggtgggcgagtcccaggcggccaaggtcattgtctctgtcgaagatgctgtgcctaccatattctgtggcaagatcaaaggcctctcaggggtgtccaccaaaaacttctccttcaaaagagaagactccgtgcttcagggctatgacatcaacagccaaggggaagagtccatgggaaatgcagagccccttaggaaacccatcaaaaaccggagcataaagttaaagaaagtgaactcccaggaaatacacatgctcccaatcaaaaaacaacggctggccaccttttttccaagaaa

SEQ ID NO: 20753 - DNA, 551 bp, Homo sapiens
  MAP TO AL133224.2; EXPRESSED IN FETAL LIVER, SIGNAL =   1; EXPRESSED IN HEART, SIGNAL = 1.4; EXPRESSED IN LUNG, SIGNAL = 1.1; EXPRESSED IN PLACENTA, SIGNAL = 2.1; EXPRESSED IN HELA, SIGNAL = 0.34; EXPRESSED IN ADULT LIVER, SIGNAL = 1.2; SWISSPROT HIT: P16088, EVALUE 2.00e-04; NT HIT: AL163246.2, EVALUE 1.00e-88; EST_HUMAN HIT: BF508546.1, EVALUE 2.00e-84
ccaggattcgtaagcctaggaatcaaagggtggaaatgaaagtggcaccactcaccatcacccctagtaacccactagcaaaatttttgcttcctgttcccacaacattatgttctgctggcctagaagtcttagctccagagggaggaatgctgccaccaggtgacagaacaatgattcagttaaactggaagttaagattggcacttcaccactttgggctcctcctacctctaagtcaacagacaaagaatggagttacagtattggctggggtgattgaccccaactatcaagatgaaatcagtctgctactccacagtggaggtaaggaagagtatgcacggaataccagagatgctttaggaagtctcttagtattaccatgccctatgattaaggtcaatgggaaactacagcaacccaatccagataggactgaaaatggcccagacccttcaggaatgaaggtttgggtcacttcaatagataaaaaaaaaaatcaagacctgctgaggtgcttgctgaaggcaaagggaatacagaatgga

SEQ ID NO: 20754 - DNA, 1121 bp, Homo sapiens
  MAP TO AL109824.21; EXPRESSED IN ADULT LIVER, SIGNAL = 1.4; EXPRESSED IN LUNG, SIGNAL = 1.8; EXPRESSED IN HEART, SIGNAL = 1.7; EXPRESSED IN BONE MARROW, SIGNAL = 1.6; EXPRESSED IN FETAL LIVER, SIGNAL = 1.4; EXPRESSED IN BRAIN, SIGNAL = 1.7; EXPRESSED IN HELA, SIGNAL = 2.6; EST_HUMAN HIT: AL118850.1, EVALUE 0.00e+00; SWISSPROT HIT: P18480, EVALUE 4.00e-07; NT HIT: gi14772743, EVALUE 0.00e+00
ctactttagatcttgctgactatttttcttcttccgagggggtttcttcttcttcggtttatttgcgttggtattattttgcttattgtttaccccaaaatggcctgcagatatgtcactctgcaataagttgaccaacaatgggctcgttagcgtgacatccttattgactgggaagcctggattttgaccacaggacatctgatttccattgggagctccactgaaaggtgcattgaaagacatcccatggcctgagaagtggtttcccgaggcactgtttccctgcatggcctgcacatgaggggggaccatgttggtttgttgaatgctaacatcaggcatcatctgagataaactgacatcgttatttgctgtagtagcaggatcaccatgctgctgggccatgtgtgggctgggccctggtggccgcaggacctgtccctgaatgcccataacctgagatggactgttgttcacaggcccttgctggggcagcatctgtcctgacatctgtcccgtaaactgcaccatatttccttgcatgtttggagttggtcccctcattatctgggctggtcccggcatgacattggactggttctgagtgttaaactgctgcttattcccctgcatttgattggtcataatctgctctatcattgggttctgttggagcaaaacctgcccctgaggccccatcatctggttatgtggcgccatcatttgtgggccctgctgggaaagcatctgcttgggtggggtcatcctttggggcgagggcccaagattttggctcggggggttcaccatcatctggccctgtggcataagctgggcccttgaaaggatcatagggttctgagggttcaaggttccttgttgctggaccatctggccctgggagggcacgatttgctggtgcatgcccatcagctgagatggtgggccctgctggggctggccttgcatgttgctgaggttcacttgaggaaccccagaagtaccagcctgctgattgttcatgttgccatgaattcccatgaggctgggctgcatcatatttggcggcccgtgggacacctgcatctggttttgaggaggaccagctccttgaccac

SEQ ID NO: 20755 - DNA, 538 bp, Homo sapiens
  MAP TO AC008151.1; EXPRESSED IN ADULT LIVER, SIGNAL =   2; EXPRESSED IN BRAIN, SIGNAL = 1.8; EXPRESSED IN HELA, SIGNAL = 0.54; EXPRESSED IN HEART, SIGNAL = 2.3; EXPRESSED IN BONE MARROW, SIGNAL = 2.2; EXPRESSED IN FETAL LIVER, SIGNAL = 1.9; EXPRESSED IN PLACENTA, SIGNAL = 2.3; EXPRESSED IN LUNG, SIGNAL = 1.8; SWISSPROT HIT: P39801, EVALUE 9.90e-01; NT HIT: U32507.1, EVALUE 3.30e-02
caacaattctatgatagaggtatttccaccaacgtcattttatagttatacaaattgaaaatcagaaaaggtagcccaaaattacaattatcctgagatggctccaataatagaattagaatcttaatccaggtcctcttagcctaaatcttatagtcttacaagagcctaagggctgtgaactgagtctgaatggagcctatccaaaagttgggtccactaaagaaaaacaggagggcaagtctgcagcctaggtctggagtaagtgttcctcatctcagaagactaaggaggattatctcctatggcttttggcccttcaggatgaagcgctttcctagggcatcttagggacccagcatcctgtgtctttccatgtctctggctctgagtcacacttgtcagctcattcccaatgatcagactgtttgtgccctgactcacttgggacaacagaaaaaaatagcaacttggctgacctgctttgttccccatcctttcatatcaatgacaaatgggacatttatggtaaaaccct

SEQ ID NO: 20756 - DNA, 595 bp, Homo sapiens
  MAP TO AC008272.1; EXPRESSED IN ADULT LIVER, SIGNAL = 2.9; EXPRESSED IN HELA, SIGNAL = 5.1; EXPRESSED IN PLACENTA, SIGNAL = 5.3; EXPRESSED IN BRAIN, SIGNAL = 3.6; EXPRESSED IN HEART, SIGNAL = 3.2; EXPRESSED IN FETAL LIVER, SIGNAL = 3.6; EXPRESSED IN LUNG, SIGNAL = 3.2; EST_HUMAN HIT: AA780058.1, EVALUE 0.00e+00; SWISSPROT HIT: P03341, EVALUE 6.00e-10; NT HIT: X57147.1, EVALUE 0.00e+00
gtgtgggtgatggcatgagctggtgcttgcccggggcaccctcagtcctgttgttggattatctggttgggggcttctgacccaggaaaacttcatcctctggggcagtgcaccttccagtgattgtctcagtgtagtggacatggacgagggggcagcttgtttctcattggacaatcttttttaacgtgtcctagtaagccacactgataacaagccctaccaggtgattggactgctccattttctgtcctctctgaatcaccaaggtttgtttatctcagggccaggactaaggctgcagcctttctctgacctcgcttttccttttgggcctgttcctcttggtccctattatagaacgacgaggtttgccaggtttaataatgcctctagattttgttcagggcccagggcttgcttttggagctttctcctgatagctgtggctgattgggtaataaatttatcttttagaatcaattgaccctcgagggattcaggcgagaggggagtatatattcttaagacctctcgtagctgctcgaggaaggcagaaggattttattcctttccctgtgttatggtggacatc

SEQ ID NO: 20757 - DNA, 2583 bp, Homo sapiens
  MAP TO AC025436.2; EXPRESSED IN PLACENTA, SIGNAL = 1.5; EXPRESSED IN ADULT LIVER, SIGNAL = 1.8; EXPRESSED IN BRAIN, SIGNAL = 2.8; EXPRESSED IN HELA, SIGNAL = 0.6; EXPRESSED IN BONE MARROW, SIGNAL = 1.8; EXPRESSED IN LUNG, SIGNAL = 2.4; EXPRESSED IN HEART, SIGNAL = 2.7; EXPRESSED IN FETAL LIVER, SIGNAL = 1.6; EST_HUMAN HIT: BG722685.1, EVALUE 0.00e+00; SWISSPROT HIT: Q9Y5E5, EVALUE 0.00e+00; NT HIT: gi15295801, EVALUE 0.00e+00
acgcaatcaaaaacacacggaagaagcgttacaagcagtgcaggtttaccaacggcttggggcagcgatatactaaacaaatttaatattaaaagcaactgtgtgacgattcctccaagcaagaaattggaattgaatgtctcaagtctcgttgcggttgctgaggggattggatatagggacctggactccaacatgaagaagctagggagaattcatccaaacaggcaagtgttggcctttattttgatggtgttcttgtctcaggttcgcctcgagcctattcgttattctgtgttggaggaaacagagagcggctcctttgtagcccatctggccaaggatctgggcctgggaattggggaactggcctcccggtcagcccgggtgctgtctgacgatgacaagcagcgtttgcagctggatcgtcagactggagatttgcttctgagggagaaactagaccgggaagagctctgtggtcctattgaaccgtgtgtactgcatttccaagtgttcctggaaatgccggtgcaattttttcaaggagaattattgatccaggacataaatgatcactctccaatattccctgaaagggaagtgctcttgaaaatactagaaaatagccagccgggtactctatttccgttgctaatagctgaggatttggatgtgggcagcaatggtcttcaaaaatacacaatcagccccaattctcattttcacattctcactcgaaatcatagtgagggcaagaaatacccagatttggtgcaggacaaaccactggatcgagaggagcagcctgagttcagcttaaccctcgtggcgctggatggtgggtcaccacctaggtctggcacggtcatggttcgaatcctgatcatggacatcaatgacaatgctcctgagtttgtgcacactccatatggggtgcaggtcctggaaaacagccccctagactctccaattgttagggtcttagctagagatatagatgctggaaacttcgggagtgtttcttatggcttattccaagcatcagatgaaattaaacaaactttctcaataaatgaagtcacgggagaaatactgttgaaaaaaaaattggatttcgaaaaaattaaatcttaccatgtagaaattgaggccacagatggaggaggcctttctggaaaaggcactgtagtcatagaggtggtggatgtgaatgacaatcccccagaacttatcatatcttcactcaccagctccatcccagaaaatgctcctgagacggtagtctctatcttccgaattcgagatagagattccggagaaaatggaaagatgatttgctctattccagataatctaccgtttattctaaaaccaactttgaagaatttttacaccctggtaacagagagaccactggaccgagagaccagcgctgagtacaacatcaccatcgccgtcactgacttggggacacccaggctgaaaacccagcagaacataaccgtgcaggtctccgacgtcaatgacaacgcccccgccttcacccaaacctcctacaccctgttcgtccgcgagaacaacagccccgccctgcacatcggcagtgtcagcgccacagacagagactcgggcaccaacgcccaggtcacctactcgctgctgccgccccaggacccgcacctgcccctcgcctccctggtctccatcaacgcagacaacggccacctgttcgccctcaggtcgctggactacgaggccctgcaggcgttcgagttccgcgtgggcgcctcagaccgcggttctccggctttgagcagcgaggcgctggtgcgcgtgctggtgctggacaccaacgacaactcgcccttcgtgctgtacccgctgcagaatggctccgcgccctgcaccgagctggtgccccgggcggccgagccgggctacctggtgaccaaggtggtggcggtggacggcgactcgggccagaacgcctggctgtcgtaccagctgctcaaggccacggagcctgggctgttcggcgtgtgggcgcacaatggcgaggtgcgcaccgccaggctgctgagcgagcgcgacgcagccaagcacaggctcgtggtgcttgtcaaggacaatggcgagcctccgcgctcggccaccgccacgctgcacgtgctcctggtggatggcttctcccagccctacctgcctctccctgaggcggccccggcccaggcccaggccgactctctcaccgtctacctggtggtggcgttggcctcggtgtcgtcgctcttcctcttctcggtgctcctgttcgtggcggtgcggctgtgcaggaggagcagggcggcctcggtgggtcgctgctcggtgcccgagggcccctttccagggcatctggtggacgtaagcggcaccgggaccctgtcccagagctaccagtacgaggtgtgtctgacaggagactctgggactggtgagttcaagttcctgaagccaatatttcctaatctcttggttcaggacaccgggagggaagttaaggaaaaccccaagttcagaaatagcttggtattcagttaa

SEQ ID NO: 20758 - DNA, 540 bp, Homo sapiens
  MAP TO AL022319.2; EXPRESSED IN ADULT LIVER, SIGNAL = 2.3; EXPRESSED IN HELA, SIGNAL = 1.3; EXPRESSED IN PLACENTA, SIGNAL =   4; EXPRESSED IN BRAIN, SIGNAL = 2.1; EXPRESSED IN HEART, SIGNAL = 2.4; EXPRESSED IN FETAL LIVER, SIGNAL = 2.8; SWISSPROT HIT: Q9Z0Y8, EVALUE 4.00e-06; NT HIT: gi14779037, EVALUE 1.00e-32; EST_HUMAN HIT: BE614767.1, EVALUE 4.80e-02
ctccgtgaactgagaggtggcagcctctcctctacgaaccttggccaaagcagcggctggccagtggccgggcagctctgggagcccctgagcctatggtatctcccgatgctttcaggaacgcatctttctcaccgtgtccaactacatcttcacggccatcttcgtgggcgagatgacattgaaggtagctcccggtttcacccgggacccctgctagccccagctcgggcccctggccctgggtcagcccctgcctcagcttgtcactcgcctgccatcggcttcatttcactcgtagccccatggcccacccctctgggtgccagccccggggctgggctcccgcgacccagagggggtcagccccgtccccattcacaggagtcacaaacccaccagacagatgggtgcagggaacactgagtgtgatggaggcacctgctagaggtgtggggcgcaggggaagcatcccgtctggggcgcttcccagggcgggcagttttcaattggatttgccagaggcaccgggaacctaac

SEQ ID NO: 20759 - DNA, 660 bp, Homo sapiens
  MAP TO AC022423.2; EXPRESSED IN HEART, SIGNAL = 2.1; EXPRESSED IN BONE MARROW, SIGNAL = 1.6; EXPRESSED IN LUNG, SIGNAL = 1.6; EXPRESSED IN FETAL LIVER, SIGNAL = 1.7; EXPRESSED IN HELA, SIGNAL = 0.54; EXPRESSED IN ADULT LIVER, SIGNAL = 1.7; EXPRESSED IN BRAIN, SIGNAL = 1.5; EST_HUMAN HIT: N71658.1, EVALUE 2.40e-01; SWISSPROT HIT: Q04870, EVALUE 8.00e-03; NT HIT: AF338650.1, EVALUE 0.00e+00
cttctccacagctccacctggctgaaagccagcgacagtcactttgacagaagtggcctggactctcgagtccagatcgcatggatcattggctctgccagtcaggttcactgtctgtgagccactgggcttggcctcagcctcggatctcttgcagtgggggcttaccctggccactggtctgtgcctggagcccaggccttcacttttctgctggggggaactggggctcccagtgttcgtcggactctgggtgtctgtacggactgtgtattccaatttgggtgcgctacttgatcctgacagttccttcttccaccagcttccagggctccccttgggggcctctgcagagtccgtgaggttggctgcataggacgcagcatccaccatgccctctgggatactctcctctaagtccactgagctaccaagaagaggtgccgagatggccttgctcaccagtgttttccggggtcgttcctcttggttgtggacgtccatgcccttggaagaggaaattgagacacgcctcgggtcatcctctgacagaggcctgatgggacccgggagggcccctgggagtgaaatgcagtccccttctctgtcaaactcttcctcatcactggcatcgttggcatcgtagcagcctaccttcct

SEQ ID NO: 20760 - DNA, 872 bp, Homo sapiens
  MAP TO AC006547.9; EXPRESSED IN PLACENTA, SIGNAL = 3.4; EXPRESSED IN ADULT LIVER, SIGNAL = 3.2; EXPRESSED IN BRAIN, SIGNAL = 3.6; EXPRESSED IN HELA, SIGNAL = 5.6; EXPRESSED IN LUNG, SIGNAL = 3.5; EXPRESSED IN HEART, SIGNAL = 3.7; EXPRESSED IN BONE MARROW, SIGNAL = 4.1; EXPRESSED IN FETAL LIVER, SIGNAL =   3; SWISSPROT HIT: Q9Z5I9, EVALUE 2.50e-02; NT HIT: gi14777147, EVALUE 0.00e+00; EST_HUMAN HIT: BF684093.1, EVALUE 0.00e+00
gttccaggccctgattccctgaccctgggggacgacagcatccgtagcctggactttgtgtccgagccgagcctggacctccctgactatgggccagggggcctgcatgcagcctacccgccatccccaccgctcagcgcctctgatgccttctcgggcgctttgcgctccctgagcctcaaggcctcgagccggcggggcggggatcatgtggccctgcagcccctgcgctctgagggggggccccccacgccccaccgtagcatttttgccccccatgcactgcccaaccgcaacggcagcctgtcctatgacagcctgctcaatcctggctcgcctggtggccacgcctgccctgcccacccagcagttggcgtggccggataccactcaccctacctgcatcctggggcaacgggcgacccgccacggcccctaccccgcagcttcagccccgtgctgggcccccgcccccgggagccctcgcctgtgcgctacgacaacctgtccaggaccatcatggcatccatccaggagcgcaaggacagggaggagcgtgagcgcctgctgcgctcccaggccgactcactcttcggcgactcaggcgtctatgacgctcccagctcctacagcctgcagcaggccagtgtgctgtccgagggcccccgaggtcccgcgctgcgctatggctccagagacgaccttgtggctgggcccggcttcggtggcgcccgcaaccctgccctgcagacgtcactgtcctcgctgtccagctccgtgagccgtgcaccgcggacgtcgtcctcctccctgcaggctgatcaggccagcagcaacgccccggggccccggcccagcagtggctcacacag

SEQ ID NO: 20761 - DNA, 743 bp, Homo sapiens
  MAP TO AC011467.3; EXPRESSED IN ADULT LIVER, SIGNAL = 1.9; EXPRESSED IN PLACENTA, SIGNAL = 1.9; EXPRESSED IN HELA, SIGNAL = 1.8; EXPRESSED IN LUNG, SIGNAL = 1.7; EXPRESSED IN HEART, SIGNAL = 1.9; EXPRESSED IN FETAL LIVER, SIGNAL = 1.6; NT HIT: gi9635487, EVALUE 0.00e+00; EST_HUMAN HIT: BF920079.1, EVALUE 0.00e+00; SWISSPROT HIT: P21414, EVALUE 3.00e-37
ggtctgagaaggccaccgcggtcatttcttcccttctgtcagacataattcctcggtttggccttcccacctctatacagtctgataatggaccagcctttactagccaaatcacccaagcagtttctcaggctcttggtattcagtggaaacttcatatcccttaccatcctcaatcttcaggaaaggtagaacggactaatggtcttttaaagacacacctcaccaagctcagcctccaacttaaaacagaatggacagtacttttacctcttgcccttctcagaatcagagcctttcctcgagaagctacagggtacagtccatttgaactttcatatggatgcactttcttgcttggccccaacctcatcccaggcaccagccctctaggtgactatcttccagtactccagcaggctagacaggaaattcaccaggctgctaatcttctcttgcctactccagatccccagctatatgaagacaacctagctgggcgatcagttcttgttaagaatctgacccctcaaactctacaacctcgatggaccggaccctacttagtcatctatagtaccctgactgccgtccgcctgcaggatcctccccactgggttcaccgttccagaataaagctgtgtccatcggacagccagcctaatccctcctcttcctcctggaagtcgcaagtactctcccccacttcccttaaactcactcgtatttctgaagaacagtaa

SEQ ID NO: 20762 - DNA, 839 bp, Homo sapiens
  MAP TO AC008762.5; EXPRESSED IN BONE MARROW, SIGNAL = 2.9; EXPRESSED IN LUNG, SIGNAL = 2.3; EXPRESSED IN HEART, SIGNAL = 2.4; EXPRESSED IN FETAL LIVER, SIGNAL = 1.7; EXPRESSED IN ADULT LIVER, SIGNAL = 1.9; EXPRESSED IN BRAIN, SIGNAL = 2.1; EXPRESSED IN HELA, SIGNAL = 4.1; NT HIT: gi16163638, EVALUE 0.00e+00; EST_HUMAN HIT: BG739765.1, EVALUE 0.00e+00; SWISSPROT HIT: P52272, EVALUE 1.00e-125
tcaccaccaccaagaagttccccaagagccacttacatttctcacaaatatctggcaggccttcctggccaccccaggagcatggcctccagctccaccaaaggaacctgcgaagcttcctccgaagttgccacgctccatctcgatggcacggtcaaagctggcaccgccaccgccacccatggccaggcccatgcgctcaatgccagcgcccagggccgggcccatggcggggcccatgcgctcgaggctgttggcacccatgcgctccaggcccatgcgctcgaggctgttggcgcccatgcgctccaggcccatccgctccagattgttggcgcccatgcgctccaggccggtggccatgcgatccatcacggggcccatgcgctccaggccagctcccatacctgcgggcaccatgcgctccatgctcaggcccatgcgctcgatggcagggcccatgcgctccacgccagagcccatgcgctcaatggtctggcccacacggtcgatgggagcggccatgcgctcaaggccgaagcccatgccggcacccatgcgctccacgccagagccaatgcgctccatggtctggcccatgcgctcaatgctggaggccatgtggtcgaggcccagcgggcccatgcgctcaatgccggagcccatgcgctccacggagcccatgcggtccatgaccaggcccatgcgctcgatctcggagcccacgcgatccatgccgtggcccaggcccgcgcccatgcgctccatgccggcacccccgaggcggtcaatgccaggacccatcctctcgatcccagggacgcttcctccacctccac

SEQ ID NO: 20763 - DNA, 994 bp, Homo sapiens
  MAP TO AC010620.3; EXPRESSED IN ADULT LIVER, SIGNAL = 2.4; EXPRESSED IN PLACENTA, SIGNAL = 3.1; EXPRESSED IN BRAIN, SIGNAL =   3; EXPRESSED IN HELA, SIGNAL = 4.1; EXPRESSED IN LUNG, SIGNAL = 2.6; EXPRESSED IN BONE MARROW, SIGNAL = 3.4; NT HIT: gi13650821, EVALUE 0.00e+00; EST_HUMAN HIT: BI093435.1, EVALUE 0.00e+00; SWISSPROT HIT: Q03923, EVALUE 0.00e+00
cacattcttcacatttgtaagatttctctccagtatgaattatgttatgtttagtaaggtttgaggatcggttgaaagctttgccacattcttcacatttgtagggtttctctccagtgtgaattctcttatgtgtagtaaggtttgaggatcggttaaaagctttgccacattcttcacatttgtagagtttctctccagtatgaattatcttatgtttggtaaggtttgaggattggttaaaagctttgccacattcttcacatttgtaaggtttctctccagtatgaattatcttatgtatagtaagttttgaggagtggttaaaggctttgccacattcttcacatttgtagggtttctctccagtatgaatcatcttatgtgtagtaaggtgtgaagacacattaaaggctttgccacattcttcacatttgtagggtttctctccagtatgaattcttttatgttttgtaagggttgaagaccagttaaagcctttgccacattgttcacatttgtaagatttctctccagaatgaattatcttatgtttagtaaggtatgagaatcggttaaaagctttgtcacattcttcacatttgtagggtttttctttaacatgaatgaacttatgtgtagtaagggctgaagggtggttaaaagctttaccacattcttcacatttgaagggcttctctccagtatgaattaccttatgtgtagtaaggtgtgaagaatggtagaaggctttgccacattcttcacatctgtagggtttctctccagtatgaatcatcttatgtgtagtaagggttgaggagtgcttaaaagctttgccacattcttcacatttgaagggtttctctccagtatgaactctcttgtgtctagtaagggttgagaaccgcttaaacactttgtcacattcttcacattggtaagaattctctctaatatgaattcttttatgttgatgtaggtgtaaaagcat

SEQ ID NO: 20764 - DNA, 888 bp, Homo sapiens
  MAP TO AL024498.12; EXPRESSED IN PLACENTA, SIGNAL = 2.2; EXPRESSED IN BONE MARROW, SIGNAL = 1.7; EXPRESSED IN ADULT LIVER, SIGNAL = 1.6; EXPRESSED IN BRAIN, SIGNAL = 1.5; EXPRESSED IN HELA, SIGNAL = 1.4; SWISSPROT HIT: P14248, EVALUE 1.00e-03; NT HIT: gi14757663, EVALUE 0.00e+00; EST_HUMAN HIT: W19939.1, EVALUE 1.00e-129
actgactgcggagcccagcccagacagacacacatcccaagtctctgcttcatctgtcctagaggaaactggctcgtggggaatagccacagtgggtctgatggcccggcaatctcctgcaattttcataggaggtggccctgaaggagaggctgccctggtgactgtcaccggaggaccccagggttctggatagacagacatcccagtatcttcaggagcatagttacagctcgaaaggctcttcacctctcgcacactgtcactgtatttcatagcagggggctggtaggcctggtaggacactttagtggtggtggtgatcacggtttgtagggcaggggcacctggtggtggagtcgtgaggtacctgcagggaagctctgggttataataagggcgagtggccatggcctgaaactgcccatggttagtcctttccacaaggctgggttttccaagagctggtttccagccatgctgtttgttggtgaaatcaaagcttctctcatagctgctgtatgaattgacattacattgtagtgtgttcagatgaacccagtctgtgtcattagggatactggtggaatccttataaagggtgggatatgggcttgaatttgtataaccagggtttgccaattcatagctgcaaggtggcctaggcaaatagattcttgggcttgagtatttctggaagggtggcattttgtctccttgaaaggtggctaggtcacaggtagctttgtaaacatcagactttgggaaggaagggcaaggctgccctggaatagggaagctggtttcagtaactatatcaaagtcttctggattttccaagggaggtatgttgctgaaatgaccactgctgtcttgattttcttctgc

SEQ ID NO: 20765 - DNA, 596 bp, Homo sapiens
  MAP TO AC009336.2; EXPRESSED IN BONE MARROW, SIGNAL = 2.7; EXPRESSED IN FETAL LIVER, SIGNAL = 2.8; EXPRESSED IN BRAIN, SIGNAL = 2.7; EXPRESSED IN ADULT LIVER, SIGNAL = 3.3; EXPRESSED IN LUNG, SIGNAL =   3; EXPRESSED IN HEART, SIGNAL = 2.1; SWISSPROT HIT: P23812, EVALUE 1.00e-75; NT HIT: gi12728336, EVALUE 0.00e+00; EST_HUMAN HIT: BG031716.1, EVALUE 7.00e-26
cgtcgggcagtgaaggtcgcaggcaagaggcaacgcccgccgcctgcactgtcatgttcaagttgagcgggcccttggtgtcgtccttgaagccaggggcgcagggagccccctggagcagggtcgtggagcccggcgtggcacgacccacaccagcgtagtcatacttggccgctttgagagcagccactgcaggagccaggctagactcgggggcgaaggacggccgggtacgaccgcgctcctctggcccagcggccgcttcgggcgcatagaacttagcctgctcttcgggtccgtctttggctgttgggggctgcaggccgagaggcccggagccagccaggtagggctgcgagaagccgccgaaggcagtggcgcccgcaggctgcgcgggggcgcaggaggcgggcgtggcggcccagggcagcgcgccgcgcgggtaggagatagggggaagcgcggccaactggccgccattcggcctcaggttggagaagtagaaagagtctggcgactgcagattcagaagcgagcccacatagcccgctctgtagagactgcgctcacacatctccaacaaagggcttcggctg

SEQ ID NO: 20766 - DNA, 474 bp, Homo sapiens
  MAP TO AD000092.1; EXPRESSED IN ADULT LIVER, SIGNAL =  14; EXPRESSED IN BRAIN, SIGNAL =   6; EXPRESSED IN HELA, SIGNAL =  16; EXPRESSED IN LUNG, SIGNAL =  11; EXPRESSED IN HEART, SIGNAL =  12; EST_HUMAN HIT: AW802656.1, EVALUE 1.00e-116; SWISSPROT HIT: P15253, EVALUE 1.00e-52; NT HIT: AY047586.1, EVALUE 1.00e-116
gtcccgacatctgtggccctggcaccaagaaggttcatgtcatcttcaactacaagggcaagaacgtgctgatcaacaaggacatccgttgcaaggtgtgcctgggggtggtggcaaatggctgtcatggggagattcagaggtcagcctcattggggggtggcccccgctcaccttcttccttcttcaggatgatgagtttacacacctgtacacactgattgtgcggccagacaacacctatgaggtgaagattgacaacagccaggtggagtccggctccttggaagacgattgggacttcctgccacccaagaagataaaggatcctgatgcttcaaaaccggaagactgggatgagcgggccaagatcgatgatcccacagactccaagcctgaggttggtgtttgggcaggggctctgctctccacattggagggtgtggaagacatctgggccaactctgatctctt

SEQ ID NO: 20767 - DNA, 595 bp, Homo sapiens
  MAP TO AC005151.1; EXPRESSED IN LUNG, SIGNAL = 1.1; EXPRESSED IN ADULT LIVER, SIGNAL = 1.2; EXPRESSED IN BRAIN, SIGNAL = 1.1; EXPRESSED IN HELA, SIGNAL = 1.6; NT HIT: gi7305360, EVALUE 4.00e-11; EST_HUMAN HIT: BF891147.1, EVALUE 5.40e-02; SWISSPROT HIT: P54197, EVALUE 1.00e-03
tgcaggtgtcagcacagccttgtgggatcccgaggaggtgggggacctggagatggctccaggggaagccacaggtctggaggagggacttgctgtcaaggagggctgtgggggtgtcgtcctaacaggcaaggagccatggcctcggactgtcacagccttggtcatgagcgggaagcgaggggcagggggcgaccgggaggagactgtgatgttagggcttcctgcaaagatcacagtcacccttgttgtctccatggcacctgacaccatgccaggtgtgggtgtctgcagtgcaacagggagggatgaggactctggtgtatgggggatggccaggaggctggcagtcactcccttgctggctggggactccgtggggccggcggggagttgagatgcagtgagctccagtggctgctgcagggtggtctgggtggggcctggagacaccactggctcctcagtggctgtcactggtgggttcagggctgtggtgagtggggcagctggggtgagggctggcctgtgggtgggggtcctggggctttcctgtgacagctgtggctcctcatcactgggagtgggcaaccct

SEQ ID NO: 20768 - DNA, 619 bp, Homo sapiens
  MAP TO AL023585.1; EXPRESSED IN ADULT LIVER, SIGNAL = 3.4; EXPRESSED IN LUNG, SIGNAL = 3.4; EXPRESSED IN HEART, SIGNAL = 2.8; EXPRESSED IN FETAL LIVER, SIGNAL =   2; EXPRESSED IN PLACENTA, SIGNAL = 2.7; EXPRESSED IN BRAIN, SIGNAL = 3.3; SWISSPROT HIT: O60810, EVALUE 3.00e-97; NT HIT: gi16167544, EVALUE 3.00e-06; EST_HUMAN HIT: BE409930.1, EVALUE 4.00e-06
gaggtggaaacttcaagtgctggatttacaggatgtctgtgagaacttctggatggtttggtctgaagctatggcccgtgggtccttcctcaatgccaagaggaacaaaacaccagtgcaggactgtccaaggatgagaggacagcagcccttgactgtgttcgtagaactttggctcaagaacaggactctggatgaatacctcacctacctccttctatgggtcaagcagaggaaagatttactacacctgtgctgtaagaagctgaaaattttgggaatgcccttccgcaatatcagaagcatcctgaaaatggtgaacctagactgtatccaggaggtggaagtgaattgcaagtgggtactgcccatcctgacacagtttaccccatacctgggccacatgaggaatcttcagaagctcgttctctcccacatggatgtctctcgctacgtttccccagagcagaagaaggagattgttaccaagttcaccactcagttcctcaagctgcactgcctccaaaagctttatatgaactctgtttctttcctcgaaggccacctggaccagctgctcaggtgagggagggtggtgagctttctctgcagaccacag

SEQ ID NO: 20769 - DNA, 669 bp, Homo sapiens
  MAP TO AC007324.38; EXPRESSED IN ADULT LIVER, SIGNAL = 3.3; EXPRESSED IN BRAIN, SIGNAL =   8; EXPRESSED IN PLACENTA, SIGNAL = 2.9; EXPRESSED IN HEART, SIGNAL = 7.6; EXPRESSED IN LUNG, SIGNAL = 3.8; EXPRESSED IN BONE MARROW, SIGNAL = 6.4; SWISSPROT HIT: Q9NY65, EVALUE 1.00e-121; NT HIT: gi16166973, EVALUE 0.00e+00; EST_HUMAN HIT: BG697371.1, EVALUE 0.00e+00
cttgaagcctgtgggacaccagtctacaaactggatggtcctcttggtcttgatggcagcaatagcgacattcacatccttgggcaccacgtcgccccggtagagcatgcagcaggccatgtacttgccatgtctcgggtcgcacttcaccatctggctgttgggctcaaagcaggagctggttatctcggccacagagagctgttcgtgataggctttctcggcagagatgatgggcgcgtaggtgaccagcgggaagtggatgcgggggtagggcaccaggttggtctggaactcagtgaggtccacattgagggccccgtcaaagcggagagaagcagtgattgaggacacaatctgactgatgaggcggttgaggttggtataggtagggcgctcaatgtcaaggttcctgcggcagatgtcatagatggcttcgttgtccaccatgaaagcacaatctgaatgttccagtgtggtgtgggtggtcaggatggagttgtagggctccaccactgcagtagagacctggggggctgggtagatggcaaactccagcttggatttcttgccataatccagggagaggcgttccatcagcagagaagtgaagccggagccagtgcccccaccaaaactgtggaaaatcaggaagccctgcaggccaga

SEQ ID NO: 20770 - DNA, 962 bp, Homo sapiens
  MAP TO AC011890.4; EXPRESSED IN ADULT LIVER, SIGNAL = 1.3; EXPRESSED IN HELA, SIGNAL =   1; EXPRESSED IN BONE MARROW, SIGNAL = 0.94; NT HIT: gi13632536, EVALUE 0.00e+00; EST_HUMAN HIT: AF150268.1, EVALUE 0.00e+00; SWISSPROT HIT: P14868, EVALUE 5.40e-01
tcagtcattgtcagaaccatttggaggtaagaaaaccaatgcatcattgaaaatatgcccaaatgccctaaggcggtataccccatacatcatcacatgcatctgatttggagtcagtccattaaaagtaacagccatatctgaacaacagccttctactacctggttggggtgataagtcattgcctctttaatagaaagcccaacagatttggtattaaatacatcttttccatcagcatcttctgcattttctgcaaatactccagcatatttcaggcaaactgctagctgtttatcttcagatatcttccaaatcatccctccctgttcaggacacttttctgggatattgagaaggctgttaagtcttttcattgattctacacttaagacaattcctccttccatacccacatattcaaggtctccagattttatagtgtggcctagatagaaaggctgtgatggatccttttttaacaaaaaatactttaggttttcaatgatagcaaacgtagtggggcgtgcaaggaagaaccagttgtattggtctctatacttatcaaaggcgtatttgtaagcttttctcatcattaaccacatgtcatttgtgtccatattaattgactcaaacactttaacattttcagaactgaagaactctgctttgtcacagtgtttggtccaagtctcctttactgcagcccaaagactcacatctttgggttttacaaggataatacagtatactcgaaagctcttactgagctccatgcgctcatcctctgaaattttcaagatatcttctttgttaggagcttgtaggtgatgatgctcatggtggtgcattctatttccatgaccaatcctaatgtgtcctagcatagtgatcaaagcacagaaaatgcttccaagcatcacacccttcaaaaaggagctgctttcagaaagcatttttc

SEQ ID NO: 20771 - DNA, 600 bp, Homo sapiens
  MAP TO U91327.1; EXPRESSED IN ADULT LIVER, SIGNAL = 1.2; EXPRESSED IN HELA, SIGNAL = 2.2; EXPRESSED IN BRAIN, SIGNAL = 1.4; EXPRESSED IN HEART, SIGNAL = 1.4; EXPRESSED IN LUNG, SIGNAL = 1.6; EXPRESSED IN FETAL LIVER, SIGNAL = 1.5; SWISSPROT HIT: O05979, EVALUE 6.70e-01; NT HIT: gi12737512, EVALUE 0.00e+00; EST_HUMAN HIT: BG765054.1, EVALUE 0.00e+00
acactacaggtgtgcaagaagagcggaaaaaccgcacaagtgtgcatgttccattggaggcaagggtttctaacgctgaaagcagcacaccaaaagaagaaccaagtagtattgaggacagggatcctcagattcttcttgaacctgaaggagtcaaatttgttttagggccaacccctgttcaaaagcagttaatggaaaaagagaaactggagcaacttggaagagatcaagttagtggaagtggagcaaataacacagaatgggacactggctatgacagtgatgaacgaagagatgcaccctctgttaacaaactggtgtatgaaaatataaatgggctatctatccctagtgcctcaggggtcaggagaggtcgtctgacatccaccagtacctcagatacccagaatatcaacaactcagctcagagaagaactgcattattaaactatgaaaatctaccatctttgcctcctgtttgggaagcccgcaagctaagtagggatgaagatgacaatttaggaccaaagaccccatctctaaatggctaccataataatctagatccaatgcataactatgtaaatacagagaatg

SEQ ID NO: 20772 - DNA, 498 bp, Homo sapiens
  MAP TO AL358293.1; EXPRESSED IN HEART, SIGNAL = 1.7; EXPRESSED IN LUNG, SIGNAL =   2; EXPRESSED IN ADULT LIVER, SIGNAL =   2; EXPRESSED IN BRAIN, SIGNAL =   2; EXPRESSED IN BONE MARROW, SIGNAL = 2.3
aaagaaagaaggaaagaaagatggaaggaaggaaggaaggaaggaaggaaggaaggaaggaaggaaggaaggaaggagaaagaaagaaagaaagaaagaaagaaagaaagaggaaggaaggaaggagaaaagaaaaggaaggatggaaggaaggaaggaaggaaggaaggaaagaaagaaagaaagaaagaaagaaagaaagaaagaaagaaagaaagagaaagaaagagaaagaaagaaagagaaaaggaaagaaaagaaaagaaggaaggaaggaaagaaagaaagaaacaaaaagaaagaaagagaaagaaaaggaaggaaggaaggaaagaaaggaaagaaagaaagaaagaaagaaagaaagaaagaaagaaagaaagaaagaaagaaagaaaagaaaagaaagagaaagaaagagaaaaagaaagagagacagaaagagaaaacatctacctcttttttgaagacaattcctctagctccatcatggagtga

SEQ ID NO: 20773 - DNA, 564 bp, Homo sapiens
  MAP TO AL133367.2; EXPRESSED IN ADULT LIVER, SIGNAL = 6.7; EXPRESSED IN FETAL LIVER, SIGNAL =   4; EXPRESSED IN HEART, SIGNAL =   7; EXPRESSED IN BONE MARROW, SIGNAL =  14; EXPRESSED IN LUNG, SIGNAL = 9.4; EXPRESSED IN HELA, SIGNAL =  11; SWISSPROT HIT: P52859, EVALUE 5.00e-58; NT HIT: gi15431287, EVALUE 0.00e+00; EST_HUMAN HIT: BG685765.1, EVALUE 0.00e+00
atggtggagttgcagatcagcttgaagaactatgacccccagaaggacaagcgcttctcgggcaccgtcaggcttaagtccactccctgtcccaagtgtgggtcctgggggaacagcagcactgtgacgagaccaaggccacggatatccccccaagtggacactgaggtgccaaaaaaactcaagaataagaatctggtcaagaagctggccaagaagtatgatgcatttttggcttcagagtctctgataaagcaaatcccacgaatcctcggcataggcctaacaaaggcagtaaagttcccttccctgctcacacacgatgaaaacacggtggccaaagtggatgaggcgaagtccacaatcaagtttcatatgaacatgttatgtttggctgtggctgttggccacgtgaagatgacagacgatgagcttgtgcataacattcacctggctgttaacttcttggtgtcactgctcgagaaaaaactggcagaatgtccgggccttatatatcaagagcaccacgggcaagccccagcgcctatattaaggcatatttga

SEQ ID NO: 20774 - DNA, 1294 bp, Homo sapiens
  MAP TO AD000671.1; EXPRESSED IN ADULT LIVER, SIGNAL = 1.8; EXPRESSED IN PLACENTA, SIGNAL = 1.7; EXPRESSED IN LUNG, SIGNAL = 1.8; EXPRESSED IN HEART, SIGNAL = 1.8; EXPRESSED IN BONE MARROW, SIGNAL = 2.2; EXPRESSED IN FETAL LIVER, SIGNAL = 1.9; EXPRESSED IN BRAIN, SIGNAL = 2.1; SWISSPROT HIT: Q9UMN6, EVALUE 1.00e-111; NT HIT: gi16177558, EVALUE 0.00e+00; EST_HUMAN HIT: BE260317.1, EVALUE 0.00e+00
gaagtccatcttcactgacccaccacatccccacagtgggagacccggacttcccagctccccccagacgttcccgtcgtcccagccctttggctcccaggccgcctccatcacggtgggcctcccctcctctaaaaacctcccctcagctcagggtgccccctcctacctcagtcgtcacagccctcacacctacctcaggggagctggctccccctggcccggccccatctccaccaccccctgaagacctgggcccagacttcgaggacatggaggtggtgtcaggactgagtgctgctgacctggacttcgcggccagcctgctggggactgagcccttccaggaagagattgtagccgctggggccatggggagcagccacgggggcccgggggacagctccgaggaggagtccagccccacctcccgctacatccacttccctgtgactgtggtgtccgcccctggtctggcccccagcgctacccctggagccccccgcattgaacagctggacggcgtggacgacggcactgacagtgaggctgaggcggtgcagcagcctcggggccagggcacgcctccttcggggccaggagtagtccgggcaggggtccttggggctgcaggggacagggcccggcctcctgaggacctgccatcggaaattgtggattttgtgttgaagaacctagggggtcctggggatggaggtgctggccctagagaggagtcactccccccggcgcctcccctggctaatggcagccagccctcccaaggcctgaccgccagcccagctgaccccacccgcacatttgcctggctcccaggggccccaggggtccgggtgttaagccttggccctgcccctgagccccccaaacccgccacatccaaaatcatacttgtcaacaagctggggcaagtatttgtgaagatggctggggagggtgaacctgtcccacccccagtgaagcagccacctttgccccccaccatttcccccacggctcccacctcctggactctgcccccaggccccctcctcggcgtgctgcccgtggtcggagtggtccgccctgccccgcccccgccaccccctcccctgacgctggtgctgagcagtgggccagccagcccgccccgccaggccatccgcgtcaagagggtgtccactttctccggccggtccccgccagcacctcccccatacaaagccccccggctggatgaagatggagaggcctcagaggatacccctcaggttccagggcttggcagtggcgg

SEQ ID NO: 20775 - DNA, 3201 bp, Homo sapiens
  MAP TO AC020582.3; EXPRESSED IN ADULT LIVER, SIGNAL = 1.1; EXPRESSED IN HELA, SIGNAL = 2.4; EXPRESSED IN BRAIN, SIGNAL = 1.2; EXPRESSED IN HEART, SIGNAL = 1.4; EXPRESSED IN BONE MARROW, SIGNAL = 1.5; EXPRESSED IN LUNG, SIGNAL = 1.3; NT HIT: gi14769392, EVALUE 0.00e+00; SWISSPROT HIT: P08640, EVALUE 2.00e-08
attcctcaagccagaaacagaacaacaaaactgagatgtatgataagaagacaacagaccaggctccaaacactgatgcttctcggagtcagggctatccaatgtcagcagcatatggaagaagatggagaagaaaaggagcaagtgtttcaggattgagtgggtgtgaattcaaaggaagaagccttaaacaatccagtgaagggtatggcctgggcgatagagctgggtcttcacctaccaataagactgccaggaatgtccctttctcgcacttgtccttagagaaggacaacatggagcagcctacaacttcacaaccagaaaccactacccctcaggggttgctttcagataaagatgacatgggaaggagaaatgctggcatagatttcggatccagaaaagcatcagcagcacagcccatacctgaaaacatggacaattccatggttagtgatccacaaccataccatgaagatgcagcttctggagctgagaagacagaagccagagcttctctctcactgatggtggaaagcctttctacaacccaagaggaggccattctctcagtagcagcagaggctcaggtgtttatgaatccttctcatatccagttagaagatcaagaagctttcagctttgatttacaaaaggcccaatccaaaatggagtcagcccaggatgttcaaactatctgcaaagaaaagccttctggaaatgttcaccagacctttacagcaagtgttttgggtatgacaagtactacagccaaaggagatgtttatgccaagactctgcctcccagaagcctttttcagtcctcaaggaagcctgatgctgaagaagtctcctcagattcagagaatattcctgaggagggggatggttctgaagaactggctcatggtcactcttcccagtccttggggaagtttgaagatgaacaagaagtcttctcagaatcaaaaagttttgttgaggacttgagcagctctgaggaggagctggacctcagatgcctctcccaggctttagaggagcctgaagatgcagaagtcttcacagaatcaagcagttatgttgaaaagtacaacacttctgaagattgcagcagctcagaggaagacctgcctctcagacaccctgctcaggccttgggaaagcccaaaaaccaacaagaagtctcctctgcttcaaataatactcctgaagagcagaatgattttatgcagcagctgccttccagatgcccttctcagcccattatgaatcctactgttcagcaacaagtccccaccagttcagtgggcacttctataaaacagagcgattccgtggagccaatccctccaagacaccctttccagccatgggtgaaccctaaagtggagcaagaagtttcctcatctccaaagagcatggctgttgaagagagcatttctatgaagcctctgcctcctaaacttctttgccagcccttgatgaatcctaaagttcaacaaaacatgttctcaggttcagaggacattgctgttgagagagtcatttctgtggagccactactccccagatattctcctcagtccttgacagatcctcaaatccggcaaatctcagaaagcacagctgttgaggaaggcacttatgtggaaccgctgcctcccagatgcctttcccagccctcggagaggcctaagttcctggactcaatgagtacttctgcagaatggagcagtcctgtggcaccaacaccttccaaatacacttccccgccatgggtgacccctaaatttgaggaactgtatcaactctctgcacatccagaaagcactactgttgaagaggacatttctaaggagcagctgcttcccagacatctttcccagttgactgtgggaaataaagtccagcaactgtcctcaaatttcgagcgggctgctattgaggcagacatttctgggagtccattgcctccccaatatgctacccagttcttaaagaggtctaaagttcaggaaatgacctcacgactagagaaaatggctgttgaaggcacttctaacaaatcaccgattcccaggcgtccgacccagtcattcgtgaaatttatggcacagcaaatcttttcagagagctctgctcttaagaggggcagtgatgtggcacctctgcctcccaatcttccttccaaatctttatcaaagcctgaagtcaagcaccaagttttctcagattcagggagtgctaatcctaagggaggcatttcttcaaagatgctacctatgaagcaccctttacagtccttggggaggcctgaagacccacagaaagttttctcttattcagagagagctcctgggaagtgcagcagttttaaagagcagctgtctcccaggcagctttcccaggccttgaggaaacctgagtatgagcaaaaagtctcccctgtttctgccagttctcctaaagagtggaggaattctaaaaagcagctgcctcccaaacattcttcccaagcctcagataggtctaaattccagccacagatgtcatcaaagggcccagtgaatgtacctgtaaagcagagcagcggtgagaagcacctgccttcaagtagtcctttccagcaacaggttcattcaagttctgtgaatgctgctgctaggcgatctgtttttgagagcaattctgacaattggttcctaggaagagatgaagcttttgcaatcaaaaccaagaaattcagccaaggttccaaaaaccccataaagagcattccagcccctgctaccaaacctgggaagttcaccattgctcctgtcaggcaaacatccacttctgggggcatttactctaagaaagaagatcttgagagtggtgatggtaataataaccagcatgcaaacctatccaatcaggatgatgttgaaaagctttttggagttcgactgaaaagagcccctccctcgcagaagtataagagtgagaaacaagataacttcacccagcttgcttcagtgccctcgggcccaatttcatcctctgtaggcaggggacataaaatcagaagcacttcccaggggctcctggatgctgcagggaacctcaccaaaatatcttacgttgcagataagcaacagagcaggcccaaatctgaaagcatggccaagaagcaacctgcttgcaagaccccag

SEQ ID NO: 20776 - DNA, 3264 bp, Homo sapiens
  MAP TO AP000303.1; EXPRESSED IN ADULT LIVER, SIGNAL = 1.7; EXPRESSED IN BONE MARROW, SIGNAL = 2.4; SWISSPROT HIT: P18583, EVALUE 0.00e+00; NT HIT: gi16166227, EVALUE 0.00e+00; EST_HUMAN HIT: AU118276.1, EVALUE 0.00e+00
cacctagaccctacaggatagcacccaggtcctatagaatagcacccaggccatataggttagcacctagacccctgatgttagcatctagacgttctatgatgatgtcctatgctgcagaacgttccatgatgtcatcttacgaacgctctatgatgtcttatgagcggtctatgatgtcccctatggctgaacgctctatgatgtcagcctacgagcgctctatgatgtcagcctacgagcgctctatgatgtcccctatggctgagcgctctatgatgtcagcttatgaacgctccatgatgtcagcttatgaacgctccatgatgtccccaatggctgatcgatctatgatgtccatgggtgctgaccggtctatgatgtcgtcatactctgctgctgaccggtctatgatgtcatcgtactctgcagctgaccgatctatgatgtcatcttatactgctgatcgttcaatgatgtctatggctgctgattcttacaccgattcttacactgacacatatacagaggcatatatggtgccacctttgcctcctgaagagcccccaacaatgccaccgttgccacctgaggagccaccaatgacaccaccattgcctcctgaggaaccaccagagggtccagcattgcccactgagcagtcagcattaacagctgaaaatacttggcctacagaggtgccatcatcaccatctgaagagtctgtatcgcagcctgagcctcctgtgagtcaaagtgagatttcggagccttcagcagtgcctactgattattcagtgtcagcatcagatccctcagttttagtatcagaggctgctgtgactgttccagaaccaccaccagagccagaatcttcaattacgttaacacctgtagagtctgcagtagtagcagaagaacatgaagttgttccagagagaccagtgacttgtatggtatctgaaactcccgccatgtcagctgaaccaactgtgttagcatcagagcctcctgttatgtcagagacagcagaaacatttgattccatgagagcctcaggacatgttgcctcagaagtatctacatccttgttggttccagcagtaactactccagtgctggcagagagcattctggagccgccagccatggctgccccagagtcttcagctatggctgtcctggagtcttcggctgtgaccgtcctggagtcttcgactgtgactgtcctggagtcttcgactgtaactgtcctggagccttcggttgtgactgtcccggagcctcctgttgtggctgagccagactatgttaccattcctgtgccagttgtttctgcgctggagccttctgtgcctgttctggaaccagcggtgtcagtccttcaaccttctatgattgtttcagaaccatctgtttctgtccaggaatcgactgtgacagtttcagagcctgctgtcacagtctcagagcagactcaagtaataccaactgaggtggctatagagtccacaccaatgatactggaatctagtatcatgtcatcacatgttatgaaaggaattaatctatcctctggtgatcaaaatcttgctccagagattggcatgcaggagattgcattgcattcaggtgaagaaccacatgctgaggaacacctgaaaggtgacttttacgaaagtgaacatggtataaatatagaccttaatataaataatcatttaattgctaaagagatggaacataatacagtgtgtgctgctggtactagtcctgttggggaaattggtgaagagaaaattttgcccaccagtgagactaaacagcgcacagtattggatacctaccctggtgttagtgaagctgatgcaggagaaactctatcttctactggtccttttgctctggaacctgatgcaacaggaactagtaagggtattgaatttaccacagcatctactctcagtttagttaataaatatgatgttgatttatctttaactactcaagatactgaacatgacatggtaatttccaccagtcctagtggtggtagtgaagctgacattgaagggcctttgcctgctaaagatattcatcttgatttaccatctaataataaccttgttagtaaggatacagaagaaccattacctgtaaaagagagtgaccagacattagcagctctgctcagccctaaagaaagtagtggaggagaaaaagaagtacctccccctcctaaagagacactgcctgattcaggattttctgccaatattgaggatattaatgaagcagatttagtgagaccgttacttcctaaggacatggaacgtcttacaagccttagagctggcattgaaggacctttacttgcaagtgatgttggacgtgacagatctgctgccagcccggttgtaagtagtatgccagaaagagcttcagagtcttcttcagaggaaaaagatgattatgaaatttttgtaaaagttaaggacactcacgaaaaaagcaagaaaaataagaaccgtgataagggggagaaagagaagaaaagagactcttcattaagatctcgaagtaagcgttccaaatcttctgaacacaaatcacgcaagcgtaccagtgaatctcgttctagggcaagaaagagatcatctaagtccaagtctcatcgctctcagacacgttcacggtcacgttcaagacgcaggaggagaagcagcagatcaagatcaaagtctagaggaagaagatctgtatcaaaagagaagcgcaaaagatctccaaagcacagatccaagtctagggaaagaaaaagaaaaagatcaagctccagggataaccgaaagacagttagagctcgaagtcgaaccccaagtcgtcggagtcggagtcatactccaagtcgtcgacgaaggtctagatctgtgggtagaagaaggagctttagcatttccccaagccgccgcagccgcacccccagccgccgcagccgcacccccagccgccgcagccgcacccccagccgccgcagccgcacccccagccgccggagccgcacccctagccgtcggagccgcaccccaagccgccggagaagatcaaggtctgtggtaagaagacgaagcttcagtatctcaccagtcagattaaggcgatcaagaacacccttaagaagaaggtttagcagatctcccatccgtcgtaaaagatccaggtcttctgaacgaggcagatcacccaaacgtctgacagatttgg

SEQ ID NO: 20777 - DNA, 1324 bp, Homo sapiens
  MAP TO AC000380.1; EXPRESSED IN PLACENTA, SIGNAL =  22; EXPRESSED IN LUNG, SIGNAL =  12; EXPRESSED IN HELA, SIGNAL =  19; EXPRESSED IN BRAIN, SIGNAL =  15; EXPRESSED IN ADULT LIVER, SIGNAL =  17; EXPRESSED IN FETAL LIVER, SIGNAL =  12; EXPRESSED IN BONE MARROW, SIGNAL =  11; EXPRESSED IN HEART, SIGNAL =  27; SWISSPROT HIT: P51805, EVALUE 2.00e-09; NT HIT: gi14738001, EVALUE 0.00e+00; EST_HUMAN HIT: BI757553.1, EVALUE 5.00e-04
gcccccgccgccgccgccgccgccgccgccgccaccgcccgggtgtacctggatgttgagcttgcgctcgcaggccggtcccgtgccctgcaccacgctgtcgagcaccgccaccacgtcgggcgccggttccacgaagcaggcggtgcgcgcagctcggatggcggctcgcacgtcggcgaagcggaaggcgcagagtgcggccggagcagcgcgggccgcgggggacccctggggccgctcgaagacagcaaagagccgctcccgggctgggaagaccgacaccaggcggctgtagaggtcgccgcggcccgcgccgcccgcgcactgcaagcccaactggatgtaggactcggtgagcttcttggcgtcgccgccggcgccgtggggcaggcagatgcgcgccagcaggctccgcgcctggctctccttgtcgcccgcgcgcgcctcgctgttgagcgccaggtacgcgtaggactgtgcacccggcggcgggtcggacgggtgcaggaaggcgctcacgaagcccagcttgtgctgctccttggcgccctgcttgatcttgaggatgttgtcgtcggaggggttgaggtcgaaggtgaagagcttggccaggtcgccgcgcgtgtccagggagcggatggcgatctcgggcgtgttctcgaagcggtggtcctccaggctgcggttgcgcgggaagaaggagctgccgtaaccggtgtacgtggcgcccacgagcaggcggctgccccccgcgcccgcggcgggaggcagaactagccccacggtggacgcgttcgggtggttggccgccacgttcagcatgctggggaacaccgtgacgggctcggcgggcggcgcggcgggcgggaagcgcacggccacggccgagatgttgccccggcgccgcagctggcagaagccctggtagatggacccgcacacgactaccaggccctggccggggtccagctgcaggatcttgttgtagttgtccgtgaggcgccgcgggtgctcgcacgaggcctgcggcagctgcggagcgtgacacagcgggctgtcgggcaccgggcccacggccgcctcggcctccaggctcaggttggcgcccgacagctgatagaggcggttgacggccgccaggtacacggtccccgccgcgccgtccagggcgaagttgttggtgggcgtgggcgaggggaaccgacgctggatctccagggcgccggcccgcgccgcccccaggagcagcagcaacagcagcggcaccgggcaccgcggcggcgtctggaacggcggggggctggcagcggcgccgggccgc

SEQ ID NO: 20778 - DNA, 519 bp, Homo sapiens
  MAP TO AL133367.2; EXPRESSED IN BONE MARROW, SIGNAL = 1.7; EXPRESSED IN HELA, SIGNAL = 1.1; EXPRESSED IN ADULT LIVER, SIGNAL = 1.2; EXPRESSED IN PLACENTA, SIGNAL = 1.6; NT HIT: gi14754012, EVALUE 0.00e+00; EST_HUMAN HIT: BI819202.1, EVALUE 0.00e+00
atcccgggcctggcccgggccgtcccccggcgggtcccggggctcattctctccctgcctcggcggccgaggcgaggagaccgggagggcggcagtggcggagccgagcctgcgggcggcgggctgcgcttcggcccgccggcgtccccttgcctcagggcgccccgcgatcctgggccccctcacctccttctccactccctcccgtcgcaccgcgaatttcagctcgcgggcctccacacagcgccgccggcggcgcctgaaaacgaggaggcggaggaggatgtgaaggaagtggagcgcaagacaggccgccgcgggctgtgggcgccgaccatggagcgggctgcggaggaggcgcctgcgcccgactgcttctccctctctagcgagcttgctgcctcagcctccgccctgctggccgccgctgccgccgccgcaccccggcacctcagagcctcacggagccaagatggccgcccctcggcttcctctgctgcctccggctgccggaagtga

SEQ ID NO: 20779 - DNA, 563 bp, Homo sapiens
  MAP TO AL109798.8; EXPRESSED IN PLACENTA, SIGNAL = 2.2; EXPRESSED IN HEART, SIGNAL = 2.6; EXPRESSED IN LUNG, SIGNAL = 2.5; EXPRESSED IN BONE MARROW, SIGNAL = 2.7; EXPRESSED IN FETAL LIVER, SIGNAL = 2.2; EXPRESSED IN BRAIN, SIGNAL = 2.8; EXPRESSED IN HELA, SIGNAL = 4.6; EXPRESSED IN ADULT LIVER, SIGNAL =   2; SWISSPROT HIT: O76039, EVALUE 1.00e-104; NT HIT: gi15308604, EVALUE 0.00e+00; EST_HUMAN HIT: BE831003.1, EVALUE 0.00e+00
aaaccaagccggcaaaagtactgctttgcagtctcaccacagatctaacagcaaggacatccagaacctgagtgtaggcctgccccgggctgacgaaggtctccctgccaatgaaagcttcctaaatggaaaccttgctggagctagtcttagtccactgcacaccaaaacctaccaagcaagcagccagcctgggtctaccagcaaagatctcaccaacaacaacataccacaccttcttagcccaaaagaagccaagtcaaaaacagagtttgattttaatattgacccaaagccttcagaaggcccagggacaaagtacctcaagtcaaacagcagatctcagcagaaccgccactcattcatggaaagctctcaaagcaaagctgggacactgcagcccaatgaaaagcagagtcggcatagctatattgacacaattccccagtcctctaggagtccctcctacaggaccaaggccaaaagccatggggcactgagtgactccaagtctgtgagcaacctttctgaagccagggcccaaattgcggagcccagtacca

SEQ ID NO: 20780 - DNA, 636 bp, Homo sapiens
  MAP TO AC004500.1; EXPRESSED IN ADULT LIVER, SIGNAL = 1.8; EXPRESSED IN BRAIN, SIGNAL = 1.9; EXPRESSED IN HELA, SIGNAL = 1.9; EXPRESSED IN LUNG, SIGNAL = 1.9; EXPRESSED IN FETAL LIVER, SIGNAL = 1.6; SWISSPROT HIT: P51825, EVALUE 4.00e-13; NT HIT: gi16158288, EVALUE 0.00e+00; EST_HUMAN HIT: AW207581.1, EVALUE 0.00e+00
cctgaacccccgccaacaaacaaatggcaacttgataattggctgaataaagtgaacccacataaagtgtcacccgcctcttcagtggacagtaacatcccatcatctcaaggctacaaaaaggaaggccgagagcagggcactgggaatagctacactgatacaagtggacctaaagaaacgagttccgctactccgggacgagactccaaaaccatccaaaagggatcagaaagtgggcgtgggaggcagaaatctcctgcacagagtgacagcacaacacagagaagaactgtaggcaaaaaacaacccaaaaaggctgagaaggcagctgctgaagagcctcgtggaggcctgaagatagaaagtgaaacccctgtagacttggctagcagcatgccctccagcagacacaaagcagccaccaaaggctcaaggaaacccaatataaagaaggagtctaagtcttcccctcgacctacagcagagaaaaagaaatataagtcaacaagtaaatcttcccagaaatcaagggaaatcatagaaacagatacctcatcctcagattcagatgaaagtgagagccttcctccttcctcacaaactcctaagtaccccgagagcaataggactcct

SEQ ID NO: 20781 - DNA, 820 bp, Homo sapiens
  MAP TO Z95624.1; EXPRESSED IN PLACENTA, SIGNAL = 1.7; EXPRESSED IN ADULT LIVER, SIGNAL = 1.5; EXPRESSED IN HEART, SIGNAL = 2.4; EXPRESSED IN BONE MARROW, SIGNAL = 1.9; EXPRESSED IN FETAL LIVER, SIGNAL =   1; EXPRESSED IN LUNG, SIGNAL = 1.6; SWISSPROT HIT: Q39433, EVALUE 3.00e-36; NT HIT: gi5803162, EVALUE 0.00e+00; EST_HUMAN HIT: AL532978.1, EVALUE 0.00e+00
ttaagaaattttgcagctgtttctggtgcagtttttgggtgggctctggggtgggcagacgatcttcactttgcagaggctgctccttttgtgagtggagctggtggtgagggagtaggagaggcctcgcatcatcctggcattcaggcccttagccatggagaaggacttgaggtggcttcttaaggcaatggggagcgggagcttgtccaccagatgcacaggtgtgcaggacacgatggtgcggcagcagaggtcttgcaagctcagtaccttgctcggcctcccgagccagttcaacctgtgccgcagcagcactatcctggccagctccgtgaaagactctatgatgttgaaattgcacagagggctgacctcaaagaaggtcacgcccaggcgctcggcgtaggcctgggcctgctccctgggcacctgcctcttgaatgccagatgtaggcgattccccaccaggattttagggacaccaggggcatgttcctcaatcttcttaatccatcgatccataccctcgaaagaccagcggtttgcaatgtcgtagaccaggatcactccttgtgcaccacgagagtaggagcggaatatggtacaaaatcttccctgccccgacgtatcccagagcttcagcttcacccgctggccgtccagcaggatggtggtcgtcttgtagtcgattccccccaggtgactgtacggggactcggccgtgccgtcctgcaggctctccaggatctcactcttgcctacgtccctgtcgcccaccagcaggaacttgagcaggaagtcgtaggcctggtcgggg

SEQ ID NO: 20782 - DNA, 728 bp, Homo sapiens
  MAP TO AL049839.3; EXPRESSED IN ADULT LIVER, SIGNAL =   2; EXPRESSED IN HELA, SIGNAL = 0.58; NT HIT: L28101.1, EVALUE 0.00e+00; EST_HUMAN HIT: BG824652.1, EVALUE 0.00e+00; SWISSPROT HIT: P29622, EVALUE 1.00e-109
atgcatcttatcgactacctgctcctcctgctggttggactactggccctttctcatggccagctgcacgttgagcatgatggtgagagttgcagtaacagctcccaccagcagattctggagacaggtgagggctcccccagcctcaagatagcccctgccaatgctgactttgccttccgcttctactacctgatcgcttcggagaccccggggaagaacatctttttctccccgctgagcatctcggcggcctacgccatgctttccctgggggcctgctcacacagccgcagccagatccttgagggcctgggcttcaacctcaccgagctgtctgagtccgatgtccataggggcttccagcacctcctgcacactctcaacctccccggccatgggctggaaacacgcgtgggcagtgctctgttcctgagccacaacctgaagttccttgcaaaattcctgaatgacaccatggccgtctatgaggctaaactcttccacaccaacttctacgacactgtgggcacaatccagcttatcaacgaccacgtcaagaaggaaactcgagggaagattgtggatttggtcagtgagctcaagaaggacgtcttgatggtgctggtgaattacatttacttcaaaggtgagagtcagatcattggtatatgctaaatccacaccaccgcctccaacccactaatttgttgactggttaaatatat

SEQ ID NO: 20783 - DNA, 668 bp, Homo sapiens
  MAP TO AC011330.4; EXPRESSED IN BRAIN, SIGNAL = 3.1; EXPRESSED IN ADULT LIVER, SIGNAL = 3.1; EXPRESSED IN PLACENTA, SIGNAL = 2.1; EXPRESSED IN LUNG, SIGNAL = 2.6; EXPRESSED IN HEART, SIGNAL = 2.6; EXPRESSED IN BONE MARROW, SIGNAL = 2.6; EXPRESSED IN FETAL LIVER, SIGNAL = 2.4; EST_HUMAN HIT: BE867530.1, EVALUE 0.00e+00; NT HIT: gi16160681, EVALUE 0.00e+00; SWISSPROT HIT: P35324, EVALUE 3.00e-04
tcttcccctactacagtagatggtaactcccaatttggcttcagtgatcaaccctccctaaattcacacgtggctgaagaacatcaaggccttgggctgctccaggagacccctgggagtggagcacaagagctctccatagaaggggagcaagagctttttgaaccaaatcagtccccacaggtgccacctatggaaaccagccagccatacgaggaggtcagccagccatgtcaggaggtccctgacatcagccagccatgccaggacatttctgaggcgctcagccagccatgtcagaaggtccctgacatcagccagcaatgccaggagaaccatgacaatggtaaccacacatgccaggaggtccctcacatcagccagccatgccagaagtccagccaactgtgccagaaagtctctgaggaagtttgccagctatgtctggagaactccgaggaggtcagccagccatgccagggggtctctgtggaggttggcaagctggtccataagttccatgtaggggttggtagcttggtccaggaaacccttgtagaagttggcagcccagctgaagagatccctgaggaggtcatccagccataccaggagttctctgtggaggttggcaggctggccccaagagacttctgcgatcaatctgt

SEQ ID NO: 20784 - DNA, 841 bp, Homo sapiens
  MAP TO AL020993.1; EXPRESSED IN PLACENTA, SIGNAL = 4.1; EXPRESSED IN ADULT LIVER, SIGNAL = 2.3; EXPRESSED IN HELA, SIGNAL = 1.2; EXPRESSED IN HEART, SIGNAL = 3.1; EXPRESSED IN LUNG, SIGNAL = 2.4; EXPRESSED IN FETAL LIVER, SIGNAL = 3.6; SWISSPROT HIT: P24708, EVALUE 2.00e-11; NT HIT: U50323.1, EVALUE 2.10e-01; EST_HUMAN HIT: BF748611.1, EVALUE 0.00e+00
agcgaccccaccacactgcccccacccaggctactctagaccacagggaggtcagcccaggaagctagagcagctggattgccaaggctactctagaccacagggaggtcagcccaggaagctagagtggctggattgccaaggctactctagaccacagggaggccagcccaggaagctagagcggctggattgccaaggctactctagaccacagggaggtcagcccaggaagctagagcggctggattgccaaggctactctagaccacagggaggtcagcccaggaagctagagcggctggattgccaaggctactctagaccacagggaggtcagcccaggaagctagagcggctggattgccaaggctactctagaccacagggaggccagcccaggaagctagagcggctggattgccaaggctactctagaccacagggaggtcagcccaggaagctagagcggctggattgccaaggctactctagaccacagggaggccagcccaggaagctagagcggctggattgccaaggctactctagaccacagggaggtcagcccaggaagctagagcggctggattgccaaggctactctagaccacagggaggccagcccaggaagctagagcggctggactgccaaggctactctagaccacagggaagtcagcccaggaagctagagcggctggattgccaaccaggaaatgcagggagagacgaagagacggcagaggcctgttctggcgtgtgtctttaatgccaaaaccctcctgccccctagctgcagctgatgagaagttttcaaatggaggttctagaatcccca

SEQ ID NO: 20785 - DNA, 834 bp, Homo sapiens
  MAP TO AL137846.1; EXPRESSED IN HEART, SIGNAL = 1.5; EXPRESSED IN ADULT LIVER, SIGNAL = 1.5; EXPRESSED IN LUNG, SIGNAL = 1.2; EXPRESSED IN BONE MARROW, SIGNAL = 1.1; SWISSPROT HIT: Q13285, EVALUE 2.00e-42; NT HIT: D88155.1, EVALUE 0.00e+00; EST_HUMAN HIT: BF969543.1, EVALUE 0.00e+00
gagaggaggaagggatgacctctgatccaagggacgtcgaggcccaccagggaatcccgaacctcctccccggacctgcaggcttcagactccaggagagagagctgggagcagggagggggcggggcgggtggttaacagccacctccttggggcactccaagcagcaggcaagtgccagtggccactccacctccgccaggccctgcccagcctcacccaccttcccaaacacacagtgtcagaactcaggggcagcggcctctgggacggggctggggctcctcggtgggcatcagaaaatgaaccatgcggagccagcggtgtggctgcggccccgcccaggccccgcccccagtcccgcccccagtcccggccccgcccccggcccaggctcaagtctgcttggcttgcagcatttcgatgagcaggttgttgcggggcatctcgttgcccaggtgcttgtggtacaggtactccttggcctgcatgctcagggcccgcacctccaccaggcacagcagcagctgctggaatttgtccccgcagtgcgggtagtggcacagggtgtagtcaagcagggcggcgttggccttctcctgagcgtctttcaccaggatgtggttattcaggaacttcaaatctgcaaagggaggttctcggtcaccatcgcgtcaccatccatgcccatcagggctgggccaacaccgtcaccagcatcaccaataccaccttccctatgaccatcaaagacatgggcattgctgccaccaaccatgcaacatggtctccccgttggcaccgtgtcgccatcaccattgctgtcaccctggt

SEQ ID NO: 20786 - DNA, 895 bp, Homo sapiens
  MAP TO AC003682.1; EXPRESSED IN BONE MARROW, SIGNAL = 2.3; EXPRESSED IN FETAL LIVER, SIGNAL =   2; EXPRESSED IN HELA, SIGNAL = 3.4; EXPRESSED IN HEART, SIGNAL = 1.9; EXPRESSED IN LUNG, SIGNAL = 1.7; EXPRESSED IN BRAIN, SIGNAL = 1.8; EXPRESSED IN PLACENTA, SIGNAL = 2.3; EXPRESSED IN ADULT LIVER, SIGNAL = 1.6; SWISSPROT HIT: P52741, EVALUE 7.00e-81; NT HIT: gi14766470, EVALUE 0.00e+00; EST_HUMAN HIT: BE743780.1, EVALUE 0.00e+00
ctcataaggccttgctgtagtgtgaattctctggtgtacaacaaggctgaagctttgtctgaataatttcccacattcaccacactcatatggcttttctcctgtgtgagttctctggtgtcgaacaagagtggatttggacccaaaggcttttccacattcatcacactcataaggcctttctccagtgtgaattctgcaatgttcaataaggttggaactttggctaaaagatttcccacattcaccacactcgtaaggcctttctccagtgtgaactctgtgatgtttaatgagggtggctctttggctaaatgatttcccacactgaccacacacataaggcctttctccagtgtggattctccgatgatcattcagatgagaggtttggctaaaagatttcccacattcactgcactcataaggcctttctccagggtggactctttgcagctgaacaagggagcactcacagcagcaggctttcccacatttgctagattcataaagcctttttccagtgcagactctagggtgaaaaaaagtgtgtttgtggctggactctctcctgcattgactccacttgtaatgacttattccaacatgaaaggcctcctcacatttgctgattttgtttggcttctcatagttagcaatagcttgcggctgaagaatgcccaatggggctaggaagtccttcccaacctcactgctggtgaaaggcattcctgactcatggaacaggcagcactgcacaaatgaggccttgtccatgtcactttccaagggtttctctgcactatgatgcttctggtcctggtgaaagaccgcacatgccccagtcaagtatagttcctgcccaggcaaatcggtcaggtgcaaaatgtcggtc

SEQ ID NO: 20787 - DNA, 1908 bp, Homo sapiens
  MAP TO AC022150.5; EXPRESSED IN LUNG, SIGNAL =   2; EXPRESSED IN HEART, SIGNAL = 1.8; EXPRESSED IN PLACENTA, SIGNAL =   3; EXPRESSED IN ADULT LIVER, SIGNAL = 1.7; EXPRESSED IN BONE MARROW, SIGNAL = 2.4; EXPRESSED IN FETAL LIVER, SIGNAL = 1.8; EST_HUMAN HIT: BI260133.1, EVALUE 0.00e+00; SWISSPROT HIT: Q05481, EVALUE 0.00e+00; NT HIT: gi12741314, EVALUE 1.00e-116
ctaaggtttctctccagtatgaattctatgatgacgtgaaaggtgtgattgttgattaaaagccttcccacattcattacacttgtaaggtttctctgcagtgtgaattctggtatgtcttgacaggagtgaattacgcacgaaagccttgtcacaaattgtacatttgtaagatttctctccagtatgaagtctacgatggtatataagggatgagcagtgacggaaggtattgccacactcattacacttgtaaggtttctcaccactatgaagtctacgatggcaatgaagggatgacctgcgactgaaggtcttgctgcactcattacacttgtaaggtttctcaccactatgaactctatgatggcatacaaggtatgacctgtgactgaaggtcttgctgcactcattacacttgtaaggtttctctccactatgaattctagtatgttttgccagataggaatgacacgcaaaagccttgtcacaaaccttacatttgtatggtttctctccagtatgacctatcttatgtgtctcaaggcttgatttacgactgaaaaccttttcacattcatcacatttgtaaggttgctccccagtatgaattgacttatgaattaaaagatctgaattttgaccaaaggtcttcccacattcattacacttgtaaggtttttctccacagtcaattctagtatgttttgccagttgtgaactccacacaaaagccttgtcacaaaccttacatttgtaagatttctctccaccatgaagtctatgatggcatacaagggatgacttgtgactgaaggtcttgccacactcattacatttataagttttctttgcagtatgaattcttctatgtcgagccagctgtgaatgccacgtgaaagctgtgtcacaaaccttacatctgtatggtttctctccagtatgaattctcttatgtgtctcaatggttgatttccgactgaaaactttgtcacattcttcacatttgtaaggtttctctccagtatgaattctatgatgtgaaagttgtgattgttgattaaaagccttgtcacattcattacacttgtaaggattttctccagtatcaattgccttatcaattagaagggctgaattttgaccaaagatcttgccacactcattacaattgtaacgttttactccagtatgaagtctacgatggcaggtaagggatgactcctgactgaaggtcttgccacactctttacacttgtaaggtttctcaacagtgtgacatctatcatggcatgcaaggtattgctcgtgattaaagagcttgccacatacatcacatttatattgtttgtctcctaaatggggtatctggtgtttccttaagagtgagctacaattaaaggctttgccactcttattacattggaaagatttttctctcatgtgtacttcctgtttttgtgggagtaatgaagaattcaggggattattcccatagttattagaaatctgggtttggggcctacaggaaattctttggaatgttgaaactgagggagcatcattagtagacttctcaagttgattaccaatttcacctttgatctgaaatatgtggagttcaggcagatgtgaataaaagcttgatccaagctgatctttaataggcttgtttccagcatgcctgtgatcatgttggtctgtgctaccagtcaacttttttatttttgtcatgggtgcttcaaggccatttctttcatcttcttgacactgaaactcaatgtcatgaatttctttctcaatttcctggaagcaaaaatctccaatgtgatgactttcatgtctttgcaatgtccctgtgtggatcacttctgtattgccttgccctgttgacaagacctccttcat

SEQ ID NO: 20788 - DNA, 2964 bp, Homo sapiens
  MAP TO AL139395.2; EXPRESSED IN HELA, SIGNAL = 0.86; EXPRESSED IN ADULT LIVER, SIGNAL = 1.5; EXPRESSED IN PLACENTA, SIGNAL = 1.5; EXPRESSED IN BRAIN, SIGNAL = 1.5; EXPRESSED IN HEART, SIGNAL = 1.4; EXPRESSED IN FETAL LIVER, SIGNAL = 1.4; EXPRESSED IN LUNG, SIGNAL = 1.6; SWISSPROT HIT: O60673, EVALUE 5.00e-20
ttacctcagtttttcaaaagaagctgtcccagactcatccttgtggacctgttctcgctccatgtgctttcccttacatttctcatctctcagggccttggagctggatttgtgacgatacaactttttgtgtgtcggtccgttattgcctaaagtgctcatgttactatactttttatcaaagaaggtagagcgagagtcctcgttataaccaggcatgtttgcacgaccaggatcacctattgctgttttcccattgcttttgctcacacccttgattgacctgtgattcttagtggctccttgggacccactgttgatctttttcttagactcctgtggtgtcccagccaatattttgagggtttttaattttagactattggactcaggggagtagaatatgttgggatccccatggtgctccatgggttcccaaaggggctctatggaggccatcatgaatctctgcacatctgccataccagaggcaatgttggacaagatataggaaggctcctgaaattcccgttggtcatcatccagaaggctgttggtgttggtgcccatgctcatatcactccagcctgggctgctctccttccccaaggcccaatctccagaaagtcccttttgacttggcatcttcatagaggccatagggccaccatgttggatacattcagccaatgtcttcccagtggaggatatggtgttggtttggcttcccccacggccaatgccaatttgcattttctctccattgatggcagccatgtatttccctttctttgtggacttagggacctggcgggagtttttgccaggtggtttttcaatccccttgttgttacctttgagggattttttcctggtgtttttctgagaagagctttggttcatagccccactcttgctgggtgaacttttctttcttgattttgacactttgttgttggtactaatttgaccagatggatcattaaatgttgacaggcaagggtttttttggagcaggctgacagaatcctcatcattgaacatatggaactgaaactggtgattatttaaagtaaatccatcctccatttggacctgccgtgaaagggtactgcagtcccacttgattttttccacactgtccaatggtcctgggacaccctcttggaacccctttagtgttcctagtgtcttcatactctcacatctggtaatttgaggggaaagactaggggtgtccggtggggacatctctgaaagggaagagtggcggaatttgtcaggggtgaagttggatatatccaggaggtcagtggactcctttagtggtgctatctcatcaatgctttgctggatcaccagcttagggctgcaatgggccaggaagtcatcagtgatatcatcatcgccatccttttcacaggacttcaagcttaaggagcaataattacttgagctgacagagagtggggccattgaatcaaagctaaagagccgaccatcatccatattgactggcccctgctggaaaggaaagcagatctctccattattaaagtgacataattggtaagagtcatcagatgggagttgggtatcttgcatggagtcatacaggaccttgttgcaattactgccaccactattgagacagattggattgtatgttgtaggtgtgaggttattttccatggagactacttgggaggctccaaattcactggattgggttggggctatctcccttgagacttcagccatgaattcctgggtgccagaagtagccttgttgggccacacatttctatagttgcttgattccattttgaagttatgagatgactgctgcagctcagagtcagaggatgaggtgagcacacagtcctgggtaggctggaggggtacaaatgatttttcggtttgagtgaggctgccttcattttgctctggagaatggtggctgaagtatgagatactagtgttatttgacaagtcagaagcatctaacaatgtctgcagataccctcccgggataacaggtatattagtggtaacattagcagatgataaaggcatttcagaagagcatgtcgttggtagaaaagtggaactcttagcagcctttgcctcatgaaattcagatagacgggaactgtttgatgtcccaggaataacttcattctttaaattagcctttgaggattggttttccaagagagggctcatttgaacaattggcttgctttcttgcccagcagctttgactttcttagattttaacctagcttcacttttaaatttgattttattgagcactttcctctctggccccttaaactctgtgtcttgggctttgactttcactgagtcagggcctgtgatgtcatttaaatgtgatccatttgcacagctaggagcacccagaggtgctgacttcagtgtaccttttaggcctccatcttctttatgattactagcgtgcctctgatcattacataatgaaatctgtttactacttgctgaaatttcaatggatgggattctttgaatcctgtgcctgttgccaagtttagattttcgtttgcgagcaggtggcagaaatgacacctcaaagctacctggttcaaagctttgcttttgggaaaaaggtgtcttgatggagtccgtgttggtgtttctctgcttcttcttcttttgccagaagcctttcaagggtgccagcttggcatatttgttgagctgattctcactcaaattcactgttgtctcactggcatccaccttacccaacttcaccagcatgttcttctcacctttaaagcgattaatgatgatatatttgataataacagggggctccttacgggttacttttcttctctttttgggacaccattcatcatcatcttcctctttggaaccaactggcagccattccttcctctcatttactttttcaccctc

SEQ ID NO: 20789 - DNA, 498 bp, Homo sapiens
  MAP TO AC012064.1; EXPRESSED IN LUNG, SIGNAL = 2.6; EXPRESSED IN BONE MARROW, SIGNAL = 2.3; EXPRESSED IN BRAIN, SIGNAL = 2.5; EXPRESSED IN ADULT LIVER, SIGNAL = 2.9; EXPRESSED IN HELA, SIGNAL =   1; NT HIT: gi14720077, EVALUE 0.00e+00; EST_HUMAN HIT: BG991974.1, EVALUE 0.00e+00; SWISSPROT HIT: Q00657, EVALUE 6.00e-65
gctgaccacggctggatcccgctgcaggtgtccgatgggcagcaccaggccatcacggtgctggaggtgcaggccttggagccttacctctgtgtggccaatggctccggcctcatggttcctcaaggaggccagggtaccatcaacatggccgagctccacctgggcaccaacctcaacatctgcagtagggatgaggcccactaccacgtcacagacagccctcactggggacagttgctccaagccactcagccagccacagccttctctcagcaggacctgctggttggggctgttttctatggccacaatggcagcctcagctcccgcaacaccctggccttctcaatggatgtgggaccagtgcacacagatgccaccctacaagtgaccattgccctagagggcccagtagccccactgaagctggcccagcacaaggagatctacatcttccagggagaggcagctgagatcagaagggaccagctggag

SEQ ID NO: 20790 - DNA, 564 bp, Homo sapiens
  MAP TO AL160175.5; EXPRESSED IN ADULT LIVER, SIGNAL = 1.8; EXPRESSED IN HELA, SIGNAL = 2.3; EXPRESSED IN HEART, SIGNAL = 1.7; EXPRESSED IN LUNG, SIGNAL = 2.5; EST_HUMAN HIT: AL537680.1, EVALUE 0.00e+00; SWISSPROT HIT: Q07817, EVALUE 1.00e-108; NT HIT: gi14772456, EVALUE 0.00e+00
ccagccgccgttctcctggatccaaggctctaggtggtcattcaggtaagtggccatccaagctgcgatccgactcaccaatacctgcatctccttgtctacgctttccacgcacagtgccccgccgaaggagaaaaaggccacaatgcgaccccagtttaccccatcccggaagagttcattcactacctgttcaaagctctgatatgctgtccctggggtgatgtggagctgggatgtcaggtcactgaatgcccgccggtaccgcagttcaaactcgtcgcctgcctccctcagcgcttgctttactgctgccatggggatcacctcccgggcatccaaactgctgctgtggccagtggctccattcaccgcggggctgtctgccaggtgccaggatgggttgccattgatggcactgggggtctccatctccgattcagtcccttctggggcctcagtcctgttctcttccacatcactaaactgactccagctgtatcctttctgggaaagcttgtaggagagaaagtcaaccaccagctcccggttgctctgagacat

SEQ ID NO: 20791 - DNA, 690 bp, Homo sapiens
  MAP TO AC008747.4; EXPRESSED IN ADULT LIVER, SIGNAL = 1.8; EXPRESSED IN HEART, SIGNAL =   2; EXPRESSED IN BRAIN, SIGNAL = 1.5; EXPRESSED IN BONE MARROW, SIGNAL = 1.7; EXPRESSED IN FETAL LIVER, SIGNAL = 1.2; EXPRESSED IN HELA, SIGNAL = 0.54; NT HIT: Z70664.1, EVALUE 0.00e+00; EST_HUMAN HIT: AI654705.1, EVALUE 2.00e-79; SWISSPROT HIT: P21416, EVALUE 7.00e-40
atggagtccatgctccagactcaccggcccacctgggatgattgtcagcaacgccttttaaccctcttcatctctgaagagaggaattgtatccgaagagaagccagaaagtatttccttacatcagctgatagaccagagggggaagcccaaaacctcgttaaggaggtttttccctctacccggcctaattgggatcctaactcctcgggtgggaggagggctttagatgattttcaccggtatctccttgtgggcctcaagggagccgctcaaaaacccataaatctgtctgagacaactgaagttgtccaggggcctgatgaacctggaacacttttagaaagtctccaggaggcctatcaaacttacaccccttttgacccggcagctcccaagaatagccgtgctattaatttggtgtttgtggctcaggcagctactgatagtaaaagaaaattacaaaagccggagggatttgctggaatgaacaatagccagcttttagaagtagcccagaaagtttttgacaatcgagagtctgaaaaacgaaaacaggcagctgaggcagctgaaaaagctgctgataaagcatccaaaagacaagcaaaaatcttagtggtggccatccaggaagccaaaaagtaagggcccccatcacagaggaatagccagggaaccccgggtccc

SEQ ID NO: 20792 - DNA, 1347 bp, Homo sapiens
  MAP TO AC004477.1; EXPRESSED IN BRAIN, SIGNAL = 4.6; EXPRESSED IN HELA, SIGNAL = 1.5; EXPRESSED IN ADULT LIVER, SIGNAL = 4.3; EXPRESSED IN HEART, SIGNAL =  23; EXPRESSED IN LUNG, SIGNAL = 4.6; EXPRESSED IN BONE MARROW, SIGNAL = 1.8; NT HIT: gi15311385, EVALUE 0.00e+00; EST_HUMAN HIT: BI859901.1, EVALUE 0.00e+00; SWISSPROT HIT: Q14494, EVALUE 0.00e+00
gccatggaagtgaacacatcagcaagtgaaatcctgtacagtgcccctcctggagacccactgagcaccaactacagccttgcccccaacactcccatcaatcagaatgtcagcctgcatcaggcgtccctggggggctgcagccaggacttcttactcttcagccccgaggtggaaagcctgcctgtggccagtagctccacgctgctcccgttggcccccagcaattctaccagcctcaactccaccttcggctccaccaacctgacagggctcttctttccaccccagctcaatggcacagccaatgacacagcaggcccagagctgcctgaccctttggggggtctgttagatgaagctatgttggatgagatcagccttatggacctggccattgaagaaggctttaaccctgtgcaggcctcccagctggaggaggaatttgactctgactcaggcctttccttagactcgagccatagcccttcttccctaagcagctctgaaggcagttcttcctcttcttcctcctcctcttcctcttcttcctctgcttcttcctctgcctcttcctccttttctgaggaaggtgcggttggctacagctctgactctgagaccctggatctggaagaggccgagggtgctgtgggctaccagcctgagtattccaagttctgccgcatgagctaccaggatccagctcagctctcatgcctgccctacctggagcacgtgggccacaaccacacatacaacatggcacccagtgccctggactcagccgacctgccaccacccagtgccctcaagaaaggcagcaaggagaagcaggctgacttcctggacaagcagatgagccgggatgagcaccgagcccgagccatgaagatccctttcaccaatgacaaaatcatcaacctgcctgtggaggagttcaatgaactgctgtccaaataccagttgagtgaagcccagctgagcctcatccgagacatccggcgccggggcaagaacaagatggcggcgcagaactgccgcaagcgcaagctggacaccatcctgaatctggagcgtgatgtggaggacctgcagcgtgacaaagcccggctgctgcgggagaaagtggagttcctgcgctccctgcgacagatgaagcagaaggtccagagcctgtaccaggaggtgtttgggcggctgcgagatgagaacggacgaccctactcgcccagtcagtatgcgctccagtacgccggggacggcagtgtcctcctcatcccccgcacgatggccgaccagcaggcccggcggcaggagaggaagccaaaggaccggagaaagtga

SEQ ID NO: 20793 - DNA, 1081 bp, Homo sapiens
  MAP TO AC013648.3; EXPRESSED IN ADULT LIVER, SIGNAL =   2; EXPRESSED IN BRAIN, SIGNAL = 4.9; EXPRESSED IN HELA, SIGNAL = 7.9; EXPRESSED IN LUNG, SIGNAL = 2.4; EXPRESSED IN HEART, SIGNAL = 2.4; EXPRESSED IN BONE MARROW, SIGNAL = 2.5; EXPRESSED IN FETAL LIVER, SIGNAL = 2.4; EST_HUMAN HIT: BG168568.1, EVALUE 0.00e+00; SWISSPROT HIT: gi8039778, EVALUE 7.00e-06
gacacggatgttgctgatgggtgcagagagacccccacgaaaactctggaaggagatggggaccaagagagactcatctccaaaccaagggtggggagaggcaggcagagccagagggagaggctctcttggccaaaatttcaatccataaagagcaagcgggggccgggaccccagaggtcacacagctcgtcagaggcctacgaacctagggacgcacatgacgtgtcccctacaagcacagacacagaggcccagctcacggtggagcgccaagagcagaaggcagggccgggcagccagaggaggcggaagttcctcaacctcagattcaggacaggctcgggacagggcccttcatcgacaggacagccaggcagggggttccagagtggggtgggccgtgctggggtcctggaagagttggggccctggggtgatagcctcgaggagactggggctgccacaggcagcaggagagaggagagggcagaacaggatcgagaagtgatgcctgctcagagcatgccattgcccacagagctcggtgaccctagactttgcgagggaacccctcaggaagggggactcagggcagccaggctccatggaaagaccctggaggggcaggcacaggagacagcagtggcccagaggaagcccagggcccagccaactcctggaatgagccgggagggtgaaggcgagggactgcagagcctggaaatcgggatcgccagactgtccttgagagacacaaccgaaggaggcacacagattggcccaccagaaattagggtgcgagtacacgatttaaagacaccaaaatttgcattttccacagaaaaagagccagaaagagaaaggcgccttagtaccccacagcgagggaagagacaggatgcgtcctcaaaagcgggtactggcctgaagggtgaggaggtggaaggagccgggtggatgccgggcagggaaccaaccacacatgcagaagcacagggggatgaaggagatggagaggaaggactacagaggacaaggatcactgaggaacaggacaagggcagggaagacacagaag

SEQ ID NO: 20794 - DNA, 664 bp, Homo sapiens
  MAP TO AL355838.2; EXPRESSED IN ADULT LIVER, SIGNAL =   3; EXPRESSED IN BRAIN, SIGNAL = 4.1; EXPRESSED IN HELA, SIGNAL =   6; EXPRESSED IN BONE MARROW, SIGNAL =   5; EXPRESSED IN LUNG, SIGNAL = 3.2; EXPRESSED IN HEART, SIGNAL = 3.7; NT HIT: AF077207.1, EVALUE 0.00e+00; EST_HUMAN HIT: BG697295.1, EVALUE 0.00e+00; SWISSPROT HIT: P52669, EVALUE 2.30e+00
catccagggctgagatgctgctggtccacaccaggttcttcatcttgtgtttgaagaccagaagctggatccggaactcctgttctgtaaggtccagggagccagcaagcttggccacaggcatggtggtgtagagcttgaggaagctgcagatgcttgaaagctgggcctgctgccatgcttcatcggaaaacacctccagctgctgcaggaagggctctctgtggtagttggggtacacgttatcatagctgggcactacaggcgacaggaacttggggcaggagtaactgaaaagttcttcatagacttgtgggtgacctttctgcttgcgcagcaacttgtccccatatttctcctgcagctggaggtgaatgctctcatcgatatgcatggggtacatcatgagggcaatggccagcagcgcatgcatctgatcattctgcttgttaatcatctcatacttacatgtggtcctctggaacatgctcttggtcctctggatgtagaagaggatattggtgaagacctggatggcgtcctggtagcaatgcatcatcaaatacgcaaacccaagataatagtatgtggtgacctggcactctaacacacaggaatacatgatcttctggttcagctcgatgttctctagcaccttgatggc

SEQ ID NO: 20795 - DNA, 500 bp, Homo sapiens
  MAP TO AL137038.3; EXPRESSED IN ADULT LIVER, SIGNAL = 1.6; EST_HUMAN HIT: BG686228.1, EVALUE 0.00e+00; SWISSPROT HIT: P36591, EVALUE 2.00e-10; NT HIT: S81752.1, EVALUE 0.00e+00
tcactctgcaaactggtccaagaacttgaggtaggcctgacgctggggtgcagctgctggaatgaagtggccaccagagtgggtgagggtgatggctccgggaaattggctggccagttgcacactctcctgagaggggatgactttgtcagtgtccccaaaaacatggagcgaaggcaatgacaagggcctttgcaggatggattccttgaacccaatgccccggggacagaaaccagacaccaagaggataaaccgtggcaaggggaagcggggatcgcctgcctggcccagggcacacacaagggctgctagcgcagccccttggctgaaaccaagaaggccgtcaaaaggccccagcctgttcagtgcctgtgccaccatccccagtgattcctccaggcccctgcagacggcgggctcttccaatgcggagaaaacgtcggcctcctgctctgaaaaccaccagcctcgaggctgctcctccggagggcaggacc

SEQ ID NO: 20796 - DNA, 912 bp, Homo sapiens
  MAP TO AC000090.2; EXPRESSED IN HEART, SIGNAL = 1.4; EXPRESSED IN LUNG, SIGNAL = 1.1; EXPRESSED IN BRAIN, SIGNAL =   1; EXPRESSED IN HELA, SIGNAL = 0.7; EXPRESSED IN ADULT LIVER, SIGNAL = 1.2; EST_HUMAN HIT: AA618338.1, EVALUE 2.00e-61; SWISSPROT HIT: P10264, EVALUE 8.00e-61; NT HIT: L41825.1, EVALUE 0.00e+00
atgctggaacctcctaatgctcaaggggtacaagtgtgtcgatatacgccgctcaatcttacctttttaaaagaattcaaggatgcttgtactcagtatgttcctacttctccatatgttaaaacggtattacagactctttgtaccgaggtcattttgcttcctatagactgcgaccttttggcaaaagctgttctaactccatctcagcatttacaattccatacctggtggtcagaggaggcccgcctgcaggctcagctaaatcgggctgatggcattccaattactcaggctcagctcacaggctccgataattactctgatactactgctcatttaggctttgatgctctcaccacggaacaagtaacaaaggtgtgtatgagagcttgggataaattacgcaccccaggccaagcttctgtttcttttactattgttaaacagggtcacaatgaattatatcttgattttttagctaaattacaagatgctgttgaaaaatctgtctctgatgagcacactcaaggtattcttcttcatatgttagcttttcaaaatgcgaaccatgagtgtaaaatggccgtgcattccatcctacgtcaaaatttacctgatcatgaggtgttgcctgcatatattaaagcttgtgaaggcgttggatcggagacccacagagctattctgtgggcaccggccatgaagcacggcaaccaaactggctcgactgattcttttcttggagcctgctataattgtggccaacttggtcatacccaaaaaaactacactgttaaaaacttaaaagcggccaagccggctcaacaaacacggccaaatgctcctgctactgtttgcctgcgttgtcgtaagggtaaacattgggcaagtacttgccactcagtctga

SEQ ID NO: 20797 - DNA, 496 bp, Homo sapiens
  MAP TO U91328.1; EXPRESSED IN LUNG, SIGNAL = 1.2; EXPRESSED IN HELA, SIGNAL = 1.2; EXPRESSED IN ADULT LIVER, SIGNAL = 1.2; EXPRESSED IN BRAIN, SIGNAL =   1; NT HIT: U91328.1, EVALUE 0.00e+00; EST_HUMAN HIT: BI767701.1, EVALUE 0.00e+00; SWISSPROT HIT: Q99879, EVALUE 2.00e-45
atgcctgagccagccaagtctgctcccgccccgaagaagggctccaagaaggcagtgaccaaagcgcagaagaaagatggcaagaagcgcaagcgcagccgcaaggagagttactctgtgtacgtgtacaaggtgctgaaacaggtccatcccgacactggcatctcttccaaggccatgggcatcatgaattctttcgttaacgacatatttgagcgcatcgcgggcgaggcttcccgcctggcgcattacaacaagcgctcgaccatcacctccagggagatccagacggccgtgcgcctgctgcttcccggagagctggccaagcacgccgtgtcggagggcaccaaggccgtcaccaagtacaccagctccaagtaaacattccaagtaagcgtcttaacacctaaccccaaaggctcttttaagagccacccagatacccactaaaagagctgtggccagacgccaaattttatttggcggcggaggggta

SEQ ID NO: 20798 - DNA, 582 bp, Homo sapiens
  MAP TO AL035701.13; EXPRESSED IN ADULT LIVER, SIGNAL = 1.6; EXPRESSED IN PLACENTA, SIGNAL = 1.4; EXPRESSED IN LUNG, SIGNAL = 1.2; EXPRESSED IN HEART, SIGNAL = 1.5; EXPRESSED IN BRAIN, SIGNAL = 1.3; NT HIT: gi7262387, EVALUE 5.60e-01; EST_HUMAN HIT: BE768116.1, EVALUE 8.20e-01; SWISSPROT HIT: P51862, EVALUE 2.50e+00
gatcaggcatgtttgggaagtatcagattaggtagtaaggggtaacctggtatcctggtgtgttacatggtggagtacagctgacaggacaccatggggacacttgcatgaaggggagaagctattgcatgaaacatggggctctgtgcactaggtagagaagagcctcagattggccagggacaatttgaggtcactaaatgcttaagtaaggaaaggaagtctggaataataattgaactttgaatgtgttgagtgctttgcagcctacaaaatgcttttacattagagtcttacttggttttcacaactggtctgtaaataagcatgccctttatatccatgttatttctaaatcacagaggttaaggtgttcacctagggttctatgggaagtgtcaggactgagccctgcagtggatgcaggagcagtggatgaagggagcccttctcttctgatgccatcagctgctgacttcaccacacatctgacctagatggtcaacaattttgtccaccctttaagcaaccaggcacctactgaatgaacaaagaggatatggacaatatcccgcaagtgct

SEQ ID NO: 20799 - DNA, 679 bp, Homo sapiens
  MAP TO AP001678.1; EXPRESSED IN ADULT LIVER, SIGNAL = 1.2; EXPRESSED IN BRAIN, SIGNAL = 1.2; EXPRESSED IN HELA, SIGNAL = 1.8; EXPRESSED IN LUNG, SIGNAL =   1; NT HIT: AL163209.2, EVALUE 0.00e+00; EST_HUMAN HIT: BE163587.1, EVALUE 1.00e-101; SWISSPROT HIT: P70213, EVALUE 2.00e-29
atgataggcaaggagtttagtgactctctacacaataattttgaccaagtatggaaaaacaaggaacataatgaagctggttggttactcctaagttcaggagacaaagtgatgaaagaaaatgatcaactcagggattctgtctccgggcttcagaagcagatactgagcctcaaatctcctaagattgccctgagtgagagtcttatcttctgtagagaaatagctgaaattgtggaaaaagagacacaagcgcttaccacgcgagtggctgacctgcaacaaaaggtgcacacacagcctcgccaagtgtctactgttaaagtgaggacattgattgaaaaagaacgggaccctgcaacttggaatgggaacacgtgggaggaccctgatgaaactagggacactgagtttgtaaactctgatgaaccttttttgccagaaggaacagcttccccatccccagtagtggcaacatcccctccccaacccatggtaccatcaccctttccacctttgtctgaggaggtaaaccctacactgcctgaggcaacagtgatgggctttcctgaggcagttgccaggcaaaataacgttgattctcctcaggagtcagccccaatgcccctgtttgcttctagacctataactagactaaagtccctatgggcccctagag

SEQ ID NO: 20800 - DNA, 885 bp, Homo sapiens
  MAP TO AL022328.21; EXPRESSED IN HELA, SIGNAL = 2.4; EXPRESSED IN BONE MARROW, SIGNAL =   2; EXPRESSED IN FETAL LIVER, SIGNAL = 1.1; EXPRESSED IN ADULT LIVER, SIGNAL = 1.5; SWISSPROT HIT: Q00130, EVALUE 1.00e-03; NT HIT: gi14779842, EVALUE 0.00e+00; EST_HUMAN HIT: BI913283.1, EVALUE 0.00e+00
acctagttcttcagagacactgtctcccggggtgttgggccaccatggttgggtgggagccacgtctgacacgttctcccccacgctgatgctcccctccccgcagcccgagctgggggaggacagagatggccccacttctacaggcagccgtggcccacagtccagcacagtgctctgtgctcccaggctgagcgctgactgggacgtgtggccaggggggctctgttggggcctgggtgtgttgggctcagcttctggtgagagagcccccagcaccatgtggggcggagggatgggtacatgggtgttccaccgtggccgggtggaaaccacatccgacacaggctcccccaagctgatgctggcgtcggacacgtgtccatgggtgttgcaccgtgaccggatgggagccacgtccgatacgttctccccaaccctgatgctggtgtcagacacatgtccgtgggtgttccaccgtggccgggtgggagccatgtctgacacagactcccccaagctgatgctggcatcagacacgtgtccatgggtgttccaccgtggccgggcgggagccatgtctgacacagactcccccaagctgatgctggcatcggacacgtgtccatgggtgttccaccgtggccgggtgggagccacgtccgacacgttctccccaaccctgatgctggcgttggacacgtgcccgtgggtattccaccgtggcctggtgggagccacatctgacacattctccccgaccctgatgctggcgttggacacatgtccatggatgttccaccgtggccgagtgggagccacatctgacacagactcccctaagctgatgctggcattggatacgtgtccgtgggtgttccaccg

SEQ ID NO: 20801 - DNA, 630 bp, Homo sapiens
  MAP TO L39891.1; EXPRESSED IN HELA, SIGNAL = 2.4; EXPRESSED IN ADULT LIVER, SIGNAL = 2.6; EXPRESSED IN HEART, SIGNAL =   6; EXPRESSED IN BRAIN, SIGNAL =  13; EXPRESSED IN BONE MARROW, SIGNAL = 4.8; NT HIT: gi16164978, EVALUE 0.00e+00; EST_HUMAN HIT: BE296329.1, EVALUE 0.00e+00; SWISSPROT HIT: P98161, EVALUE 1.00e-109
gagacctcatccacctggccagctcggacgtgcgggcaccacagccctcagagctgggagccgagtcaccatctcggatggtggcgtcccaggcctacaacctgacctctgccctcatgcgcatcctcatgcgctcccgcgtgctcaacgaggagcccctgacgctggcgggcgaggagatcgtggcccagggcaagcgctcggacccgcggagcctgctgtgctatggcggcgccccagggcctggctgccacttctccatccccgaggctttcagcggggccctggccaacctcagtgacgtggtgcagctcatctttctggtggactccaatccctttccctttggctatatcagcaactacaccgtctccaccaaggtggcctcgatggcattccagacacaggccggcgcccagatccccatcgagcggctggcctcagagcgcgccatcaccgtgaaggtgcccaacaactcggactgggctgcccggggccaccgcagctccgccaactccgccaactccgttgtggtccagccccaggcctccgtcggtgctgtggtcaccctggacagcagcaaccctgcggccgggctgcatctgcagctcaactatacgctgctggacg

SEQ ID NO: 20802 - DNA, 529 bp, Homo sapiens
  MAP TO AC004943.1; EXPRESSED IN ADULT LIVER, SIGNAL = 4.1; EXPRESSED IN HEART, SIGNAL = 1.8; EXPRESSED IN LUNG, SIGNAL = 4.4; EXPRESSED IN PLACENTA, SIGNAL =  18; EXPRESSED IN BRAIN, SIGNAL = 1.4; EXPRESSED IN HELA, SIGNAL = 7.9; NT HIT: gi14757538, EVALUE 0.00e+00; EST_HUMAN HIT: BG491115.1, EVALUE 0.00e+00; SWISSPROT HIT: P05783, EVALUE 5.00e-60
ttcaccactcgctccaccttctccaccaactaccggtccctgggctttgtccaggcgcccagctacagtgcccggccagtcagcagcatggccagcgtctatgcaggcaccaggggctctggttcctggatctccatgtcccactccgccagcttctggggcggcatggggtctgggggcctgtccgcggggatggctgggggtcttgcaagaatgggaggcatccagaacaagaaggagaccatgcaaagcctgaagtactgcctgacctcctacctgaacacagtgaggaacctggagatggagaactggaagctagagagcaaaatccgggagcacctggagaagaagggaccccagttcagagactggagccgttacttccagaccatcaaggacctgagggctcagatcttcgcaaatactgtggacaatgcctgcatcgttctgcagattgacagtgcccgtcttgcagctgatgattttagagtcaagtatgagacggagctggccgtgcactagtctgtgg

SEQ ID NO: 20803 - DNA, 492 bp, Homo sapiens
  MAP TO AP000354.1; EXPRESSED IN LUNG, SIGNAL =   2; EXPRESSED IN BRAIN, SIGNAL = 1.9; EXPRESSED IN HELA, SIGNAL = 2.3; EXPRESSED IN ADULT LIVER, SIGNAL = 2.1; EXPRESSED IN FETAL LIVER, SIGNAL = 1.9; EXPRESSED IN HEART, SIGNAL =   2; NT HIT: AY008791.1, EVALUE 4.70e-01
atttaaggactataaagaattgacattgaacgaaaaagacataattataaaattatgctagaaatatataagcatgtcatttaaagatcatataacaggagaaaatatttgtgccctctggatctttaagggcattgctttactaatgcagagttacattctgcttgtggttatcctaaaatcattgagaaaattttagccagtaaagtgggcggtgggggtgggggtgggggtgggagtgggggcagcagtttttagtaatcaggggaaaacaattactgacatgtaacatggattgcattaaatcagcccaggaatgatagagttaatggcgcctgcagatccaccttcttctgaggtgagaaagaatctgaggtcaggaactttgtcgactatgtgacttgtcactgtgctcagccctgcgttctgattacctggcaatactcagtgctgcctttagaaagctgctgttgtggatctggtaccagtggc

SEQ ID NO: 20804 - DNA, 566 bp, Homo sapiens
  MAP TO AC004065.1; EXPRESSED IN LUNG, SIGNAL = 1.5; EXPRESSED IN ADULT LIVER, SIGNAL = 1.9; EXPRESSED IN BRAIN, SIGNAL = 1.6; EXPRESSED IN HELA, SIGNAL = 1.5; NT HIT: X65172.1, EVALUE 0.00e+00; EST_HUMAN HIT: BE765394.1, EVALUE 3.00e-03; SWISSPROT HIT: P29371, EVALUE 3.00e-77
atggccactctcccagcagcagaaacctggatagacgggggtggaggcgtgggtgcagacgccgtgaacctgaccgcctcgctagctgccggggcggccacgggggcagttgagactgggtggctgcaactgctggaccaagctggcaacctctcctcctccccttccgcgctgggactgcctgtggcttcccccgcgccctcccagccctgggccaacctcaccaaccagttcgtgcagccgtcctggcgcatcgcgctctggtccctggcgtatggtgtggtggtggcagtggcagttttgggaaatctcatcgtcatctggatcatcctggcccacaagcgcatgaggactgtcaccaactacttccttgtgaacctggctttctccgacgcctccatggccgccttcaacacgttggtcaatttcatctacgcgcttcatagcgagtggtactttggcgccaactactgccgcttccagaacttctttcctatcacagctgtgttcgccagcatctactccatgacggccattgcggtggacaggtgaggagaggacagaca

SEQ ID NO: 20805 - DNA, 631 bp, Homo sapiens
  MAP TO AL139316.1; EXPRESSED IN LUNG, SIGNAL = 3.4; EXPRESSED IN HEART, SIGNAL = 2.8; EXPRESSED IN ADULT LIVER, SIGNAL = 1.3; EXPRESSED IN BRAIN, SIGNAL = 1.5; EXPRESSED IN BONE MARROW, SIGNAL = 2.2; NT HIT: gi15300842, EVALUE 0.00e+00; EST_HUMAN HIT: BG196117.1, EVALUE 0.00e+00; SWISSPROT HIT: O02491, EVALUE 7.20e-01
atgggggccaccaggcattggtggagcaccagaaggtcctgaaggcacttggaaaggattactgggagtaggatagagtcctggtgtgggatacgatcctgtaggggcaggatatggtgctggtggtccccaggctcctggtggaacggtgccccatggaacaggtggtgctgccccaggggcttggggaggaggaggagcgggatatgggcctggagatggatatggcatattaggggtaggatactgccctcccattcctggcgcccaaggtccagaagacatggatccccatggacctaaaggaccagctgcagctggatctgtgggtgcaccatatggtctgggtagctctggaaagggcatatttggtgtaggatatggccctgtggggccagggcccggcacagttggggctggataaggaccaccaggtgggggacatgatggtccggaaggaggaaagggtgctgggggtcctggaggtggtccggtgggaggcacggagggatacattcctgttggtgctggtccaaaaggcacagtggagggtgttgcacttggtgggagtccagatggcactgaagatggagcactcggattattccaagggttggagcctggccagcct

SEQ ID NO: 20806 - DNA, 658 bp, Homo sapiens
  MAP TO AC001070.1; EXPRESSED IN HELA, SIGNAL =   7; EXPRESSED IN LUNG, SIGNAL = 6.6; EXPRESSED IN HEART, SIGNAL = 4.3; EXPRESSED IN FETAL LIVER, SIGNAL = 2.4; EXPRESSED IN ADULT LIVER, SIGNAL = 3.3; NT HIT: gi16165307, EVALUE 0.00e+00; SWISSPROT HIT: P19659, EVALUE 1.10e-01; EST_HUMAN HIT: BG698986.1, EVALUE 0.00e+00
gagtagcagatcgtgaacgatcagaactacttccagatgcagaacgcctgcggatggctggaggagatcttgttaaggaccgtttaccccgagctgttcgtggagtacgggatctggagcggcggcggatagcaagtggtgagcgacttcgagaacgtttgcgtggtaacagtggcgttcgagatctagagcggcgccgaatagctggaggtgtccgggacctagagcggcggcgtgtcactggtgaggttcgagagcgggaccttcttcgagttactggagatgtgcgagatcgagatctccttcgggtgaccggagatgttctggatcttgatcttctgcgagtgataggcgaagttctgcttcgagatcgcctcctggttactggtggagtcctggatctggaccttctgcgagtcactggtggagttctagaacgggagcggcggcgtgttgttggcgttctagaccttgaacgacggcgggttactggtggcgttctggatctggatcgccttctgctcactggggatgctcttgaccgggatcttcgtcgagtcactgaagtcctggaccttgaccgtctccggctgactggtgaagttcgagatctggacctacgtcggcttatcaggggggttctggacctggatcgccg

SEQ ID NO: 20807 - DNA, 1035 bp, Homo sapiens
  MAP TO AC004789.1; EXPRESSED IN ADULT LIVER, SIGNAL =   2; EXPRESSED IN PLACENTA, SIGNAL = 2.6; EXPRESSED IN BRAIN, SIGNAL = 1.8; EXPRESSED IN LUNG, SIGNAL = 1.8; EXPRESSED IN FETAL LIVER, SIGNAL = 2.1; EST_HUMAN HIT: T86244.1, EVALUE 3.00e-17; SWISSPROT HIT: Q01456, EVALUE 1.30e-02
atgattcttcctaccctgcaaagcccagcccaggaggaaccccctcctctcacggaaccccctcctctcacagaaccccctcctctcacacaatcccctcctctcacacaatcccctcctctcacagaaccccctcctctcacggaaccccctcctctcacggaaccccccccctcacacaatccccttctcttacggaacccccttcttttacggaacccccttctctcacagaacccccttctctcacggaacccccttctctcacggaacccccttctctcacagaaccccccctcacacaatcccctcctctcacggaaccccctcctctcacagaaccccctcctctcacggaaccccctcctctcacacagtccccttctctcacagaacccccttctctcacacaatcctctcacggaaccccctcctctcacggaaccccctcctctcacagaaccccctcctctcacagaaccccctactctcacacagtcccctcctctcacggaaccccctcctctcacagaaccccgtcgtctaacggaaccccttcctctcacggaaccccctcctctcacacagtcccctcctctcagagaaccccctcctctcacacagtcccctcctctcacagaaccccctcctctcacagaaccccctcctctcacacaatcccctcatctcacgcaaccccctcctctcacagaaccccctcctctcacacagtcccctcctctcacagaaccccctcctctcacacaatcccctcctctcacggaatcccctcctctcacacagtcccctcctctcacagaaccccctcctctcacagaaccccctcctctcacacagtcccctcctctcagagaaccccctcctctcacagaaccccctcctctcacacagtcccctcctctcacagaaccccctcctctcacagaaccccctcctctcacacaatcccctcctctcacggaaccccctcctctcacagaaccccctcctctcacacagtcccctcctctcaca

SEQ ID NO: 20808 - DNA, 665 bp, Homo sapiens
  MAP TO AL022152.1; EXPRESSED IN PLACENTA, SIGNAL = 1.5; EXPRESSED IN BRAIN, SIGNAL = 1.2; EXPRESSED IN HELA, SIGNAL = 1.4; EXPRESSED IN ADULT LIVER, SIGNAL = 1.7; EXPRESSED IN HEART, SIGNAL = 1.5; EXPRESSED IN BONE MARROW, SIGNAL = 1.5; EXPRESSED IN LUNG, SIGNAL = 1.5; SWISSPROT HIT: O55188, EVALUE 1.70e-02; NT HIT: AF064589.1, EVALUE 0.00e+00; EST_HUMAN HIT: AL135051.1, EVALUE 4.00e-12
atgcctctctttctaaaccttccacgccccagctttgagcaaggcttccagaaggcaattttcatactggagttggtagatgcagaggatcccccagatgaggaagaggaggaagcttcctccattttctcttcctctttccactttttattcccctcgtcctcctcctgtttttctttctcatcctcatcctcctctctgcttctgcgttctccaggggacaaggatatgcctactgctgggatgccgagtcttctccagagttcctctgagagtcctcagagttgtcctgagggggaggactcccagtctcctctccagattccccagagttctcctgagagcgacgacaccctgtatcctctccagagtcctcagagtcgttctgagggggaggactcctcggatcctctccagagacctcctgaggggaaggactcccagtctcctctccagattccccagagttctcctgagggcgacgacacccagtctcctctccagaattctcagagttctcctgaggggaaggactccctgtctcctctagagatttctcagagccctcctgagggtgaggatgtccagtctcctctgcagaatcctgcgagttccttcttctcctctgctttattgagtattttccagagttcccctgagagtac

SEQ ID NO: 20809 - DNA, 664 bp, Homo sapiens
  MAP TO D84394.1; EXPRESSED IN ADULT LIVER, SIGNAL =  37; EXPRESSED IN HELA, SIGNAL =  27; EXPRESSED IN BONE MARROW, SIGNAL =  29; EXPRESSED IN LUNG, SIGNAL =  29; EXPRESSED IN HEART, SIGNAL =  11; EXPRESSED IN FETAL LIVER, SIGNAL = 9.2; EST_HUMAN HIT: BG257368.1, EVALUE 0.00e+00; NT HIT: gi14778998, EVALUE 0.00e+00; SWISSPROT HIT: P39023, EVALUE 1.00e-116
gcctttgcccttggtcaccctgatgacgtcgatcatctcatcctgcccaaacacttggttcacaggtacctggtgcttgagcctctcgccagcccagtccagcttctcagccacagtgcctccattcacctggatctccatcaggtgggccttcttctggcacagaggaagcagttgcatctgggtgtgggcaatgacgcagatgacttggcagtacttcttcatgctgctgaagtccttctccagctgcttcttgccatcctcatcctgccatttcttgcagtacttggtaaaggccttcttcttagatttatgccagttcttatagaaacgtctcttgcattcatcactgatgtgctcagcgaagacagtcttgcaagtccggaagccttgaggggtttccacgcagcccacaatgcccactggtggcctctccacaatggtcacagcctccaccacctccttcttgttcaccttggatcctggcctgtcgacttcccgcacgatgtgggtcatgccagccttgtatcccaggaaggctgtgaggtggaccggcttggacgggtcatccttagggaagctcttcaccttcccacaatgcctgctgctgcgcttccaaggcaggaagccgagggacccatgtctgggagtggagaactttctg

SEQ ID NO: 20810 - DNA, 618 bp, Homo sapiens
  MAP TO AJ239319.2; EXPRESSED IN ADULT LIVER, SIGNAL = 1.7; EXPRESSED IN LUNG, SIGNAL = 1.3; EXPRESSED IN HEART, SIGNAL = 1.4; EXPRESSED IN BRAIN, SIGNAL = 1.3; EXPRESSED IN HELA, SIGNAL = 0.33; NT HIT: gi16162711, EVALUE 0.00e+00; EST_HUMAN HIT: AL523289.1, EVALUE 0.00e+00; SWISSPROT HIT: Q14202, EVALUE 7.00e-82
ctggcaaggaaggatgtgcaggggggctagagcccccaggtttggtctgagaactgttgattccatcccccagagtctctcccactgaagggctaggcggggcatttgggctctgtggctgcccttggggaagctcctcctcctgcccaggggagccccttcttgcagtagctatggaggtggtctcctcctcttcaatatgtggggactgcagtgttattggagaatctggagccaaaggctctagtagcccctcaggtgaacaggaatttgccccagcccctggatcaggtggtaccacctcaggggtctggccccctggtccaggctctagggtctgatctcctgcatcccatgccagggttccctcaggaccgtggtccacctccgggggagagggggctttatagagcagcccccccagccccagcaactcagtggctccatccaggactccagggtctttttccaggccagcaggggtatcaagcaggtccagggctcccgaggatggagaagggccagggggggcccatcctcgagttggggcagtctgggattccagtagatcctctccaaattccatgtctactggtaggtctccagccaggggcttct

SEQ ID NO: 20811 - DNA, 527 bp, Homo sapiens
  MAP TO AC004687.1; EXPRESSED IN ADULT LIVER, SIGNAL = 1.2; EXPRESSED IN BRAIN, SIGNAL = 1.1; EXPRESSED IN HELA, SIGNAL = 0.93; EXPRESSED IN LUNG, SIGNAL = 1.1; EXPRESSED IN HEART, SIGNAL = 1.5; EXPRESSED IN FETAL LIVER, SIGNAL = 1.8; SWISSPROT HIT: P05164, EVALUE 5.00e-10; NT HIT: M17170.1, EVALUE 0.00e+00; EST_HUMAN HIT: BI024513.1, EVALUE 1.00e-95
atgcatggtggacttaggaccttgctgggctgggggtctcactgcagagatgaagctgcttctggccctagcagggctcctggccattctggccacgccccagccctctgaaggtgctgctccaggtaacagttcccaaggtgggagaagatggtgtgttggggtggttgtgttccagagaccccttttctcagagcaggccttcctagctctggggcctgatagggggttggggcccattcctgactttgtgatccctgctctgggcagctgtcctgggggaggtggacacctcgttggtgctgagctccatggaggaggccaagcagctggtggacaaggcctacaaggagcggcgggaaaggtggggcacgaggcactgcccagctctgggcaaggatgtcccaggcctttcagagaagcagcaggcagcagggagcttgaaggtgggagagggggactatggggacccatgtggactccctttctgtctgtctgtccctgtgtttctggatgggagaacagct

SEQ ID NO: 20812 - DNA, 939 bp, Homo sapiens
  MAP TO AL031058.1; EXPRESSED IN BRAIN, SIGNAL = 0.9; EXPRESSED IN ADULT LIVER, SIGNAL = 1.9; EXPRESSED IN HELA, SIGNAL = 1.5; EXPRESSED IN BONE MARROW, SIGNAL = 0.85; EXPRESSED IN FETAL LIVER, SIGNAL = 1.2; EXPRESSED IN LUNG, SIGNAL = 1.4; EXPRESSED IN HEART, SIGNAL = 6.1; SWISSPROT HIT: P15924, EVALUE 0.00e+00; NT HIT: gi15300248, EVALUE 0.00e+00; EST_HUMAN HIT: BG681087.1, EVALUE 0.00e+00
ctggaagcccaagcagctactggctttatagtggatcctgttagcaacttgaggttaccagtggaggaagcctacaagagaggtctggtgggcattgagttcaaagagaagctcctgtctgcagaacgagctgtcactgggtataatgatcctgaaacaggaaacatcatctctttgttccaagccatgaataaggaactcatcgaaaagggccacggtattcgcttattagaagcacagatcgcaaccggggggatcattgacccaaaggagagccatcgtttaccagttgacatagcatataagaggggctatttcaatgaggaactcagtgagattctctcagatccaagtgatgataccaaaggattttttgaccccaacactgaagaaaatcttacctatctgcaactaaaagaaagatgcattaaggatgaggaaacagggctctgtcttctgcctctgaaagaaaagaagaaacaggtgcagacatcacaaaagaataccctcaggaagcgtagagtggtcatagttgacccagaaaccaataaagaaatgtctgttcaggaggcctacaagaagggcctaattgattatgaaaccttcaaagaactgtgtgagcaggaatgtgaatgggaagaaataaccatcacgggatcagatggctccaccagggtggtcctggtagatagaaagacaggcagtcagtatgatattcaagatgctattgacaagggccttgttgacaggaagttctttgatcagtaccgatccggcagcctcagcctcactcaatttgctgacatgatctccttgaaaaatggtgtcggcaccagcagcagcatgggcagtggtgtcagcgatgatgtttttagcagctcccgacatgaatcagtaagtaagatttccaccatatccagcgtcaggaatttaaccata

SEQ ID NO: 20813 - DNA, 677 bp, Homo sapiens
  MAP TO AF129408.1; EXPRESSED IN FETAL LIVER, SIGNAL = 2.2; EXPRESSED IN LUNG, SIGNAL = 2.5; EXPRESSED IN BONE MARROW, SIGNAL = 2.6; EXPRESSED IN HELA, SIGNAL = 5.3; EXPRESSED IN PLACENTA, SIGNAL = 3.1; EXPRESSED IN ADULT LIVER, SIGNAL = 2.5; SWISSPROT HIT: Q9NSI6, EVALUE 1.00e-77; NT HIT: AL163279.2, EVALUE 0.00e+00; EST_HUMAN HIT: AU139205.1, EVALUE 0.00e+00
caccagatcttcctggttcagaatctgcttcctctgagatgctctctgccttaagtttctgcacagacgttgatgggccagcagttctgttacatgcatgatctgaatcatgacttttagagtcttcctcagaagactctattttaagaaattttgtctttgaaggtgctggagtatgggacttgtaaccattagcatgccaatttttccgggctacccgcaaatcactttctgactctgagtctctgttttcagattcatcaacattgctctgggcagtgtgagaactggacactggtaatagttgattttcatcttttagctcctcttcttcaatttctgactttaagctctgttcatcttcagaattatgtaataacttttttctagctacagcagaagcattgcggtgaggcagcttccgaccagaacagacactttcagagctagaattctcttctacatcactcattagctttattttattggcagccacagcagcacacttccttaagacttttcggttatttccagctctggcttttagaatttcaccagtctccaatgaattgttatcagaatcacttaaatagactctctttcgagtggcttttctgccacatccatttgctaatgaaacgggacctagaaataaggttaacaataagattaaaaag

SEQ ID NO: 20814 - DNA, 17203 bp, Homo sapiens
  MAP TO AC010680.2; EXPRESSED IN ADULT LIVER, SIGNAL = 1.6; EXPRESSED IN BONE MARROW, SIGNAL = 2.1; EXPRESSED IN LUNG, SIGNAL = 1.7; EXPRESSED IN PLACENTA, SIGNAL = 1.6; EXPRESSED IN BRAIN, SIGNAL = 1.6; EXPRESSED IN HELA, SIGNAL = 2.2; SWISSPROT HIT: P16419, EVALUE 3.00e-73; NT HIT: gi16157781, EVALUE 0.00e+00; EST_HUMAN HIT: BF790528.1, EVALUE 0.00e+00
tttcaacaccgttcattccagagtgccaatattttatctaaattacccaaaagccaaactctgaatatatacttttgtgtctttgtttctttctcagatcctccaggaccaccttcaaatccgcatgtcactgatactaccaagaaatctgcttctttggcatggggcaagcctcattatgatggtggacttgaaatcactggctatgtcgtggagcatcaaaaagtaggagacgaggcctggataaaagataccacaggaaccgccctcagaatcactcagttcgttgttcctgatcttcagactaaagaaaaatacaacttcagaatcagtgccatcaacgatgcaggtgttggggagccagcggtgattccagatgttgaaatcgtagaacgggagatggctcctgattttgaactagatgccgagcttcgaagaacacttgttgttagagcaggactcagtattaggatatttgtgccaattaaaggtcgtcctgctcctgaagtgacatggaccaaagataacatcaacctgaaaaaccgagccaacattgaaaatacggaatcatttactcttctgattatcccagaatgtaacagatatgataccggtaaatttgtcatgaccattgaaaacccggctgggaagaaaagtggctttgtgaacgtcagagtcttggacacgccaggcccagtcctcaacctgcggcctacagacatcacaaaggacagtgtcaccctgcactgggacctccctctgatagatggaggctcacgtataacaaactacattgtagagaaacgtgaagcaacacggaaatcttattccacagccaccactaagtgccataaatgcacatataaagttaccggcttgtctgaagggtgtgaatatttcttcagagtgatggcagagaatgaatatggaattggtgagccaacagaaactacagagcccgtaaaagcctctgaagcaccatctccaccagacagccttaacatcatggacataactaagagcaccgtcagcctggcatggcctaagcccaaacacgatggtggcagcaagatcactggctatgtgattgaagcccaaagaaaaggctctgaccagtggacccacatcacaaccgtgaaagggttagaatgtgttgtgaggaatctaactgaaggagaggaatataccttccaagtgatggcagtgaacagcgcggggagaagtgcccctagagaaagcagacccgtcattgtcaaggagcagacaatgcttccagagctggatctccgtggcatctatcagaaactggtcattgccaaagctggtgacaacatcaaagttgaaattccagtgctcggtcgaccgaagcccacagtgacatggaaaaaaggagaccaaattcttaaacagacacagagagttaattttgaaaccacagcgacttcaaccattttaaatatcaatgagtgtgtcagaagtgatagtgggccctatccattaacagcaaggaacattgtaggagaggttggtgatgtcatcaccattcaagtccatgatatcccagggccacctactggaccaatcaaatttgatgaagtttcatctgattttgtaaccttctcttgggacccacctgagaacgatggtggtgtaccaataagcaactatgtagtggaaatgcggcagactgacagtactacctgggttgagttagcaaccaccgttatacgtactacctataaagccacccgccttactactggattagagtatcagttccgtgtaaaagctcagaatagatatggagttggaccaggcatcacatcagcatgcatagttgccaactatccatttaaggttcctggacctcctggtacccctcaggtaactgcagttaccaaggattcaatgacaattagctggcatgagccactttctgatggtggaagccccattttaggatatcatgttgaaagaaaagaacgaaatggtattctctggcagactgtgagcaaagctttagtaccaggcaacattttcaaatcaagtggacttacagatggtattgcttatgagttccgggtgattgcagaaaacatggcaggcaaaagtaagccaagcaagccatcagaacctatgttggctctggatcccattgacccacctggaaaaccagtacctctaaatattacaagacacacagtaacacttaaatgggctaagcctgaatatactgggggctttaaaattaccagttatatcgttgaaaagagagaccttcctaatggacggtggctgaaggccaacttcagcaacattttggagaatgaatttacagtcagtggcctaacagaagatgctgcatatgaattccgtgtgatcgccaaaaatgctgcaggtgccatcagtccaccatctgagccatctgatgctatcacttgcagggatgatgttgaggcaccaaagataaaggtggatgttaaatttaaggacacggttatattaaaagcaggtgaagcattcagactggaagctgatgtttcaggccgcccacctccaacaatggaatggagcaaagatggaaaagagctggaaggcacagcaaagttagaaataaaaattgcagatttctctactaatctggtaaacaaagattcaacaagaagggatagtggtgcctatacccttacagcgactaatcctggtggctttgctaaacacattttcaatgtcaaagttcttgacagaccaggcccacctgaaggacctttggctgtaactgaagtgacatcagaaaagtgtgtactatcatggttccctccactggatgatggaggtgccaaaattgatcattacatagtacagaaacgtgaaaccagcagattggcatggacaaatgtagcctcagaagtccaagtaacaaagctaaaggtcactaaactcttgaaaggcaatgaatacatattccgtgtcatggctgtaaataaatatggagtgggagagccactggaatcagagcctgtgcttgcagtgaatccttatggaccccctgatccgcccaaaaaccctgaagtgacaactattactaaagattcgatggttgtctgctggggacatcctgattctgatggtggaagtgaaatcatcaattatattgtggaacggcgtgataaagctggccaacgctggattaaatgcaacaaaaaaactcttactgatttaagatataaagtgtctggactgacagaaggacatgaatatgagttcaggattatggctgaaaatgctgctggaattagtgcaccaagtcctaccagtccattttacaaggcttgtgacactgtgtttaaacctggaccaccaggtaacccacgtgttctggatacaagcagatcatccatttcaatcgcttggaataaacctatctatgatggtggttcagaaatcactgggtatatggttgagattgccctgccagaggaagatgaatggcagattgtcactccaccagcaggactcaaggcaacttcgtatactatcactggcctcacagagaatcaggaatataagatccgcatctatgccatgaattccgaaggacttggggaacctgcccttgttcctggaactccaaaggctgaagacagaatgctgcctccagaaattgaactggatgctgacctgcgcaaagttgttactataagggcctgctgcaccctgagactttttgttcccatcaaaggaaggcctgcacctgaggtgaagtgggcccgggaccatggagaatctttagataaagctagcatcgaatccacaagctcttacaccctgcttattgttggaaatgtaaacagatttgacagtggcaaatatatactaactgtagaaaatagttcaggcagcaagtctgcatttgtcaatgttagagttctcgatacaccaggccccccacaggatctgaaggtaaaagaggtcactaagacatctgtcacactcacatgggacccacctctccttgatggaggttcaaaaatcaagaactatattgttgaaaagcgggaatcaacaagaaaagcatattcaactgttgcaacaaactgccacaagacttcctggaaggtagaccagcttcaagaaggctgtagctactatttcagggttctcgcagaaaatgaatatggcattgggctgcctgctgaaaccgcagaatctgtgaaagcatcagaacgacctcttcctccaggaaaaataactttgatggatgtcacaagaaatagtgtgtcactctcttgggagaaaccagagcatgatggaggcagccgaattctaggctacattgtggagatgcagaccaaaggcagtgacaaatgggccacgtgtgccacagtcaaggtcactgaagccactatcactggattaattcagggtgaagaatactctttccgtgtttcagctcagaatgaaaagggcatcagtgatcctagacaactgagtgtgccagtgatcgccaaagatcttgtcattccaccagccttcaaactcctgttcaatactttcactgtactggcaggtgaagacctaaaagttgatgttccattcattggccgccctaccccagctgtaacctggcataaagataatgtaccactgaagcagacaactagagtaaatgcagagagcacagaaaataattcactactgacaataaaggacgcctgccgagaagatgttggccattatgtggttaaactgactaactcagctggtgaagctattgaaacccttaatgttatcgttcttgacaaaccagggcctccaactggaccagttaaaatggatgaagtgacagctgatagtattactctttcctggggcccacccaagtatgatggtggaagttctatcaataattacattgttgagaaacgggacacttccacaaccacctggcaaattgtatcagctacagttgcaaggacaacaataaaggcttgcagactgaagactggatgtgaatatcagtttagaattgcagctgaaaacagatatgggaagagtacctacctcaattcagagcctactgtagcccaatatccattcaaagttcctggtcctcctggcactccagttgtcacactgtcctccagggacagcatggaagtacaatggaatgagccaatcagtgatggaggaagtagagtcattggctatcatctagaacgcaaggaaagaaatagcatcctctgggttaagttgaataaaacacctattcctcaaaccaagtttaagacaactggccttgaagaaggtgttgaatatgaatttagagtctctgcagagaacatcgtgggcattggcaagccgagtaaagtatcagaatgttatgtggctcgtgacccatgtgatccaccaggacggccagaggcaatcattgtcacaaggaattctgtgactcttcagtggaagaaacccacctatgacggtggaagcaagatcactggttatattgttgagaagaaagaattacctgagggccgttggatgaaagccagttttacaaatattattgacactcattttgaagtaactggcctagttgaagatcacagatatgagttccgggttatagcccgaaatgccgcaggagtgtttagtgagccttcagaaagcacaggagcaataacagctagagatgaggtagatccaccacgaataagtatggatccaaaatacaaagacacaatcgtggttcatgctggtgaatcattcaaggttgatgcagatatttatggcaaaccaataccaaccattcagtggataaaaggtgatcaggagctttcaaacacagctcgattagaaataaagagcaccgactttgccaccagtctcagtgtaaaagatgcagtacgtgtcgacagtggaaattacatactgaaggccaaaaatgttgcaggagaaagatcagttactgtgaatgtcaaggttcttgacagaccagggccacctgaaggacctgttgttatctcaggagttacagcagaaaaatgcacactagcttggaaacccccacttcaggatggtgggagtgacatcataaattatattgtggaaaggagagaaaccagccgcttagtttggactgtggttgatgccaatgtgcagactctcagctgcaaggttactaagcttcttgaaggcaatgaatatactttccgtataatggcagtaaacaaatatggtgttggtgaacctcttgaatctgagccagtagttgccaagaatccatttgtagtaccagatgcaccaaaagctccagaagtcacaacagtgaccaaggactcaatgattgttgtatgggaaagaccagcatctgatggtggtagtgaaattcttggatatgttcttgagaaacgggataaagaaggcattagatggacaagatgccataagcgtctgattggagagttgcgcctgagagtaactggactcatagaaaatcacgattatgagttcagagtttctgctgagaatgctgctggacttagtgaaccaagccctccttctgcttaccaaaaggcttgtgatcctatttataaaccaggacccccaaacaaccccaaagtcatagacataaccagatcttcagtattcctttcttggagcaaaccaatatatgatggtggctgtgaaattcaaggatacattgttgaaaaatgtgatgtgagtgttggtgaatggacaatgtgcactccaccaacaggaattaataaaacaaacatagaagtagagaagctgttggaaaagcatgaatacaacttccgtatctgtgctattaataaagctggagttggagaacatgctgacgtccctggacctattatagttgaagaaaaattagaagcaccagacattgatcttgacctagaactaaggaaaatcataaatataagggcaggtggctccttaaggttatttgttcctataaaaggtcgtcctacaccagaagttaaatggggaaaggtggatggtgaaatccgagatgcagctataattgatgtcactagcagtttcacctctcttgttcttgacaatgtcaaccgatatgatagtggaaaatatacgcttacattagaaaacagcagtggaacaaagtctgcctttgttactgtgagagttctggacacgccaagtccacctgttaacctgaaagtcacagaaatcaccaaagactcagtatcaattacatgggaacctcctttgttggatgggggatccaaaataaaaaattacattgttgagaaacgtgaagccacaagaaaatcatatgctgctgttgtaactaactgccataagaattcttggaaaatcgatcagctccaagaaggttgcagttattactttagagtcacagctgagaatgagtatggtattggccttcctgcccagactgctgatccaattaaggttgcagaagtgccacaacctcctggaaaaataactgtggatgatgtcaccagaaacagtgtctctctgagttggacaaaacctgaacatgatggtggcagtaaaatcattcagtatattgtggaaatgcaagctaaacacagtgagaaatggtcagagtgtgctcgagtaaagtctcttcaggcagtaattaccaacctaactcaaggggaagaatatctttttagagttgttgctgtaaatgaaaaggggagaagtgatcctcggtcccttgcagttccaatagttgccaaagatctggtaattgagccagatgtaaaacctgcattcagtagttacagtgtacaggttggccaagatttgaaaatagaagtgccaatttctggacgtcctaagccaaccattacctggactaaagatggtctcccactgaagcagaccacaagaatcaatgttaccgattcactggatctcaccacactcagtattaaagaaactcataaggatgatggtggacaatatggaatcacagttgccaatgttgttggtcagaagacagcatccatcgaaattgtaactctagataaacctgatcctccaaaaggacctgttaaatttgatgacgtcagtgctgaaagtattacattatcttggaaccctccattatatacagggggctgccaaatcaccaactacattgttcagaaaagagatacaaccaccacagtatgggatgttgtttctgctactgttgctagaactacactcaaagtgaccaaactgaaaactggtacagaataccaatttagaatatttgccgaaaacagatatggacaaagctttgccttagagtctgatccaattgtagctcaatatccctacaaagaaccaggccctccaggtacaccatttgccacagccatttccaaagactccatggtcatacagtggcatgaaccagtcaacaatggtggaagccccgtcataggttaccacctggagagaaaagaaagaaacagtattttgtggacaaaggtcaacaaaactattattcatgacacccaattcaaagcacagaatcttgaagaaggcattgaatatgaattcagagtgtatgctgaaaatattgttggtgtaggcaaagcaagcaagaattctgaatgctatgtagccagagatccctgtgacccaccaggaaccccagaaccaataatggttaaaagaaatgaaatcactttacagtggaccaaacctgtgtatgatggtggaagtatgattacaggctacattgtagagaaacgtgatttgcctgatggtcgttggatgaaagctagctttacaaatgtcattgaaactcaatttactgtgtcaggtcttactgaagatcaaagatatgaattcagagtcattgcaaagaatgcagctggtgcaataagtaaaccctctgacagtactggaccaataactgccaaggatgaggttgaactcccaagaatttcaatggatccaaaattcagagacacaattgtggtaaatgctggagaaacattcagacttgaggctgatgtccatggaaagcccctacctaccattgagtggttaagaggagataaggaaattgaagaatctgctagatgtgaaataaagaacacagatttcaaggctttacttattgtaaaagatgcaattagaattgatggtgggcagtatattttaagagcttccaatgttgcaggttctaagtcattcccagtaaatgtaaaagtattagatagaccaggacctccagaagggccagtccaggttactggagtcacttctgaaaaatgctctttaacatggtctccaccacttcaagatggtggcagtgacatttctcactatgttgttgaaaagcgagaaaccagtcgacttgcctggactgttgttgcttcagaagttgtgaccaattctctgaaagttaccaaactcttagaaggtaatgaatatgttttccgtataatggctgtcaacaaatatggtgttggagagcctttggaatctgcaccagtactaatgaaaaatccatttgtgcttcctggaccaccaaaaagcttggaagtcacaaatattgccaaagactccatgaccgtctgttggaaccgtccagatagtgatggtggaagtgagattattggttacattgtagagaaaagagacagaagtggcattcgatggataaaatgtaataaacgccgcattacagatttgcgtctaagagtgacaggattaacagaagatcatgagtatgaattcagggtctctgcagaaaatgctgctggagttggggaaccaagtccagctacagtttattataaagcctgtgatcctgtgttcaaacctggcccacctaccaatgcacacattgtagacaccactaaaaattcaatcacacttgcctggggtaaacccatctatgatggcggcagtgagatcttgggatatgtagtagaaatctgtaaagcagatgaagaagaatggcaaatagttactccacagactggcctgagagtcactcgatttgaaatttcaaaactcactgaacaccaagagtataaaatacgagtctgtgccctcaacaaagttggtttaggtgaggctacatcagttcctggtactgtgaaaccagaagataaacttgaagcacctgaacttgaccttgactccgaattaagaaaaggaattgttgtaagagctggtggatctgccagaattcacattccattcaaaggtcgtccaacgcctgagatcacttggtctcgagaggaaggtgaattcacagataaggtccaaattgaaaagggagtaaactatacccaactatcaatagataactgtgatagaaatgatgctggaaaatacattcttaagttggaaaacagcagtggatcaaagtctgcttttgtaactgtgaaagttcttgacactccaggaccaccacagaatttggcagtcaaagaagtgagaaaagattctgccttcctggtatgggagccacccatcattgatggaggggcaaaggtcaagaactatgtgattgacaaacgtgagtcaaccagaaaagcgtatgctaatgtgagtagtaaatgcagcaaaacaagttttaaagtggaaaaccttacagaaggagccatttattacttcagagtcatggctgaaaatgaatttggagttggtgttccagtggaaactgttgatgccgtgaaagctgctgaacctccttccccaccaggaaaggttacactcactgatgtgtcccagaccagtgcatcacttatgtgggagaaacctgaacatgatggcggtagcagagtcctggggtacgttgttgaaatgcagcccaaaggaactgaaaaatggagcattgtggctgaatccaaagtctgtaatgcagttgttactggtttgagttctggacaagaatatcagttccgtgtcaaggcttataatgagaaaggaaaaagcgatccaagagtgttgggtgttcctgtcatagccaaggacttgactatacagcctagtttaaagttaccatttaacacatatagtatccaagctggagaagatcttaaaatagaaattccagttataggccgaccaagacctaacatttcttgggtcaaagatggtgagcctcttaaacagacaacaagagtaaacgttgaagaaacagctacctcaactgttttgcacattaaagaaggtaacaaagatgactttggaaaatacaccgtaacggcaacaaatagtgcaggcacagcaacagaaaatctcagtgttatcgttttagaaaagcctggacctccagttggcccagttcggtttgatgaagttagtgcagactttgtagtcatatcttgggaacctccagcctatactggtggctgccaaataagcaactacattgtagagaagcgagatacaaccaccaccacttggcacatggtatcagcaacagttgcaagaacaacaattaaaataaccaaactgaaaacaggcacggagtaccagtttagaatttttgctgaaaacaggtatggaaaaagtgccccactggattctaaggcagttattgtacaatatccatttaaagaacctggaccacctggaactccttttgtgacatcaatctcaaaagatcagatgcttgtgcaatggcatgagccagtgaatgatggaggcaccaaaattattggctaccatcttgaacagaaagaaaagaacagtattttatgggtcaagttaaataagacccccattcaggacaccaaattcaaaacaactgggcttgatgagggccttgagtatgagttcaaagtttctgctgaaaatattgttggcattggcaagcctagcaaagtgtcagaatgctttgttgctcgtgatccatgtgacccacctggtcgccctgaagccattgttattacaagaaacaatgtcacactgaaatggaagaaacctgcctatgatggtggtagcaaaataacaggttatattgtagaaaagaaagatctacctgatggccgctggatgaaagccagctttaccaacgtattagaaactgaatttacagtgagtggacttgtagaagaccaaagatatgaatttagagtaattgcaagaaatgcagctggaaactttagtgaaccatctgatagtagtggtgccattactgcaagagatgaaattgatgcaccaaatgcctctctggatccaaaatataaagatgtcatcgttgttcatgcaggagagacttttgttcttgaagccgacatccgtggcaaacctatacctgatgttgtttggtcaaaagatggaaaagaacttgaagaaacagctgctagaatggaaattaaatctactattcagaaaacaactcttgttgtcaaagactgtatacggactgatggaggacaatatattctgaaactcagcaatgttggtggtacaaagtctatacccatcactgtaaaggtacttgacaggccagggcctcctgaagggcctctgaaagttactggagttactgcggaaaaatgttacctggcatggaacccacctttgcaagatggtggtgctaatatttcacattacatcattgaaaagagggagacaagccgactctcttggacccaggtttcaactgaggtacaggcccttaactacaaagttactaaacttcttcctggtaatgagtacattttccgtgtcatggctgtgaataaatatggaattggagagcccttggaatctgggcctgttacggcctgtaatccttataagccaccaggtcctccctcaacacctgaagtctcagcaatcaccaaagattctatggtagtaacatgggcacgcccagtagacgacggaggtaccgaaattgagggctacattcttgaaaaacgagataaggaaggcgttagatggaccaagtgcaacaagaaaacattaacggatctgcggctcagggtaactggtcttaccgaaggccattcctatgaattcagagttgctgctgaaaatgcagctggtgtgggagaacctagtgagccatctgttttctaccgtgcgtgtgatgccttgtatccaccaggtcccccaagcaatccaaaagtgacggacacttccagatcttctgtctccctggcatggagtaagccaatttatgatggtggcgcacctgttaaaggctatgttgtagaggtcaaagaagctgctgcggatgaatggacaacctgcactccaccaacaggattacaaggaaagcagttcacagtgaccaagcttaaagaaaacactgaatataacttccgtatttgtgccatcaattctgaaggtgtaggtgaacctgcaactctacctggctcagtggttgctcaggagaggatagagccaccagaaatagaactcgatgctgatctcagaaaggtggtcgttctgcgtgcaagtgctactttacgcttatttgtcactatcaaaggtcgaccagaacccgaagttaaatgggaaaaggcagaaggcattctcactgacagggctcagatagaggtgaccagctcatttacaatgttggtgattgataatgttaccagatttgacagtggtcggtataatctgacattagaaaataatagtggctccaaaacagcttttgttaacgtcagagttcttgactcaccaagtgcccctgtgaatttgaccataagagaagtgaagaaagactcagtgacgttgtcctgggaaccaccacttattgatggtggagctaagattacaaactacattgtcgaaaaacgagaaactacaagaaaagcctatgctaccattacaaataattgcactaaaactactttcagaattgaaaatctacaagaaggatgttcttactacttccgagtcttggcttccaatgaatatgggattggtttgccagctgaaacaacagaacccgttaaagtgtctgaaccacccctcccacctggaagagtaactcttgttgatgtgacccgtaatacagctacaattaagtgggagaaaccagaaagtgatggtggcagcaaaattactggttatgtggttgaaatgcagactaaagggagtgaaaagtggagcacctgcacacaagttaagactctagaagcaactatatctggcttaactgcaggagaagagtatgtcttcagggtagctgcagttaacgaaaagggaagaagtgatccaagacaacttggagtgccagtaattgcaagggatattgaaataaagccttcagttgagcttcctttccatactttcaatgtaaaggctagagaacaacttaagattgatgtgccattcaaaggaagacctcaagctactgtgaactggagaaaagatggtcagactcttaaagagacaactagagtcaatgtttcttcttcaaagactgtaacatcactatctattaaggaagcttcaaaggaagatgttggaacttatgaattatgtgtttcaaacagtgctggatccataacagttcctattactataattgtccttgacagaccaggacctccaggtcctatacgtattgatgaggttagttgtgacagcataaccatttcttggaatcctccagaatatgatggtggctgccaaattagcaattacattgttgaaaagaaagaaaccacctctacaacatggcacatagtttcacaagcagttgcaagaacatccattaaaatagttcgcctgacaacaggaagtgagtatcagttccgtgtttgtgcagaaaaccgctatggaaagagctcctacagtgaatcttcagctgttgttgcagagtatccattcagtcccccaggtcctcctggtactcctaaagttgtgcatgccacaaaatctaccatgcttgtaacctggcaagtgccagttaatgatggaggaagtcgagtaattggctatcatcttgagtataaagaaagaagcagcattctttggtcaaaagcaaataaaatcctcattgctgatactcaaatgaaagtctccggccttgatgaaggactgatgtatgagtatcgtgtatatgctgaaaatattgctggaattggtaaatgcagtaaatcttgtgaaccagtccctgcaagagatccttgtgaccctcctggacaacctgaagtcacaaatatcacaagaaaatcagtgtcacttaaatggtctaaaccacattatgatggtggagctaagatcacaggatacattgttgaacgcagagaactaccagatggccggtggctgaagtgcaattatactaatatacaagaaacatactttgaagtaactgaacttactgaagatcagcgttatgaattccgggtttttgcaaggaatgctgctgactcagttagtgagccatctgaatccactgggcctattatagttaaagatgatgttgagcctccaagagttatgatggatgtcaagttccgagacgttattgttgtcaaagctggagaggtccttaagataaatgcagacattgcagggcgacctctgccagtaatttcctgggccaaggatggtatagaaattgaagaaagagcaagaacagaaatcatctcaacagacaatcatactttgttaacagttaaagactgtataagacgagacactgggcaatatgtactaacactgaagaatgttgccggcactcggtctgtggccgttaattgcaaagtacttgataagcctggtccaccagcaggaccacttgaaataaatggcctcactgctgagaaatgctctctttcctggggacgtccccaagaagatggtggtgcagatatcgactattacatcgtagaaaaacgtgaaacaagccaccttgcatggacaatatgtgaaggagagttacagatgacatcctgtaaagtaaccaagttactcaaaggcaatgaatatatatttagagtaactggtgttaataaatatggtgttggtgagcccctagagagtgtagctataaaggcactagatccatttacagttccaagtccacccacgtctttggaaattacttctgtgaccaaagaatctatgacactttgctggtcaagacccgagagtgatggaggtagtgaaatatctggatatataattgaaaggcgagagaaaaatagcctaagatgggtgcgtgtaaacaaaaaaccagtttatgatctaagagtgaaatcaacaggacttcgggaaggatgtgaatatgaatatcgtgtttatgcagaaaatgctgctggcctaagtcttccaagtgaaacctctcccttaattagggcagaagatccagtgttcctaccatctcctccatccaaacccaaaattgtggactcaggcaagacaactataactattgcctgggttaagccgctgtttgatggtggggccccgataactggatatactgtagaatacaaaaaatctgatgacactgactggaaaacttccattcagagcttacgagggacagaatatacaataagcggactaacaacaggagctgaatatgttttcagagtaaaatctgtcaataaggttggtgctagtgaccccagtgatagctctgaccctcagatagcaaaggaaagagaagaagaacctttatttgatattgacagtgaaatgaggaagaccttgattgtcaaggctggtgcctcatttaccatgactgtgcctttccgaggaagaccagtacccaatgtcttgtggagtaagccagacactgacctccgtactagagcttatgttgataccacagactcccgtacatcactgaccattgaaaatgccaacagaaatgactctggaaagtacacattaacaattcagaatgttttgagtgctgcttcactgaccttagttgtcaaagttttagataccccaggtcctccaaccaacattactgtgcaagatgtaaccaaagagtctgcagtgttatcctgggatgttcctgaaaacgatggtggagcaccagtgaagaattaccacatagaaaaacgtgaggccagcaagaaagcatgggtctctgtgaccaacaactgtaaccgcctctcctacaaagttaccaatttacaagaaggagctatctattacttcagagtctctggagaaaatgagtttggtgttggtataccagctgaaacaaaggaaggagtaaaaataacag

SEQ ID NO: 20815 - DNA, 563 bp, Homo sapiens
  MAP TO AL023553.5; EXPRESSED IN PLACENTA, SIGNAL = 2.5; EXPRESSED IN BRAIN, SIGNAL = 1.7; EXPRESSED IN ADULT LIVER, SIGNAL = 1.6; EXPRESSED IN HELA, SIGNAL = 2.3; EXPRESSED IN BONE MARROW, SIGNAL =   2; EXPRESSED IN FETAL LIVER, SIGNAL = 1.8; EXPRESSED IN LUNG, SIGNAL = 1.6; EXPRESSED IN HEART, SIGNAL = 1.6; SWISSPROT HIT: P40313, EVALUE 3.60e-01; NT HIT: AF378903.2, EVALUE 1.00e-04; EST_HUMAN HIT: BF772472.1, EVALUE 3.00e-03
ttgagcacttgggtgttgaggtgttgctgcctttcttaccaaatgttttgggggaagtgctccccacggctgggaggagcgcctcagtgaagggagtactgtgaaatgggacaggtgatgaggcagggtggcatcgcgccttgagcaagtcacatgggttctcagagccacctccagatgctgaagtggacgaggcatcacctattctttgcagttgaggaaaagttcatagctttgtgtacccactggggcctcccaggacttcttcctcaggggccttgtggggctggagccagctcctggaagaaccaccaaccccgatgagaagccaggtggggatgctccacacccaggatgaggccgggcctgggcccatcacaggacagtttctctggttcttgtcacatcctggggtcatggtggtatgggtgtttggttactgtgctacaaatgaggaaactgaggcatggggcagcattcaaaggcccaagacatatagcaggaaatatcagagctattcaagagcccaggccacctgtctcccaaggctctggctcttcttg

SEQ ID NO: 20816 - DNA, 1240 bp, Homo sapiens
  MAP TO AC010422.6; EXPRESSED IN ADULT LIVER, SIGNAL = 1.7; EXPRESSED IN PLACENTA, SIGNAL = 1.6; EXPRESSED IN BRAIN, SIGNAL = 1.7; EXPRESSED IN HELA, SIGNAL = 2.1; EXPRESSED IN BONE MARROW, SIGNAL = 1.9; EXPRESSED IN LUNG, SIGNAL = 1.6; EXPRESSED IN HEART, SIGNAL = 1.6; NT HIT: gi14759689, EVALUE 0.00e+00; EST_HUMAN HIT: AW504245.1, EVALUE 0.00e+00; SWISSPROT HIT: P17024, EVALUE 0.00e+00
aagtcctatggttgaagcactctgtgaaaataaagaagattgtccatgtggaaaaagcactagccagattcctgatcttaatacgaacctggaaactcctactggattaaaaccatgtgactgcagtgtgtgtggggaagtcttcatgcatcaggtctcccttaataggcacatgagatctcacactgaacagaaaccaaatgagtgtcacgaatatggagagaagccacataaatgcaaagaatgtgggaaaaccttcactcgcagctccagtattcgaacccatgaaagaattcacactggagagaaaccctatgaatgtaaggaatgtggcaaagccttcgcatttctcttttcctttcgaaaccatataagaattcatactggagagacaccctatgaatgtaaggaatgtgggaaggcattcagatatctcactgctcttcggcgccatgaaaaaaatcacactggagagaaaccctacaaatgtaaacagtgtggaaaagcctttatatattaccagccttttctaacccacgaaaggactcacactggagagaaaccttatgaatgtaagcaatgtgggaaagccttcagttgtcccacgtacttacggagtcatgagaaaactcatactggagagaaaccttttgtatgtagggaatgtgggagagccttcttttctcactcaagccttcgaaaacacgtgaaaacccacaccggagttcaaccttatacatgtaagaaatgtggggaagccttcaagtcatctagttcctgtgaagtgcacgaaagaactcattttggagaaaaaccctatgaatgtaaacaatgtggtaaagccttcaattcttcaagttaccttcagttgcacgaaagagttcacactggcgagaaaacttacgaatgtaaagaatgtggtaaagcctttctttattccactcactttcgaatccatgaaagaacccatactagagagaaaccctatgaatgcaaacagtgtggtcgggtcttcatttacttcagtcaccttcgaaggcacgaaagaagtcacactggagtgaaaccatgtgagtgtaagcagtgtggcaaagctttcacttgtttaaattccctgaaagtacacaaaagaattcatactggagaaagaccctttcagtgtagacaatgtggtaaagccttcagttactcaaagtctttgcacgtgcacgaaaggactcatagtagacagaagccctaa

SEQ ID NO: 20817 - DNA, 550 bp, Homo sapiens
  MAP TO AC007463.3; EXPRESSED IN FETAL LIVER, SIGNAL = 1.8; EXPRESSED IN HELA, SIGNAL = 2.6; EXPRESSED IN ADULT LIVER, SIGNAL = 1.5; EXPRESSED IN PLACENTA, SIGNAL = 1.5; EXPRESSED IN BRAIN, SIGNAL = 1.6; EXPRESSED IN LUNG, SIGNAL = 1.6; EXPRESSED IN HEART, SIGNAL = 1.6; SWISSPROT HIT: Q29512, EVALUE 5.20e+00; NT HIT: X01871.1, EVALUE 1.30e-01; EST_HUMAN HIT: AL565457.1, EVALUE 2.00e-01
tgcctatgtgtcattcatcccaacatctgcaaaatctctgaggggctgtccagcaaactacggaaaatggtaggtgccccctcccaaaaagaaatttgcaagtgttgtttgcaattgatgtttgcaagtgtttaattaattaattaattaagtatacctccattcattctgcctgctccagggtttttacgtgtttggtttcttctgtcttcaatattctaccccattcttctcctgactcttcttccagataaactcaccttcactcttcaaagaaaacttgctcagcttccccagtccagagattcctgtgtcacaaattctcatagatctctggtgcactgagattacaataagctaaaatataattacatgtttattagtgtaagcatttgatttgtttttttcctcctccatttgattaccaactccatgtggtagtgaccatccccgttcttcattactaacctggcattcagcatggtactcagtatgtagacatgtgagcaaagactctgcattagccattagaacacatcaaggctgagga

SEQ ID NO: 20818 - DNA, 1459 bp, Homo sapiens
  MAP TO AC003043.1; EXPRESSED IN LUNG, SIGNAL = 2.1; EXPRESSED IN HEART, SIGNAL = 1.9; EXPRESSED IN FETAL LIVER, SIGNAL = 2.3; EXPRESSED IN ADULT LIVER, SIGNAL = 2.8; EXPRESSED IN PLACENTA, SIGNAL = 2.2; EXPRESSED IN HELA, SIGNAL = 3.8; EXPRESSED IN BONE MARROW, SIGNAL =   2; SWISSPROT HIT: Q07703, EVALUE 3.30e+00; NT HIT: D16195.1, EVALUE 1.00e-47; EST_HUMAN HIT: BI522882.1, EVALUE 0.00e+00
gaggcgctgcctgaagccgaggcaacagcaccgcaagctgcagctctcggggccctctgacggtaacaaacgagaccaggccacctcgatgtcccagctccacctcatctgtgggggacccctggaacccgccccgtcgggggaccccgaggctccgcctccaggccccctccactcggccttctccagctcccgggacttggcctcctcccgggatgacttcttccgcaccaagccgcgctctgccagccgcccggccgccgagccttcgggtgcccgcgggggcgagagcgccgggctcaagggcgctcgctcggccgagggccccggcgggctggagcccggcctagaggagcaccggcgggggccctcgggggctgcggccttcctgcacgagccgccctcgccgccgccgcccttcgaccactacctgggccacaagggggcggccgagggcaagacccccgacttcctgctgtcgcagtcggtggaccagctggcgcggccgccgtcgctgggccaggcggggcagctcatcttctgcggctccatcgaccacctcaaggacaacgtctaccgcaacgtcatgcccaccctggtgatccccgcgcactacgtgcgcctcggcggcgaggcgggcgccgccggcgtgggcgacgagccggccccgccggagggcacggcacccggcccggcgcgcgcttttccccagcccgacccccagcgcccgcagatgccgggccactcgggcccggggggcgagggcggcgggggcggcggcgagggctggggggccgggcgcgcggcgcccgtcagtggctcagtcaccatccctgtgctattcaacgagtccaccatggcgcagctcaacggggagctgcaggccctgaccgagaagaagctgctggaactgggcgtgaagccgcacccgcgcgcctggttcgtgtccctcgacgggcgctccaactcgcaagtgcgccactcttacatcgacctgcaggcgggcggcggggcacgcagcaccgacgccagcctggactcgggcgtagatgtccacgaggcgcggcccgcgcgccgccggcccgcgagggaggagcgggagcgcgccccgcctgccgcgccgccgccgccgcccgcgcccccgcgcctggcgctcagcgaggacacggagcccagcagcagcgagagccgcacgggcctctgctctccggaggacaactcgctgacgccgctgctggacgaggtggcggcgcccgagggccgggcggccacggtaccccgggggcggggccgcagccgcggggacagctcccgcagcagcgccagcgagctgcggcgcgactcgctcaccagcccggaggacgagctgggggcggaggtgggcgacgaggcgggagacaagaagagcccgtggcagcggcgggaggagcggccgctgatggtgttcaacgtcaagtag

SEQ ID NO: 20819 - DNA, 595 bp, Homo sapiens
  MAP TO AL121774.3; EXPRESSED IN HELA, SIGNAL = 1.5; EXPRESSED IN ADULT LIVER, SIGNAL = 1.2; EXPRESSED IN HEART, SIGNAL = 1.3; SWISSPROT HIT: P34092, EVALUE 2.00e-03; NT HIT: gi15300324, EVALUE 0.00e+00; EST_HUMAN HIT: BI085108.1, EVALUE 0.00e+00
tgaacctgccccagcagggccaccggtgagcttggtccctggccactgctctcctccagccctgcagtggggctgggaaggggtcccttctccatgacaatcacccgccggttgtcctccagggtgaggtctgcagtgacatacagggtctcgcctccatccggcttgctctggggcagaggcccaggggattgggcagcctctccgcctccccggcccctcttggtgctcaggctgcggcagcggcccaccctgcccgacagaggtggctctaccatgttctccggcaccgagtggctcctgttgacgggtgggccgcggggccggccgccccctgctcggcgtgcctcatcgcgggaggcatacttggagcagagctcacggacgtcgggccagctgaaggtctctgtggggctgagggggctccgggcggagggccggcccccaggcgaggtggtcctctggctgacagcagacgggttgaagaagaaacgctgtggtgacatctccccagccgaggagggcttgggagggctgtgctcctgggccatcagctgctcatagtcaaatagagacagcaccggcttcctcttac

SEQ ID NO: 20820 - DNA, 1521 bp, Homo sapiens
  MAP TO AF053356.1; EXPRESSED IN ADULT LIVER, SIGNAL = 2.9; EXPRESSED IN BONE MARROW, SIGNAL = 2.9; EXPRESSED IN LUNG, SIGNAL = 2.7; EXPRESSED IN HELA, SIGNAL = 4.5; SWISSPROT HIT: Q9Y493, EVALUE 1.00e-110; NT HIT: AY046055.1, EVALUE 0.00e+00
ctctgactttcagccttggcccacgctccatccacctcatacctgtactggatctggaggttgtggtagtgcccagaatcacactggtcataggggtacttggagcatgtggagacatcaccaaggctgccagcccagtggctgtggggctgggatggggtggcctcagggctgtgagcttctctgtgggaatggtgggtttttctgtggggatggtgggtttttccgtggggatggtaagtttttccgtggggatggtgggtttttccgtggagatggtgggtttttctgtggggatggtgagtttttctggggagatggtgggtttttctgtggggatggtgagtttttctgtggagatggtagtctcttcagtggggatggtgggtttttccgtggggatggtgggtttttccgtggagatggtgggtttttctggggagatggtgggtttttctgtggggatggtgagtttttctgtggagatggtagtctcttcaatggggatggtgggtttttccgtggggatggtgagtttttccgtggggatggtgagtttttctggggagatggtgggtttttctgtggggatggtgggtttttctgtggagatggtgggtttttccatggggatggtgagtttttctgtagagatggtagtctcttcaacagaggtggtggtttcttcagtggggagagtgggtttttccatggggatgctgggtttttctgtggagatggtggtctcctcagtgggggtggtgggctcttctgtggagatggtgggtttttctgtggggatggtgggtttttccgtggggatggtgagtttttccgtggggatggtgagtttttctggggagatggtgggtttttctgtggggatggtgggtttttctgtggagatggtgggtttttctgtggggatggtgggtttttctgtgggggtggtgggtttttctggggagatggtggatttttctgtggggatggtgggtttttctgtggggatggtgggtttttctgggcagatggtgggtttttctgtggagatgatagtctcttccatggagatggtgggtttttccgtggggatgctgggtttttctgtagggatgctgggtttttctgtagggatgacaggctcttccatgtaggtggtggtctcctcagtgggggtggtgggctcttctgtggggacggtgggtttttctgtggaaatggtgggtttttctgagggaatggtgggtttttctgagggaatggtgggtttttctgtgaggatggtgggtttttctgagggaatggtgggtttttctgagggcatgttgggtttttctgaaggaatggtgggtttttctgtggagatggtgggtttttctgtgggaatggtgggcttttctttggggactgtgggcttttctgtggtgacactgggtttttctatggaaactgtaggtttcttggtggagattgtagggttttctgtgaggccagtggtttcagaagggccagtggaag

SEQ ID NO: 20821 - DNA, 670 bp, Homo sapiens
  MAP TO AC004506.1; EXPRESSED IN PLACENTA, SIGNAL = 1.5; EXPRESSED IN BRAIN, SIGNAL = 1.3; EXPRESSED IN ADULT LIVER, SIGNAL = 1.2; EXPRESSED IN HELA, SIGNAL = 1.5; EXPRESSED IN BONE MARROW, SIGNAL = 1.4; EXPRESSED IN LUNG, SIGNAL = 1.2; EXPRESSED IN FETAL LIVER, SIGNAL = 1.1; EST_HUMAN HIT: AL573982.1, EVALUE 0.00e+00; NT HIT: gi14767767, EVALUE 0.00e+00; SWISSPROT HIT: P17941, EVALUE 2.00e-01
cacctgccccgcctcgtcctcgcctgtgtcccccccgtcatccccgctccaggcgcccccggggagccagcctccgcagccaccgtcaagaggaagccgaagagccggtggaggcctgaagagaacaaagtagagctctcacctgctgagctggtgcagagggacgtggatgcctctccctcacctctgtcagttcaggacctcaaggggctcggctatgagaacgggaagtccgtgggtctagcgggcctcacggagctatcgtgctcccagaagcagcagctgaaggaccagcaggagatgcatcagatgtacgacatgatcatgcagcacaagtgggccatgcaggatatgcagctgctgtgggagaaggcggtgcagcagcaccagcacggctaccacagcgacgaggaggtgagcagcgagctgcgcacctgggagcaccagctgcagcgcatggagatgaacaagacgagggaatgggccgagcagctgacgaagatgagccgaggcaagcacttcatcggagacttcctacctccagacaagctggagaagtttatggagactttcaaggccctgaaggagggtcgcgagcctgactactcggagtacaaggagttcaagctcaccgaggagaacgtgctgatgaagatgggctggaaggagg

SEQ ID NO: 20822 - DNA, 656 bp, Homo sapiens
  MAP TO AL109804.24; EXPRESSED IN ADULT LIVER, SIGNAL = 1.9; EXPRESSED IN LUNG, SIGNAL = 2.1; EXPRESSED IN FETAL LIVER, SIGNAL = 1.8; SWISSPROT HIT: O43301, EVALUE 3.00e-73; EST_HUMAN HIT: BI818099.1, EVALUE 0.00e+00; NT HIT: gi16194862, EVALUE 0.00e+00
tcagttggaaagaaagtcgatggacgcgcgcacggagcgattggtgctgacgtcgacggcggtgaccttaatttcggtgtcgccaaactgcatggcggcgcggatctcgcggcggccgggaggcgcgccggcggtgtcctggccgcagtcggcgggctcaagctcgaggctgagcgcgccgcatttgcgcacgccggggtcggtgatgaagcgcgcatcctctgccgcgcagcagtacaggttgatgagtacgcgccgctggccgggacgcgccgggcagtagctgcgccgcacctcctcgcccagggccaccgactgctcggcggccacgaagcgctcgaagacgtcggtgcaccagcggcggccgtcgcgaaccagcagcttttcgggcgggtggcgcccaggcacaaagcggttgagcacgcccacgccataggtgagcggcgagcggcggacccgcaccacgcccggcgcctggccgaacagcaccgcgcctttgaggatggtgaggcccacgtcgtgcgggaccacgacacgcagaccgcgggcgcccagcgccgcctgcaccgcgtgctgcagcaccgctgactcggcgaagccgcccactaggaacagcagcttcacaccctgcacctccggccgtgccagcagggcct

SEQ ID NO: 20823 - DNA, 1088 bp, Homo sapiens
  MAP TO AC010519.6; EXPRESSED IN ADULT LIVER, SIGNAL = 1.5; EXPRESSED IN HELA, SIGNAL = 1.6; EXPRESSED IN LUNG, SIGNAL = 1.7; EXPRESSED IN FETAL LIVER, SIGNAL = 1.3; SWISSPROT HIT: P03181, EVALUE 2.10e-01; NT HIT: gi11425304, EVALUE 0.00e+00; EST_HUMAN HIT: BE259138.1, EVALUE 0.00e+00
ttatctggtcaacgtcctggcgccgaggccaccgttgtgactggagggtgggtaggcctcgggcctgtgcaggggcggcggggatgcgggggtgccggccgaggcagcgtgggggtacgagggcgcgggcgtccggccgggggcctgctgcaggttcaggatgctgtcgatggcgctctgcaggtgctcggtgagcgtgtcatcctgcgggctgtcgctggagaagctggcctggtccacgtcgggcgactcggacttgcgccgcttggcagggggcagcccgggcgcctcccagtcggggtccccggtgccttgggcggcgctggctgcgggctctggcggggggcccttcagcatacgctggtacagctcgtcctccacggccgccagctcgcggatgagcccgctggtggcctcgtccactttggcgggcagcggcgccgggctgcctccccgtgccctgcctgcgggcgtcccctccggcgcgccagggccccccacgttctcgcggtaggtcttgcgcagtggcaggcgcgggcagtgcggggcggtgcccaggggcttgcgctcgggggcggcaggcggcgggtggtccaccgtgccgttcatctggcccgtgggcggcggtggtggtggcggccgtggcgggggctcggccaccttgagggtagcggggggtggcgggggctggtgcacggggtccagggccgtgttgtgcacgaccttgctgagcccggcttcctgcttgatcttgagcttgagcccgatgcggctccgggcctcgtaggtcttgatgggcgggcggttgcgggagggcatggggccgtcctcgtcggcgtccaaggaggaggcggcagaggaggaggaggaagaggaggacagggaggaggacgcccgggcccaggtgaccgaaggggagccgcctgccccgccgtgccggatcacaagcttggtgggcaggtgtggagggggctgggtggaggccccgggagctgaagacgacagggggccgtggccgggaagccgatgaccctcggaagaggctgcgatggggaggccgagcgagcgggaggaagacacgtactcgt

SEQ ID NO: 20824 - DNA, 895 bp, Homo sapiens
  MAP TO AP001101.1; EXPRESSED IN LUNG, SIGNAL = 2.7; EXPRESSED IN HELA, SIGNAL = 0.83; EXPRESSED IN ADULT LIVER, SIGNAL = 1.6; EXPRESSED IN HEART, SIGNAL = 3.4; EXPRESSED IN BRAIN, SIGNAL = 1.3; EXPRESSED IN FETAL LIVER, SIGNAL = 1.5; EXPRESSED IN BONE MARROW, SIGNAL = 1.6; SWISSPROT HIT: P12110, EVALUE 1.00e-103; NT HIT: gi16166483, EVALUE 0.00e+00; EST_HUMAN HIT: BG676375.1, EVALUE 0.00e+00
gagggcagcctgtgcagggatggtgctcagcaggtggacagggcctggggcctgtgtcagggtctcaggcctgggagcaccagcagaggagatggcggctcccagcagtgccgcctgaaagtgtcttgggctaaggacccacacccagggctgccctgcagaaacgcccccgcagagcccagtggtctgtgaggttgcaggcagggtgcgaatggaagggcacaggtgcggggctggcacctgcccggtcctgcccacctcccctccgcccagcccgcacctgcgtctccccacagagctgtccgtggcacagtgcacgcagcggcccgtggacatcgtcttcctgctggacggctccgagcggctgggtgagcagaacttccacaaggcccggcgcttcgtggagcaggtggcgcggcggctgacgctggcccggagggacgacgaccctctcaacgcacgcgtggcgctgctgcagtttggtggccccggcgagcagcaggtggccttcccgctgagccacaacctcacggccatccacgaggcgctggagaccacacaatacctgaactccttctcgcacgtgggcgcaggcgtggtgcacgccatcaatgccatcgtgcgcagcccgcgtggcggggcccggaggcacgcagagctgtccttcgtgttcctcacggacggcgtcacgggcaacgacagtctgcacgagtcggcgcactccatgcgcaagcagaacgtggtacccaccgtgctggccttgggcagcgacgtggacatggacgtgctcaccacgctcagcctgggtgaccgcgccgccgtgttccacgagaaggactatgacagcctggcgcaacccggcttcttcgaccgcttcatccgctggatctgctag

SEQ ID NO: 20825 - DNA, 1756 bp, Homo sapiens
  MAP TO AF015416.1; EXPRESSED IN ADULT LIVER, SIGNAL = 1.5; EXPRESSED IN HEART, SIGNAL = 1.3; EXPRESSED IN FETAL LIVER, SIGNAL = 1.9; EXPRESSED IN LUNG, SIGNAL = 1.3; EXPRESSED IN BONE MARROW, SIGNAL = 1.4; EXPRESSED IN HELA, SIGNAL = 0.84; NT HIT: M85183.1, EVALUE 4.00e-35; EST_HUMAN HIT: AI344276.1, EVALUE 0.00e+00; SWISSPROT HIT: P33076, EVALUE 2.00e-12
agtacaagaagaagtaccgggagcacgtgctgcagctgcacgctcgggtgaaggagaggaacgcccgctccgtgaagatcaccaagcgcttcaccaagctgctcatcgcgcccgagagcgccgccccggaggaggcgctggggcccgcggaagagcctgagccggggcgcgcgcggcgctcggacacgcacactttcaaccgcctcttccgccgcgacgaggagggccggcggccgctgaccgtggtgctgcagggcccggcgggcatcggcaagaccatggcggccaaaaagatcctgtacgactgggcggcgggcaagctgtaccagggccaggtggacttcgccttcttcatgccctgcggcgagctgctggagaggccgggcacgcgcagcctggctgacctgatcctggaccagtgccccgaccgcggcgcgccggtgccgcagatgctggcccagccgcagcggctgctcttcatcctggacggcgcggacgagctgccggcgctggggggccccgaggccgcgccctgcacagaccccttcgaggcggcgagcggcgcgcgggtgctaggcgggctgctgagcaaggcgctgctgcccacggccctcctgctggtgaccacgcgcgccgccgcccccgggaggctgcagggccgcctgtgttccccgcagtgcgccgaggtgcgcggcttctccgacaaggacaagaagaagtatttctacaagttcttccgggatgagaggagggccgagcgcgcctaccgcttcgtgaaggagaacgagacgctgttcgcgctgtgcttcgtgcccttcgtgtgctggatcgtgtgcaccgtgctgcgccagcagctggagctcggtcgggacctgtcgcgcacgtccaagaccaccacgtcagtgtacctgcttttcatcaccagcgttctgagctcggctccggtagccgacgggccccggttgcagggcgacctgcgcaatctgtgccgcctggcccgcgagggcgtcctcggacgcagggcgcagtttgccgagaaggaactggagcaactggagcttcgtggctccaaagtgcagacgctgtttctcagcaaaaaggagctgccgggcgtgctggagacagaggtcacctaccagttcatcgaccagagcttccaggagttcctcgcggcactgtcctacctgctggaggacggcggggtgcccaggaccgcggctggcggcgttgggacactcctgcgtggggacgcccagccgcacagccacttggtgctcaccacgcgcttcctcttcggactgctgagcgcggagcggatgcgcgacatcgagcgccacttcggctgcatggtttcagagcgtgtgaagcaggaggccctgcggtgggtgcagggacagggacagggctgccccggagtggcaccagaggtgaccgagggggccaaagggctcgaggacaccgaagagccagaggaggaggaggagggagaggagcccaactacccactggagttgctgtactgcctgtacgagacgcaggaggacgcgtttgtgcgccaagccctgtgccggttcccggagctggcgctgcagcgagtgcgcttctgccgcatggacgtggctgttctgagctactgcgtgaggtgctgccctgctggacaggcactgcggctgatcagctgcagattggttgctgcgcaggagaagaagaagaagagcctggggaagcggctccaggccagcctgggtggcggcag

SEQ ID NO: 20826 - DNA, 550 bp, Homo sapiens
  MAP TO AC005042.1; EXPRESSED IN LUNG, SIGNAL =   2; EXPRESSED IN HEART, SIGNAL = 2.5; EXPRESSED IN FETAL LIVER, SIGNAL = 2.6; EXPRESSED IN ADULT LIVER, SIGNAL =   2; EXPRESSED IN PLACENTA, SIGNAL = 3.5; EXPRESSED IN HELA, SIGNAL = 5.7; NT HIT: X81889.1, EVALUE 0.00e+00; EST_HUMAN HIT: AW960727.1, EVALUE 0.00e+00; SWISSPROT HIT: P06599, EVALUE 2.20e-02
ccatcagtagccaatcgggccatgagaagagttagttcagttccatctagagcacagtctccttcttatgttatcagcacaggcgtgtctccttcaagggggtctctgagaacttctctgggtagtggatttggctctccgtcagtgaccgacccccgacctctgaaccccagtgcatattcctccaccacattacctgctgcacgggcagcctctccgtactcacagagacccgcctccccaacagctatacggcggattgggtcagtcacctcccggcagacctccaatcccaacggaccaacccctcaataccaaaccaccgccagagtggggtccccactgaccctgacggatgcacagactcgagtagcttccccatcccaaggccaggtggggtcgtcgtcccccaaacgctcagggatgaccgccgtaccacagcatctgggaccttcactgcaaaggactgttcatgacatggagcaattcggacagcagcagtatgacatttatgagaggatggttccacccaggccagacagcctgacag

SEQ ID NO: 20827 - DNA, 644 bp, Homo sapiens
  MAP TO AC005488.2; EXPRESSED IN BRAIN, SIGNAL = 4.9; EXPRESSED IN ADULT LIVER, SIGNAL = 2.3; EXPRESSED IN HELA, SIGNAL = 1.6; EXPRESSED IN LUNG, SIGNAL = 2.5; EXPRESSED IN HEART, SIGNAL = 2.9; SWISSPROT HIT: Q9Y2N3, EVALUE 3.00e-27; NT HIT: gi14742307, EVALUE 0.00e+00; EST_HUMAN HIT: BI905882.1, EVALUE 2.00e-97
tctccggcggctgcggcggctggagcaggcgagcggcggcggcccatagcgagtgtcagggacggccggggccggggctgcggcgggccggccagggcggtgctcctgggcctgtcgctggttggcctcttactgtacctcgtgccggctgcggctgcactggcctggctgaccgtgggggctaccgcggcctggtggggactgagccgcgagccccgaggttcgcgccccttgtcctccttcgttcggaaggcgcgtcatcggcgccccttgtcctccttcgttcggaaggcgcgtcatcggcgaacactgttcgcttcgcctctggccaagtcgacagccaacggaaacctcctagagccgcggaccctgctcgaaggacctgaccctgcggaactgctactcatgggcagttacctgggcaagcccgggccgccgcagcccgccgccgctccggagggccaggacctgcgggataggcctggccgccgcccacctgcccgcccggcgccgcgctccccaccgccgcgctccccaccgccgcgctcccccccgccctccccgccgacccatcgcgctcaccacgtttacccctctctgcccactcctcttctccgaccctccaggaggccttccccacggta

SEQ ID NO: 20828 - DNA, 1790 bp, Homo sapiens
  MAP TO AC004127.1; EXPRESSED IN HEART, SIGNAL = 2.6; EXPRESSED IN PLACENTA, SIGNAL = 3.9; EXPRESSED IN ADULT LIVER, SIGNAL = 2.7; EXPRESSED IN FETAL LIVER, SIGNAL = 2.8; SWISSPROT HIT: P10266, EVALUE 0.00e+00; NT HIT: M14123.1, EVALUE 0.00e+00; EST_HUMAN HIT: AL535594.1, EVALUE 0.00e+00
aaatagaaataagaaaagacacattaaaaacattaaatgactttcaaaaattgctaggagatattaattggattcggccaactctaggcattcctacttatgtcacgtcaaatttgttctctatcttaagaggagacccagatttaaatagtaaaagaatattcactccagaggcaacaaaaaaaattaaattagtggaagaaaaaattcaaccagcacaaataaatagaatagatcccttagccccactccaacttttgatttttgctactgcacattctccagcaggcatcaatgttcaaaatactgatcttgtggagtggtcattccttcctcacagtacaattaagacttttacattgtacttggatcaaatagttacattaattggtcaggcaaaattacgaataataaaattgtgtggaaatgacccagacaaaatagttgttcctttaaacaaggaacgagttagacaagcctttatcaattctggtgcatggcagattggtcttactgattttgtgggaattactgataatcattaccccaaaacaaaaatcgtccagttcttaaaattgactacttggattttacctaaaattacgagacatgaacctttagaaaatgctctgacggtgtttactgatggttccagcaatggaaaggcagcttacatagggccaaaagagcaagtaatcaaaactcattatcaatcggctcaaagagctgagttggttgcagtctttacagtgttacaagattttaatcaacctattaatattgtatcagattctgcatatgtagtacaggctacaagggatgttgagacagctctaattaaatatagcatggatgatcagttaaaccagctgttcaatttattacaacaaactgtaagaaacagaaatttcccattttacattactcatattcgggcacacactaatttaccagggcctttaactaaagcaaatgaacaagctgacttactggtaccatctgcattcataaaagcacaagaacttcatgctttgactcatataaatgcagcaggattaaaaaacaaatttgacgtcacatggaaacaggcaaaaaatattgtacaacattgcacccagtgtcaagtcctacacctgcccactcaagaggcaggagttaatcccagaggtctatgtcctaatgtgttatggcaaatggatgtcacgcatgtaccttcatttggaagattatcatatgttcatgtaacagttgatacttattcacatttcatatgggcagcttgccaaacaggagaaagtacttcccatgttaaaaaacatttattgtcttgttttgctgtaatgggagttccagaaaaaatcaaaactgacaatggaccaggatattgtagtaaagctttccaaaaattcttaaatcagtggaaaattacacatacaacaggaattccctataattcccaaggacaggccatagttgaaagaactaatagaacactcaaaactcaattagttaaacaaaacgaagggggagacagtaaggagtgtaccactcctcagatgcaacttaatctagcactctatactttaaattttttaaacatttatagaaatcagactactacttctgcagaacatcttactggtaaaaagaacagcccacatgaaggaaaactgatttggtggaaagacaacaaaaataagacatgggaaatagggaaggtggtaacgtgggggaaaggttttgcttgtttcactaggagaaaatcagcttcctgtttggatacccactag

SEQ ID NO: 20829 - DNA, 768 bp, Homo sapiens
  MAP TO AL117259.3; EXPRESSED IN ADULT LIVER, SIGNAL = 4.8; EXPRESSED IN HELA, SIGNAL = 5.7; EXPRESSED IN PLACENTA, SIGNAL = 4.4; EXPRESSED IN LUNG, SIGNAL = 2.9; EXPRESSED IN HEART, SIGNAL =   3; EXPRESSED IN BONE MARROW, SIGNAL = 3.1; EXPRESSED IN FETAL LIVER, SIGNAL =   4; EST_HUMAN HIT: BG565282.1, EVALUE 0.00e+00; SWISSPROT HIT: Q9UK55, EVALUE 1.00e-111; NT HIT: gi14748336, EVALUE 0.00e+00
gaagtcttgcagctgaagggaggcactccttggcctccgcagccgatcacatgaaggtggtgccaagtctcctgctctccgtcctcctggcacaggtgtggctggtacccggcttggcccccagtcctcagtcgccagagaccccagcccctcagaaccagaccagcagggtagtgcaggctcccaaggaggaagaggaagatgagcaggaggccagcgaggagaaggccagtgaggaagagaaagcctggctgatggccagcaggcagcagcttgccaaggagacttcaaacttcggattcagcctgctgcgaaagatctccatgaggcacgatggcaacatggtcttctctccatttggcatgtccttggccatgacaggcttgatgctgggggccacagggccgactgaaacccagatcaagagagggctccacttgcaggccctgaagcccaccaagcccgggctcctgccttccctctttaagggactcagagagaccctctcccgcaacctggaactgggcctcacacaggggagttttgccttcatccacaaggattttgatgtcaaagagactttcttcaatttatccaagaggtattttgatacagagtgcgtgcctatgaattttcgcaatgcctcacaggccaaaaggctcatgaatcattacattaacaaagagactcgggggaaaattcccaaactgtttgatgagattaatcctgaaaccaaattaattcttgtggattacatcttgttcaaag

SEQ ID NO: 20830 - DNA, 472 bp, Homo sapiens
  MAP TO AF038458.1; EXPRESSED IN ADULT LIVER, SIGNAL =   4; EXPRESSED IN PLACENTA, SIGNAL = 5.4; EXPRESSED IN HELA, SIGNAL = 1.5; EXPRESSED IN BONE MARROW, SIGNAL = 3.9; EXPRESSED IN LUNG, SIGNAL = 3.6; EXPRESSED IN HEART, SIGNAL = 4.1; EXPRESSED IN FETAL LIVER, SIGNAL = 4.9; SWISSPROT HIT: Q28542, EVALUE 2.80e-01; NT HIT: gi13375645, EVALUE 0.00e+00; EST_HUMAN HIT: AA479990.1, EVALUE 1.00e-128
gatgatcccggcggagagccgctcgttcctgctgacggacctggcgtcaggccggacctacgatctgtgcgtgctcgccgtgtatgaggacagcgccacggggctcacggccacgcggcctgtgggctgcgcccgcttctccaccgaacctgcgctgcggccatgcggggcgccgcacgctcccttcctgggcggcacgatgatcatcgcgctgggcggcgtcatcgtagcctcggtactggtcttcatcttcgtgctgctaatgcgctacaaggtgcacggcggccagccccccggcaaggccaagattcccgcgcctgttagcagcgtttgctcccagaccaacggcgccctgggccccacgcccacgcccgccccgcccgccccggagcccgcggcgctcagggcccacaccgtggtccagctggactgcgagccctgggggcccggccacgaacctgtgggaccctag

SEQ ID NO: 20831 - DNA, 656 bp, Homo sapiens
  MAP TO AC002481.1; EXPRESSED IN HELA, SIGNAL =  10; EXPRESSED IN PLACENTA, SIGNAL = 8.8; EXPRESSED IN HEART, SIGNAL = 5.8; EXPRESSED IN BONE MARROW, SIGNAL = 5.9; EXPRESSED IN LUNG, SIGNAL = 5.8; EXPRESSED IN FETAL LIVER, SIGNAL = 6.2; EXPRESSED IN ADULT LIVER, SIGNAL = 5.5; SWISSPROT HIT: Q01838, EVALUE 3.80e+00; NT HIT: gi11450121, EVALUE 0.00e+00; EST_HUMAN HIT: BG818780.1, EVALUE 0.00e+00
atggagcagcatgtgtgggacgtggccatcagcctgacaacggtggtggtggccgggcgtttgctggagcccctctggggggccttggagctgctcatcttcttctcagtggtgaatgtgtctgtagggctgctgggggccttcgcctacctcctcacctacatggcttccttcaacctggtctacctgttcactgtccgtatccacggcgccttgggcttcctaggtggcgtcctggtggcactcaagcaaaccatgggggactgtgtggtcctgcgagtgccccaggtgcgcgtcagtgtgatgcccatgctgctgctggcgctgctgctcctgctgcggctcgccacgctgctccagagcccggcgctggcttcctatggcttcgggctgctctccagttgggtatatcttcgcttctaccagcgccatagccggggccgaggggacatggctgaccactttgctttcgccactttcttccctgagatcctgcagcctgtggtgggtttgctggcgaacttggtgcacagcctcctggtgaaggtaaagatatgccagaagacggtgaagcgctacgatgtgggtgccccatcctccatcaccatcagcctgccaggcacagaccctcaagacgccgagcggagaaggtactg

SEQ ID NO: 20832 - DNA, 1101 bp, Homo sapiens
  MAP TO AC009757.8; EXPRESSED IN LUNG, SIGNAL = 1.7; EXPRESSED IN ADULT LIVER, SIGNAL = 1.8; EXPRESSED IN HELA, SIGNAL =   1; EXPRESSED IN BONE MARROW, SIGNAL = 1.7; EXPRESSED IN FETAL LIVER, SIGNAL = 1.6; SWISSPROT HIT: P30754, EVALUE 1.40e-02; NT HIT: gi14760602, EVALUE 3.00e-13; EST_HUMAN HIT: AI822066.1, EVALUE 0.00e+00
ccgccatctccgtaggaaggtggctggggctgtgtctgcgcagcccagtcccggcctcctcctcctcccagagggcttccaggtctgaccgagggtcgctgggactcgagaactggaggctctgactggaacactcctgggcgcactctggctcagcctggacccgggcaggcccgttttcaccggggtgtctacactagggtctcccaaggcagcgaggcgtccgggcgggcgccagggtggcagggccgagtctccggaggtggccgctctgaaggccgaatctggccagaaaatctggccagaaaaagggaccactgcgtccttgcggcctcctttccacgttaaccgggggcagagaacacccaggccctgctgtgggtgcctaacgcgctggggcgcataggccaagccagtccaaccagggtgtccagtcaggggcgcgctgaggcagaaggctttagagatcgagggacatgggggacccctgacgccaggtctccttctcgcttccgggtccgcactctgggtccgcagtccctcaacccaccaggaggccagagatgcggctggggtggatccagggagctggggcccagatccaccaagatcagggaaggttcctgagggcccgctgtccctcagggcctgaagaaaatccattctccgcgtgcttgcgttggagaacacagtggcccccaccgcccgccctgagacctccacagggtcctgatccagaacttgacgaccggacgccatctcatctctccccacagaacccctgtcagcctgccgggggacgcggtgcccgccctccggcatccgggaaacacagcgtcccagccggcgcctgcgcaggtgccacacttcctggtcctctctggctgcgtctgagggccttagctctggccaggggcgctgcaacgggctcagccttctaggggtggcgggtgaaggcctacacctgccccaggacggccaggtccaccagcacctgcaacagacggagaactgaaggagcatcttgaagctgtggctgtcttgaaggtgtcgccgcttgtcctcacgagcaccattttgattctcgtgccctgtgtgcat

SEQ ID NO: 20833 - DNA, 854 bp, Homo sapiens
  MAP TO AC008739.5; EXPRESSED IN BRAIN, SIGNAL = 1.6; EXPRESSED IN HELA, SIGNAL =   2; EXPRESSED IN ADULT LIVER, SIGNAL = 1.8; EXPRESSED IN PLACENTA, SIGNAL =   2; EXPRESSED IN LUNG, SIGNAL = 1.7; EXPRESSED IN HEART, SIGNAL = 2.1; EXPRESSED IN BONE MARROW, SIGNAL = 2.1; EST_HUMAN HIT: BI560594.1, EVALUE 0.00e+00; NT HIT: gi14760983, EVALUE 0.00e+00; SWISSPROT HIT: Q03923, EVALUE 0.00e+00
ctcatgtgtggtaaggtgtgcagactggttaaaggcttttccacattttttacatttgtagggtttctctccagtatgaattatcttatgtgtagtaaggtttgaggactgcttaaaggctttgccacattcttcacatttgtaaggtttctctccagtatgaatttttctatgggtagtaagggttgaagatcggttaaaagctttaccacattctttacatttgtagggtttctctccagtatgaattatcttatgggtagtaagagttgagaatcggttaaaagttttgccacattcttcacatttgtagggtttctctccagtatgaattttcttatgtttaataaggtttgaggactggttaaaggctttaccacattcttcacatttgtaaggtttctctcccgtatgaattctcttatgtttagtaagggttgaggaccagttaaaggcttttccacattcttcacatttgtagaaatttactctagtatgaattctgctatgttcagttaggcatgaaatcatgccaaatgatttgccacattttgtacatttgaaaggtttctttttagtatgtcttatctcatgtctgtttgaatttgaaaatttatgagcgacttttacatatttatcacattgaaatattttgctctgggtagctgtgagacattggttaagtccattacaacctcctttgtgcatcttacactcatccatactttcacagccttttcttaatggtaaattttcatgtctacattttccatatcttttcagtgtcactttttggaaagaatcttttatattctgctccggccaaaggtcttgggcaaaatgagaacacataa

SEQ ID NO: 20834 - DNA, 1163 bp, Homo sapiens
  MAP TO U73629.1; EXPRESSED IN ADULT LIVER, SIGNAL = 3.6; EXPRESSED IN BRAIN, SIGNAL = 3.9; EXPRESSED IN LUNG, SIGNAL = 3.3; EXPRESSED IN HEART, SIGNAL = 3.8; EXPRESSED IN FETAL LIVER, SIGNAL = 4.9; SWISSPROT HIT: P39748, EVALUE 0.00e+00; NT HIT: gi14784566, EVALUE 0.00e+00; EST_HUMAN HIT: AL560007.1, EVALUE 0.00e+00
tcatccctcctctgtgttgccatgggaattcaaggcctggccaaactaattgctgatgtggcccccagtgccatccgggagaatgacatcagagctactttggccgtaaggtggccattgatgcctctatgagcatttatcagttcctgattgctgttcgccagggtggggatgtgctgcagaatgaggagggtgagaccaccagccacctgatgggcatgttctaccgcaccattcgcatgatggagaacggcatcaagcccgtgtatgtctttgatggcaagccgccacagctcaagtcaggcgagctggccaaacgcagtgagcggcgggctgaggcagagaagcagctgcagcaggctcaggctgctggggccgagcaggaggtggaaaaattcactaagcggctggtgaaggtcactaagcagcacaatgatgagtgcaaacatctgctgagcctcatgggcatcccttatcttgatgcacccagtgaggcagaggccagctgtgctgccctggtgaaggctggcaaagtctatgctgcggctaccgaggacatggactgcctcaccttcggcagccctgtgctaatgcgacacctgactgccagtgaagccaaaaagctgccaatccaggaattccacctgagccggattctgcaggagctgggcctgaaccaggaacagtttgtggatctgtgcatcctgctaggcagtgactactgtgagagtatccggggtattgggcccaagcgggctgtggacctcatccagaagcacaagagcatcgaggagatcgtgcggcgacttgaccccaacaagtaccctgtgccagaaaattggctccacaaggaggctcaccagctcttcttggaacctgaggtgctggacccagagtctgtggagctgaagtggagcgagccaaatgaagaagagctgatcaagttcatgtgtggtgaaaagcagttctctgaggagcgaatccgcagtggggtcaagaggctgagtaagagccgccaaggcagcacccagggccgcctggatgatttcttcaaggtgaccggctcactctcttcagctaagcgcaaggagccagaacccaagggatccactaagaagaaggcaaagactggggcagcagggaagtttaaaaggggaaaataa

SEQ ID NO: 20835 - DNA, 834 bp, Homo sapiens
  MAP TO AC004796.2; EXPRESSED IN ADULT LIVER, SIGNAL = 1.5; EXPRESSED IN BRAIN, SIGNAL = 1.4; EXPRESSED IN HELA, SIGNAL = 2.1; EXPRESSED IN BONE MARROW, SIGNAL = 1.9; EXPRESSED IN LUNG, SIGNAL = 1.7; EXPRESSED IN HEART, SIGNAL = 1.9; SWISSPROT HIT: Q25460, EVALUE 3.00e-04; NT HIT: gi13640711, EVALUE 0.00e+00; EST_HUMAN HIT: BI821389.1, EVALUE 0.00e+00
ccctgggcttttgcaagctgagttgttcgaatatttaaagactggcttcttgtaacagttgccacagaaagggattttccattcacctttctttcaagatgacaatttgctgtcgatctctcttcaagaagaacagcatcccaaggatcctttgctagcaaacttgaaacatttttctcttcctcatggtctaatacctccacattatccaccttaggcttacttagaggatccaagtctaaccagtcaaatttactgatatcctcagactttggagatacctgtagattgctgacttttgaatctgttatctccaaatcagtccttgctttcccattttttaaaaattctgatgtactagctattttgtcaaatagttttgccatgtcagtactgactactggacgatagataggtaagcttccttgtggatgaaagggtgtggcaggtgtcaaaggatatgagaaatatggagattgtcccggaagacttaaatatataggttctgtagatggaaaagtgggcattcttggattgaagccattttggaatgcagcctgtttactgtaagtagaaggataaatagaaggtaaagcataagtggaaggcccaggtaatccaggtggccactgtcctctctgaatagtaggtctaaaatagagctgtgctgaaaaggaagggctcagaataggagtaactggtaatacaggtgtttttttagtctcgaaactgtcatccagcaatagtttctcaagttcagcttgggtgagcttttctacatcaatatctaatgctcttttttgggaatctgattcaggaaacaccatgagatca

SEQ ID NO: 20836 - DNA, 550 bp, Homo sapiens
  MAP TO AL021938.1; EXPRESSED IN LUNG, SIGNAL = 2.1; EXPRESSED IN BONE MARROW, SIGNAL =   2; EXPRESSED IN BRAIN, SIGNAL = 1.9; EXPRESSED IN ADULT LIVER, SIGNAL = 2.1; SWISSPROT HIT: Q92833, EVALUE 6.00e-69; NT HIT: gi16162617, EVALUE 0.00e+00; EST_HUMAN HIT: BF311359.1, EVALUE 0.00e+00
tcgttgagcttgcactcgggccgccagtccggaggggggatcaccctgcacatcccgaacttctccacctgagcgcggaccgactcgatgtagatgagcggatcgtggaactccttggcggagggcctgaggacggggatctcgtccatggccgcccacccggccttgccgccgcccttctcggccttgcccgagtcctgcggcttgtgcacggactccggttgcgaggtagaacgattttcacaggaggcgctgtccgccttgccatgtgcttgtctgcctggcgtgctcttcccggccgtggcccgcttcggccgattcctctccagactgcgctccggcacttccttcttcacgtgtccgttcagcagacctctctcggccggggccttcttgccagggccttcggcggggccagccgcccctttcatcttcttggggggcgactgcggcttctccgcctggtgtgcctcttccagtctcctcttggagttccgcagcccctcccgcagctgcaggccctcccgcagctgccgcccccccacctcct

SEQ ID NO: 20837 - DNA, 717 bp, Homo sapiens
  MAP TO AL160176.3; EXPRESSED IN ADULT LIVER, SIGNAL = 2.8; EXPRESSED IN PLACENTA, SIGNAL = 5.1; EXPRESSED IN HEART, SIGNAL = 3.1; EXPRESSED IN LUNG, SIGNAL = 2.6; SWISSPROT HIT: O66605, EVALUE 7.30e+00; NT HIT: AF049236.1, EVALUE 1.70e-01; EST_HUMAN HIT: BG722482.1, EVALUE 0.00e+00
ttaaaactcttttttaaaaaagaacctaagaactctcaagattttcctgggaagtatttgtactgtctttaatttgcaactgcaaaataccttgtccagacataatattgcataaaagccgacttgaattttttctttttcatgtaaggggttgtttattaaaaccagctgtaccttgatcagtccagtagtttcagccaggctcaccgctaacttactgtcttcactggccaccatcacattctcctctagagcgtggaactgcaacacctccatctcttgcggggagtacagctcttgctggatactaatggccacacactgctgcaggctctgccggggcccttcctcaagccacagcaacccagggccaggctgttgcaccaccacctgcaccccttcttgctgctgtatgctcagcaagctcatatcctgcaactccacagcttcagaagtgaagtgcaccgtctgcagggtcaggatgtacttctcgctctcctccgagggggccagcaccagctccacttcttcctccaggacgctgtcctggaaggccccagaggtacgctcggcctccaactcactagggctccgatggtctttctctctgcacactccgtctttttcctcctccttcaggcctttttccggcatcaactcgagttctttgatcttggtgaattgctcagaaaggacagagatctcagtggctgccat

SEQ ID NO: 20838 - DNA, 876 bp, Homo sapiens
  MAP TO AL136450.1; EXPRESSED IN HELA, SIGNAL = 2.1; EXPRESSED IN ADULT LIVER, SIGNAL = 1.3; EXPRESSED IN LUNG, SIGNAL = 1.4; EXPRESSED IN HEART, SIGNAL = 1.2; EXPRESSED IN FETAL LIVER, SIGNAL = 1.4; SWISSPROT HIT: Q02817, EVALUE 1.40e-02; NT HIT: AL096777.1, EVALUE 1.00e-115; EST_HUMAN HIT: BF516120.1, EVALUE 0.00e+00
ccacgcctccagcggcccctgcccctccgtctgtgcccatgcccactccaaccccatcttccggcccaccttctacccccaccctcatccccgcctttgctcctacaccggtgcctgcacccaccccagcccccatctttactccagcccctacacccatgcctgctgccacgccagctgccattcccacctctgcacccatcccggcctccttcagtttgagtagagtgtgctttcctgcagctcaggcaccagctatgcaaaaagtccccctgtcctttcagccagggacagtgctgaccccgagccagccgctggtatatatcccgcctccaagctgtgggcagccactcagtgtggccacactgccaaccactctaggggtttcctccactcttacgctccctgtcctgccgtcctacctgcaggacaggtgtctcccaggcgtgctagcctcccccgagctccgttcttacccgtatgcattttctgtggcccggcctctgacttcggattccaagctggtatctctggaggtgaacaggctcccctgcacttccccatccggtagcaccaccacccagcctgcacccgatggggtccctgggcctttggcagatacctcccttgttactgcttctgccaaggtgcttccaactccacagcctctgctgccagcccccagtgggagctcagccccaccgcaccccgccaagatgcccagtggcaccgagcagcaaacagaagggacttccgttaccttctctcctcttaagtcaccgccacagctggaacgagagatggcctctccacctgagtgcagcgagatgccccttgatctgtcctccaagtccaaccgccagaagcttccattgc

SEQ ID NO: 20839 - DNA, 1298 bp, Homo sapiens
  MAP TO AC025761.3; EXPRESSED IN ADULT LIVER, SIGNAL = 1.5; EXPRESSED IN PLACENTA, SIGNAL = 1.9; EXPRESSED IN BRAIN, SIGNAL = 1.3; EXPRESSED IN LUNG, SIGNAL = 1.1; EXPRESSED IN BONE MARROW, SIGNAL = 1.3; NT HIT: gi14724561, EVALUE 0.00e+00; EST_HUMAN HIT: BE671791.1, EVALUE 1.00e-119
gtgatgtcatgcccattgttttggtgcgcccaaccaatcggactcgccgcctggattctaccggagccggcatgggcccttcctcgcaccagcagcaggagtccccgctcccgaccataacgcattgcgcagggtgcaccaccgcttggtctccctgcagctttaacagccctgacatggaaaccccattgcagttccagcgcggcttcttcccagagcagccgccgccgccgccgcgctcctcacacctgcattgccagcagcagcaacagagccaggacaagccgtgcccgcccttcgcgcccctcccgcaccctcaccaccacccgcacctcgcgcaccagcagccggccagcggcggcagcagcccatgcctccggtgcaacagctgcgcctcctccggtgccccggcggcgggggcgggagataacctgtccctgctgctccgcacctcctcgcccggcggcgccttccggacccgcacctcctcgccgctgtcgggctcgtcctgctgctgctgctgctgctcgtcgcgccggggcagccagctcaatgtgagcgagctgacgccgtccagccatgccagtgcgctccggcagcagtacgcgcagcagtccgcgcagcagtcggcgtccgcctcccagtaccaccagtgccacagcctgcagcccgccgccagccccacgggcagcctcggcagtctgggctccgggcccccgctctcgcaccaccaccaccacccgcacccggcgcaccaccagcaccaccagccccaggcgcgccgcgagagcaaccccttcaccgaaatagccatgagcagctgcaggtacaacgggggcgtcatgcggccgctcagcaacttgagcgcgtcccgccggaacctgcacgagatggactcagaggcgcagcccctgcagccccccgcgtctgtcggaggaggtggcggcgcgtcctccccgtctgcagccgctgccgccgccgccgctgtttcgtcctcagcccccgagatcgtggtgtctaagcccgagcacaacaactccaacaacctggcgctctatggaaccggcggcggaggcagcactggaggaggcggcggcggtggcgggagcgggcacggcagcagcagtggcaccaagtccagcaaaaagaaaaaccagaacatcggctacaagctgggccaccggcgcgccctgttcgaaaagcgcaagcggctcagcgactacgcgctcatcttcggcatgttcggcatcgtggtcatggtcatcgagaccgagctgtcgtggggcgcctacgacaag

SEQ ID NO: 20840 - DNA, 570 bp, Homo sapiens
  MAP TO AC008812.4; EXPRESSED IN LUNG, SIGNAL = 1.5; EXPRESSED IN BONE MARROW, SIGNAL = 1.7; EXPRESSED IN ADULT LIVER, SIGNAL = 2.3; EXPRESSED IN HELA, SIGNAL = 2.2; SWISSPROT HIT: O88520, EVALUE 1.00e-04; NT HIT: gi16175420, EVALUE 0.00e+00; EST_HUMAN HIT: AL544658.1, EVALUE 0.00e+00
tgtccaaggtccccagctccctaagtcaggaacaatccgagcaagacgcaatctaccagaacctgacccagcttaaagctgcagtgggtgagctctcagagaaatccaagctgcaggagatctaccaggagctgacccagctgaaggctgcagtgggtgagttgccagagaaatccaagctgcaggagatctaccaggagctgacccggctgaaggctgcagtgggtgagttgccagagaaatccaagctgcaggagatctaccaggagctgacccggctgaaggctgcagtgggtgagttgccagagaaatccaagctgcaggagatctaccaggagctgacccggctgaaggctgcagtgggtgagttgccagagaaatccaagctgcaggagatctaccaggagctgacggagctgaaggctgcagtgggtgagttgccagagaaatccaagctgcaggagatctaccaggagctgacccagctgaaggctgcagtgggtgagttgccagaccagtccaagcagcagcaaatctatcaagaactgaccgatttgaagactgcatttg

SEQ ID NO: 20841 - DNA, 471 bp, Homo sapiens
  MAP TO AC005684.1; EXPRESSED IN HEART, SIGNAL = 1.7; EXPRESSED IN FETAL LIVER, SIGNAL = 1.4; EXPRESSED IN LUNG, SIGNAL = 1.2; EXPRESSED IN ADULT LIVER, SIGNAL = 1.2; EXPRESSED IN PLACENTA, SIGNAL = 1.6; EXPRESSED IN BRAIN, SIGNAL = 1.1; EXPRESSED IN HELA, SIGNAL = 2.3; SWISSPROT HIT: Q00587, EVALUE 1.90e-02; NT HIT: U15553.1, EVALUE 4.50e-01; EST_HUMAN HIT: BE169131.1, EVALUE 0.00e+00
ctcctgctatcccctttctgggcccttgcccagtgctccacctgggccagattgctcttcctttggctgtgtttttcagggttggtcctgggaggaaaggcccgctggtacccaccagtcccattctgttctcctgggccatatgaggcaggcagcattccattcttctctgcccgttggggctgtgcctgctggcctcttgggccagtgggtaaatccataaacaaggcatcctcctcggctggcgagtacggagacctggccttgctccggtcccgcttgccctccagtgggtccctctgggaacggtactgctctccctcctgctcctgcctctcgaagttgacaatgtcatcatggccacgatgaggacaatctctcgtatgtccgggtcccacccggccacattcgtgacaggactctgtgtggttggcctgggggacagcctgccgctccaccttctccatatcc

SEQ ID NO: 20842 - DNA, 574 bp, Homo sapiens
  MAP TO AC011536.5; EXPRESSED IN BONE MARROW, SIGNAL = 3.2; EXPRESSED IN LUNG, SIGNAL = 3.5; EXPRESSED IN HEART, SIGNAL = 2.9; EXPRESSED IN FETAL LIVER, SIGNAL = 3.5; EXPRESSED IN ADULT LIVER, SIGNAL = 3.1; EXPRESSED IN PLACENTA, SIGNAL = 5.1; EXPRESSED IN BRAIN, SIGNAL =   3; EST_HUMAN HIT: BI005091.1, EVALUE 0.00e+00; SWISSPROT HIT: Q9Y493, EVALUE 9.00e-26; NT HIT: gi13651412, EVALUE 0.00e+00
cacagccaacctgtgcccgccagtcttcgatgacaaccccagcggcctggcaggcggccacgtaggaagccagagccttgcaaagaatgtcacggtccccaccacccatgcagacgtccagaacacagcccttgaagaagctctcaggtggcacatgagcatggcaggtggtgaaggggccccctgtgccagatgaaaggggtccgcagaagccagggccctcgtactgctccaaccggtcctcagggcacgttgggcaggacccccgacattcgtcccaacacagtgggtcccagcctggggctcgccagctgccgccccagatgggtatggagggagccagtgtgccattagggaagacctggtcattgttggggttgcggtccatgttaccgcagagcccgcacactgcgccatgatagctgctggggagcgtcacgtctacccgccagttccagtcatagctgacttgcagtccaaagtcagccaccagcagtgccttcgatgcaccctgggccactgaaatccgcccgtcggccacggagacaggcaaggctgtgagcacaccgttcac

SEQ ID NO: 20843 - DNA, 1273 bp, Homo sapiens
  MAP TO AC013648.3; EXPRESSED IN HEART, SIGNAL =   2; EXPRESSED IN BONE MARROW, SIGNAL = 1.5; EXPRESSED IN LUNG, SIGNAL = 1.8; EXPRESSED IN FETAL LIVER, SIGNAL = 1.7; EXPRESSED IN PLACENTA, SIGNAL = 3.6; EXPRESSED IN HELA, SIGNAL = 3.3; EXPRESSED IN ADULT LIVER, SIGNAL = 1.8; EST_HUMAN HIT: BE906852.1, EVALUE 0.00e+00; SWISSPROT HIT: gi1351900, EVALUE 3.00e-48
tgcgccgaaggtggaggccgacgtgagcctcccctccatgcagggggacctgaagaacactgacatcagcattgagcccccctctgcccaactggaggtccaggctggccaggtggacgtgaagctcccagagggccacgttctcgagggagctggcctcaaagggcacctgcccaagttgcagatgcccagtttcaagatgcccaaagtagatcacaagggcccccagatagacatcaagggccccaagctggacctgaaaggcccgaagacggacgtgacggcccccgacgtggaggtgtctcagcccggcatggaggtggatgtcgaggccccaggagccaagttggatggtgcacggctggagggggacctgtccctggccgacaaggatgtgactgccaaagacagcaagttcaaaatgcccaagttcaagatgccgtcgttcggggtgtctgccccaggcaagtccattgaggtcttggtggatgtgtctgcgccgaaggtggaggccgacgtgagcctcccctccatgcagggggacctgaagaacactgacatcagcattgagcccccctctgcccaactggaggtccaggctggccaggtggacgtgaagctcccagagggccacgttctcgagggagctggcctcaaagggcacctgcccaagttgcagatgcccagtttcaagatgcccaaagtagatcgcaagggcccccagatagacatcaagggccccaagctggacctgaaaggcccgaagatggatgtgacggcccccgacgtggaggtgtctcagcccagcatggaggtggacgtcgaggccccaggagccaagttggatggtgcacggctggagggggacctgtccctggccgacaaggatgtgactgccaaagacagcaagttcaaaatgcccaaattcaagatgccttcgtacagggcgtctgccccaggcaggtccatcgaggcctcgctggatgtgtctgcgccgaaggcggaggccgacgtgagcctcccctccatgcagggggacctcaaggccactgacctcagcattcagcccccttccgctgacctggaggtccaggctgtccaagtggatgtggaactcctggagggccccgtgcccgagggagccggcctcaaagggcacctgcccaaagtggagatgcccagtttaaagacgcccaaagtggacctcaagggcccccagatagatgttaagggccccaagctggacctgaaaggccccaaggcagaagtgaga

SEQ ID NO: 20844 - DNA, 455 bp, Homo sapiens
  MAP TO AP001760.1; EXPRESSED IN LUNG, SIGNAL = 5.3; EXPRESSED IN HEART, SIGNAL =   5; EXPRESSED IN BONE MARROW, SIGNAL = 5.5; EXPRESSED IN FETAL LIVER, SIGNAL = 5.1; EXPRESSED IN ADULT LIVER, SIGNAL = 4.9; EXPRESSED IN HELA, SIGNAL = 3.9; SWISSPROT HIT: O95613, EVALUE 8.00e-72; NT HIT: gi16166512, EVALUE 0.00e+00; EST_HUMAN HIT: BI824924.1, EVALUE 4.10e-02
gtaaaacacaatctaattgaagaccaccagaaggaactaaataatgctaagcaaaagactgagctgatgaaacaggaattccaaagaaaagaaacggactggaaagttatgaaggaggagctacagcgggaagctgaggagaagttaacattgatgctacttgaactgagagaaaaggctgaatccgagaaacagaccatcataaacaagtttgagcttcgagaagctgaaatgaggcagcttcaggaccaacaggcagcccagatcctggatctggagaggtccttgacggagcagcagggccgcctgcagcagctggaacaggacctcacttcagacgacgccctgcattgcagccagtgtgggcgggagccgcccacagcccaggacggggagcttgctgcgctccacgtgaaggaagactgcgccctgcagctgatgctggcccggagcag

SEQ ID NO: 20845 - DNA, 573 bp, Homo sapiens
  MAP TO AF114156.1; EXPRESSED IN HELA, SIGNAL = 2.7; EXPRESSED IN ADULT LIVER, SIGNAL = 1.4; EXPRESSED IN BRAIN, SIGNAL = 1.5; EXPRESSED IN HEART, SIGNAL = 1.7; EXPRESSED IN FETAL LIVER, SIGNAL = 1.8; EXPRESSED IN LUNG, SIGNAL = 1.5; SWISSPROT HIT: P08048, EVALUE 9.00e-94; NT HIT: gi14719970, EVALUE 0.00e+00; EST_HUMAN HIT: AL042461.1, EVALUE 1.00e-119
gagctgatgctacacacatggatggtgatcagattgttgtggaaatacaagaagcagtttttgtttctaatattgtggattctgacataactgtgcataactttgttcctgatgacccagactcagttgtaatccaagatgttgttgaagatgttgtcatagaggaggatgttcagtgctcagatatcttagaagaggcagatgtatctgaaaatgtcatcattcctgagcaagtgctggactcagatgtaactgaagaagtttctttaccacactgcacagtcccagatgatgttttagcttctgacattacttcaacctcaatgtctatgccagaacatgttttaacgagtgaatccatgcatgtgtgtgacattggacatgttgaacatatggtgcatgatagtgtagtggaagcagaaatcattactgatcctctgacgagtgacatagtttcagaagaagtattggtagcagactgtgcccctgaagcagtcatagatgccagcgggatctcagtggaccagcaagataatgacaaagccagctgtgaggactacctaatgatttcgt

SEQ ID NO: 20846 - DNA, 672 bp, Homo sapiens
  MAP TO AC010422.6; EXPRESSED IN BONE MARROW, SIGNAL =  71; EXPRESSED IN LUNG, SIGNAL =  58; EXPRESSED IN HEART, SIGNAL =  59; EXPRESSED IN BRAIN, SIGNAL =  13; EXPRESSED IN HELA, SIGNAL =  22; EXPRESSED IN ADULT LIVER, SIGNAL =  60; SWISSPROT HIT: P45634, EVALUE 1.00e-125; NT HIT: gi13631175, EVALUE 0.00e+00; EST_HUMAN HIT: BI259617.1, EVALUE 0.00e+00
tgtgccactgaagatcctggtgtcgccatgggccgccgccccgcccgttgttaccggtattgtaagaacaagccgtacccaaagtctcgcttctgccgaggtgtccctgatgccaagattcgcatttttgacctggggcggaaaaaggcaaaagtggatgagtttccgctctgtggccacatggtgtcagatgaatatgagcagctgtcctctgaagccctggaggctgcccgaatttgtgccaataagtacatggtaaaaagttgtggcaaagatggcttccatatccgggtgcggctccaccccttccacgtcatccgcatcaacaagatgtcgtcctgtgctggggctgacaggctccaaacaggaatgcgaggtgcctttggaaagccccagggcactgtggccagggttcacattggccaagttatcatgtccatccgcaccaagctgcagaacaaggagcgtgtgattgaggccctgcgcagggccaagttcaagtttcctggccgccagaagatccacatctcaaagaagtggggcttcaccaagttcaatgctgatgaatttgaagacatggtggctgaaaagcggctcatcccagatggctgtggggtcaagtatatccccaatcgtggccctctggacaagtggtgggccctgcactcatga

SEQ ID NO: 20847 - DNA, 547 bp, Homo sapiens
  MAP TO AC005070.1; EXPRESSED IN ADULT LIVER, SIGNAL = 2.6; EXPRESSED IN PLACENTA, SIGNAL = 3.6; EXPRESSED IN HELA, SIGNAL = 1.9; EXPRESSED IN FETAL LIVER, SIGNAL = 1.7; SWISSPROT HIT: P25439, EVALUE 5.00e-04; NT HIT: gi14149872, EVALUE 0.00e+00; EST_HUMAN HIT: BE161922.1, EVALUE 0.00e+00
cctggttcacctggatctgtaattcctgctcaagcacacgggaaaatattcacaaaaccagatccccaatgggactccacagttagtgcatccgaagctgaaaatggtgttcacctaaaaacagagctccaacaaaaacagctatcaaataacaaccaagcactttcaaagaatcatcctcctcagacacacgttcgtaattcatctgagcaactttcacaaaagctgccttctgtgccaacaaagttgcactgtcctccatcacctcacctagaaaatcctccaaagtcatccacgcctcacacacctgtacagcatggttatctttcaccaaagcctccttcacagcagttaggatctccctacaggcctcatcattcacagtcacctcaagttggaacacctcagcgagagcctcaaagaaacttttatccagcagcacagaaccttccagccaatactcagcaggcaacttctggaacattatttacacagacaccctcaggacaatcttcagcaacatacagtcagtttaaccaacaaagtc

SEQ ID NO: 20848 - DNA, 634 bp, Homo sapiens
  MAP TO Z97986.3; EXPRESSED IN HELA, SIGNAL = 0.34; EXPRESSED IN ADULT LIVER, SIGNAL = 1.5; EXPRESSED IN BRAIN, SIGNAL = 1.9; EXPRESSED IN BONE MARROW, SIGNAL = 1.5; EXPRESSED IN LUNG, SIGNAL = 1.3; SWISSPROT HIT: Q02080, EVALUE 1.10e-01; NT HIT: X52564.2, EVALUE 9.50e+00; EST_HUMAN HIT: AA757196.1, EVALUE 6.00e-76
cctgcccaccggctcctctgtgatgctgtggcctgaggacggggatccaggcggccctgagacccccggccctgagggccccctccccctgcagccacggggcccagtgccaggaagcccggagcatgtgggcgaggacctgacccgagccctcggtgactacgccagggtggagcagcgcctgggacagttggggcccgcggggggcctggccccgagacccctgcgggagcagctgggcaagatccgcctggagctgctcaccattcaccaggcgctggagcaggccgtgaggccgccagacgcacccctcgacctctctgtgaaacgtgcgcccgccaaggggccccaggctcttggagaggcgtgggggcggcccgagctgggtcccgtgttgaccgggggcacccccgagccacccggcatgctgggccctgcagcgccccaacccttctctggccacaccaccaagtgtgaggccgactccagcgtcccacccccagggctccccctcgcagccccagatgaccctgtcattcctggcagtggctggggcacctgtgttgcgacgaggagttcccagacccctgaggctgtctgtggcctgcagagcccccagggcgccgaggtctga

SEQ ID NO: 20849 - DNA, 754 bp, Homo sapiens
  MAP TO AL022310.1; EXPRESSED IN ADULT LIVER, SIGNAL = 3.7; EXPRESSED IN PLACENTA, SIGNAL = 5.6; EXPRESSED IN BRAIN, SIGNAL =   4; EXPRESSED IN BONE MARROW, SIGNAL = 4.7; EXPRESSED IN LUNG, SIGNAL = 3.9; EXPRESSED IN HEART, SIGNAL = 3.8; SWISSPROT HIT: Q95328, EVALUE 9.00e-01; NT HIT: AL163208.2, EVALUE 1.00e-11; EST_HUMAN HIT: AW894443.1, EVALUE 8.00e-11
tcctggcaaaacagactttgcagacaccattaagttaaagatcttgagatgaggagattatcctgaattttccagggggttcctaaatgtaaccattttttataagagagagacagtggcagacttgactgtagaaaggaaagaaagcaatgtaactattgaagcaatgggagaaaatgtgatatgatacaggactattaaccaaagagtgagaaatgcctctagaatctggaactagcaaggagatgagttctcccgagagtctcaaaaaggaaccagctctgctaacaacatgcttttagcccctccaagactcatttcagacttctggccttcagaactctcagagaataaattttgttgttttaagccacttcgttcgtggtaattttttacagcagatatagaaaactaatagagtgttagtctcaaagagtctgatgataatatttttgcccagatgcaaacagaactggagaagctgaagctccacagcaacacgatgagccagaagatcaggagcaatgggcatgagttgcacagcacctggcactgtactccaaactttagagtagaaaaatggctgtcccttcactttcaccttctaaatctcatgcgaactttgccttgttgctacacaggaagaggaattctggggactatacttctagcttggctaacttgtgttagtacaaacccaccacatttcaccccttgtcgacttgacatctatacacacccctttaatcatacc

SEQ ID NO: 20850 - DNA, 1414 bp, Homo sapiens
  MAP TO AL136040.3; EXPRESSED IN ADULT LIVER, SIGNAL = 1.3; EXPRESSED IN HELA, SIGNAL =   2; EXPRESSED IN BONE MARROW, SIGNAL = 1.5; EXPRESSED IN LUNG, SIGNAL = 1.3; EXPRESSED IN HEART, SIGNAL = 1.3; EXPRESSED IN FETAL LIVER, SIGNAL = 1.6; SWISSPROT HIT: P16473, EVALUE 0.00e+00; NT HIT: gi16190702, EVALUE 0.00e+00; EST_HUMAN HIT: BE179105.1, EVALUE 0.00e+00
ttacaaaaccgtttgcatatactcttctgagatttggccttgcttctttggggttagatgggagttttcaatcagttcatagacatcttccatgttgtggagaccctgcctcatctcgtgggtaaccttttgaacctgaatatcagtgctgttctttggaggaaccctctgcccccggtatgcctgagcctggcgtttacagatgccaaacttgctgagtaggatgaacacatccctctggaaggccttggtgaaaatagcatagaggaatggattggcacaggagttaagtggatagaagagtaccagcaagattttggagttgctaacagtgatgagaggcttgttcagaattgctgacagagcatagaatgagattggggccatgcatatgaagtcggtgaagatcaacacagccatcctcttggcaattttggtatctttgtcccctgggttgtactgcggatttcggactgtgatgtagatcttcacataacagcagcagacgatgacgaaggcaactatgttgagcgtcagaacaaaaacaatatatgccagagcaagaggggtctcggtgtccatgggcaggcagatactgactttggcatagctacttattcccaccaaaggaagcagggcgagaaggaagcagcaaacccagcccccaaccatgatggcacatgcgtgcctgaggcggatcttccggtccaggcgcatggcgaaggtgatggcataccagcgctccagggtgatgaccgtcagcgtatacaccgataactcgcttgcaaagacagtgaagaaaccagccgtgttgcacccagggcctgtctgccagtcgatggcatggttgtagtactcagagtgagtgtagaggtctacagaggcgatgaggagcaggtacatccccatgcagaaatccgcaaaggccaggttgcacatgagaaagcgggggacgttcagtttgtagtggctggtgaggagaataagcaggacaaagacattgcccaggagagccagcagactaacgaaccacaccacaattctcaggaacttgtagcccattatgtcttcacacgggttgaactcatcggacttgggggtacacaccatgtcttcactgtccccacatatggtgtagtcataatggctgtcaaaagcttgtagagtctcttcctgggggtttttgagctcctggccaaaaccaatgatctcatcctcttgttcttcaaagaagacgtaataatgagcgttgttatgagtatcctggaacttggacttttccttgtacccaacaatgctgtcacccagattctcttcatattcctggtggagggggctattcaaggcattcacagattttctctggcgcaagctctgcatactgctctcattacacatcaaggactcaaggatt

SEQ ID NO: 20851 - DNA, 557 bp, Homo sapiens
  MAP TO AP000344.1; EXPRESSED IN PLACENTA, SIGNAL =   2; EXPRESSED IN BRAIN, SIGNAL = 0.84; EXPRESSED IN HEART, SIGNAL = 1.5; EXPRESSED IN BONE MARROW, SIGNAL = 0.99; EXPRESSED IN ADULT LIVER, SIGNAL = 1.2; SWISSPROT HIT: P05680, EVALUE 5.30e+00; EST_HUMAN HIT: BG623981.1, EVALUE 2.00e-04
catgacccttctgaggttcctagcagatgacctgggtgctcagcaagaacacttgctctggctggtcggcatgtgcctgtccccggtcctgcgtgacctctggagttgttccctgacagctccccgatgtgcttggttcagccttgtggagttgcatgctgtgtgcgtagagtgtattactcagcagctcagcgagacctttctccaggttgccagaagccttctgtgcacagctccgccctccacagatcctcccttcctctcagcaggaccatcatgctgagcttgagctgtaccccacggcgccaagcctggaagagaccactgggtagagcaaggggtgttcagaggttcacttcatttgtttctctgtctttagacagcccagtgtctgtgaacagttactgtgtgtattttgttcatttttctagttgtttacaacatgaaggcagacctggtctcagttgcccagcatgacgtcccagatccacatgtgaggaggagcagcagcatgggggttccgctgcgagctcagggcaggggtctgtattccagga

SEQ ID NO: 20852 - DNA, 746 bp, Homo sapiens
  MAP TO AC005795.1; EXPRESSED IN ADULT LIVER, SIGNAL = 3.9; EXPRESSED IN BRAIN, SIGNAL = 4.9; EXPRESSED IN PLACENTA, SIGNAL = 6.9; EXPRESSED IN LUNG, SIGNAL =  12; EXPRESSED IN HEART, SIGNAL =   5; EXPRESSED IN BONE MARROW, SIGNAL =  11; SWISSPROT HIT: P12324, EVALUE 1.00e-104; NT HIT: gi14786817, EVALUE 0.00e+00; EST_HUMAN HIT: BE741145.1, EVALUE 0.00e+00
atggctgggatcaccaccatcgaggcggtgaagcgcaagatccaggttctgcagcagcaggcagatgatgcagaggagcgagctgagcgcctccagcgagaagttgagggagaaaggtgggcccgggaacaggctgaggctgaggtggcctccttgaacgtgggatccagctggttgaagaggagctggaccgtgctcaggagcacctggctactgccctgcaaaagctggaagaagcggaaaaagctgctgatgagagtgagagaggtaagaaggttattgaaaaccgggccttaaaagatgaagaaaagatggaactccaggaaatccaactcagagaagctaagcacattgcagaagaggcagataggaagtatgaagaggtggctcgtaagttggtgatcattgaaggagacttggaacgcacagaggaacgagctgagctggcagaatccctttgccgagagatggatgagcagattagactgatggaccagaacctgaagtgtctgagtgctgctgaagaaaagtactctcaaaaagaagacaaatatgaggaagagatcaagattcttactgataaaataaaggaggcggagacccatgctgagtttgctgagagatcggtagccaagctggaaaagacaattgatgacttggaagataaactgaaatgcaccaaaggggagcacctctgtacacaaaggatgctggaccagactctgcttgacctgaatgagatgtag

SEQ ID NO: 20853 - DNA, 651 bp, Homo sapiens
  MAP TO AL163195.3; EXPRESSED IN LUNG, SIGNAL = 0.95; EXPRESSED IN HEART, SIGNAL = 1.2; EXPRESSED IN BONE MARROW, SIGNAL = 1.1; EXPRESSED IN FETAL LIVER, SIGNAL = 1.3; EXPRESSED IN ADULT LIVER, SIGNAL = 1.3; EXPRESSED IN BRAIN, SIGNAL = 1.1; SWISSPROT HIT: Q9QYX3, EVALUE 1.00e-10; NT HIT: gi13376077, EVALUE 2.00e-04; EST_HUMAN HIT: AU124123.1, EVALUE 2.00e-04
tcattgtccagttggtaactggcgcttcatgtcattacaggttataataatgtgcttttttataacagaagttaggtaattgcagttaggagtgacctggtctggttgggacagctcgcacaatgtcaaatcaaaaggtcgggagcttttgtgacattttccccccttgagctcacaggcaatgacaggactgttacagacagctttgactgtgtttagatcctcatggatgaatgcatactgggctatgcaactctgactgggctccttcatcttgtgtgccatcatatcattgcattctctatctgtctggtcaagcctaagatagtctttgttgctctgaaagagagctgaggctctgagcatcttgttacccccaacctcatcttcaccgaggatgggatcttctggccagccaggttgcaccacttctttgttgctaagcaccagcgtttctgtggtttgggtgccgtctccctcctcagtggcctcagctttgtcctgtgagtcactggaccaaaattcattgagcggttgatcactctcctccaagactgctgtagccatatgaagtcccaaccccaggcccatccccaggcccagcagcagcatcagcaacatgaaaaagatctgcaccagattcagcttcat

SEQ ID NO: 20854 - DNA, 659 bp, Homo sapiens
  MAP TO AL117259.3; EXPRESSED IN ADULT LIVER, SIGNAL =  37; EXPRESSED IN PLACENTA, SIGNAL = 1.7; EXPRESSED IN BRAIN, SIGNAL = 0.84; EXPRESSED IN BONE MARROW, SIGNAL = 1.3; EXPRESSED IN LUNG, SIGNAL = 4.1; EST_HUMAN HIT: AW950676.1, EVALUE 1.00e-36; SWISSPROT HIT: P20848, EVALUE 2.00e-96; NT HIT: M21890.1, EVALUE 0.00e+00
gacaataccattctctgtctcatggggcgtcctcctgctggcaggcctgtgctgcctggtccccagctccctggttgaggatccccaggaagatgctgcccaaaagacggatacatcccaccatgatcaaggggactgggaggaccttgcttgccagaagatctcctataacgtcaccgacctcgcctttgatttgtacaaagagctggctgatctatcacaaaccagcaatgtcttagtcaccccaacaagcgtggctatggcctttgcaatgctctccctggggaccaaggctgacactcgcacagagatcctggaaggcctgaatgtcaacctcacagagacgcctgaggccaagatccacgaatgcttccagcaagttctccaagccctcagcaggccagacacccggctccagctgaccaccggcagtagcctgtttgttaacaagagtatgaagctagtggacacgtttttggaggataccaagaagctgtaccactcagaagcctcttccatcaacttcagggacaccgaggaggccaaagagcagatcaacaattatgtggagaaaagaactggaagaaaagtagtggatttggtcaaacacctgaaaaaagacacaagtcttgccctggtggattacatttcctttcacg

SEQ ID NO: 20855 - DNA, 1156 bp, Homo sapiens
  MAP TO AC007721.10; EXPRESSED IN FETAL LIVER, SIGNAL =   2; EXPRESSED IN LUNG, SIGNAL = 1.7; EXPRESSED IN ADULT LIVER, SIGNAL = 1.8; EXPRESSED IN HELA, SIGNAL =   3; EST_HUMAN HIT: BG002218.1, EVALUE 4.00e-35; SWISSPROT HIT: gi8039778, EVALUE 8.00e-19
ccttcctctgtgtccagatcctggacgttggttccttttttaatggagaacacgcatgtgattccaaatggaaaaaggcccgacagcccagccctggccacttgcccctcctggaggcagccagtgtggagatgccagtgtgcctggggcgtggcctcctagagggagtcagtgtggagatgccggtgtgcctggggcgtggcctcctggagggaaccagtgtggagatgtcggtgtgcctggggtgtggcctcctggagggagtcagtgtggagatgcccgtgtgcctggggcatggcctcctggagggaaccagtgtggagatgtcagtgtgcctggggtgtggcctcctggagggagtcagtgtggagatgcccgtgtgcctggggcatggcctcctggagggaaccagtgtggagatgtcagtgtgcctggggcgtggcctcctggagggagtcagtgtggagatgcccgtgtgcctggggcatggcctcctggagggaaccagcgtggagatgccggtgtgcctggggcgtggcctcctagagggagtcagtgtggagatgcccgtgtgcctggggcgtggcctcctggagggaaccagtgtggagatgcccgtgtgcctggggcgtggcctcctagagggagtcagtgtggagatgcccgtgtgcctggggcgtggcctcctggagggaaccagtgtggagatgcccgtgtgcctggggcgtggcctcccggagggagtcagtgtggagatgcccgtgtgcctggggcgtggcctactagagggagtcagtgtggagatgcccgtgtgcctggggcgtggcctcctggagggaaccagtgcggagatgtcggtgtgcctggggcgtggcctcccggagggagtcagtgtggagatgtcggtgtgcctggggcgtggcctcctggagggagccagtgcggagatgcccgtgtgcctggggcggggcctcctggagggaaccagcgtggagatgcccatgtgcctggggcgtggcctcctagagggagtcagtgtggagatgcccgtgtgcctggggcgtggcctcctggagggaaccagtgtggagatgccagtgtgcctggggcgtggcctcctagagggagtcagtgtggagatgcccgtgtgcctggg

SEQ ID NO: 20856 - DNA, 728 bp, Homo sapiens
  MAP TO AC012433.5; EXPRESSED IN ADULT LIVER, SIGNAL =   2; EXPRESSED IN BRAIN, SIGNAL = 2.1; EXPRESSED IN HELA, SIGNAL = 1.7; EXPRESSED IN LUNG, SIGNAL = 2.3; EXPRESSED IN HEART, SIGNAL = 2.2; EXPRESSED IN BONE MARROW, SIGNAL = 2.2; EXPRESSED IN FETAL LIVER, SIGNAL = 2.6; SWISSPROT HIT: P31152, EVALUE 1.00e-101; EST_HUMAN HIT: BF918990.1, EVALUE 0.00e+00; NT HIT: gi14764264, EVALUE 0.00e+00
tcaggctagtgatcttcctagcaccctccagcctcccctaattactaactctagtcctctgactaccatggagctaggaatagcttgggaatgctgcaagtattcttggggattctgtggaccaccagtatccgccattccagccagacataccttgtgggagtaatgctgatcaacgatccttgccaacccgaaatccccaatcttgagcacgaggtcctctgtgctgatgaagatgttggcgggcttcaggtccctgtgcagcacgttggcggagtggatgtacttgagcccgcggagcagctggtacatgaacagcttggcatgctcttctgccagcgtgccctgctccagcaggcgtgccaggtcggtctccatgtactcctggacgatgtacgccacgctgaacttgaacagctcaccctgcaggtcagtgcccttgggaccgagcacctcgtacactttgacgatgttgtcgtggtccaggcgccgaatgatcttgatctctcggagcgcgtgcttcatgctgcgggcatcgctcagggcaatcttcttcacagcgaccttccggcaggcccggctgtccacggccgacagcaccaaaccattgacaccgaagcccaggggttggaagtcaacaaagcgcccaccgaggtcatacccatagacactggcgatgcagtcacccttctcagccattgtgggctcagtgatctggagctgcccag

SEQ ID NO: 20857 - DNA, 962 bp, Homo sapiens
  MAP TO AC004597.1; EXPRESSED IN ADULT LIVER, SIGNAL = 1.8; EXPRESSED IN FETAL LIVER, SIGNAL = 1.7; EXPRESSED IN LUNG, SIGNAL =   2; EXPRESSED IN BRAIN, SIGNAL = 1.7; NT HIT: gi11427060, EVALUE 0.00e+00; SWISSPROT HIT: O60404, EVALUE 0.00e+00; EST_HUMAN HIT: BG197640.1, EVALUE 5.00e-59
atacagtatccatgcctggtcagaactacagaaccatatctgaatttatcctctctggcttctcagccttcccccagcagctcctgcctgtcttgttcctgctgtacctcctgatgttcctgttcacattgcttggcaaccttcttatcatggccacagtttggattgaacgcagactccacacacccatgtacctcttcttgtgtgccctctccatctctgagattctgttcactgttgccatcacccctcgcatgctggctgatctgctcttcacccatcgttccatcacctttgtggcttgtgccattcagatgttcttctccttcatgtttggcttcactcactccttccttctcatggtcatgggctatgatcactacgtgaccatctgccacccactgcattacaacatgctaatgagtccccgtggctgtgcccatcttgtggcctggacctgggctggtggctcggtcatggggatgatggtgacaatgatggtttttcacctcactttctgtgggtctaatgtgatccaccattttctctgtcatgtgctttccctcttgaagttggcctgtgggagcaagacatcatctgtcatcatgggtgtgatgctggtgtgtgtcacagccctgataggctgtttgttcctcatcatcctctcctttgtcttcattgtggctgccatcttgaggattccttctgctgagggccggcacaagactttctccacttgtgtatcccacctcactgtggtggtcatgcactatagttttgcctcccttatctacctcaaacccaagggcctccattctatgtacagtgatgccttgatggccaccacctatactgtcttcacccccttcctcagcccaatcattttcagtctaaggaacaaggagctgaagaatgccataaataaaaacttttgcagaaggttctgccctctaagctcctaa

SEQ ID NO: 20858 - DNA, 773 bp, Homo sapiens
  MAP TO AC007326.28; EXPRESSED IN BRAIN, SIGNAL = 2.7; EXPRESSED IN LUNG, SIGNAL = 2.3; EXPRESSED IN HEART, SIGNAL = 2.7; EXPRESSED IN BONE MARROW, SIGNAL = 2.4; EXPRESSED IN FETAL LIVER, SIGNAL =   2; EXPRESSED IN PLACENTA, SIGNAL = 4.2; EXPRESSED IN ADULT LIVER, SIGNAL = 2.8; NT HIT: M14123.1, EVALUE 0.00e+00; SWISSPROT HIT: P10266, EVALUE 0.00e+00; EST_HUMAN HIT: AL535594.1, EVALUE 0.00e+00
atgtagtacaggctacaagggatgttgagacggctctaattaaatatagcatggatgatcagttaaaccagctattcaatttattacaacaaactgtaagaaaaagaaatttcccattttatattactcatattcgagcacacactaatttaccagggcctttgactaaagcaaatgaacaagctgacttactggtatcatctgcactcataaaagcacaagaacttcatgctttgactcatgtaaatgcagcaggattaaaaaacaaatttgatgtcacatggaaacaggcaaaagatattgtacaacattgcacccagtgtcaagtcttacacctgcccactcaagaggcaggagttaatcccagaggtctgtgtcctaatgcattatggcaaatggatgtcacgcatgtaccttcatttggaagattatcatatgttcatgtaacagttgatacttattcacatttcatatgggcaacttgccaaacaggagaaagtacttcccatgttaaaaaacatttattgtcttgttttgctgtaatgggagttccagaaaaaatcaaaactgacaatggaccaggatattgtagtaaagctttccaaaaattcttaagtcagtggaaaatttcacatacaacaggaattccttataattcccaaggacaggccatagttgaaagaactaatagaacactcaaaactcaattagttaaacaaaaagaagggggagacagtaaggagtgtaccactcctcagatgcaacttaatcta

SEQ ID NO: 20859 - DNA, 597 bp, Homo sapiens
  MAP TO AC011718.2; EXPRESSED IN ADULT LIVER, SIGNAL = 1.7; EXPRESSED IN PLACENTA, SIGNAL = 1.6; EXPRESSED IN BONE MARROW, SIGNAL = 1.8; EXPRESSED IN LUNG, SIGNAL = 1.4; EXPRESSED IN FETAL LIVER, SIGNAL = 1.4; EXPRESSED IN HELA, SIGNAL = 2.7; EXPRESSED IN BRAIN, SIGNAL = 1.4; NT HIT: gi14756466, EVALUE 3.70e-02; SWISSPROT HIT: Q04503, EVALUE 1.00e-03; EST_HUMAN HIT: BI829297.1, EVALUE 0.00e+00
tcaagacaaagaaaagtgtcttacattggcagcatcttcttttttacagatgtcttgtacagtgtcctcattagcaatgtcatatacagcgtccttattagcgaattcgtatacagcatcctcattagcgatgccatatacagcgtcctcattagcgatgttgtatacagcgtcctcattagtgatgtcgtatagagcgtcctcattagcgatgtcatatacaatgtcctcattagcgatgtcatatacagcaacctcattcgctatgtcttgtaaagcatcctcattagcgatgtcatatacaacgtcctcattagcgatgtcgtatacagcgtcctcgttagtgatgtcttgtacggtgtccttataagcaatgtcgtctacagcgtcctcgttagcatgccttgtgggtgtcattagcgatgtcatatacagcatcctcattggtgatgtcttatatggtgtcattagcgatgttgtgtacagcgtcctcgttagcaatgccttgtacagtgtcctcgttagcaatgtcatatacagtgtcctcattagcgatggcttatacactgtcctcattagcgatgttgtgtacagcat

SEQ ID NO: 20860 - DNA, 726 bp, Homo sapiens
  MAP TO AF030876.1; EXPRESSED IN LUNG, SIGNAL = 3.3; EXPRESSED IN HEART, SIGNAL = 3.3; EXPRESSED IN BONE MARROW, SIGNAL = 3.2; EXPRESSED IN ADULT LIVER, SIGNAL = 2.6; EXPRESSED IN PLACENTA, SIGNAL = 3.9; EXPRESSED IN BRAIN, SIGNAL =   3; NT HIT: gi14768314, EVALUE 0.00e+00; SWISSPROT HIT: P51608, EVALUE 5.00e-37; EST_HUMAN HIT: AI742297.1, EVALUE 0.00e+00
ctcggtcacgggcgtccggctgtccacaggctcctctctgtttggccttggcatggaggatgaaacaatgtctttgcgctctccctcccctcggtgtttgtacttttctgcggccgtggcggcggtggcaaccgcgggctgagtcttagctggctccttggggcagccgtcgctctccagtgagcctcctctgggcatcttctcctctttgcagacgctgctgctcaagtcctggggctcaggggggctggtggggtcctcggagctctcgggctcaggtggaggtgggggcaggggtgggagcagtggcacgggggcctttggggactctgagtggtggtgatggtggtggtgctccttcttggggggtgaggaggcgctgctgctgcgccccttggggctgctctccttgcttttccgcccagggctcttacaggtcttcagtcctttcccgctcttctcaccgagggtggacaccagcaggggcttcaccacttccttgacctcgatgctgaccgtctcccgggtcttgcgcttcttgatggggagtacggtctcctgcacagatcggatagaagactccttcacggctttctttttggcctcggcggcagcggctgccaccacactccccggctttcggccccgtttcttgggaatggcctgagggtcggcctcagcttttcgcttcctgccggggcgtttgatcaccatgacctgggtgga

SEQ ID NO: 20861 - DNA, 501 bp, Homo sapiens
  MAP TO AC004126.1; EXPRESSED IN BONE MARROW, SIGNAL = 1.9; EXPRESSED IN ADULT LIVER, SIGNAL = 1.9; EXPRESSED IN PLACENTA, SIGNAL = 6.2; EXPRESSED IN BRAIN, SIGNAL =   3; NT HIT: gi14784758, EVALUE 0.00e+00; SWISSPROT HIT: P10569, EVALUE 1.20e+00; EST_HUMAN HIT: BG177799.1, EVALUE 0.00e+00
aggagctggtggtgcccccaggagggccaggggccagggtaggggcctcccctcctcccccactctcacaggggcagctcccctcccccttgggcgggccaggggactgccggtccagctggcggctcagttcctcctggtcagtgcccagccagacccagttgtggggctggggggaggtggggtcagtggcactgtcgggaggttctttgcgctgatagcgcaggacgaagaccacaccattgaccaagaagatgaagatggccacgcagaagactcccagcagggcgtacatgcccagctctagctcagtgacatgctgaggggcagggaccatctcctcctcctcttcctcctcctcctccctggcttcggtctcctccttcctggcctcctcctctgcccgctcaaacttgcccctcacacctgtgttgcccccgacactgcctgccacctgccgtttaccacccatggtggcttctgtggctggtgggctccaag

SEQ ID NO: 20862 - DNA, 744 bp, Homo sapiens
  MAP TO AF254983.1; EXPRESSED IN PLACENTA, SIGNAL = 4.6; EXPRESSED IN LUNG, SIGNAL = 2.3; EXPRESSED IN HEART, SIGNAL = 2.5; EXPRESSED IN BONE MARROW, SIGNAL = 2.4; EXPRESSED IN ADULT LIVER, SIGNAL = 2.3; EXPRESSED IN BRAIN, SIGNAL = 2.6; NT HIT: AL163201.2, EVALUE 0.00e+00; SWISSPROT HIT: Q02952, EVALUE 4.30e+00; EST_HUMAN HIT: BF994092.1, EVALUE 0.00e+00
atgttttatatatctatagttagaaaatttaaaatttgtttgtacattaccataacaaatgttctgaattttgtaatatcatcccaacatacagtgaataccgaattggaaaaacagatttctaatgaggctgatagtgaagaaatgaaaatgtcttctgaagtgaagcatatttgtggcgaagatcaaattgaagataaaatggaagtgacagaaaacattgaagtcgttacacaccagatcactgtgcagcaagagcaactgcagttgttagaggaacctaaaacagtggtatccaaagaagaatcaaggcctccaaaatttgtcattgaatctgtcactcttccactagaaaccttagtgtccccacatgaggaaagcacttcattatgtcctgaggaacagttggttatagaaaggctacaaggagaaaaggaacagaaagaagattctgaactttctactggattgatggactctgaaatgactcctacaattgagggttgtgtgaaagatgtttcataccaaggaggcaaatctataaagttatcatctgagacagagtcatcattttcattatcagcagacataagcaaggcagatgtgtcttcctccccaacaccttcttcagacttgccttcgcatgacatgctgcgtaattacccttcagctcttagttcctctgctggaaacatcatgccaacaacttacatctcagtcactccaaaaaactggcatgggtaa

SEQ ID NO: 20863 - DNA, 971 bp, Homo sapiens
  MAP TO AC002472.3; EXPRESSED IN BRAIN, SIGNAL = 1.2; EXPRESSED IN ADULT LIVER, SIGNAL = 1.3; EXPRESSED IN HELA, SIGNAL = 0.35; EXPRESSED IN HEART, SIGNAL = 1.3; EXPRESSED IN FETAL LIVER, SIGNAL = 1.3; EXPRESSED IN LUNG, SIGNAL = 1.6; NT HIT: AB002059.1, EVALUE 0.00e+00; SWISSPROT HIT: O43246, EVALUE 1.00e-105; EST_HUMAN HIT: BE732966.1, EVALUE 0.00e+00
cacgcttatgccagaagctgaaccgcctgaagccgctggaggactccaccatggagacgtcactgcggcgctgcctgtccacgctggacctgactcttctgggcgtgggtggcatggtgggctcgggtctctacgtgctcacaggtgccgtggccaaggaggtggctggccctgctgtgctcttgtccttcggtgtggccgctgtggcctccctgctggcagccctatgctatgcagaatttggggcacgtgtgccacgcacgggctctgcctacctgttcacctacgtatccatgggcgagctgtgggccttcctcatcggctggaatgttctcctcgaatacatcatcggtggcgccgccgtggcccgtgcctggagtggctacctggactctatgttcagccacagcatccgcaacttcactgagacccacgtgggttcttggcaggtgcccctcctgggccactacccggacttcctggctgctggcatcatcctcctggcctctgcctttgtctcctgtggagcccgcgtgtcctcctggctcaatcacaccttctcggccatcagcctgcttgtcattctcttcattgtcatcctgggcttcatcctggcccagcctcacaactggagcgctgacgaaggcggctttgcacccttcggcttctccggcgtcatggccggcactgcctcctgcttctatgctttcgtgggcttcgacgtcattgccgcctccagtgaggaggcccagaacccacggcggtctgtgcctctggccatcgccatctcgcttgccattgcagctggtgcctacatccttgtctccaccgtgctaaccctcatggtgccctggcacagcctggaccccgactcagcgcttgcagatgccttctaccagcggggctacaggtgggctggcttcatcgtggcagctggctccatctgcggtgagagactcttcctgggcagg

SEQ ID NO: 20864 - DNA, 487 bp, Homo sapiens
  MAP TO AL163248.2; EXPRESSED IN ADULT LIVER, SIGNAL = 1.9; EXPRESSED IN BRAIN, SIGNAL = 1.9; EXPRESSED IN PLACENTA, SIGNAL = 2.8; EXPRESSED IN BONE MARROW, SIGNAL = 1.9; EXPRESSED IN LUNG, SIGNAL = 1.3; EXPRESSED IN HEART, SIGNAL = 1.6; NT HIT: AL163248.2, EVALUE 0.00e+00; SWISSPROT HIT: P10809, EVALUE 7.00e-71; EST_HUMAN HIT: AL518632.1, EVALUE 3.00e-89
tcatcggtagcgtttttccatctttactgtggtgaaaccctttcttctgacctttttcattgcatcggaaattaggttgccaatttctttgtctccatttgcagaaattgtagcaacctgagcaatttcttcaggggtggtcacaggtttagactgctttttaagttcagcaattacagcatcaacagctaacatcacacttctcttgatttccactggattagcacctttgctaaacttcttgaagacttccttggcaacagtagcagtggtagtgccatccccagcctcttcatttgtgttattggcaacatcttgaacaagtttagccgcaatatttttatatttatcctttaagtcaatggaccttgcaacagtcacaccatcttttgttactttgggacttccccagttctgctcagtaatcactgtttttccctttggccccattgtaatggctacagcagtgagtaaaaggtctacacct

SEQ ID NO: 20865 - DNA, 590 bp, Homo sapiens
  MAP TO AC004624.6; EXPRESSED IN ADULT LIVER, SIGNAL = 1.2; EXPRESSED IN BRAIN, SIGNAL = 1.3; EXPRESSED IN HELA, SIGNAL = 1.1; EXPRESSED IN LUNG, SIGNAL = 1.2; EXPRESSED IN BONE MARROW, SIGNAL = 1.4; EXPRESSED IN FETAL LIVER, SIGNAL = 1.2; SWISSPROT HIT: P49639, EVALUE 2.60e+00; EST_HUMAN HIT: AA385255.1, EVALUE 3.00e-03; NT HIT: gi16165435, EVALUE 5.60e-01
gaagggtgtctgtgagcgagaatcacctccctactcttttcttctaaaactggagcagcagcgtggtgtagggttaaggacacaggcttagacatcttcccactccaacacagcccctggcaattcacttcgcctccctgcacctcggtctcctcatctgtaagaaggggtgagcagctcactggatggctgtagagagtagacggctgcatggtaaggcgaggtggacagtgtttggcggcgacacaggagtcacggctgctctgaaactccacgaccacccacacacattggtcctttccaggtcctcgctgttgttgttctcttcctgctcagacagcattgcctgcagattcctctgcaagcttcctcatattggaaaactcagcacagagtttagcattttaaataaatcaaactccactcctccacaaaaggactttgtgtggcttgtcatccctgcaggagaagctccaggctcgctggtctggctcaagagtcctctgccgtctggcccctgtctaccttttctctgtgtcctgccactcctccctgcaccctcctcccggccccacttaactcctggcatg

SEQ ID NO: 20866 - DNA, 516 bp, Homo sapiens
  MAP TO AF002994.1; EXPRESSED IN PLACENTA, SIGNAL = 3.4; EXPRESSED IN BONE MARROW, SIGNAL = 1.9; EXPRESSED IN LUNG, SIGNAL = 1.8; EXPRESSED IN ADULT LIVER, SIGNAL = 2.1; EXPRESSED IN BRAIN, SIGNAL = 1.9; SWISSPROT HIT: P43363, EVALUE 9.00e-50; EST_HUMAN HIT: BE541026.1, EVALUE 1.00e-45; NT HIT: U82671.3, EVALUE 0.00e+00
atcacgaagactacttcgctttcattttcaaggaatcctccgagtacatgcagctgatctttggcatcgacgtgaaggaagtggtccccaccggccattcctatgtccttgtcacctctctgggcctctcctatgatggcatgctggttgatgacccgagcaagcccaagacgggcctcctaataattgtcctgtgtgtgatcttcacggagggcaactgcgccccagaggaggttatgtgggaagccctgaatgtgatagaggtgtatgctgggagggagcacttcatctatggggagcccaggaagctgctcacccgggattgggtgcaggaaaattacctggagtactggcaggtgcccagaagtgatcctgcatgctatgaggaagagagagtttcagcaggcgatgcagccagggccagtggagggtggggtggactagtgcacgttccagggctacatccagcagcttccccaccctgtgtgacatgaggcccattcttcactctaaaga

SEQ ID NO: 20867 - DNA, 882 bp, Homo sapiens
  MAP TO AL132642.1; EXPRESSED IN LUNG, SIGNAL = 1.1; EXPRESSED IN BONE MARROW, SIGNAL = 1.2; EXPRESSED IN ADULT LIVER, SIGNAL = 1.2; NT HIT: gi14748454, EVALUE 0.00e+00; SWISSPROT HIT: P46804, EVALUE 1.00e-03; EST_HUMAN HIT: BI464012.1, EVALUE 0.00e+00
cagcagagcctaccctcttcatggaaagcctcgtgcagtggccccctggtgatggcatccgacagtgatgtgaagatgctgctgaacttcgtgaacctggcgtccagcgacatcaaggcagccctggataagtccgcaccctgccgccgctccgtggaccatcgcaagtacctgcagaagcagctcaagcgcttctcccagaagtattcccggctcccgcggggccttcctggcagagctgctgagccctacctgaaaagggggtctgaggaccggcccaggaggctgctcctggatttgggccctgattccagccccggcgggggtgggggctgcaaggagaaggtgctgaggaacccctacagggaggaatgtcttgctaaggagcagctcccacagaggcagcatccagaagctgcccagcctggccaggtgcccatgaggaaaagacagctgcccgcttccttctgggaagagccaaggcccacccacagctaccatgtggggctggaggggggactgggccccagggagggacctccctatgagggtaagaaaaattgcaagggcttggagcccctgggacctgagactaccctggtgtccatgtctccaagggccctggctgaaaaggagccgctcaagatgcctggggtctccttggtgggccgcgtcaatgcctggagttgctgccccttccagtaccatggacagcccatctatccgggccccctgggggcactgcctcagagtcctgtccccagcctgggcctttggaggaagagcccagcctttcccggggagctggcgcacctctgcaaggatgtggacggcctggggcagaaggtgtgcaggcccgtggtgctgaaacccatccccacc

SEQ ID NO: 20868 - DNA, 655 bp, Homo sapiens
  MAP TO AC009336.2; EXPRESSED IN BRAIN, SIGNAL = 9.9; EXPRESSED IN ADULT LIVER, SIGNAL = 7.5; EXPRESSED IN LUNG, SIGNAL = 6.8; EXPRESSED IN BONE MARROW, SIGNAL = 8.2; EXPRESSED IN HELA, SIGNAL = 2.5; NT HIT: gi14725456, EVALUE 1.00e-101; SWISSPROT HIT: P31277, EVALUE 5.00e-48; EST_HUMAN HIT: AI139039.1, EVALUE 1.00e-101
ctgcgctgctgctcttctcggcccccgcctctcccggggggccctcgccgtcgccaccgctgccttctgctgcccccttgggctccgagccaggggtcgccttggtgcagggactgcccccgccgccaccagccccggtcctggggtcgcccttgtcggctgcgccctcgggctgtggcggcgcgggtggcggcgggggctgcggcccggcgaacgggggcccgggcgctgcctcgtagaactggtcgaagccctgtggcaagatgccattgcggcccaccgcgctgtagaagttggaggcggcgcccgcggggccgtgcggcggccccggcgcagcgcacaccggctcaggcgccttgaagagcacgtccggccggcggcccgcgggcgggagaagctcgcgttgcatggccgcctcctcggccgccgcggccgccgcagccgccgccgccgccgccgcgtagtagggagcgtagccccccgcgccgccgccgcccccgccggggccgcccccgctgctgccgccccccgcgctgccgccgccgccgccgccgcggtacggccacttggcgcgctccaggccgtagtcgcggaaggccacttcgcgcacgggctggacgtgcggagccaggttggaagagtaggggaaagtcat

SEQ ID NO: 20869 - DNA, 620 bp, Homo sapiens
  MAP TO AC004080.1; EXPRESSED IN BRAIN, SIGNAL = 1.2; EXPRESSED IN HELA, SIGNAL = 0.53; EXPRESSED IN ADULT LIVER, SIGNAL = 1.4; EXPRESSED IN HEART, SIGNAL = 1.3; EXPRESSED IN FETAL LIVER, SIGNAL = 1.4; EXPRESSED IN LUNG, SIGNAL = 0.99; EXPRESSED IN BONE MARROW, SIGNAL = 1.1; EST_HUMAN HIT: AL551705.1, EVALUE 0.00e+00; NT HIT: AF039307.1, EVALUE 0.00e+00; SWISSPROT HIT: P31270, EVALUE 2.00e-75
ctttcataaagcgcagggcgctgcctttatacgtactggagccgccggccttgtcctcagtgtggccggaagacgactcggggctgctgctgctctcggggcgccgccgccgctctttctcctctgctgccgccgccgtctcccggcagccgccgccgccgccgctgtccgaacttgaagttgccggcgcgcccgttgcagccgccgccgccgccgcggaggtcgccgtggccgccgggggccccttctcggcgctcttgtccccggggtagtcggaggaggcgaggttttccggggtgccgtaggctgtctcgaaaaactggtcgaaagcctgtggcaggacgccgttcctgcccacggtgctatagaaattggacgagactgcgggggtggggtggtggtagacgttggccgagctcttggccagcacgtcgccaggcacgccggccgcgctgggcgcctgcaggcagtctctgtgcacgagctcctccgcggagtagcagtgggccagattgccgcgggggtgccatttagtggcgggctcaatggcgtactctctgaaggtcacttcgcgcacgggttggacctggggcaggttggaggagtaggagtatgtcatt

SEQ ID NO: 20870 - DNA, 497 bp, Homo sapiens
  MAP TO AL049732.9; EXPRESSED IN LUNG, SIGNAL = 2.4; EXPRESSED IN PLACENTA, SIGNAL = 2.2; EXPRESSED IN HELA, SIGNAL = 4.4; EXPRESSED IN ADULT LIVER, SIGNAL = 2.3; EXPRESSED IN FETAL LIVER, SIGNAL = 2.7; EST_HUMAN HIT: AL530336.1, EVALUE 0.00e+00; NT HIT: gi14760407, EVALUE 0.00e+00
gtgactatctgagtggcaagtggggcctcagagatctcagagacagaatttgggcccctgctggcagccttcttgcccttggattttttgggcctgatagccactactgaggcctcaatctgcctggtagctgcgtcagtgacatttagagcctctatatgctcagtgtcagtatttatgaccttagcaattgtcttcctggctttggaggctttcttggttcggatggaggctgctgtggtgtggatactggctgtctcattggtaatttggccttgggtggtagctgtatgggtggcagttgcagccagcgagacctcggtggcactagctatggccttatttgcagccttcttagccttggaagctttcttaggcttgatagaggttatcaaggcttgggaactggctgactcattggcaattggagcgtgaatattctgtgagatgactggtagctttaggacctgcaagggtgacttcagctgtatagtgcc

SEQ ID NO: 20871 - DNA, 465 bp, Homo sapiens
  MAP TO AC004231.1; EXPRESSED IN HELA, SIGNAL = 1.3; EXPRESSED IN ADULT LIVER, SIGNAL = 1.2; EXPRESSED IN BRAIN, SIGNAL = 1.2; EXPRESSED IN BONE MARROW, SIGNAL = 1.4; EXPRESSED IN LUNG, SIGNAL = 1.2; EST_HUMAN HIT: BI762148.1, EVALUE 0.00e+00; NT HIT: X73501.1, EVALUE 0.00e+00; SWISSPROT HIT: P35900, EVALUE 2.00e-67
gcttccacagaagcctgagctcctccttgcaggcccctgtagtcagtacagtgggcatgcagcgcctcgggacgacacccagcgtttatgggggtgctggaggccggggcatccgcatctccaactccagacacacggtgaactatgggagcgatctcacaggcggcggggacctgtttgttggcaatgagaaaatggccatgcagaacctaaatgaccgtctagcgagctacctagaaaaggtgcggaccctggagcagtccaactccaaacttgaagtgcaaatcaagcagtggtacgaaaccaacgccccgagggctggtcgcgactacagtgcatattacagacaaattgaagagctgcgaagtcaggtgagagatgatgcttgtgtttcctactctgtgtttagcttcaagataaatcaagaggttatctatgttaggtaggtccaaatggactttgtaa

SEQ ID NO: 20872 - DNA, 1785 bp, Homo sapiens
  MAP TO AC008688.4; EXPRESSED IN ADULT LIVER, SIGNAL = 2.2; EXPRESSED IN HELA, SIGNAL = 0.32; EXPRESSED IN BRAIN, SIGNAL = 1.8; EXPRESSED IN BONE MARROW, SIGNAL = 1.7; EXPRESSED IN FETAL LIVER, SIGNAL = 2.6; EXPRESSED IN LUNG, SIGNAL = 1.9; SWISSPROT HIT: Q9Y5F3, EVALUE 0.00e+00; EST_HUMAN HIT: AA448114.1, EVALUE 0.00e+00; NT HIT: gi14861873, EVALUE 0.00e+00
tggatttctccattttgtctttgaacagaaaataacccaaggtcagtggccttaagtagatgatatgaaagccaagaattctgacctgagtcaccatccacagccaccactttggtcactaggtagcctgcctctgcagacctgggcaccaggtcattgcagggcaaggtgccgttctgcagtgggtataagatcattggacgattgtcattgtcatctaggacaaccactctgacagtaacttggctactcagtgacaggaagcccccatcagttgcctttaccacaaattgaaaatcttgaatggcctcataatccatggttctcagcgcgtagagcttcccattgcctgaatttatggatatgtaagcaaagactgaaagatctccgttttttggaggcaacagagaatatgttatttgggcattctcacccaaatcaagatcctcagcatggactttgccaataaaaaccgcaggactgttgttttctcgaacagtcaagatataggaatcttcccgaaatattggaggattgtcattaacgtcggatattagcacctctatcatagtctcggcagacaagctaggtggtccagtatccatggcaacaatggtgatattatagcctgagacctcctcccgatccaagcttctgtcagtgaccagtgagtaagaattcccaaatgtaggtttgattacaaagggaaggtcttctctgaggaagcaggtgacttttcctcccactcgaatgtcccggtctctgatagtgaaaagggctactactgtctgtggtggtgagtcttcagggagtgggctggacacagaggagaccatcacttcgggaggattgtcattcacatccaccacttctaccaggactttgctgtgggcagagaggcctccaccatctgtagcttgaatgtcaatgtcgtatgtttcaatggcttcaaaatcgaggggtcctcttagtcgaacttctccattttgagggtcaatctgaaacgtcttgagaattgcttctgggttttgagctaaagagtaagttatcgctttgttggtgccctcgtctaggtccacggcagtcaccgtggccaccaaagagccattggggctgttctctgatacctgggctctgtacaccagtcgcgagaactggggcacgtggtcgttgacatccagaaccaccacgtggatgtgagctgtgccagacttaggcggggacccgccgtccaccgccgtaattgtcaagttgacttcaggctgctcctctcggtccaggggtttgttcagcaccagctcagcatatttaggcccgtggctgcagaagcgggtgtgcaggtggaaatacccattggcactcagggtgtagttctggagaccgttaaggcccacgtccagatcctgggcgctctgcagaggaaaacgtgaacccaaaggggtgctctccggaatctttaaaagcggctccttgtttaggaaaactggggcattgtcattgatatcaaataccctgacctcggcccggaaggactgcagcggctccaccaggactacttcaaagtgcagaacacaagggtcggctttgccacaaagtgactcccgatccagtttctccttcacaaacaaatctcccgtcttgcggtggagccggaaatgcattttgttgccctcggaaaccagccgcgccccgcgcgcagccagcttccctacctccagtcctaggtccttagctacgttggccacaaacgagccgctctccatttcctctgccactgaatagcgg

SEQ ID NO: 20873 - DNA, 585 bp, Homo sapiens
  MAP TO AC002094.1; EXPRESSED IN LUNG, SIGNAL = 2.8; EXPRESSED IN HEART, SIGNAL = 2.8; EXPRESSED IN ADULT LIVER, SIGNAL = 2.1; EXPRESSED IN BRAIN, SIGNAL = 4.3; EXPRESSED IN BONE MARROW, SIGNAL = 2.9; EXPRESSED IN FETAL LIVER, SIGNAL = 3.1; SWISSPROT HIT: P31792, EVALUE 3.00e-59; EST_HUMAN HIT: AW299272.1, EVALUE 0.00e+00; NT HIT: gi14760973, EVALUE 0.00e+00
aggccggtacaggatttgcgcttggttaatcaagctacagtgactttacatccaacagtacctaacccgtacacattgttggggttgctgccagctgaggacagctgcttcacctgcttggacctgaaagacgctttctttagcatcagattagcccctgagagccagaagctatttgcctttcagtgggaagatccggagtcaggtgtcactactcagtacacttggacccgggttccccaagggttcaagaactcccccaccatctttggggaggtgttggctcgagaccaccagaagtttcccaccagagacctaggctgtgtgttgctccagtatgttgatcttttgctgggacaccccacggcagtcgggtgcgccaagggaacagacacactactccggcacctggaggactgtgggtataaggtgtccaagaaaaaagctcagatctgccaacagcacgtacattacttgggatttactatccgacagggggagcgcagcctgggatcaggaagaaagcaggtcatttgcaatctgccagagcctaagaccagaaggcaggtgagagaattcttagga

SEQ ID NO: 20874 - DNA, 732 bp, Homo sapiens
  MAP TO AP000354.1; EXPRESSED IN PLACENTA, SIGNAL = 3.6; EXPRESSED IN ADULT LIVER, SIGNAL = 1.9; EXPRESSED IN BONE MARROW, SIGNAL = 2.2; EXPRESSED IN LUNG, SIGNAL = 2.1; EXPRESSED IN HEART, SIGNAL = 2.5; NT HIT: gi14777812, EVALUE 0.00e+00; SWISSPROT HIT: Q99323, EVALUE 3.00e-04; EST_HUMAN HIT: BF348674.1, EVALUE 0.00e+00
gcacagcttcttcaaccaagcggagcacttctacaggtaataaagaatccagttctactagagaaagattacgtgaacgtacccgattaaaccagagcaaaaaactaccttctgcaggtcagggagctaatgacatggcattggccaaacgttcccgcagtcgaactgctacagaatgtgacgttcgtatgagcaagtctaagtcagacaatcagatcagtgacagagctgctttggaggccaaagtgaaggatcttctcacgctggcaaaaaccaaagacgtagaaattttacatttgagaaatgaactgcgagacatgcgtgcccagctgggcattaatgaggatcattctgagggtgatgaaaaatctgagaaggaaactattatggctcaccagccgactgatgtggagtccactttattgcagttgcaggaacagaatactgccatccgtgaagaactcaaccagctgaaaaatgaaaacagaatgttaaaggacaggttgaatgcattgggcttttccctagagcagaggttagacaattctgaaaaactgtttggctatcagtccctgagcccagaaatcacccctgataaccagagcgatggaggaggaactctgacttcttcagtggaaggctctgcccctggctcagtggaggatctcttgagtcaggatgaaaatacactaatggaccatcagcacagtaactccatggacaatttagaca

SEQ ID NO: 20875 - DNA, 590 bp, Homo sapiens
  MAP TO AC007595.3; EXPRESSED IN BRAIN, SIGNAL = 1.1; EXPRESSED IN ADULT LIVER, SIGNAL = 1.2; EXPRESSED IN HELA, SIGNAL = 2.3; EXPRESSED IN BONE MARROW, SIGNAL = 1.2; EXPRESSED IN LUNG, SIGNAL =   1; EXPRESSED IN FETAL LIVER, SIGNAL = 1.1; NT HIT: U57395.1, EVALUE 8.80e+00; SWISSPROT HIT: P24391, EVALUE 1.90e+00; EST_HUMAN HIT: BF899367.1, EVALUE 1.30e-02
atggagtttcttgggactactcagaccgccagttactgtggtcccaagaaatgctgtggcttgacctcactgccagctgtacaggcgccagtgatccaggaatgctatcagccctactacctgcccgggtaccgctacctcaattcatggaggcctagcctcttctacaagatagccaacgtccagacctgcccggacgagagcaccagtaccctgcggccgcccaccatcctgcccacactgcgctccgcactcttctctcgctatagcccccacgactgggaccagtccaaccagctgcaggtgcgtggggccgaggcctcccggctgtgggccagccggctgacggatgactccatgaggctcttgcaggacaaggaccagctgacgcaccagatgcaggagggcacctgccggaacctgggccagaggctgtcggacattggcttctggaagtcagagctgagctatgagctggacaggcttctgactgagaaccagaacttggagacggtcaagaggcggctggagtgcgcggccaatgaggtgaactgcccattgcaggtgagtacaggggtggggacagggct

SEQ ID NO: 20876 - DNA, 585 bp, Homo sapiens
  MAP TO AL139008.3; EXPRESSED IN FETAL LIVER, SIGNAL = 1.4; EXPRESSED IN ADULT LIVER, SIGNAL = 1.5; EXPRESSED IN BRAIN, SIGNAL = 1.6; EXPRESSED IN HELA, SIGNAL = 3.3; EXPRESSED IN HEART, SIGNAL = 1.3; EXPRESSED IN BONE MARROW, SIGNAL = 1.5; NT HIT: gi14742076, EVALUE 5.00e-60; SWISSPROT HIT: P10587, EVALUE 1.00e-06; EST_HUMAN HIT: BI198974.1, EVALUE 2.00e-54
tacactttctaaagccaatgtcttttccctgagagcatctcttgtctcacggagcttaccttttaaggtattgaacttcacccgagctttatggacctgttcagtaagcaactcattcttatctgttagttgagaaatattagaacccattgtttcatgtctagaaacatcatctgctctccataaaactagttctaggtcttttctttccaaaatttcattgtactcatttatagcagtggccaagttagaatggagggattcaacttcagcttctagtctttctttgttgtgtttttccttctccaattttgaattcagccttgcattctcagctttcagatcattaagctgttgcgaatactgggccactttttttgttatcatttcttcattgagtcttacactcttttcaaagttagcatttatttctgtaatacttttaatttcctgaatatatttcttttcctttctgagactgtcattttttattgcatataattcctctttgagcatggcaatgtctctcttcaacataaaatttccaaacatctcatccttcttttttccataactttgagaatc

SEQ ID NO: 20877 - DNA, 477 bp, Homo sapiens
  MAP TO AL121907.2; EXPRESSED IN ADULT LIVER, SIGNAL = 3.3; EXPRESSED IN PLACENTA, SIGNAL = 5.1; EXPRESSED IN BONE MARROW, SIGNAL = 2.9; EXPRESSED IN LUNG, SIGNAL = 3.3; EXPRESSED IN HEART, SIGNAL = 3.4; EXPRESSED IN FETAL LIVER, SIGNAL = 2.7; NT HIT: gi14769949, EVALUE 1.00e-90; SWISSPROT HIT: P32644, EVALUE 4.00e-04; EST_HUMAN HIT: BG324399.1, EVALUE 3.00e-83
gtccgtatcaccaagcagctgaccctggggaggaccgtagagccccaggacatcgccgtcctcacgccctacaacgcgcaggcctctgagatcagcaaggcccttcggcgagagggcatcgccggggtggccgtgtcctccatcaccaagagccagggtgaggctgggggctcgtgggtggggccgggagggtgggcgcagcggcagcagggcctcacctcccatcccgcagggagcgagtggcgctatgtgctggtgagcaccgtccgcacctgtgccaagagcgacctggaccagcggcccaccaagagctggctcaagaagtttctgggcttcgttgtggaccccaaccaagtgaatgtggctgtcacgcgggcccaggaggggctctgcctgatcggtgagggcggggctgggctcttccagggtgggaacacaggtgaggccagggctgggctagggagctgccgactcctg

SEQ ID NO: 20878 - DNA, 558 bp, Homo sapiens
  MAP TO AL033527.26; EXPRESSED IN BRAIN, SIGNAL = 1.3; EXPRESSED IN ADULT LIVER, SIGNAL = 1.5; EXPRESSED IN HELA, SIGNAL = 2.5; EXPRESSED IN BONE MARROW, SIGNAL = 1.3; EXPRESSED IN FETAL LIVER, SIGNAL = 1.2; NT HIT: M19720.1, EVALUE 0.00e+00; SWISSPROT HIT: P12524, EVALUE 7.00e-80; EST_HUMAN HIT: BG720704.1, EVALUE 0.00e+00
ccgagtcgcttgggctctcggacccggagcaggcctgggtcttgggttcgcccagcggacagggggcggcgggcgccgggttgccggcttcgaggctgggagtgcagtccggggcggcggacgccttgggcgggttcccccggggcgcgccaggagcgagccggtcgctcacagctctctccagccgttcccgggccgagaagccgctccacatgcagtcacggcgtatgatggaggcgtagttcctgccccagcctttcgagtggccccgggattccgcttcgtctccggtgcaccctccgggccacggctccgggggaccaatcccgggggccgggtcccctgcgccgggacccaagccccagggcggcgacgtggggggcgatggcaccagctcgaatttcttccagatgtcctcgctgggcgccgtggagcggtagaaatcctccccgcagtcatagtcgtagaaatagtgctggtacgagtcgtagtccatgtccgctccctgcgggagggaaggggggacgtgctgaccgggtgccggccgggcgaaggagg

SEQ ID NO: 20879 - DNA, 1197 bp, Homo sapiens
  MAP TO AC002039.1; EXPRESSED IN ADULT LIVER, SIGNAL = 1.3; EXPRESSED IN BRAIN, SIGNAL = 6.1; EXPRESSED IN HEART, SIGNAL = 1.6; EXPRESSED IN BONE MARROW, SIGNAL =   1; EXPRESSED IN LUNG, SIGNAL = 1.3; EST_HUMAN HIT: BI041724.1, EVALUE 8.00e-86; NT HIT: gi14776854, EVALUE 0.00e+00; SWISSPROT HIT: P98161, EVALUE 0.00e+00
gtgagtacgtcctgaccgtgctggcatctaatgccttcgagaaccggacgcagcaggtgcctgtgagcgtgcgcgcctccctgccctccgaggctgtgggtgtgagtgacggcgtcctggtggccggccggcccgtcaccttctacccgcatctgctgccctcgcctgggggtgttctttacacgtgggacttcggggacggctcccctgtcctgacccagagccagccggctgccaaccacacctatccctcgaggggcatctaccacgtgcgcctggaggtcaacaacacggtgagcggtgcggcggcccaggcggatgtgcgcgtctttgaggagctccgcgggctcagcgtggacatgagcctggccgtggagcagggcgcccccgtggtggtcagtgccgcggtgcagacgggcgacaacatcacgtggaccttcgacatgggggacggcaccgtgctgtcgggcccagaggccacagtggagcatgtgtacctgcgggcacagaactgcacagtgaccgtgggtgcggccagccccgccggccacctggcccggagcctgcacgtgctggtcttcgtcctggaggtgctgcgcgtcgagcccgccgcctgcatccccactcagcctgacgcgcggctcacggcctacgtcaccgggaacccggcccgctacctcttcgactggacctttggggatggctcctccaacacgaccatgcgggggtgcccgacggtgacacacaacttcacgcgtagcggcacgttccccctggcgctggtgctgtccagccgcgtgaacagggcgcgttacttcaccagcatctgcgtggagccagaggtgggcaacgtcaccctgcagccagagaggcagtttgtgcagctcggggacgaggcccggctggtggcatgtgcctggcccccgttcccctaccgctacacctgggactttggcaccgaagaagccgtccccgcccgtgtcgggggccctgaggtgacgttcatctaccgagacccaggctcctatcttgtgacagtcaccgcgtccaacaacatctccgctgccaatgactcagccctggtggaggtgcaggagcccatgctggtcaccagcatcaaggtcaatggctcccttgggctggagctgcagtagccgtacctgttctctgctgtgggccgtgggcgccccgccagct

SEQ ID NO: 20880 - DNA, 786 bp, Homo sapiens
  MAP TO AL022345.2; EXPRESSED IN BONE MARROW, SIGNAL = 6.9; EXPRESSED IN HEART, SIGNAL = 7.4; EXPRESSED IN FETAL LIVER, SIGNAL = 4.5; EXPRESSED IN LUNG, SIGNAL = 7.3; EXPRESSED IN ADULT LIVER, SIGNAL = 5.9; EXPRESSED IN PLACENTA, SIGNAL = 9.1; EST_HUMAN HIT: BG758466.1, EVALUE 0.00e+00; NT HIT: gi15299301, EVALUE 0.00e+00; SWISSPROT HIT: P30645, EVALUE 5.50e-01
atgtattcccgtgtgccagagtgccagatcaccacatactattatgttgggtttgcatatttgatgatgtgtcgctaccaggatgccatccgggtctttgccaacagcctcctctacatccagaggaccaagagcatgttccagaggaccacatacaagtatgagatgattaacaagcagaatgagcagatgcatgcactgctggccattgccctcacggtgtaccccatgagtatcgatgagagcattcacctccagctgcagaagaaacacagggacaagatgctgcgcatgcagaaaggtgacccacaagtctatgaagaacttttcagttacttctgccccaagttcctgtcgcctgtagtgcccaactatgataatgtgcaccccaactaccacaaagagcccttcctgcagcagctgaaggtgttttctgatgaagtacagcagcaggcccagctttcaaccatccacagcttcctcaagctctacaccaccatgcctgtggccaagctggctggcttcctggacctcacagagcaggagttcaggatccagcttcttgtcttcaaacacaagatgaagaacctggtgtggaccagcggcatctcaatcctggatggtgaatttcagtcagcctcagaggttgacttctacattgataaggacatgatccacatcgcggacaccaaggtctccaggcgctatggggatttcttcatccgtcggatccaaaaattggaggagcttaatcgaaccctgaagaagatgggacagagaccctga

SEQ ID NO: 20881 - DNA, 656 bp, Homo sapiens
  MAP TO AC005849.1; EXPRESSED IN ADULT LIVER, SIGNAL = 1.3; EXPRESSED IN BRAIN, SIGNAL = 0.77; EXPRESSED IN HELA, SIGNAL = 0.65; EXPRESSED IN LUNG, SIGNAL = 1.5; NT HIT: gi14766235, EVALUE 0.00e+00; SWISSPROT HIT: P49988, EVALUE 2.60e-01; EST_HUMAN HIT: BG753938.1, EVALUE 0.00e+00
ctacagtgcggtgacatggaggccctggcccccagctgccctggcgctgtcatcccaggctgcgctgccaccacaggcgtgcacgtcactcagcagggcctcagcactgccccctgcgctcgctggtcctggggagccgaggaccaggtcgccctccgtgtcactgtctctggcttcctcagcccgcacggggacctgctctgggctggacgcctctccacattgctgctcgccttccccagggtcagcctgcaggccaccatccgcgacgtggtcatagtctgtgtcctgctcatcctcctgtcgctcaaggtcattgtctgtggaccccagctcagctcgggcctgcagccagcgacctggggggctggcccagagcaggcgccgcgtgcggccccacagcgcggcacctaggcgggccgggtggtagtagccccctgagtcacggctgaggcggcgccaggccagtgctaggccagtggccagcagtaggagcagcagcagcagcaggacaacggtgacagagctggagcccacgctgtcctccgcgctgccacccgagcccaaggcccctggcagggccagcagcatcccgagccctaaggtgcagggcagagcctgtgggagacaggcaggggctcagagggctcagcacc

SEQ ID NO: 20882 - DNA, 537 bp, Homo sapiens
  MAP TO AC004000.1; EXPRESSED IN LUNG, SIGNAL =   1; EXPRESSED IN HELA, SIGNAL = 3.5; EXPRESSED IN ADULT LIVER, SIGNAL = 1.2; EXPRESSED IN BRAIN, SIGNAL = 0.95; EXPRESSED IN BONE MARROW, SIGNAL = 0.96; NT HIT: M57424.1, EVALUE 0.00e+00; SWISSPROT HIT: P05141, EVALUE 2.00e-84; EST_HUMAN HIT: BG707596.1, EVALUE 0.00e+00
gtgcagcatgccagcaagcagatcactgcagataagcaatacaaaggcattatagactgcgtggtccgtattcccaaggagcagggagttctgtccttctggcgcggtaacctggccaatgtcatcagatacttccccacccaggctcttaacttcgccttcaaagataaatacaagcagatcttcctgggtggtgtggacaagagaacccagttttggctctactttgcagggaatctggcatcgggtggtgccgcaggggccacatccctgtgttttgtgtaccctcttgattttgcccgtacccgtctagcagctgatgtgggtaaagctggagctgaaagggaattccgaggcctcggtgactgcctggttaagatctacaaatctgatgggattaagggcctgtaccaaggctttaacgtgtctgtgcagggtattatcatctaccgagccgcctacttcggtatctatgacactgcaaagggtaagtttgctgtgggctttaacgttgtgttcttaggagacagtttaaaa

SEQ ID NO: 20883 - DNA, 454 bp, Homo sapiens
  MAP TO AL022576.1; EXPRESSED IN BONE MARROW, SIGNAL = 7.2; EXPRESSED IN FETAL LIVER, SIGNAL = 6.2; EXPRESSED IN LUNG, SIGNAL =  11; EXPRESSED IN HEART, SIGNAL = 6.7; EXPRESSED IN ADULT LIVER, SIGNAL = 5.8; EXPRESSED IN PLACENTA, SIGNAL =  11; EST_HUMAN HIT: BI223716.1, EVALUE 0.00e+00; NT HIT: gi14762358, EVALUE 0.00e+00; SWISSPROT HIT: O95916, EVALUE 8.00e-75
tgccaatgttatggtagatggaaaactggtgaatctgggcttatggaatacagctggacaagaagattatgacagattacgccccctatcctatccgcaagcagatgtgttcttaatttgcttttcgcttgtgagtcctgcatcatttgaaaatgtccttgcaaagtggtatcctgaggtgcagcaccactgtcccaacactcccattatcctagtgggaactaaacttgatcttagggatgataaagacaggatccagaaactgaaggagaagaagctaactcccatcacctatccgcagggtctagccatggctaaggagatgggtgctgtaaaatacctggagtgcttggccctcacaaggcgaggcctcaagacagtgtttgacgaagcgatccgagctgtcctctgcccacctcccgtgaagaagaggaagagaaaatgcctgcagttg

SEQ ID NO: 20884 - DNA, 983 bp, Homo sapiens
  MAP TO AC069278.1; EXPRESSED IN FETAL LIVER, SIGNAL = 1.6; EXPRESSED IN HELA, SIGNAL = 2.6; EXPRESSED IN ADULT LIVER, SIGNAL = 1.3; EXPRESSED IN LUNG, SIGNAL = 1.2; EXPRESSED IN BONE MARROW, SIGNAL = 1.5; SWISSPROT HIT: Q9UJU3, EVALUE 2.00e-42; EST_HUMAN HIT: AV730067.1, EVALUE 0.00e+00; NT HIT: gi14755746, EVALUE 1.00e-12
aatcgtggaggaaagccaacataatgaccgagccccagaactctcagggaagatataagggaatttacatggaagagaaattgtacagacgtgctcagcatgatgacagcctcaactggacctcacatgatcatcatgagtcccaagaatgtaaaggagaggaccctggtagacatcccaactgcaggaaaaactttggtatgaaatcaacagttgaacaacataatgcagtccatgtattaccacagcctttcacatgtaataactgtggggtgccctttgcagatgatacagatcctcatgtccatcacagcactcacctaggagaaaaatcttataaatgtgaccagtatggaaagaactttagtcagagccaagatcttatcgttcattgtaaaactcactctggcgagactccctatgaattccacgaatggcctatgggctgcaaacagagctcagaccttcccagatatcagaaagtcccttcaggaaacaaaccctacaaatgtaaagaatgtggcaagggcttcaggtgcaactccttcctttataaccatcatggagtccacacaagggagatgccctacaaatgtgatgcatgtgggaaagggtttggatttaggtcacttctttgtattcatcagggagtacacacagggaaaagccctataaaagtgaagagtgtgggaagggctttgatcagagctccaaccttcttgtccatcagagagtccacgctggagagaagccctacaaatgcagtgagtgtggcaagtgctttagttcaagctccgttcttcaagtccactggaggtttcacacaggggagaaaccttataggtgtgatgagtgtggaaagggcttcagccaaagtacacaccttcacattcaccagagagtccacacaggggagaaaccatacaaatgcaatgtgtgtggaaaggattttgcgtatagctctgttcttcacactcatctga

SEQ ID NO: 20885 - DNA, 909 bp, Homo sapiens
  MAP TO AL132777.2; EXPRESSED IN ADULT LIVER, SIGNAL = 2.3; EXPRESSED IN PLACENTA, SIGNAL = 1.6; EXPRESSED IN BRAIN, SIGNAL = 2.1; EXPRESSED IN LUNG, SIGNAL = 1.7; EXPRESSED IN HEART, SIGNAL = 2.2; EXPRESSED IN FETAL LIVER, SIGNAL =   2; NT HIT: AB024685.1, EVALUE 0.00e+00; SWISSPROT HIT: Q61321, EVALUE 1.00e-128; EST_HUMAN HIT: BG829041.1, EVALUE 1.00e-09
atcgcaagtgcggcggacatcaagcaagagaatgggatggaaagcgcctcggaagggcaggaggcgcaccgagaagtggcggggggcgcggcggtagggctgagccccccggctccagccccttttcccctggagccgggggacgccgcgaccgctgccgccagggtgagcggagaggaaggggcagtggcggcggcggcggccggagcggcggcggatcaggtacaactccactcggaacttctgggcaggcaccaccacgccgccgccgccgccgcgcagaccccgctggccttctcgcccgaccacgtcgcctgcgtgtgcgaggcactgcagcaggggggcaacctggaccgcctggcccggttcctgtggtccctgccccagagcgacctgctacgtggcaacgagagcctgctgaaggcgcgggcgctcgtggccttccaccagggcatctaccccgagctctacagcatcctcgagagccacagcttcgagtcggccaaccacccgctgctgcagcagctctggtacaaggcgcgctacaccgaggccgagcgagcccgcggccggccgctgggagccgtagacaagtaccggctgcgcaggaaattccccctgccccgcaccatctgggacggcgaggagacggtgtattgtttcaaggagaagtcgcgcaacgcgctcaaggagctctacaagcagaatcgctacccttcgcccgccgagaagcggcacctggccaagatcaccggcctctccctcacccaggtcagcaactggttcaagaaccgccggcagcgcgacaggaacccctccgagacccagtccaaaaggtgagcgccaactttcctccacctccccttccccccccccacccccttcccggctttcttttcctccaagtgc

SEQ ID NO: 20886 - DNA, 613 bp, Homo sapiens
  MAP TO AC011469.3; EXPRESSED IN BRAIN, SIGNAL = 1.3; EXPRESSED IN ADULT LIVER, SIGNAL = 1.7; EXPRESSED IN HELA, SIGNAL = 0.95; EXPRESSED IN LUNG, SIGNAL = 1.5; EXPRESSED IN BONE MARROW, SIGNAL = 1.4; EXPRESSED IN FETAL LIVER, SIGNAL = 1.4; NT HIT: gi14761694, EVALUE 0.00e+00; SWISSPROT HIT: P21817, EVALUE 1.00e-105
gtgcatggacatcctggagctgtcggagcgcctggacctgcagcgcttccactcgcacaccctgcgcctctaccgcgctgtgtgcgccctgggcaacaatcgcgtggcgcacgctctgtgcagccacgtagaccaagctcagctgctgcacgccctggaggacgcgcacctgccaggcccactgcgcgcaggctactatgacctcctcatcagcatccacctcgaaagtgcctgccgcagccgccgctccatgctctctgaatacatcgtgcccctcacgcctgagacccgcgccatcacgctcttccctcctggaaggagcacagaaaatggtcacccccggcatggcctgccgggagttggagtcaccacttcgctgaggcccccgcatcatttctcgcccccctgtttcgtggccgctctgccagctgctggggcagcagaggccccggcccgcctcagccctgccatcccgctggaggccctgcgggacaaggcactgaggatgctgggggaggcggtgcgcgacggtgggcagcacgctcgcgaccccgtcgggggctccgtggagttccagtttgtgcctgtgctcaagctcgtgtccaccctgctg

SEQ ID NO: 20887 - DNA, 786 bp, Homo sapiens
  MAP TO AC007220.1; EXPRESSED IN HELA, SIGNAL = 1.6; EXPRESSED IN LUNG, SIGNAL = 1.4; EXPRESSED IN PLACENTA, SIGNAL = 1.8; EXPRESSED IN ADULT LIVER, SIGNAL = 1.2; NT HIT: gi14779957, EVALUE 0.00e+00; SWISSPROT HIT: Q9PW70, EVALUE 8.00e-15; EST_HUMAN HIT: BI824409.1, EVALUE 0.00e+00
ggccgggtccgccgggagcgccgccctccggagttgtccggccggcgcacacctgcccggccccgcagcgccccagctcaccgctttgtctctcccgcagcgcacccccggacgctatggcccacccctccggctggccccttctgtaggatggtagcacacaaccaggtggcagccgacaatgcagtctccacagcagcagagccccgacggcggccagaaccttcctcctcttcctcctcctcgcccgcggcccccgcgcgcccgcggccgtgccccgcggtcccggccccggcccccggcgacacgcacttccgcacattccgttcgcacgccgattaccggcgcatcacgcgcgccagcgcgctcctggacgcctgcggattctactgggggcccctgagcgtgcacggggcgcacgagcggctgcgcgccgagcccgtgggcaccttcctggtgcgcgacagccgccagcggaactgctttttcgcccttagcgtgaagatggcctcgggacccacgagcatccgcgtgcactttcaggccggccgctttcacctggatggcagccgcgagagcttcgactgcctcttcgagctgctggagcactacgtggcggcgccgcgccgcatgctgggggccccgctgcgccagcgccgcgtgcggccgctgcaggagctgtgccgccagcgcatcgtggccaccgtgggccgcgagaacctggctcgcatccccctcaaccccgtcctccgcgactacctgagctccttccccttccagatttga

SEQ ID NO: 20888 - DNA, 685 bp, Homo sapiens
  MAP TO AL035252.5; EXPRESSED IN HEART, SIGNAL = 1.7; EXPRESSED IN FETAL LIVER, SIGNAL = 0.93; EXPRESSED IN LUNG, SIGNAL = 1.3; EXPRESSED IN ADULT LIVER, SIGNAL = 1.8; EXPRESSED IN PLACENTA, SIGNAL = 1.9; SWISSPROT HIT: P13993, EVALUE 6.00e-16
catccctcatccctcaggtggacgcccctcagagggacaaccttcaggtgggactcccctcaggtggattcccctcagatggattctcctcaggtggatgcccctcaggtggattcccctcaggtggatgcccctcaggtggattcccctcaggtggattcccctcaggtggatgcccctcaggtggattcccctcaggtggatgcccctcaggtggattcccctcaggtgaatgctcctcaggtgtgtgtccctcaggtggatgcccctcaggtggactcccctcaggtggactcccctcaggtggattcccctcaggtggattcccctcaggtggactcccatcaggtggacacccctcaggtggattcccctcaggtctgtgcccctcaggtggattcccctcaggtggagtcccctcaggtggagtcccctcaggtggacactcatcaggtggattcccatcaggtgtctgtccctcaggtggacgcccctcaggtggacactcatcaggtggacacccctcaggtgagattccccttaggtggatgcccctcacgtgggattccccttgggtttgtgctcagtctccagagtccccagagctccctgttgggatgaggccctggtcgcctaccacagtcacttgcagaatgatgctggtattggttcctcctcccctgcc

SEQ ID NO: 20889 - DNA, 519 bp, Homo sapiens
  MAP TO AC005296.1; EXPRESSED IN FETAL LIVER, SIGNAL = 1.9; EXPRESSED IN ADULT LIVER, SIGNAL = 2.2; EXPRESSED IN HELA, SIGNAL = 0.53; NT HIT: AF167081.2, EVALUE 0.00e+00; SWISSPROT HIT: Q57362, EVALUE 6.30e+00; EST_HUMAN HIT: AA206042.1, EVALUE 0.00e+00
ctacacactcggtagttcttccatctcgctctcctgactcggtggttcctccacctggctctcctgactcagtggttcttccatctcgctctcctgactcagtggttcctccacctggctctcctgactcagtggttcctccacctcgctctcctgactcagtggttcctccacctggctctcctgactcagtggttcttccacctcgctctcctgactcagtggttcctccacctggctctcctgactcagtggttcttccacctcgctctcctgactcagtggttcctccagctcggcctcctgactcagggggtcgtgctgggtcccctcgctcactggctcctccggcggcagctcgtgctgagggagctcctggctgggctggtcgctggggccgggtgccgctggcgcgctctccgcctcaggtgccgtcacggccgccatctttgtcgcagcccctttcttcccgcgtctccctctacgaactgcttttcccttcttggccaccttggtagt

SEQ ID NO: 20890 - DNA, 563 bp, Homo sapiens
  MAP TO AL133372.2; EXPRESSED IN LUNG, SIGNAL = 1.7; EXPRESSED IN FETAL LIVER, SIGNAL = 1.8; EXPRESSED IN ADULT LIVER, SIGNAL = 1.9; EXPRESSED IN PLACENTA, SIGNAL = 3.7; EXPRESSED IN BRAIN, SIGNAL = 2.4; NT HIT: AL163209.2, EVALUE 0.00e+00; SWISSPROT HIT: P26808, EVALUE 3.00e-20; EST_HUMAN HIT: AA984295.1, EVALUE 3.00e-93
ggattgcagagattagtgccaacatcaaagacttgaaagacacaggggtggttattcccaccatatccccattcaactctcctatttggcctgtgcagaagacagatggatcttggataatgacaatggattatcttaagtgtaaccaagtggtgactccaattgcagctgctgtaccagatgtggttttattgcttgagcaaattaacacatctcttggtacctggtatgcagccattgatttagcaaatgcctttttctctattcgtgtccataaggcccaccagaagcaatttgcatttggctggcaaggccaggaatataccttcactgtcctatctcaggggtatatcaactctccagctttgtgtcataatcttgttcagagagatcttgatcacttttcacttccacaagatatcacactattccattacattgatgacattatgttgattggatccagtgagcaagaagtagtaaacacactgaacttattggtgagacatttgtgtgccaggagatggaaaatgaatccaactaaaattcagggccttctagct

SEQ ID NO: 20891 - DNA, 759 bp, Homo sapiens
  MAP TO AL135999.2; EXPRESSED IN LUNG, SIGNAL = 1.2; EXPRESSED IN HEART, SIGNAL = 1.5; EXPRESSED IN BONE MARROW, SIGNAL = 1.4; EXPRESSED IN FETAL LIVER, SIGNAL = 1.3; EXPRESSED IN ADULT LIVER, SIGNAL = 1.3; EXPRESSED IN PLACENTA, SIGNAL = 1.9; EXPRESSED IN HELA, SIGNAL = 1.9; SWISSPROT HIT: Q92793, EVALUE 3.10e-01; EST_HUMAN HIT: BG471925.1, EVALUE 0.00e+00; NT HIT: gi16162426, EVALUE 0.00e+00
atgccaggcagtggtaggtgcagatgggcacccgcaatgggggtggcatggagcccccagagccccgcccaaagaagcagaaggatctctggtgggcagtagccggggcctccccgtcaaatgccatcttgcactggcggcacaggtagcgatgggttacatccacggtggagatgccagtgctgcctgtcagcagctcatcaacctcaccagcttccccctcccctggagcaggcagttcaggaggctttggaggtgctgtggctgtgggctcagggggctggggtggcggctggaggagggcattggggagcagcccaatgagggtctgaggtatcatggggttcatgggaaatagccccttcttcatgccatagagctgttggaagtaggccccctgtagctgggggccaaagacagctggcggtgctgttcccccagcagggggcaatggaaagggcaggaactggccccccaacagggctgggacagtggtcttcaatgctttgaggttcttgagggcatcattggaggagctggtggggcctgcaactggctttcgctcactggagaccttgtcccccaagggctcagtaggagggcctgggacagggtcagtggtgcctgctgtggaggtgttggtttggtcgggcatgggtctctgaggtaaggggcggcctgggccagcagtctggaccactgtggtggtaggcaggaccgaagtggcgaggccgaggaggcctgaggaggctgccgggc

SEQ ID NO: 20892 - DNA, 458 bp, Homo sapiens
  MAP TO AL020998.1; EXPRESSED IN PLACENTA, SIGNAL = 2.5; EXPRESSED IN ADULT LIVER, SIGNAL = 2.8; EXPRESSED IN BRAIN, SIGNAL = 2.5; EXPRESSED IN FETAL LIVER, SIGNAL = 2.5; EXPRESSED IN LUNG, SIGNAL = 2.7; EXPRESSED IN HEART, SIGNAL = 2.7; SWISSPROT HIT: Q16937, EVALUE 4.10e+00; EST_HUMAN HIT: AU154893.1, EVALUE 2.50e+00
agccgtcccaccatccctctgccttcgagacagagacgtcctcggactgggaccccccagccgagtcccaggagcgagccagtcccagcaggcccgccaccccggccccggtgctgggcaaggccctggtcaaaggcctgcacgacagccaacgcctgcagtgggaggtgagcttcgagctggggacccctggaccggagcggggcggcgcgcaggatgccgacctatggagcgagaccttccaccacctggcggcccgcgccatcatccgcgacttcgagcagctggcggagcgcgagggcgagatcgagcagggtgagcgccacggaactgcgcccctcccgcggacggcctccggaggacagccccgctccacagccgctcccccttccccacccgcccccggtgatcctctcagccccgcgtggtccgcccacctgcttcccgggtcctacccc

SEQ ID NO: 20893 - DNA, 1433 bp, Homo sapiens
  MAP TO AC016629.5; EXPRESSED IN FETAL LIVER, SIGNAL = 1.1; EXPRESSED IN LUNG, SIGNAL = 1.3; EXPRESSED IN ADULT LIVER, SIGNAL = 1.3; EXPRESSED IN PLACENTA, SIGNAL = 1.5; EXPRESSED IN BRAIN, SIGNAL = 1.4; EXPRESSED IN HELA, SIGNAL = 0.84; NT HIT: gi14755642, EVALUE 0.00e+00; SWISSPROT HIT: P28698, EVALUE 0.00e+00; EST_HUMAN HIT: AI806315.1, EVALUE 0.00e+00
ggttcgcgctgcagctaggcagcatctccgcaggtccaggtagtgtaagccctcacctccacgtcccctgggacctcggcatggctggcctttctggccagatccaatcaccctcccgcgaaggtggctttgcgcatgcgcttctgctccccagcgatctgaggagtgaacaggaccccacggacgaggatccctgccggggtgtgggccctgctctgatcaccacccgctggcgctcccccaggggccggagccggggccgccccagcactgggggcggggtggttaggggcggccgttgcgatgtatgtggcaaggtgttcagccaacgcagcaacctgctgaggcaccagaagatccacacgggtgagcgaccattcgtgtgcagcgagtgcggccgcagcttcagccgcagctcgcacctgctgcgccaccagcttacgcacaccgaggagcggccgttcgtgtgcggcgactgtggccagggcttcgtgcgcagcgcgcgcctggaagagcatcggagagtgcacacgggcgaacagcctttccgttgcgctgagtgcggccagagcttccggcagcgctccaatctgctgcagcaccagcgcatccacggcgatcccccgggccctggcgctaagcccccggcccctcctggtgcgcccgagcctcccggcccctttccgtgcagcgagtgccgcgagagcttcgcgcggcgcgccgtgctgctggagcaccaggcggtacacacgggcgacaagtcctttggctgcgtcgagtgcggcgagcgcttcggccgccgctcagtgctgctgcagcaccggcgcgtgcacagtggcgagcggcccttcgcctgtgccgagtgcggccagagcttccggcagcgctccaacctgacgcagcaccggcgcatccacaccggggagcggcccttcgcctgcgccgagtgtggcaaggccttccgccagcggcctacgctcacgcagcatctccgcgtacacacgggcgagaaaccctttgcctgccccgagtgtggccagcgcttcagccagcgcctcaagctcacgcgtcatcagaggacacacaccggcgaaaagccctaccactgcggtgagtgcggcctgggcttcacgcaggtctcgcggctcaccgagcaccagcgcatccacacgggcgaacggcccttcgcctgccccgagtgcggccagagctttcggcagcacgccaacctcacccagcaccggcgcatccacacgggtgaacggccctacgcatgccctgagtgtggcaaggccttccgccagcggcccacgctcacgcagcatctgcgcacccaccgacgagagaagcccttcgcctgccaggactgtggccgccgcttccaccagagcaccaagctcattcagcaccagcgcgtccacagcgccgagtag

SEQ ID NO: 20894 - DNA, 925 bp, Homo sapiens
  MAP TO U90094.1; EXPRESSED IN ADULT LIVER, SIGNAL = 1.7; EXPRESSED IN HELA, SIGNAL = 0.62; EXPRESSED IN BONE MARROW, SIGNAL = 1.9; EXPRESSED IN FETAL LIVER, SIGNAL = 1.2; SWISSPROT HIT: Q28107, EVALUE 5.90e-02; EST_HUMAN HIT: AL576483.1, EVALUE 0.00e+00; NT HIT: gi14737404, EVALUE 0.00e+00
tcagatgtctttttccatccagaatatggggcgccccctcacattttgatattgtgtctccagcaggctttttgaagggggccctgatggaactgggggtgagatggtcaggcactcaggtaggggagggggtggtggcaatggaggtcccttgggaccccttggggcagcttgggcagtcaggtttggggccttcctgggtggccggggagagggggctgtggggaaggcattaagcagggtggcaggcagccgtctgctggtgaagaccaggccctgcacaggctcacccagctggtagcccaggtgggtatagaagtgcacctggtcatgggtggtgagatgcagcttgcggaagccccgggcccgagcaaagacctccaggccctccatgaggcggcggccaaagccacggcccctcagggcccgggccaccaccactgtctccactaagaggctctggggctggttcagcacccgtgacaggcgggcatggcccaccacaacgggtgctgcttcaagtgtggggtgggggcttagcagcatcaggcagagggggaaggcatctgaggactggcccagggagtgcaggcgggaggtgcggctgcggggccactgatcattgatgaggtcagcacaagcatccaggagctcgggtcggcggtgcacaggctccagggtcaactcagccaggctaggagctggggtctcctctggctggtgttcaggatccagggtaagctcagttggaccaggattgaaggtcatctctggttggcatgtggaatccaggggcagctttggctggcacgcaggatccagagtcagctcagctgggctggtactcaggatcagctccatccggtgtgtagggtctagtgtaggggtcagcttggctgggccagggctcagagtcagctcttgc

SEQ ID NO: 20895 - DNA, 863 bp, Homo sapiens
  MAP TO AC008762.5; EXPRESSED IN ADULT LIVER, SIGNAL = 1.1; EXPRESSED IN BRAIN, SIGNAL = 1.3; EXPRESSED IN HEART, SIGNAL = 1.7; EXPRESSED IN HELA, SIGNAL = 0.81; SWISSPROT HIT: P16053, EVALUE 3.00e-08; EST_HUMAN HIT: BI518513.1, EVALUE 0.00e+00; NT HIT: gi14767924, EVALUE 0.00e+00
gaagctctggcaacccgaggccggtgaggctaccccgaggtccccgcagcctgagttgagtacctttcccaagaagcctgcgcagcctgagttcaacgtgtaccccaaaaagcctccgcagcctcaggtcggtggcctccctaagaagtccgtgccgcagcctgagttcagcgaggccgctcagactcccctctggaagcctcagtccagcgagccgaagcgcgactccagcgcctttcccaaaaaggcctcccagcctccgctgagtgactttcccaagaagcctccgcagcctgagcttggggacctcaccaggacctcctcagagcccgaagtcagcgtgcttcccaagaggccgcggccggccgaattcaaagcgctctccaagaagcccccgcagcccgagctgggcggcctccccaggacctcctcagagcccgagttcaactcactccccaggaagctgctgcagccggagcgccgggggccaccccgcaagttctcacagcctgagcccagcgctgtcctcaagagacacccgcagcctgagttcttcggtgatctccctcgaaagcctccactccccagctccgcttccgagagctcactgcctgcggccgtggccggcttcagctcccggcacccgctcagccctgggtttggagccgctgggacaccccgctggaggtcaggaggcctggttcacagtggaggggccaggccaggcctcagacccagccatccaccccggcggaggcctctgccccctgccagcagcctgggacaccctccagccaagcccccgctgcccccggggcccgtggatatgcagagctttcggagaccctctgcagcatccatag

SEQ ID NO: 20896 - DNA, 574 bp, Homo sapiens
  MAP TO AC008040.7; EXPRESSED IN ADULT LIVER, SIGNAL = 2.7; EXPRESSED IN PLACENTA, SIGNAL = 3.2; EXPRESSED IN HELA, SIGNAL = 4.9; EXPRESSED IN BONE MARROW, SIGNAL = 2.6; EXPRESSED IN FETAL LIVER, SIGNAL = 2.6; SWISSPROT HIT: P08855, EVALUE 2.50e-02; EST_HUMAN HIT: BG286041.1, EVALUE 2.00e-01; NT HIT: U52196.1, EVALUE 5.50e-01
tgcaaaaatctgctccgaagcctcctctttcccatcgtcccaggcctttgctttcagggtagtggtgtgagacccccagggtttcctatgggtgggctcgagctctccacaggtgttggcaagagctgtcgttggcttttcattcgtttcacttgacttctggttgctgggtgcttcaatgtctgggtcttttgcataatgatcctcttcatagggaactgcatgagtctgacctaggattttttcttctgcttgacttttggaactctcagcatcactgtctagagctttttgattccctgtatttttcctgagtcgacgacatctctgcccccagctctcctcaaagtgtggtgcagttgccgctagcatggggtttccctgaaggtttctgagggtgcttctgtgaaaatgcaggtcaccggcagggagcatgctcctgccatggtaggcagcgggggcagctgggacactggagccatagaggaagggtatccctaggcctgctagtcccttgggattaattttttccattctcctttgctggtaaatagcatacatttccatttctgtc

SEQ ID NO: 20897 - DNA, 631 bp, Homo sapiens
  MAP TO AL160060.3; EXPRESSED IN PLACENTA, SIGNAL = 5.7; EXPRESSED IN ADULT LIVER, SIGNAL =   4; EXPRESSED IN BRAIN, SIGNAL = 3.3; EXPRESSED IN HELA, SIGNAL = 1.9; EXPRESSED IN LUNG, SIGNAL = 3.7; NT HIT: gi11496980, EVALUE 0.00e+00; SWISSPROT HIT: P24152, EVALUE 6.00e-04; EST_HUMAN HIT: AJ346438.1, EVALUE 0.00e+00
aaggaggggctccgggaggctgcctgctgcagggaggagctgtgggcgtgcttgggggaccgtggcacttcagtgaaggaggagtctcgcccagagaaagagaaggtcgaggaactctcggctgctggggacaggtcatgggcctgccgggtggcactcagctcttgacctcgtctttggttttctatgttcagcagcacctccgggtcggaagagccgtcacccacatggagggcatagtccttggattcaccggcacaggtcctgagccccatcgtctcggtcccggggtacagagaactcgcatctctgcttgactcttcctgtttgtcactttttcctccccgcttctcgacagcatcaggctccttcctggacttggtatagcgggataaatactcggagtcggcctcgggatccagagtcagcccatacttctctgccagctgtcgccttctttctgctttgtaccttgcaattctttcggctttggactccagactgtgggtgtccatggtacccgaaccatagggtgagtcaccgtggacaccggaggtttctgtgcagtatttggatcgagtttgcttttctagagaagaatcagaagtttcctcctcttcatttgatcggc

SEQ ID NO: 20898 - DNA, 752 bp, Homo sapiens
  MAP TO AC006385.3; EXPRESSED IN ADULT LIVER, SIGNAL = 1.6; EXPRESSED IN PLACENTA, SIGNAL = 1.7; EXPRESSED IN BRAIN, SIGNAL = 1.6; EXPRESSED IN BONE MARROW, SIGNAL = 1.7; EXPRESSED IN LUNG, SIGNAL =   2; EXPRESSED IN HEART, SIGNAL =   2; EXPRESSED IN FETAL LIVER, SIGNAL = 1.6; NT HIT: AJ245660.1, EVALUE 0.00e+00; SWISSPROT HIT: O95863, EVALUE 1.00e-100; EST_HUMAN HIT: AL551539.1, EVALUE 0.00e+00
atgccgcgctctttcctcgtcaggaagctccctgaccctgatcggaagcccaactacagcaaactgccggactcgaatccagagtttaccttccagcagcagccctaccaccaggcccaccttaactccactgctttgctgccaacactcatctgggacgccttcctggcgctccaagcacaaccaactgccagggcctccctccaactgagactcccccaagagagtttcaaggcggcagaactgacctcactgtcggatgaggacagcgggaaaggctcccagtcccccagcccacgttcacagccttcttcgtctttctcctccacttcagcttcttccttggaggcggaggccgataccaccttcccaggcttgggccaagtgtgcaagcagctggcccaggtctctgaggccaaggattcccagtttcaaaaagccttcaactgccaatactgcaataaggaatgcctcagcctgggtgccctcaagaaacacatccgaagccacacgctgcccttcgcctgcgaaacctgcgggaaggccttctccagaccctggctgctgcggggccatgtccggacccacactggtgagaagcccttctcctgtacccactgcagccgtgccttcgccgaccgctccaacctgcgggcccacctccagacccacttggacgtcaagaagtaccagtgccaggcgtgcgctcgaaccttctcccgaatggccctgctccacaagcaccaagagtc

SEQ ID NO: 20899 - DNA, 701 bp, Homo sapiens
  MAP TO AC002312.1; EXPRESSED IN ADULT LIVER, SIGNAL = 2.9; EXPRESSED IN BRAIN, SIGNAL = 2.8; EXPRESSED IN BONE MARROW, SIGNAL = 3.1; EXPRESSED IN HEART, SIGNAL = 2.5; EXPRESSED IN FETAL LIVER, SIGNAL = 3.8; EXPRESSED IN LUNG, SIGNAL = 2.7; EXPRESSED IN PLACENTA, SIGNAL = 2.9; EST_HUMAN HIT: BG772975.1, EVALUE 0.00e+00; NT HIT: gi15301173, EVALUE 0.00e+00; SWISSPROT HIT: P54132, EVALUE 1.00e-125
ctctttcatcttccaaatgagttttcagagagtcactttcctgagcatcttcatttatatgcacttcagcaatggggccatcatcgatgcaaatcacatcgctgcttaaccattctgagtcatccttctgttcctcagtcaaatctatttgctcgctttcagaggagggtggaggcaaatcagtctttactgtgtttgttgtataaagctgtgctttaaaaaagtttctcttacccttttttgatttctgagcagtgcttactcttacaaagtgactttggggtggtgtaacaaatgattttgaagtctcagaagtatcaaagtcatccatatcatcccaatcattgatggtacttaaagaatctggtgaagaactaaattctaatttcttgagagcagtatcccgggatttctttacagttggtgtgttttgggtagtgcatacaacttccttcggagtctgcaagaaatctggcaataatgattttgatccacctctctgtgtttcctgtcctgctggagcatttttaaagaagtccttgaccctttgctgatttgtggtgttgggtagaggttcactgaaggaaaagtcttcggtaacattaacatctttatttcttaatacaggtgtttttgctactgacacattagttacagatacattgttatctgaagatgttttctttttaaaagtgaaacct

SEQ ID NO: 20900 - DNA, 831 bp, Homo sapiens
  MAP TO AC010389.6; EXPRESSED IN ADULT LIVER, SIGNAL = 3.8; EXPRESSED IN PLACENTA, SIGNAL = 4.5; EXPRESSED IN HELA, SIGNAL = 4.5; EXPRESSED IN LUNG, SIGNAL = 3.7; EXPRESSED IN HEART, SIGNAL = 3.7; EXPRESSED IN BONE MARROW, SIGNAL = 4.2; EXPRESSED IN FETAL LIVER, SIGNAL = 3.7; NT HIT: X57147.1, EVALUE 1.00e-129; SWISSPROT HIT: P31792, EVALUE 9.00e-34; EST_HUMAN HIT: BE300447.1, EVALUE 1.00e-128
acttatgctgcccgagatgatcttttagaagtccccttagctaatcctgaccttaacctatatactgatggaagttcatttgtggagaatgggatacgaagggcaggttatgccatagttagtgatgtaaccatacttgaaagtaagcctcttcccccagggaccagcgcccagttagcagaactagtggcacttacccaagccttagaactgggaaagggaaaaagaataaatgtttatacagatagcaagtatgcttatctaatcctacatgcccatgctgcaatatggaaagaaagggagttcctaacctctgggggaacccccattaaatatcacaaagaaaccatggagttattgcacgcagtgcaaaaacccaaggaggtggtagtcttacactgccatcaaaaggggaaggagaggggagaacagcagcataagcagctggcagaggcagcagaatggaaagagagaaagagacagaaagagaaagagagagagaggaagcaacagagacaaagagaaggagacagagagaggaagagacagagacaaaggagtcaaagagagagacagagacaggaagagagagaaagagacaaagaagtcaaagagaaagaaagagagagaagcagtaaagaaaaaacagtgtaccctgttcctttaaaagccagggtaaatttctgtctacccagccacgatatattcttcttatgtggaacttcaactgatatctgcctctcagacagtttacaagagataacgaaatctatccttactctacaatcccaaatagactttttggcagcagtgactctccaaatctgctga

SEQ ID NO: 20901 - DNA, 660 bp, Homo sapiens
  MAP TO AC008620.5; EXPRESSED IN ADULT LIVER, SIGNAL = 1.3; EXPRESSED IN PLACENTA, SIGNAL =   2; EXPRESSED IN HELA, SIGNAL = 1.3; EXPRESSED IN HEART, SIGNAL = 1.3; EXPRESSED IN FETAL LIVER, SIGNAL = 1.1; EST_HUMAN HIT: BI334726.1, EVALUE 1.00e-129; SWISSPROT HIT: Q62158, EVALUE 3.00e-20; NT HIT: gi14732147, EVALUE 0.00e+00
taagcaaacttggctcaccaataccatgaggttctttggtgggtgaagagatgtttccttttcccaggtccccttacttcctctccatccccccactaaactcccatcttctctctgtacttctctcaccttgtactcctgcaccacctcctccaatggcaccacgctgtgctgtttgtggctcctggattctcggcacaccacacagatggcctcttcgtctacctcgcagaagagcttcagggcttcttggtgtttgggacagatgccctgatcggtcacgcggctccctcgaccaggggttgggtgcatctgccgaatcacctggaccatattggccagctgcaggttggggcggaagctccgccgaggaaagctctttcggcactgagggcatgtgaagcacctccgaggggctggaggcgggggcagtggggtgacggggtctagatcctcttcctcaacctcctccagcacttcctcctcgtcctcctcatcctcccccctcaggtcctcctcctccatgtcccccaagtagtagtccaggtcttcctcctcgtcctcctcctcccacacatagtccatgttgtcccagctggacctgctcatgccactggtccagaacacaccctcttcttcctcctcgaactcctcctccat

SEQ ID NO: 20902 - DNA, 616 bp, Homo sapiens
  MAP TO AC003693.1; EXPRESSED IN ADULT LIVER, SIGNAL = 1.5; EXPRESSED IN BRAIN, SIGNAL =   1; EXPRESSED IN HELA, SIGNAL = 1.6; EXPRESSED IN BONE MARROW, SIGNAL = 1.3; EST_HUMAN HIT: BF768283.1, EVALUE 3.40e+00; NT HIT: AF079444.1, EVALUE 5.90e-01
tggtggtggtgacaatgatcatggggaccgtgctgatggcggtgtttgtgatgatggtggcggtggtggtgatggtggtgggcatgagggtagttggggtggtgatggcattaccgttgatgagggtggtgatgatagtgatggtgatggtggtgggaatgatgacgaagatgatgatgatagtggtgcaaatggcagtggtggtggtagtgactgtggtgttgttgatggtattagtgctgataaaggtggtgatgatgatgatggtggtgggtgacgaaggtggtggtggtgatgattgtggtggggataatggtggtgatggtggttattgcagtggtagtgttgatcatggtggtggtagtgatggtggtcatgatgttggtggtgttggtgttggtattggtgttggtgatggtgatggtggtggtaataatcatgggatgatgatagtagtcatggtggtagtgacaatggtgacagtggaggggatggtggtggtgataatgattgtggtggtgatggtgatagtgttggtactggtggtggtgatgatggttgtggtggtggtgatgatagtggaggtggtagtaatgatgatggtggtggtagctgg

SEQ ID NO: 20903 - DNA, 920 bp, Homo sapiens
  MAP TO AC012283.1; EXPRESSED IN HELA, SIGNAL = 1.8; EXPRESSED IN ADULT LIVER, SIGNAL = 1.5; EXPRESSED IN LUNG, SIGNAL = 1.3; SWISSPROT HIT: P16112, EVALUE 8.00e-08
aggaaggaaggaaggaaggaaggaaggaaggaaggaaggaaggaaggaaggaaggaaggaaggaaggaaggaaggaaagcaagcaggcaggcagggagggagggagggaaggaaagaaagaaaggaaggaagctcacgctagtagcctgggctgtgcagtgggggaggcgagaggctcggctgtgccttcattcaggtgagagccctgaccgggacaccgagggggggacagacagatctcaggtactgatggcaaggatagaagtcacacagtgagctcgggggccagaggcagagaaagccagccctgactgcccaggaagattcctgtagccccgagaggacgtccagtagcaccttaatttaccccacccatgcccttgctagagggcatagctgctagaatgtccttgctagagggcatagctgctacaatgtccttgctagagggcatagctgctacaatgtccttgctagagggcatggctgctagaatgtccttgctagagggcatggctgctagaatgcccttgctagagggcatagctgctagaatgtccttgctagagggcatagctgctacaatgtccttgctagagggcatggctgctagaatgcccttgctagagggcatagctgctagaatgtccttgctagagggcatagctgctagaatgatgtccttgctagagggcatagctgctagaatgtccttgctagagggcatagctgctagaatgcccttgctagaaggcatggctgctagaatgtccttgctagagggcatagctgctagaatgtccttgctagagggcatagctgctagaatgatgtccttgctagagggcatagctgctagaatgtccttgctagagggcatagctgctagaatgtccttgctagaggtcatagctgctaga

SEQ ID NO: 20904 - DNA, 635 bp, Homo sapiens
  MAP TO AC019162.3; EXPRESSED IN HEART, SIGNAL = 4.1; EXPRESSED IN BONE MARROW, SIGNAL = 5.2; EXPRESSED IN LUNG, SIGNAL = 4.5; EXPRESSED IN FETAL LIVER, SIGNAL =   5; EXPRESSED IN ADULT LIVER, SIGNAL = 4.6; EXPRESSED IN PLACENTA, SIGNAL = 4.1; EXPRESSED IN BRAIN, SIGNAL = 4.9; SWISSPROT HIT: P21416, EVALUE 8.00e-13; EST_HUMAN HIT: AV732197.1, EVALUE 3.00e-93; NT HIT: AJ131016.1, EVALUE 2.00e-07
acgctgagaatcaggccactctgcaagcagcagagagatttggggataagctttgcatcacatatagcatcagggaagggggcaaacattatccaactggaagagaagcagtatcaagggatgaccctaaatgggatcccagtgacaagacagaaaactggaagaggagacactttcaggtgtgcataatggagggcttacgtaggactagaaccaagcctctcaattatactaagttgtccatgatcgaccatggatttgatgacaataccactgccttcccggaaatgttaagagagcccttgttaaagtacacctctttatctcctgatccactcaatggacagataatcctaaaggacaaatatattactcagggagcccctgatatcaggaagaagctgcaaaaacaggttctgggaccagatagtgctttagagaacctcctgaaagtagccacttcagtcttttataatagagatagggaggcccaggagagagagaggaaatacagaaaagagacagaggctttaatggccaccagcaagcccacaaatcccagaattcccagggtgcacctaattgctacagatgtggcaagccagggtatttcaaaaaggattacccagctggca

SEQ ID NO: 20905 - DNA, 733 bp, Homo sapiens
  MAP TO AF191068.1; EXPRESSED IN BONE MARROW, SIGNAL = 4.1; EXPRESSED IN FETAL LIVER, SIGNAL = 3.4; EXPRESSED IN LUNG, SIGNAL = 3.1; EXPRESSED IN HEART, SIGNAL = 3.8; EXPRESSED IN ADULT LIVER, SIGNAL = 3.4; SWISSPROT HIT: P15941, EVALUE 2.00e-21
cagtgagtgctccttgaacggggccgccgggacaggggctgccgcagtgtgcagtgagtgctccgtgaacggggccgcggggacaggggctgccgcagtgtgcagtgagtgatccgtgaaccgggccgccgggacaggggatgccgcagtgtgcagtgggtgctccgtgaaccgggccgccgggacaggggctgccgcagtgtgcagtgagtgctcagtgaacggggccgccgggacaggggctgccgcagtgtgcagtgggtgctccgtgaacggggccgccgggacaggggctgccgcagtgtgcagtgagtgctccgtgaacggggccgccgggacaggggctgccgcagtgtgcagtgagtgctccgtgaacggggccgcggggacaggggctgccgcagtgtgcagtgggtgctccgtgaaccgggccgccgggacaggggctgccgcagtgtgcagtgggtgctccgtgaacggggccgccgggacaggggctgccgcagtgtgcagtgagtgctccgtgaaccgggccgccgggacaggggctgccgcagtgtgcagtgagtgctccgtgaaccgggccgccgggacaggggctgccgcagtgtgcagtgagtgctccgtgaaccgggccgccgggacgggggatgctgcggttttgctgttcgtgcagccgtgtcggtgcagatgtgcgggttagaggcagccttgccacacaggcgagtcttca

SEQ ID NO: 20906 - DNA, 1734 bp, Homo sapiens
  MAP TO AL034380.25; EXPRESSED IN ADULT LIVER, SIGNAL = 1.3; EXPRESSED IN HELA, SIGNAL = 1.1; EXPRESSED IN BRAIN, SIGNAL = 1.7; EXPRESSED IN HEART, SIGNAL = 1.8; EXPRESSED IN BONE MARROW, SIGNAL = 2.8; EXPRESSED IN LUNG, SIGNAL =   2; EST_HUMAN HIT: BI871524.1, EVALUE 0.00e+00; SWISSPROT HIT: O14497, EVALUE 0.00e+00; NT HIT: gi16157927, EVALUE 0.00e+00
tcatgactggccaatcaaaaacagtacatcacaaatgacttgtgaaaccaatgagttcatcaacggtgataccgagatgtccaacagccgtgattcgtacagagtaaactctgagtggttctcgtccaccttggccaaggcaagcagcgcgcgggcagcccgccgcatcatgtccacactagttggctcaaagggtgggttctgcatgtggaggaggctggcctggctctgctggaactgtgtggcggcaaggctgtcctctaggaagcccaggaggttgccgatactgcccttctgcactgcaatggcacgagctgccaggctgtccccctgagccaggttggccagcagtaccacagccatctcccggcacaccgggttctttcggtcactgaggaagcgcaccatagtgctatacaacttctccaggcggctgaaggggggtgtggccagaatcaggtccacattgttgtcctggatgctgagtttgctgagggtttccaagaccagtctctgcggggaaaggacggcattggggcccagggtggaaaaggggtcctgggcttcagctgaagggcaaactgcccagtgtaggagtccgtccaggacaggcaggcaaatgctctcggggtatggagataggtccaactgccccgagatgttggcgagtgtaaccaaggtgttttcccggagcatctccaagcagtcccaccaccactccactttgttgcagctcaccccttggtcctgttcctcctccttttcataagttagtggtgcctgcttccgttctgggtgcttgtggtgcagcaggatcagcttgcccaggatgagcagcagccctgggtgtttggacatctcaaagtcattgcctggcacaaatgacaggcttcgaatggtattggacacacagacgcagcgcttggcaagagaatcctgccagtccagaagggtacacagtggggtctcatccttactgtggggttcgtcctctaggatcttgatgttccggtggctctgtgctgggctaatgccaaatggaaacttgctgctctccttgatggcctctgaactcttagctccatcctcggtcaaggtgctagaccgagtagacaacatgtcatccatagtggctgtgatccgtttttctggaggtccatcaggtgggggcccctcctggtctgttgtccctggtgtaccctctgctgttgtcacatgcttccgaggggctggtgggcagggtgcgtgaggccgggaaggcagcagctctgtcttgctctcgaagtgggtctggatatgctcagtggtgtcccccccaccaatccgccagtgcagcaggccactgtcaaactcctgcacacgcccaagcttatctgagcagtccaccacaaatggatcattcttctgtacgatctttactggaagcttgtcaaacttactgatcagcttctcctcactattctctgaagctggcttgtccttgcctgaaaaggctatctcctcatcattttcaactacttcctcttcttcttcctcttctagtttaggacctagaagttcttcttcttcttccccaccctccatgggagctggactagacaccttgctgaacctcccaggatccagtagcgttctctgtcctgggtcacccacctcatactcctttaaaatgccaaagatctcaatcaggcatcgtcggaaatattctacaaggagctctagcaaccctgggag

SEQ ID NO: 20907 - DNA, 593 bp, Homo sapiens
  MAP TO AL022319.2; EXPRESSED IN ADULT LIVER, SIGNAL = 2.1; EXPRESSED IN BRAIN, SIGNAL =   2; EXPRESSED IN HELA, SIGNAL = 2.1; EXPRESSED IN BONE MARROW, SIGNAL = 2.2; EXPRESSED IN LUNG, SIGNAL = 2.2; EST_HUMAN HIT: AI912563.1, EVALUE 9.00e-04; SWISSPROT HIT: P08547, EVALUE 1.00e-04; NT HIT: U53930.1, EVALUE 6.00e-07
cagcctaaaggagaaaaacctgtaactatccatataaatgctaaaaatggagaaactcaacatatagtcaagataaaactgttaaggaacggagagctgcaaaaacacacattaagcctctatcttaatgacaaaatgtttaaatcattctcattaagtctaggaagtccacgatcacactttcattcagcactgtgtaagtcattccacctagcatggtatggtaagaaaacaaaatacacagtgtatggcttgaaaattaagaaataagttcattattatttatagattaaatgattttcaacctaagaaacccagaagaatctacagataaactgggaaaactggtaagaattaagcaggtctgctggatacaaaatcaatatacaaaacttaattctattcattttcatcaacaaacagaaaatgcaatttataaaatgacacattttagagtagcaatgaaaatacataagtacctaggactaaacctaacgaaagatatacagaacctatatgaaaaactattaaaaaaacacattaaggaagaattaaatgaatagaatgattggatatcataaaaatgtcacttc

SEQ ID NO: 20908 - DNA, 459 bp, Homo sapiens
  MAP TO AL022727.1; EXPRESSED IN ADULT LIVER, SIGNAL = 1.3; EXPRESSED IN BRAIN, SIGNAL = 1.2; EXPRESSED IN HELA, SIGNAL = 1.9; EXPRESSED IN FETAL LIVER, SIGNAL = 1.3; EST_HUMAN HIT: AI339573.1, EVALUE 3.00e-03; SWISSPROT HIT: O76001, EVALUE 2.00e-79; NT HIT: AJ302558.1, EVALUE 0.00e+00
gaaatgaatgatgatggaaaagtcaatgctagctctgaggggtactttattttagttggattttctaattggcctcatctggaagtagttatctttgtggttgtcttgatcttctacttgatgacactgataggaaacctgttcatcatcatcctgtcatacctggactcccatctgcacacaccaatgtacttcttcctttcaaacctctcatttctggatctctgctacaccaccagctctatccctcagttgctggtcaatctctggggcccggaaaagaccatctcttatgctggttgcatgattcaactttactttgttctcgcactgggaaccacagagtgtgtcctactggtggtgatgtcctatgaccgttatgcagctgtgtgtagacctttgcattacactgtcctcatgcaccctcgtttctgccacctgctggctgtggcttcttgg

SEQ ID NO: 20909 - DNA, 588 bp, Homo sapiens
  MAP TO AL034380.25; EXPRESSED IN ADULT LIVER, SIGNAL = 1.2; EXPRESSED IN HELA, SIGNAL = 1.3; EXPRESSED IN FETAL LIVER, SIGNAL = 1.1; SWISSPROT HIT: O14497, EVALUE 2.00e-93; EST_HUMAN HIT: AI268382.1, EVALUE 0.00e+00; NT HIT: AF219114.1, EVALUE 0.00e+00
agggaacaatggacaagatggaaaggggcagattaggcaaccgaatgaggaagatctccttaccaatgtctttcattgtgagccgcctcctctgcttcaacacaggctgtgtggcttcaacagagccaggtgggaaggtgatatcccgccgaatcatggggggctgcacaggggcaggtgctatgtgcgaggcaggtactgggggacctgccttctgcattttcatcccagagtgcaggaatggagacttgctaggagaggtgcggttctccattggccggggcaggggagcagggctggatacctgaggaatgtgattctgcatgcttggtgggggctggtagttagatggagggggccttgtcatggggggcacaggggcagagggaccatatgggggctggcgtgtgccatgggaaggccacgagccttcgtggttggccctctgatctgtgtgcagcatttcatctgttcggttcacgccatgataggcggggccctggggggcagagcccgtgctctgcctgttggcataattataggtcatgtcattacgcccctgccacatggtgccttgctgagcaacct

SEQ ID NO: 20910 - DNA, 1014 bp, Homo sapiens
  MAP TO AL157687.1; EXPRESSED IN HELA, SIGNAL = 1.7; EXPRESSED IN BRAIN, SIGNAL =   2; EXPRESSED IN ADULT LIVER, SIGNAL = 1.7; EXPRESSED IN BONE MARROW, SIGNAL = 1.8; EXPRESSED IN LUNG, SIGNAL = 2.3; EXPRESSED IN HEART, SIGNAL = 2.4; EXPRESSED IN FETAL LIVER, SIGNAL = 1.6; NT HIT: gi14751677, EVALUE 0.00e+00; SWISSPROT HIT: Q9P2Y4, EVALUE 1.00e-93; EST_HUMAN HIT: AW024296.1, EVALUE 0.00e+00
ctacataccctgcgtggcggtcgatcttgcctgggccccagcagcagaggcagagtgccccggtccctcacccgggcgcgggtgcagggaagccagagagcccagcgacctgccccgggcccaggtttcctcctcggcctccaccacctcctcttcttcctcaggctcctccgcacggtgccggcgagcccgggccgggagagcagaggacagcgggcggaagcctccgaagctgcggccgggaccgggctcagcaccctcgccgttgggccggccctcgccagctcgcaggctcaggtagcccaagaggctcgggggctcacggcgctcggccggggtgggagccggggccaagaggagcgctgggcccaacggctcataggccagcaggccgaggtcaggaggctggggggcgcgggcaggcccggaggcaggccccggggcacgcagtgggcccagcttgctggcgtgcaccttcatgtggttcttaaggaaccagggctccttgaagcagcggccgcacaccggacacgcatgatcgaaggaggccttgtgcttacgcatgtggcccttgagaaaccaagactgtgtaaagctctggccgcacacttggcagcggaactccggaggcgctgggggctcctcgggagcggcaggagctggggtcggggttgcctcacgttcgggctccggctccggctccggctgggggactgatctgggttcgggctggggtggaggctgaggctgaggctgaggcggaggcgcagcggaggtggccgccaggggacgctcgggagccccgtgggccgtcaggctgtggtgcagcagctcctcctcctggctggagccgaaactgcacaggccgcacttccagggcctatgcaggatgtgcaggtggcgttcgcgctccgccgaggtgcgaaacttgcctttgcagtaggggcaacggaaggcggacgatgaaggagcctggggccgcgccagaccctcagtggcaggggtggcctgcat

SEQ ID NO: 20911 - DNA, 557 bp, Homo sapiens
  MAP TO AC004923.2; EXPRESSED IN HELA, SIGNAL = 4.1; EXPRESSED IN ADULT LIVER, SIGNAL = 1.8; EXPRESSED IN HEART, SIGNAL = 1.6; EXPRESSED IN FETAL LIVER, SIGNAL = 1.4; EXPRESSED IN LUNG, SIGNAL =   2; SWISSPROT HIT: P08124, EVALUE 3.60e-01; EST_HUMAN HIT: BF309636.1, EVALUE 0.00e+00; NT HIT: gi8393008, EVALUE 0.00e+00
taaaaacagggataccataagcaaccacctctttcctcaacgatgtgatgaaagcaaaagccaagtagctccatatatccaacttaaaaatataaaaagttacgcccgtgggctgcagttggagctatggcggcagcagctgtcactgggcctagcctggggtgtggacctggggactccccagaaggccccgatgtggaggctcacggagcgtcggcggaaggcgcacaggatgctaaagctttacaacggcctctcagaaggggaagcggtgggactccctgcagggcccgaccccctggaccccactgatctgaacggggcacactttgacccggaagtttacctagacaagctgcctagagagtcccctctggcccagctgatggacagtgagacggacatggtgcagcagatccgggctctagacagcgacatgcaaaccctggtctatgagaactacgataagttcatcccagccacagaaatgacaaacagcataaaactgtatgaggaattgcaggagacccggaatttctcaaataaacttgtaaaag

SEQ ID NO: 20912 - DNA, 577 bp, Homo sapiens
  MAP TO AC008283.3; EXPRESSED IN HELA, SIGNAL = 3.4; EXPRESSED IN ADULT LIVER, SIGNAL =   3; EXPRESSED IN BRAIN, SIGNAL = 2.6; EXPRESSED IN HEART, SIGNAL =   3; EXPRESSED IN FETAL LIVER, SIGNAL = 2.9; EXPRESSED IN PLACENTA, SIGNAL = 3.8; EXPRESSED IN BONE MARROW, SIGNAL = 3.1; EXPRESSED IN LUNG, SIGNAL = 3.2; EST_HUMAN HIT: AA169216.1, EVALUE 3.20e+00
cccaatcaatttcgcttttctgagaaactgtggaaattatgaagaactttactgagagtcaggtttattagccaactaagataatttggccaattaggatatgtcaaaaactatatacaatgaaactcttccttgactgtgaaatttttttcttattagtagctatattaaaaaatgatttatttgttctaaatgactaatcatatttacaaagaatagtaagcttaaatatagcactcttccaaccattattgacacaatcaatgtaactgaaatggtgagtttactgcaatttgttcaatttgcacttgcagaaagtgagagtctgcgatgtaaaataatcctttttgtgtgtatgtgtgtggtagcactagaattaagtaacaagcatgctgatacacacatcagttcactttcattatccctctatgatatctgactctccaagatagggtcttagtaatacctaaaattttatagaaattgtatcctactttcagtaccatgctatgctgataatacatttcctgccactcaactccaaatgcatccttctaccttgccctatgaaaatgga

SEQ ID NO: 20913 - DNA, 461 bp, Homo sapiens
  MAP TO AC004166.4; EXPRESSED IN ADULT LIVER, SIGNAL = 1.8; EXPRESSED IN HELA, SIGNAL = 1.4; EXPRESSED IN BRAIN, SIGNAL = 1.5; EXPRESSED IN HEART, SIGNAL = 1.5; EXPRESSED IN LUNG, SIGNAL = 1.8; SWISSPROT HIT: Q65399, EVALUE 1.10e+00; NT HIT: gi14149895, EVALUE 0.00e+00; EST_HUMAN HIT: BF032788.1, EVALUE 0.00e+00
ctccagcctttcccaccatagggccctgccaggagttttctctccatcacgttgcgatgtggagtacagaatcccactgggaatcctttaactgggagcagtattttgttttgctcagtttcataatggagaacagctgttcgcagaatgtaggtgctcccgaacatggaaagaatctttgcgcaatggtgcttgtatttcgggtagctaccccagaggtacttgtagaattctggtattcccaccttgtcgtatttcgtcttcaggaccgtgttgcattgcaggtcgataacctccatctggagctcctcgtgcacactgtcgatcttcgtggagaacggggagctgaacagagtcagttcgctttcgtagagtttgaaatcagacagccttttctggaattcggtcttgagttccgcgattttgggaatgtagttcaggccatcgctttcatttctgga

SEQ ID NO: 20914 - DNA, 837 bp, Homo sapiens
  MAP TO AL121796.1; EXPRESSED IN BRAIN, SIGNAL = 1.3; EXPRESSED IN ADULT LIVER, SIGNAL = 1.2; EXPRESSED IN HEART, SIGNAL = 1.3; EXPRESSED IN BONE MARROW, SIGNAL = 1.2; EXPRESSED IN LUNG, SIGNAL =   1; SWISSPROT HIT: Q05793, EVALUE 2.00e-03; NT HIT: L00936.1, EVALUE 8.10e-01
actgtgcagtggacaccgcgtggggccgccgtcacagtcttgccgtcaccatggcacagctgcaatgtcgcgtgactgtgcagtggagaccgcgtggggccgccgtgtgtcacagtcttgccattgccacggcagtgctgcaatgtcatgtgactgtgcagtggacaccgcgtgcggccgccgtgtgtcacagtcttgccgtcgccacagcagtgctgcaatgtcacgtgactgtgcagtggacaccgcgtggggccgccgtgtgtcacagtcttgccgtcaccatggcacagctgcaatgtcgcgtgactgtgcagtggacaccgtgtggggctgccgtgtgtcacagtcttgcagtcaccatggcacagctgcaatgtcgcatgactgtgcagtggacaccgtgtggggccgccgtgtgtcacagtcttgccattgccacggcagtgctgcaatgtcgtgtgactgtgcagtggacaccgcgtgcggccgccgtgtgtcacagtcttgccgtcaccatggcacagctgcaatgtcgcatgactgtgcagtggacaccgtgtggggccgccgtgtgtcacagtcttgccattgccatggcagtgctgcaatgtcgtgtgactgtgcagtggacaccgtgtgcggccgccgtgtgtcacagtcttgctgtcaccacagcagtgctgcaatgtcgtgtgactgtgcagtggacaccgcgtggggccgccgtgtgtcacagtcttgccattgccacggcagagctgcaatgtcacgtgaccatgcagctagacaccgcgtgaccgtgcagctggataccacgtggacggcgggtgggag

SEQ ID NO: 20915 - DNA, 1135 bp, Homo sapiens
  MAP TO AC011811.36; EXPRESSED IN HEART, SIGNAL = 1.8; EXPRESSED IN BONE MARROW, SIGNAL = 1.5; EXPRESSED IN ADULT LIVER, SIGNAL = 2.1; EXPRESSED IN BRAIN, SIGNAL = 1.4; SWISSPROT HIT: P11680, EVALUE 3.20e-02; NT HIT: gi14750154, EVALUE 4.30e+00; EST_HUMAN HIT: BI520288.1, EVALUE 0.00e+00
atggcactcccagggtaccccctgggcaacgtggatgacagcaggtctaaggacagcccagcaggagagccccaaggtcaggtcccactcacagcagatgtcttggcagtgagcagctctgtcgcatccactgactggcaggatatagatcaggcctccttcaagacggccacccccagggccatatcaacatctggagacaaagacaagagtgcagttgttccagaacacggccagaagacacccagaaaaatcacacctctgcttcccagccaaaatccaagtcccctgcaagtgtctatgagccttcagaatccagcgtgggacaggcaggttcaagacgcaaggacaagtcagagtctagtggttttcccaagtcacctcctgggtaaagacaagatgtcacaaatggcgagtgttcctgagagagagccggagtcagccccctctgccccgagtgctgagctacagtccacccagcacatggaggctcagcccgtcgagagtgatgctgaccatgtcacagcaggtgccaatggccagcatggccctcaggctgccagcaccaccaagtctgctgaggagaaagctgagcatccaaaggccccacaccctgaagctgaagctttaccatctgatgagtccccagtggcaatgggggcaaatgtggtggacagcttaggagacctgcagacttggttcttccctccacctccagcaggcagtgtgtccccgtcgcctggcccccacgaggtggccctggggagaaggcccctggactccagcctgtacacggccagtgaggagaacagctacatgcgctccatgaccagcctgctggacaggggcgagggctccatcagctccctggcagacatcctggtgtggtccgagaccaccatgggcatggccatagccacaggcttcctggattccggccacagcactgtggcagacctgctgcacagctcggggcccagcttgcgctcggtccccagcctggtgggaagcgtcagctcggccttctcctctgggctggtgtcagggaccagctcagccctgcgcaccatcacccgtgtgctggagacagtggagcagaggaccgtggagggcatccgctcagccatgcgctacc

SEQ ID NO: 20916 - DNA, 544 bp, Homo sapiens
  MAP TO D88268.1; EXPRESSED IN BRAIN, SIGNAL = 0.98; EXPRESSED IN ADULT LIVER, SIGNAL = 1.2; EXPRESSED IN HELA, SIGNAL = 0.78; EST_HUMAN HIT: AA767677.1, EVALUE 0.00e+00; SWISSPROT HIT: Q15048, EVALUE 2.00e-25; NT HIT: gi13636190, EVALUE 2.00e-03
tcaaactgcaccagctgcataagcaaagacagtggaggggctccactgcatgtcagcctgctgcatggcttgcagctgcttctgtatctcggcctgcaactggcacagcttgtcctcgttcacaggaccccggcagacgccatgcaggtagatgcagcagtcaactgggatgggatagagtacctgcttcagctccatcagccccatggtgtgctccagcaggctcaggaggcaggcactggagatggggttgtcggagaggctcagggaactgaggtgggagcagcggcacagggcgggcaggagggcactgaggtgggcatccttcagccagcagtgtttcaggtctaggtgctgcagtgtccctgagactgccctcagcagggtacccaagggcccagggatcatgtaggacaagtcgttgacgctcagatccagcttcttcaggcaggtggtatgatggctccgggacaagtaggtgatgtcagtgtccagaagcttgcagttgcagatctccagggaatgtagtgggacccacagacag

SEQ ID NO: 20917 - DNA, 820 bp, Homo sapiens
  MAP TO AL049870.3; EXPRESSED IN BRAIN, SIGNAL = 1.5; EXPRESSED IN HELA, SIGNAL = 1.9; EXPRESSED IN ADULT LIVER, SIGNAL = 1.6; EXPRESSED IN HEART, SIGNAL = 1.3; EXPRESSED IN LUNG, SIGNAL = 1.6; EXPRESSED IN BONE MARROW, SIGNAL = 1.6; EXPRESSED IN FETAL LIVER, SIGNAL = 1.6; NT HIT: gi14747448, EVALUE 0.00e+00; SWISSPROT HIT: Q9Y2M5, EVALUE 1.00e-65; EST_HUMAN HIT: BI222474.1, EVALUE 0.00e+00
agactgtctgatgagagagtctatgttcaggcataaagtggtactttagggcttcattcaaaagatgtttacaagtgcgatcatcacgaataagatgatttgcttcatatagtctagtgagaaacttaacactcaacaatggtaatcgtacactgtttagtaactgtgctaagtatttctggcgttcttgtacatcatacttgatccaagactctaatgcataaaaaacagtctcttcggtagctacattcaaacagtcattggaaacaatttcatccaagtcagcatgtgtaagctcaaaaaactcttcagtctggcaaacagcttcaaaattctggcatatgtatttagtggctgccaaataaaggtcacggcaaccatatgtttctgcaaaacgagaaattccaatacaattaccaggatcaagttggctttcaagaaatgcacaacattctttcaggacaagttttatctggagtaggtttgctgctggcaggagagattcaactgtgtcctgagaaataaaaacagtccctgtataggcatactccacaatggcctggagagcagtttcatcaatgcattgaaactcaacctcactgttctctttttcagaaaggtttccagtgaacatagctttgaaatacgggctgacgctggcaagtaccactttgtgagcatgaattttaacatcacctactcgaagaatgatgtcacagagttcgtgatgttggcgaagaagattcaagccctgcagaagttgttcagaatgcaagtgggttaagttagcaagcatgtaggtcggggatgtgtggtccat

SEQ ID NO: 20918 - DNA, 557 bp, Homo sapiens
  MAP TO AC000353.27; EXPRESSED IN LUNG, SIGNAL =   1; EXPRESSED IN FETAL LIVER, SIGNAL = 1.1; EXPRESSED IN ADULT LIVER, SIGNAL = 1.2; EXPRESSED IN HELA, SIGNAL = 0.67; EXPRESSED IN BONE MARROW, SIGNAL =   1; EST_HUMAN HIT: AL514126.1, EVALUE 2.00e-04; SWISSPROT HIT: O70594, EVALUE 7.00e-08; NT HIT: AJ242871.1, EVALUE 1.30e-01
ctacataaagccgggggtactgggcctcaggtcaggcctatggccatggccttcacagacctgctggatgctctgggcagcatgggccgcttccagctcaaccacacagccctgctgctgctgccctgcggcctgctggcctgccacaacttcctgcagaacttcaccgccgctgtccccccccaccactgccggggccctgccaaccacactgaggcctccaccaacgactcgggggcctggctgagggccaccatacccctggaccagcttggggcccctgagccctgccggcgcttcaccaagcctcagtgggccctgctgagccccaactcctccatcccgggcgcggccacggagggctgcaaggacggctgggtctataaccgcagtgttttcccgtccaccatcgtgatggaggtcagaaggggctgggtgtgtgggggggctgctgccgaggcccagtctgaagcgcccatgtcttccctgcagtgggatctggtgtgtgaggcccgcactctccgagacctggcgcagtccgtctacattgccggggt

SEQ ID NO: 20919 - DNA, 882 bp, Homo sapiens
  MAP TO AC006137.1; EXPRESSED IN LUNG, SIGNAL = 1.2; EXPRESSED IN BRAIN, SIGNAL = 1.1; EXPRESSED IN HELA, SIGNAL = 0.41; EXPRESSED IN ADULT LIVER, SIGNAL = 1.3; EXPRESSED IN BONE MARROW, SIGNAL = 1.1; EST_HUMAN HIT: AI023490.1, EVALUE 1.00e-114; SWISSPROT HIT: O95918, EVALUE 0.00e+00; NT HIT: gi15304750, EVALUE 0.00e+00
ctccttgttcctcagggtgtatatgagagggttaagtgaaggagtgcccactgcatagaagagaccaaagaacttgcccctctcttgggcatagggatttttgggctggaggtagacagcaatgactgagctgtagaagagggtgaccacagtgagatgggaggagcaggtcccaaaagctttcctccgcccttttgcagagttaatcctcagcactgcccaggtaatggctccgtaagagacaaggatgaggctgagaggcacaaccaagatgaagacactggcaacagccacctggatctcattgtaggaggtgtcttcacaggagagtcgaattagagctgggacctcacagacaaaatcatccacctgccgatcggggcagaagggcaggtgcagggtggatggtgtctggaccactgactccactagcccaatgacccaggccacagatgccagctgccagcacaggcgggggtggatgatggtggcatagtggaggggctggcagacagccacgtagcgatcaaaagccatcactgtcaagaggatgcactcagttgtccccagggacaggaagatgaagatctggacagagcagtccaggaagctgatggtcttctttgggccccagaggttgaccagcatttggggaacacaactcgtggtgaaacagaggtccaagaaggagaggttggagaggaaaaagtacattggagagtggagcttggggtccagcacagacagcaggatgatgagtgtgttgcccactagggttaggaggtaggaagtgaagacaaccacgaagagagtcctttccagccctgggtgttcagagaagcccagaaggaggaagcccggtgtggagctttggttaaccat

SEQ ID NO: 20920 - DNA, 558 bp, Homo sapiens
  MAP TO AL138811.1; EXPRESSED IN ADULT LIVER, SIGNAL = 1.2; EXPRESSED IN HELA, SIGNAL = 1.5; EXPRESSED IN LUNG, SIGNAL = 1.1; SWISSPROT HIT: P50300, EVALUE 1.80e+00; NT HIT: AL445564.1, EVALUE 6.00e-04
ctggtccaatatcctttccaacatcatccacaccaatatttttacaaagagccattgaaatgatctttttgttttctgatggatctagtggtctctccttcagcaacaaagaaatgcaaggggtcgaactgctcgctgtttgactttcaatgtgatttacttttgaccaaggaccggggtctgaaaaattcatgtatactggagttttctcagtttttttatctgaagttgaaagatcaaaggttgaccttccgcttctgtttactaaatctccagatggctctatgtgaaatgaatgtgattcctccagctgtccttcactgaacatttttcctgaaacaatgtcatttaatgattctgttttctctgtattatttaacaatgtatgctgtctttcattaatgctcacaaaaaggaagaggtcattttttgtggcttcagttacctgattctcatcaatctgattctttttattggaaaactctgtttctgtgcaagttttcatgtgaacagcagttttcacatctttggcttgtgaagcatgactattctcattgt

SEQ ID NO: 20921 - DNA, 1135 bp, Homo sapiens
  MAP TO AC004448.1; EXPRESSED IN PLACENTA, SIGNAL = 3.2; EXPRESSED IN FETAL LIVER, SIGNAL = 2.2; EXPRESSED IN ADULT LIVER, SIGNAL = 1.7; EXPRESSED IN HELA, SIGNAL = 2.6; SWISSPROT HIT: Q13164, EVALUE 0.00e+00; EST_HUMAN HIT: BG683084.1, EVALUE 0.00e+00; NT HIT: gi15315704, EVALUE 0.00e+00
aagccttgtccaagtccaagtctcccctctgcccacccgacctgcccacaaggcacctctgagccggctcctcaaagacttgagcagggcagctttaagggcagccttagtattgtctgagatggcaccatctttctttggtggggcaggctcactgactggtggaggtggctgcagggtcagatcaatggtgtcaggtgcagggccggggcatggtggcggggctggtggtggagactccatggcacagtccccactgggagcccagggactgggcatttcaacatctggacagccaggctcactagccacaggctgtagagaaggctggaagcggatctgttggcggatgccctcacgccttgcatggaagtcctcaatttcagccacaatggcctccttaatgcgctcccgagtgagggcttcgcggtcaaaggcaaagtcaaagggcggggcacagtcaggctcatcatcaggatcatggtacttggccaggaaagggtggcgaagggcagcagctgctgagatgcgagcgctgggctcaaaacgcagcatgcgacccagcagtgatagggcctggcggtcggcacctgggtacactgtctcccagggcacaggctggcgtggtggcaagctctggatataggcccgcaccctctcagcccccacagcctgaatcacggctggtgatggggtacccagcaccatcatgatgagctgtagctggtgtacatagtttttgcctgggaagagctggcgccgggccagcatctcaccaaagatgcagcccacagaccagaggtcaatagcctgtgtatactcatgcaaagagagcatgagctcgggcgcacggtaccagcgcgtggccacatactcagtcatgaagtactgatgttcagcgggcgaggtgcacaggccacgagccataccaaagtcaccaatcttgagctcacagttctcattcaccaataggttggagggcttcaggtcacggtggatgacctgagccgagtgcatgtacttcaggccccgcagcagttggtacaggaagtagcgcacgtgttccagtgtgaggggctgtgaggagtggatgatctggtgcaggtcgctttccatcaggtccaggaccacgtag

SEQ ID NO: 20922 - DNA, 578 bp, Homo sapiens
  MAP TO AL135998.2; EXPRESSED IN BRAIN, SIGNAL = 1.6; EXPRESSED IN ADULT LIVER, SIGNAL = 1.5; EXPRESSED IN PLACENTA, SIGNAL = 1.8; EXPRESSED IN LUNG, SIGNAL = 1.8; EXPRESSED IN BONE MARROW, SIGNAL = 1.7; EXPRESSED IN FETAL LIVER, SIGNAL = 1.3; EST_HUMAN HIT: AL560986.1, EVALUE 0.00e+00; NT HIT: gi14751471, EVALUE 0.00e+00; SWISSPROT HIT: Q9UM01, EVALUE 1.00e-84
atggttgacagcactgagtatgaagtggcctcccagcctgaggtggaaacctcccctttgggtgatggggccagcccagggccggagcaggtgaagctgaagaaggagatctcactgcttaacggcgtgtgcctgattgtggggaacatgatcggctcgggcatctttgtttcccccaagggtgtgctcatatacagtgcctcctttggtctctctctggtcatctgggctgtcgggggcctcttctccgtctttggggccctttgttatgcggaactgggcaccaccattaagaaatctggggccagctatgcctatatcctggaggcctttggaggattccttgctttcatcagactctggacctccctgctcatcattgagcccaccagccaggccatcattgccatcacctttgccaactacatggtacagcctctcttcccgagctgcttcgccccttatgctgccagccgcctgctggctgctgcctgcatttgtaagtggggctggggtaggaggtggtgggtggagggctggacagaggctgggatgtgagtgcagtctgggagtaagaa

SEQ ID NO: 20923 - DNA, 492 bp, Homo sapiens
  MAP TO AC011382.1; EXPRESSED IN LUNG, SIGNAL = 1.6; EXPRESSED IN ADULT LIVER, SIGNAL = 1.4; EXPRESSED IN BRAIN, SIGNAL = 1.4; EXPRESSED IN BONE MARROW, SIGNAL = 1.2; NT HIT: U63963.1, EVALUE 0.00e+00; SWISSPROT HIT: Q12766, EVALUE 1.00e-77; EST_HUMAN HIT: AL561488.1, EVALUE 0.00e+00
agtgtgtcctgcccagagctcttggaccagcattatactgtggacatgacagaaactgagcactctatccagcacccagtcaccaagactgccacgcggcgcatcgtccatgcaggcctacagcccaatcctggtgaccccagtgctgggcaccactccttggccctgtgccctgaattggcaccttacgcaaccatcctggcctccatcgtggacagcaaaccaaacggtgtccgccagcggcccattgccttcgacaatgccactcactattacctctacaaccgcctcatggacttcctcaccagccgcgaaattgtcaatcgtcagatccatgacattgtacagagctgccagcctggtgaggtggtcattcgtgacaccctctaccgccttggggttgctcagatcaagacagagacagaggaggagggtgaggaagaggaggtggccgcagtggcagaataagccaggctgttgtacagggactac

SEQ ID NO: 20924 - DNA, 536 bp, Homo sapiens
  MAP TO AC004660.1; EXPRESSED IN PLACENTA, SIGNAL = 1.8; EXPRESSED IN BRAIN, SIGNAL = 3.9; EXPRESSED IN HELA, SIGNAL = 2.1; EXPRESSED IN ADULT LIVER, SIGNAL = 2.3; EXPRESSED IN HEART, SIGNAL = 2.4; EXPRESSED IN FETAL LIVER, SIGNAL = 1.7; EXPRESSED IN LUNG, SIGNAL = 2.4; EXPRESSED IN BONE MARROW, SIGNAL = 2.1; NT HIT: gi16176313, EVALUE 0.00e+00; SWISSPROT HIT: Q14938, EVALUE 1.00e-104; EST_HUMAN HIT: BF058855.1, EVALUE 0.00e+00
gatgagttccacccgttcatcgaggcactgctgcctcacgtccgcgctttctcctacacctggttcaacctgcaggcgcggaagcgcaagtacttcaagaagcatgaaaagcggatgtcgaaggacgaggagcgggcggtgaaggacgagctgctgggcgagaagcccgagatcaagcagaagtgggcatcccggctgctggccaagctgcgcaaggacatccggcccgagttccgcgaggacttcgtgctgaccatcacgggcaagaagcccccctgctgcgtgctctccaaccccgaccagaagggcaagatccggcggattgactgcctgcgccaggctgacaaggtgtggcggctggacctggtcatggtgattttgtttaaggggatccccctggaaagtactgatggggagcggctctacaagtcgcctcagtgctcgaaccccggcctgtgcgtccagccacatcacattggagtcacaatcaaagaactggatctttatctggcttactttgtccacactccgggtag

SEQ ID NO: 20925 - DNA, 862 bp, Homo sapiens
  MAP TO AL137818.2; EXPRESSED IN ADULT LIVER, SIGNAL =   2; EXPRESSED IN BRAIN, SIGNAL = 1.8; EXPRESSED IN HELA, SIGNAL = 2.1; EXPRESSED IN PLACENTA, SIGNAL = 1.7; EXPRESSED IN BONE MARROW, SIGNAL = 1.8; EXPRESSED IN LUNG, SIGNAL = 1.8; EXPRESSED IN FETAL LIVER, SIGNAL = 1.8; NT HIT: gi9910327, EVALUE 0.00e+00; SWISSPROT HIT: P97739, EVALUE 2.10e-01; EST_HUMAN HIT: BG194789.1, EVALUE 0.00e+00
tgaaaactcaaatgcagcatggattaatctctatagcagcccgcactgttattacacatctggtaaatcacctgggccattatccaatgagcggtggtcctgctatgctaacaagtcaggtgtgtgaaaatcacgacaatcattacagtgaaagtactgaactttctcctgaactctttgagagtccaaatatccagttctttgtgttaaataatacaaccttagtgtcctgtatccagatcagatcagaagagaatatgcctggaggaggtttatctgctggccttgcatcagccaattcaaatgtcagaatcatagtacgtgatctctctggaaaatattcatgggattctgctatactgtatggcccacctcctgtaagtggcttgtcagaacctacatctttcatgctttcattgtctcaccaagagaagccagaagagcctccgacatctaatgaatgcttagaagatataaccgtaaaagatggactttctctccagtttaaaagatttagagaaactgtaccaacttgggatacaataagagatgaagaagatgttcttgatgagctcttgcagtatttgggtgttactagtcctgaatgcttacagagaactggaatctcacttaatattcctgctccacaacctgtgtgcatttctgaaaaacaagaaaatgatgttattaatgctatccttaagcaacatacagaagaaaaagaatttgttgagaagcactttaatgacttaaacatgaaagctgtggaacaagatgaaccaatacctcaaaaacctcagtcagcattttattattgcagattgcttcttagtatattgggaatgaattcctgggacaaacg

SEQ ID NO: 20926 - DNA, 455 bp, Homo sapiens
  MAP TO U07000.1; EXPRESSED IN ADULT LIVER, SIGNAL = 3.2; EXPRESSED IN HELA, SIGNAL = 0.89; EXPRESSED IN LUNG, SIGNAL = 3.4; EXPRESSED IN HEART, SIGNAL = 4.4; EXPRESSED IN BONE MARROW, SIGNAL = 3.5; NT HIT: AK024483.1, EVALUE 0.00e+00; SWISSPROT HIT: Q9UKB7, EVALUE 2.00e-90; EST_HUMAN HIT: BF806953.1, EVALUE 0.00e+00
tgttgtgggcacttctcacccctgaaaatctgggacctcaacagtgggcagctgatgacacacttggacagagactttcccccaagggctggggtgctggatgtcatatatgagtcccctttcgcactgctctcctgtggctatgacacctatgttcgctactgggactgccgcaccagtgtccggaaatgtgtcatggagtgggaggagccccacaacagcaccctgtactgcctgcagacagatggcaaccacttgcttgccacaggttcctccttctatagcgttgtacggctgtgggaccggcaccaaagggcctgcccgcacaccttcccgctgacgtcgacccgcctcggcagccctgtgtactgcctgcatctcaccaccaagcatctctatgctgcgctgtcttacaacctccacgtcctggatattcaaaacccgtgaccgtcagg

SEQ ID NO: 20927 - DNA, 693 bp, Homo sapiens
  MAP TO Z68328.1; EXPRESSED IN ADULT LIVER, SIGNAL = 1.4; EXPRESSED IN HELA, SIGNAL = 1.1; EXPRESSED IN BONE MARROW, SIGNAL = 1.2; EXPRESSED IN LUNG, SIGNAL = 1.4; NT HIT: gi14760985, EVALUE 0.00e+00; SWISSPROT HIT: P14778, EVALUE 1.40e-02; EST_HUMAN HIT: BG001757.1, EVALUE 2.50e-01
atggaagatctcacaagatatgttgaacaaagcagaagacttattatcgtgctaactccagactatattctcagacggggatggagtattttcgaactggaaagcagactccataacatgctagtcagtggagaaatcaaagtgattttgattgagtgtacagaattaaaagggaaagtgaattgccaggaagtggaatcactaaagcgtagcatcaaacttctgtccctgatcaagtggaagggatccaaaagcagcaaattaaattctaagttttggaagcacttagtatatgaaatgcccatcaagaaaaaagaaatgctacctcggtgccatgttctggactccgcagaacaaggactttttggagaactccagcctataccctctattgccatgaccagtacttcagccactctggtgtcatctcaggctgatctccctgaattccacccttcagattcaatgcaaatcaggcactgttgcagaggttataaacatgagataccagccacgaccttgccagtaccttccttaggcaaccaccatacttattgtaacctgcctctgacgctactcaacggacagctaccccttaataacaccctgaaagatacccaggaatttcacaggaacagttctttgctgcctttatcctccaaagagcttagctttaccagtgatatttggtag

SEQ ID NO: 20928 - DNA, 471 bp, Homo sapiens
  MAP TO Z95327.1; EXPRESSED IN LUNG, SIGNAL = 2.9; EXPRESSED IN PLACENTA, SIGNAL = 2.4; EXPRESSED IN BRAIN, SIGNAL = 3.9; EXPRESSED IN ADULT LIVER, SIGNAL = 2.9; EXPRESSED IN BONE MARROW, SIGNAL = 2.9; EXPRESSED IN HEART, SIGNAL = 2.3; EST_HUMAN HIT: AU123599.1, EVALUE 0.00e+00; NT HIT: gi5453993, EVALUE 0.00e+00; SWISSPROT HIT: P25426, EVALUE 3.20e+00
tagtaggcactactgcttctaatctcctattagagtctgaacagagcaccagcaatctgaatgagaaaattaaccatttagaatatgaagaccaatataaagataataattttggagaaggaaatgatggtggaatattagaagacaaacttattagtaataatgatggtagtatctttgatgatccccctgccctctctgaggcagaggtaatgttgccagagcagcctgcacatgatgatatacgggtgaggatgataatacatcaatgggtgggcctgatagtcctgattcagtgaatcctgttgaaccagccaactatgactgatcaaacaacacttgttccaaatgaggaagaagcatttgcattggaacctattgatataactgttaaagaaacaaacgccaagaggaagaggaagctaattgttgacagtgtcaaaaacttggatagcaagacaattagagccc

SEQ ID NO: 20929 - DNA, 518 bp, Homo sapiens
  MAP TO AL355075.2; EXPRESSED IN BONE MARROW, SIGNAL = 3.7; EXPRESSED IN ADULT LIVER, SIGNAL = 1.9; EST_HUMAN HIT: BE618657.1, EVALUE 0.00e+00; NT HIT: X66133.1, EVALUE 0.00e+00; SWISSPROT HIT: P27695, EVALUE 2.00e-99
tcacagtgctaggtatagggtgataggacagtgatcactgccgagggccttggaacggatcttgctgtcacacaatgcaggtaacagagagtgggacaacaaaaagtaatcaaggcgccaaccaacattcttggatcgagcattcatcatataagtccaaaaggtgtaggcatagggtgtgttggggtagaggtgcctaaagctgtcagccagtggcacagcctgcagtaattccccgaagccttggcgctcttgtggcgtgaagccagcattctttttgttccccttggggttgcgaaggtcaatttcttcatgtgccacattgaggtctccacacagcacaaggggctttcgggaagccaggcccttcaggaacttgcgaaaggcttcatcccagcgctgccggtactccagtcgtaccagacctcggcctgcattaggtacatatgctgttaccagcacaaacgagtcaaattcagccacaatcacccggccttcctgatcatgctcctcatcgc

SEQ ID NO: 20930 - DNA, 714 bp, Homo sapiens
  MAP TO AC007445.1; EXPRESSED IN ADULT LIVER, SIGNAL = 1.4; EXPRESSED IN HELA, SIGNAL = 1.1; EXPRESSED IN LUNG, SIGNAL = 1.1; NT HIT: D89859.1, EVALUE 0.00e+00; SWISSPROT HIT: Q9ULJ3, EVALUE 2.00e-22; EST_HUMAN HIT: AL526983.1, EVALUE 0.00e+00
  unsure 76
aaggcttgaggggtctgggaccccaagtcttttgattctggggtctccatggattctacttcctggccgtagcaanttgaccttccgaacttcctcactccccagctctttcaggatcgcttcctgaaccctgagcgttgtggtgggcgacttgccgtcctcctgactcgggggtgtgccttctactgtgtcatcagaaggactgtcatcctgatccccgatttcctctacatcatcatcctgggtgtcagcagcatctccaatggggcgatttattttaaggcaatacttacttttggactgaccattgttttcatcgggactggacacatcacgcttctgagaacacagtttatccaaaaatcggataccaagaatctgacccgatgacatcattaagttaacatcttcttttttcacggaaatctttgctgtgtacatgtagttcaggacctcttcaaatatatcagaacgaagaaaatctatttctatgaccgaagaactatcaacctcaagcttcttgaaaagctttttaaagtaggtgctgcaggcagcaagaacacatctgtgtgctctgaatttcacatcctcaaccacaatagcaatatcacaaaattctccttccaggcgttgttcatttagtgttttcagaaacagagttttatgatcatcgtcattatatttaatggtttcagacatactgatgaaaaactc

SEQ ID NO: 20931 - DNA, 582 bp, Homo sapiens
  MAP TO AP001708.1; EXPRESSED IN ADULT LIVER, SIGNAL = 2.9; EXPRESSED IN HELA, SIGNAL = 5.5; EXPRESSED IN LUNG, SIGNAL = 2.6; EST_HUMAN HIT: W76571.1, EVALUE 0.00e+00; NT HIT: gi13386207, EVALUE 3.00e-24; SWISSPROT HIT: P08131, EVALUE 5.00e-11
atgtggcatgcaaactcagaatcttctcagtgtaactcagctgaactcacatctcccatcaacatgtcctacaactgctgctctggaaacttctcctcccgctcctgtggtggctacctgcactacccagcctcctcctgtggcttttcctaccccagcaaccaggtctacagcactgacctctgctctcccagcacgtgccagctgggttcctctctctataggggctgtcagcagacctgctgggagcccaccagctgccagacatcctatgtggagtccagcccctgccagacctcctgctaccgtcccagaacctccttgctctgcagtccctgccagacaacttactctgggtctctaggctttggatccagcagctgccgctccctgggctatggatcgaggagctgctactcagtgggctgtgggtccagtggcttcagatccctgggttatggaggctgtggcttcccttccctgggctatggcgttggattctgccgcccaacctacttggcttctaggagctgccagtcttcttgctacagaccaacttgtggatcaggcttctactattga

SEQ ID NO: 20932 - DNA, 942 bp, Homo sapiens
  MAP TO AC011311.11; EXPRESSED IN BONE MARROW, SIGNAL = 0.88; EXPRESSED IN BRAIN, SIGNAL = 0.86; EXPRESSED IN ADULT LIVER, SIGNAL = 1.2; NT HIT: AE001933.1, EVALUE 5.80e-02; SWISSPROT HIT: P02457, EVALUE 1.60e-02; EST_HUMAN HIT: BI827630.1, EVALUE 5.00e-03
gcccgcaggaatgccggccccgcctctccatgccggccgcccccctgtgctcctttagctgtcatcgcaagtggtcccgtcccccagagcttcgtccctgggtcgggtcatgctgttggggacgccctgagcgctctcagcgcaccgttggccctgctcgctccccaccgggtgaggagggcaagagccggcttcccacccccctcctccgcgccagagcgcacaaatccccactcgaagcgacctgcctctgaggcactgcccctccagaatagcgctggtccgccgggacccactcggaactcgggaatcgggagggagaggctcgcccaacccaaatacccacatgccgccagggaggagccgtgtgccaggtgtgcagagagggggccggagggcttcccaatgccagtgacaggagcgcagcagggacagccgggcgcgagtgtgggactgacccgaagtccgaactgccaaggagagcgagacgaggggaaggggggggccccggctgggtggactggggcctatcccgtgggcagtggggatctcagggccaagcggcagcggaggcaggaccagccactctcacttttcccctcgaaaaccacagcgttccagggccgcgaggcaccccgcgggagcttgcgaggacacagcgcccccgtgtgggcggacgcgcacagagtcgcgcccgtggcgtttcgggcccaggctccgcccccgccgcgctgcccctccccccatgggggcgtggccaggcctagcccagggatccgagattccaagtcacacccagcacgacttgggaagtcgcgacgaaagtgcgcgacttcccagcaagcgaggttgaagtcccggcaggcagggaggaaggcgtgtgtccccccgtgcatgcggggaaggagcagtgggggaaggctgagttgggctttcaattaa

SEQ ID NO: 20933 - DNA, 849 bp, Homo sapiens
  MAP TO AL133543.2; EXPRESSED IN BRAIN, SIGNAL = 1.2; EXPRESSED IN ADULT LIVER, SIGNAL =   2; EXPRESSED IN LUNG, SIGNAL = 1.3; EXPRESSED IN BONE MARROW, SIGNAL = 1.2; SWISSPROT HIT: P15924, EVALUE 1.00e-130; NT HIT: gi15300899, EVALUE 0.00e+00; EST_HUMAN HIT: BG681087.1, EVALUE 0.00e+00
ccatgaataaggaactcatcgaaaagggccacggtattcgcttattagaagcacagatcgcaaccggggggatcattgacccaaaggagagccatcgtttaccagttgacatagcatataagaggggctatttcaatgaggaactcagtgagattctctcagatccaagtgatgataccaaaggattttttgaccccaacactgaagaaaatcttacctatctgcaactaaaagaaagatgcattaaggatgaggaaacagggctctgtcttctgcctctgaaagaaaagaagaaacaggtgcagacatcacaaaagaataccctcaggaagcgtagagtggtcatagttgacccagaaaccaataaagaaatgtctgttcaggaggcctacaagaagggcctaattgattatgaaaccttcaaagaactgtgtgagcaggaatgtgaatgggaagaaataaccatcacgggatcagatggctccaccagggtggtcctggtagatagaaagacaggcagtcagtatgatattcaagatgctattgacaagggccttgttgacaggaagttctttgatcagtaccgatccggcagcctcagcctcactcaatttgctgacatgatctccttgaaaaatggtgtcggcaccagcagcagcatgggcagtggtgtcagcgatgatgtttttagcagctcccgacatgaatcagtaagtaagatttccaccatatccagcgtcaggaatttaaccataaggagcagctctttttcagacaccctggaagaatcgagccccattgcagccatctttgacacagaaaacctggagaaaatctccattacagaag

SEQ ID NO: 20934 - DNA, 567 bp, Homo sapiens
  MAP TO AC008427.5; EXPRESSED IN LUNG, SIGNAL = 1.8; EXPRESSED IN PLACENTA, SIGNAL = 1.9; EXPRESSED IN HELA, SIGNAL = 5.3; EXPRESSED IN ADULT LIVER, SIGNAL = 1.5; NT HIT: gi14726728, EVALUE 0.00e+00; EST_HUMAN HIT: AW953835.1, EVALUE 0.00e+00; SWISSPROT HIT: P31170, EVALUE 4.50e-01
atggaatatactgaaggcattagtcagcgaatgagggtcccagaaaagttaaaagtagcaccgccaaacgccaacctggaacagggattccaaaaaggagttccaaatgctagcgtgataataatgcaagttccagagaggattgttgtagcaggaaataatgaggatgtttcattttcaagaccagcagatcttgaccttattcagtcaactccctttaaactcctcgcactaaaaacagcacctcgtgtacttaggctaagtgaaagaccactagattttctggatttagaaagacctcctacaacccctcaaaatgaagaaatccgtgcagttggccgactaaaaagagagcggtctacgagtgaaactgctgttcgccaaaatggacagctggtcagaaatgattctctttatggcatttcaaatacagatacaacaattgaaggaacatcagatgacctgactgttgtagatgcagcttcactaagacgacagataatcaaactaaatagacgtctacaacttccggacgaggagaacaaagaacgtgctaaaagagaaatg

SEQ ID NO: 20935 - DNA, 779 bp, Homo sapiens
  MAP TO AC007324.38; EXPRESSED IN BONE MARROW, SIGNAL = 2.6; EXPRESSED IN FETAL LIVER, SIGNAL =   3; EXPRESSED IN HEART, SIGNAL = 3.2; EXPRESSED IN ADULT LIVER, SIGNAL = 2.6; EXPRESSED IN PLACENTA, SIGNAL = 5.4; EXPRESSED IN BRAIN, SIGNAL = 2.3; NT HIT: gi14756466, EVALUE 1.00e-130; EST_HUMAN HIT: AL110383.1, EVALUE 0.00e+00; SWISSPROT HIT: P28481, EVALUE 2.00e-11
agcaatgtcgtgtacagcgtccacgttagcgtgccttgtcggtgccattagcaatgtcgtataaagcgccctcattggtgatgtcttgtacagtgccctcattagcgatgttgtgtacagtgtacttgttagcgacggcttgtagggtgtcctcgttagcgatgtcgtatacagctcgttggcgatgccgtgggcggcgtcctctttggcgatgccctgggcggcgtcctcgttggcgatgccctgggcggcgtcctcgttggcgatgccctgggcggcatcctccttggcgatgccctggacggcgtcctcgctggcgatgccgtgggcggcgtcctcgctggcgattccgtgggcggcgtcctcgttggcgatgccctgggcggcgtcctcgttggcgatgccctgggcggcgtcctctttggcgatgccctgggcggcgccctcgttggcgatgccctgggcggcgtcctccttggcgatgccctgggcggcgtcctccttggcgatgccctgggcggcgtcctcgttggcgatgccctgggcggcgacctcgttggcgatgccctgggcggcgtcctcgttggcgatgccctgggcggcgacctcgctggcgatgccctgggcggcgtcctcgctggcgattccgtgggcggcgtcctcgttggcgatgccctgggcggcgtcctcgttggcgatgcccttgtcggcggcctcgttagtgatatcgtgtgtggcatcctcgttagtgatgttgtgtacggtgtcctcatggggag

SEQ ID NO: 20936 - DNA, 987 bp, Homo sapiens
  MAP TO AC010474.2; EXPRESSED IN ADULT LIVER, SIGNAL = 1.3; EXPRESSED IN LUNG, SIGNAL = 8.1; NT HIT: gi14761734, EVALUE 0.00e+00; EST_HUMAN HIT: BI870569.1, EVALUE 0.00e+00; SWISSPROT HIT: P26038, EVALUE 0.00e+00
atgtgtccgaccgaggaattgattcaggacaccactcagcgtctgttctttctgcaagtgaaagagggcattctcagtgatgatatttactgccggcctgagactgctgtgctgctggcctcccatgctgtccagtctaagtatgggaacttcagtaaggaggtgcataagtctggctacctggccggagacgagttgctcccacagagagtcctggaacagcacaaactcagcaaggaccagtgggaggagcggatccaggtgtggcatgaggaacaccgtggcatgctcagggaggatgctgtcctggagtatctgaagattgctcaagatctggagatgtatggtgtaaactacttcagcatcaagaaaaagaaaggctcagagctgtggctgggggtggatgcactgggtctcaacatctatgagcagcatgacagactaactcccaagataggctttccttggagtgaaatcaggagcatttctttcaatgataagaactttgtcatcaagcccattgacaaaagagccccggactttgtcttctatgctccctggctgcagattaacaagcggatcttggccttgtgcatggggaaccgtgaactatacatgcgccgtcgcaagcctgacaccattgaggtgcagcagatgaaggcacgggcccgggaggagaagcaccagaagcagatggagcgtgctatgctggaaaatgagaagaagaagcgtgaaatggcagaaaaggagaaagagaagattgaacgggagaaggagctgatggggaggctgaagcagatcgaggaacagactaagaaggctcagcaagaactggaagaacagacccgtagggctctggaacttgggaaggaacggaagcatgcccagagcgaggctgaaaagctggccaaggagcttcaagaagctgaagaggccaaggaagtcttgctgcaggcctcccgggaccagaaaaagactcaggaatag

SEQ ID NO: 20937 - DNA, 1950 bp, Homo sapiens
  MAP TO AL132826.15; EXPRESSED IN BRAIN, SIGNAL = 1.4; EXPRESSED IN ADULT LIVER, SIGNAL = 1.5; EXPRESSED IN HELA, SIGNAL = 1.2; EXPRESSED IN LUNG, SIGNAL = 1.7; EXPRESSED IN BONE MARROW, SIGNAL = 1.4; EXPRESSED IN FETAL LIVER, SIGNAL = 1.2; EST_HUMAN HIT: BI439195.1, EVALUE 0.00e+00; SWISSPROT HIT: Q9XSD9, EVALUE 6.00e-27; NT HIT: gi14786580, EVALUE 0.00e+00
atgatcagcgcagcctggagcatcttcctcatcgggactaaaattgggctgttccttcaagtagcacctctatcagttatggctaaatcctgtccatctgtgtgtcgctgcgatgcgggtttcatttactgtaatgatcgctttctgacatccattccaacaggaataccagaggatgctacaactctctaccttcagaacaaccaaataaataatgctgggattccttcagatttgaaaaacttgctgaaagtagaaagaatatacctataccacaacagtttagatgaatttcctaccaacctcccaaagtatgtaaaagagttacatttgcaagaaaataacataaggactatcacttatgattcactttcaaaaattccctatctggaagaattacatttagatgacaactctgtctctgcagttagcatagaagagggagcattccgagacagcaactatctccgactgcttttcctgtcccgtaatcaccttagcacaattccctggggtttgcccaggactatagaagaactacgcttggatgataatcgcatatccactatttcatcaccatctcttcaaggtctcactagtctaaaacgcctggttctagatggaaacctgttgaacaatcatggtttaggtgacaaagttttcttcaacctagttaatttgacagagctgtccctggtgcggaattccctgactgctgcaccagtaaaccttccaggcacaaacctgaggaagctttatcttcaagataaccacatcaatcgggtgcccccaaatgctttttcttatctaaggcagctctatcgactggatatgtccaataataacctaagtaatttacctcagggtatctttgatgatttggacaatataacacaactgattcttcgcaacaatccctggtattgcgggtgcaagatgaaatgggtacgtgactggttacaatcactacctgtgaaggtcaacgtgcgtgggctcatgtgccaagccccagaaaaggttcgtgggatggctattaaggatctcaatgcagaactgtttgattgtaaggacagtgggattgtaagcaccattcagataaccactgcaatacccaacacagtgtatcctgcccaaggacagtggccagctccagtgaccaaacagccagatattaagaaccccaagctcactaaggatcaccaaaccacagggagtccctcaagaaaaacaattacaattactgtgaagtctgtcacctctgataccattcatatctcttggaaacttgctctacctatgactgctttgagactcagctggcttaaactgggccatagcccggcatttggatctataacagaaacaattgtaacaggggaacgcagtgagtacttggtcacagccctggagcctgattcaccctataaagtatgcatggttcccatggaaaccagcaacctctacctatttgatgaaactcctgtttgtattgagactgaaactgcaccccttcgaatgtacaaccctacaaccaccctcaatcgagagcaagagaaagaaccttacaaaaaccccaatttacctttggctgccatcattggtggggctgtggccctggttaccattgcccttcttgctttagtgtgttggtatgttcataggaatggatcgctcttctcaaggaactgtgcatatagcaaagggaggagaagaaaggatgactatgcagaagctggcactaagaaggacaactctatcctggaaatcagggaaacttcttttcagatgttaccaataagcaatgaacccatctcgaaggaggagtttgtaatacacaccatatttcctcctaatggaatgaatctgtacaaaaacaatcacagtgaaagcagtagtaaccgaagctacagagacagtggtattccagactcagatcactcacactcatga

SEQ ID NO: 20938 - DNA, 1738 bp, Homo sapiens
  MAP TO AC005041.2; EXPRESSED IN LUNG, SIGNAL = 1.2; EXPRESSED IN HELA, SIGNAL = 1.6; EXPRESSED IN ADULT LIVER, SIGNAL = 1.3; SWISSPROT HIT: Q13724, EVALUE 0.00e+00; NT HIT: gi14738504, EVALUE 0.00e+00; EST_HUMAN HIT: AU123550.1, EVALUE 0.00e+00
ctacaatgtcttctggacctccaacccaggactgcccctgctgacagagatggtaaagagtcgcctaaatagctggtttcagcatcggcccccaggggccccccctgaacgctacctcggcttgccaggatccctgaagtgggaggacagaggtccaagtgggcaagggcaggggcagttcttgatacagcaggtgaccctgaaaattcccatttccatagagtttgtgtttgaatcaggcagtgcccaggcaggaggaaatcaagccctgccaagactggcaggcagtctactgacccaggccctggagagccatgctgaaggctttagagagcgctttgagaagaccttccagctgaaggagaagggcctgagctctggcgagcaggttttgggtcaggctgccctcagcggcctccttggtggaattggctacttctacggacaagggctggtattgccagacatcggggtggaagggtctgagcagaaggtggacccagccctctttccacccgtacctctttttacagcagtgccctcccggtcattcttcccacgaggcttcctttgggatgaaggctttcaccagctggtggttcagcggtgggatccctccctcacccgggaagcccttggccactggctggggctgctaaatgctgatggctggattgggagggagcagatactgggggatgaggcccgagcccgggtgcctccagaattcctagtacaacgagcagtccacgccaaccccccaaccctacttttgcctgtagcccatatgctagaggttggtgaccctgacgacttggctttcctccgaaaggccttgccccgcctgcatgcctggttttcctggctccatcagagccaggcaggcccactgccactatcttaccgctggcggggacgggaccctgccttaccaaccttactgaaccccaagaccctaccctctgggctggatgactacccccgggcttcacacccttcagtaaccgagcggcacctggacctgcgatgttgggtggcactgggtgcccgtgtgctgacgcggctggcagagcatctgggtgaggctgaggtagctgctgagctgggcccactggctgcctcactggaggcagcagagagcctggatgagctgcactgggccccagagctaggagtctttgcagactttgggaaccacacaaaagcagtacagctgaagcccaggccccctcaggggctcgttcgggtggtgggtcggccccaacctcaactgcagtatgtagatgctcttggctatgtcagtctttttcccttgctgctgcgactgctggaccccacctcatcccgccttgggcccctgctggacattctagccgacagccgccatctctggagcccctttggtttacgctcccttgcagcctccagctccttttatggccagcgcaattcagagcatgatcccccctactggcggggtgctgtgtggctcaatgtcaactacctggctttgggagcactccaccactatgggcatctggagggtcctcaccaggctcgggctgccaaactccacggtgagctccgtgccaacgtggtaggcaatgtatggcgccagtaccaggctacaggctttctttgggagcagtacagtgaccgcgatgggcgaggcatgggctgccgccctttccacggctggaccagccttgtcttactggccatggctgaagactactga

SEQ ID NO: 20939 - DNA, 595 bp, Homo sapiens
  MAP TO AC016656.5; EXPRESSED IN LUNG, SIGNAL = 1.8; EXPRESSED IN ADULT LIVER, SIGNAL = 1.5; EXPRESSED IN HELA, SIGNAL = 5.1; NT HIT: gi16170983, EVALUE 0.00e+00; EST_HUMAN HIT: BF002333.1, EVALUE 0.00e+00; SWISSPROT HIT: O75962, EVALUE 5.00e-93
attaacagctgattggcaggtgaaagagaatgagaaagaacttctggataggtcaaactctaggcagaagcctgctctgcagaaagtttttaatgctacggataggtcgaacatcattctggtgtttgcgccgctcaatgaaggaagtcagtctggacgtgtcgaggacgcccgtgcttctgccgttgccggcctgcagccactgctcctggagggccagcgcagccgagggacgcttggcggggtcctcctgcaggaggaagcacacgaactccttggccttctggctcactcctttaaagtagtcatctgggaagctaaagtctaagcggcaaatgttcaggcaggtctcttccacactgtcatccaggaagggggacacgccactaagaagtacgtatgtgagcactccaacactccacgtatccgaggtcagggagacagggttcccgaggatgatttcaggggctgcgaattcagggttccccagtaactggtggatgtagtaggtcgtgttgagctgaacagcatctccaaagtcagccagtttgatggttggcttggctaaactctcatccaccaggatattctcagg

SEQ ID NO: 20940 - DNA, 467 bp, Homo sapiens
  MAP TO AC011406.1; EXPRESSED IN FETAL LIVER, SIGNAL = 1.9; EXPRESSED IN ADULT LIVER, SIGNAL = 1.8; EXPRESSED IN HELA, SIGNAL = 1.7; NT HIT: D83778.1, EVALUE 0.00e+00; EST_HUMAN HIT: BE888830.1, EVALUE 0.00e+00; SWISSPROT HIT: Q12766, EVALUE 2.00e-75
gacatcccaggtttccgcaagatcctcccacgctcagattatatcatcatccccaagagcagcctgcaggaggaccggagctgccctcagctagagctatgtgtggctcagaaccagatgtccccgaaaggacctcctcttgtgtccaacactgccccggagacagtgcccagccatgcaggcatggcagagcagtgcctggctgtggaggccctggctgaggaggtgggagcccttacccagtcaggtgctgtacaggagattgccacctcagagatcctcagccaggatgtgctcctagaggacgcttccctagaagtaggggagagccaccaaccttaccagacaagcctggtaattgaagagaccttggtgaatggctcaccagacctccccactggaagcctggctgtgccccacccccaggttggggagagtgtatcagtggtaacagtcatgagggtaag

SEQ ID NO: 20941 - DNA, 819 bp, Homo sapiens
  MAP TO AC002472.3; EXPRESSED IN FETAL LIVER, SIGNAL = 1.3; EXPRESSED IN BRAIN, SIGNAL = 1.7; EXPRESSED IN HELA, SIGNAL = 0.42; EXPRESSED IN ADULT LIVER, SIGNAL = 1.5; EXPRESSED IN HEART, SIGNAL =   2; EXPRESSED IN BONE MARROW, SIGNAL = 1.8; SWISSPROT HIT: O43246, EVALUE 7.00e-89; EST_HUMAN HIT: BE537967.1, EVALUE 0.00e+00; NT HIT: gi14777541, EVALUE 0.00e+00
acccccagcagaggcccctggtgggcttctccgccatgctgaccctccccactctctctgctacagccatgaacaccgtcctgctcagcctcctcttctccctgccacgcattgtctatgccatggccgccgatgggctcttcttccaggtgtttgcccatgtgcacccccggacacaggtgcctgtggcgggcaccctggcgttcgggctcctcacggccttcctggcactgctgctggacctggagtcgctggttcagttcctgtcccttggcacactcctggcctacacattcgtggccaccagtatcattgtgctgcgcttccagaagtcttccccgcccagctccccaggcccagccagccctggccccctgaccaagcagcagagctccttctcagaccacctacagctggtgggcactgtacacgcctccgtccctgagccaggggagctgaagccagccctgaggccctacctgggcttcttggatgggtacagccctggagcagtggtgacttgggcgcttggcgttatgttggcctcagccatcaccataggctgcgtgcttgtctttgggaactcgaccctgcacctcccacactggggttacatcctgctgctcctgctcaccagtgtcatgtttctgctcagcctccttgtcctgggggctcaccagcaacagtatcgggaagacttatttcaggtacctcccctagccaacacccactcacactcggcccaggcagctgcctccccttcccccactaccatcccagaatgaacaagtctcacggggctggggaggaccacacacc

SEQ ID NO: 20942 - DNA, 525 bp, Homo sapiens
  MAP TO AL079302.4; EXPRESSED IN BRAIN, SIGNAL =   4; EXPRESSED IN BONE MARROW, SIGNAL =   2; EXPRESSED IN FETAL LIVER, SIGNAL = 1.9; EXPRESSED IN HEART, SIGNAL = 2.6; EXPRESSED IN ADULT LIVER, SIGNAL = 1.9; SWISSPROT HIT: P53298, EVALUE 2.90e-02; EST_HUMAN HIT: BI222663.1, EVALUE 0.00e+00; NT HIT: gi14251213, EVALUE 0.00e+00
ctgtaaacctggccacagcatcaatgtgctgtttgacctggacggccagctctcgagtgggagtcagaaccagtccaagcagaggacgctttggatatgccttacaggtggcgcttttgtcatccaactcctgttttagatttccagtctgctctttatcaagattttcctcctcattctcattctgtttgggaacaggtttctccctgatcagggaagaaggcccttcaccagcatcatcgtcaccaaagagcaacgcctggtctgagacagtgcctccagtcttggctctggcctcggctgcaatatcactgggcagtgcttcactctcaattacagtatcgtcaggcaatgcatcagactcagcttcagccttgcctggtgatctagtctcagctccggcctcagttctggtctctccaggtggtgcttcggtgttacttggaggaggggcagcattcctcttctgccactgcaacaccgcatgaatcattgggatggcaaaggcaagagttttcccacttc

SEQ ID NO: 20943 - DNA, 661 bp, Homo sapiens
  MAP TO AL163300.2; EXPRESSED IN ADULT LIVER, SIGNAL = 1.7; EXPRESSED IN HELA, SIGNAL = 1.1; EXPRESSED IN BRAIN, SIGNAL = 0.96; EXPRESSED IN BONE MARROW, SIGNAL = 0.97; EXPRESSED IN LUNG, SIGNAL = 1.4; SWISSPROT HIT: P02438, EVALUE 8.00e-03; EST_HUMAN HIT: BF058205.1, EVALUE 1.00e-70; NT HIT: AL163300.2, EVALUE 0.00e+00
acccaggagaggcagcgtccacatgagcacaggggtggagactgaagcgatggagcagagaccaccatccaccccacagagcaaaagctccagaggaacaaaggggcctccctgagccagtgcttccaccaactcctggcaggtggacgactgcccggagagctgctgcgagcccccctgctgcgccgccagctgctgtgccccggccccctgcctgaccctggtctgcaccccagtgagctgtgtgtccagcccctgctgccaggcagcctgtgagcccagctcctgcacgcccttgtgctgccagcagtctagctgccagccagcttgctgcacctcctccccaagccagcagtcctgctgtgtgcccgtctgctgcaagcctgtctgttgcaagcccgtctgctgtgtgcctgtctgctctggggcttcctccctgtgctgccagcagtctagctgccagccggcttgctgcacttcctcctgctgcagaccctcctcctctgtgtccctcctctgccaccctgtgtgcaggcccacctgctgcatgcccgtcccctcctgttgtgcacccgccttctcctgccagcccagctgctgccacccagcctcctgcgtgtccctcctctgccgccgtgtgtgctcccacctggcctgctga

SEQ ID NO: 20944 - DNA, 924 bp, Homo sapiens
  MAP TO AC010487.4; EXPRESSED IN ADULT LIVER, SIGNAL = 1.3; EXPRESSED IN HELA, SIGNAL = 0.89; EXPRESSED IN HEART, SIGNAL = 1.4; EXPRESSED IN LUNG, SIGNAL = 1.2; EXPRESSED IN BONE MARROW, SIGNAL = 1.2; SWISSPROT HIT: P51522, EVALUE 1.00e-123; EST_HUMAN HIT: BE719726.1, EVALUE 0.00e+00; NT HIT: gi14758035, EVALUE 7.00e-88
tcaattaatgcttgatggtttgctatactcattgcacttgaaacaattgtctccaaaaggaattttctgatgttctgcaaggagtgacctcagactaaagaccttgccacactgatgacatttgtaagatttctgtccagtatggattctctgatgcctaataaggtgtgaaggtgaattaaaggctttaccacaatcaccacacttgtgaggtttctctcctgtatgaatcctcctatgtctttcaaggtgtgatttgcgaatgtaaactttgtcacattcttcacattcgtaaagtttctctccagtatgaagtttttgatgacatgcgaggtacgcttttgtactaaaaaccttgccacattcattacatgtgtaaggtctctctccagtatgaactctctgatgttctgcaagacgtgaatcactccggaaagccttgtcacaaaccttacatttgtatggtttctctccagtatgaatcctcctatgtctttcaagatgtgatttgcgactgaaaactttgtcgcattcttcacatctgtaaggtttctctccagtgtgaactctacgatgtcctgcaagagttgctcgttgcttaaaaaccttgccacattcattacacttatagggtttctctgcagtatgaactgccttatgaattacgaggactgaatttcgagcgaaggtcttgccacactcattacatttgtaaggtttctctccagtatgcagtctatgatggtacacaaggtgtgatgtctgactaaaggtcttgccacactcattacacttataaggtttctctccagtatgacttctatgatgacatgcaagggttgctttttgatcaaaaaccttgccacattcattacatgtgtaatgtttgtctcccctgtgaattctagtatgttttgccaggtg

SEQ ID NO: 20945 - DNA, 533 bp, Homo sapiens
  MAP TO Z84488.1; EXPRESSED IN BRAIN, SIGNAL = 1.3; EXPRESSED IN HEART, SIGNAL = 1.7; EXPRESSED IN LUNG, SIGNAL = 2.4; EXPRESSED IN ADULT LIVER, SIGNAL = 1.7; EXPRESSED IN HELA, SIGNAL = 0.97; SWISSPROT HIT: P23391, EVALUE 2.90e+00; EST_HUMAN HIT: BF983388.1, EVALUE 0.00e+00; NT HIT: gi14756954, EVALUE 0.00e+00
ataagagacagactgaggaggccattgacaggatttttgccatatcacagcaacagcagcagcaaagcaagtcaaagaaaaaccgaagggcaggcaaacgctataaatttgtggatgctgtccctgatatttttgcacagattgaagtcaatgagaaaaagattagacagaaagctcagattttggcacagaaagaactacccatagatgaagatgaagaaatgaaagaccttttagattttgcagatgtaacatacgagaaacataaaaatgggggcttgattaaaggccggtttggacaggcacggatggtgacaactacacacagcagggccccatcactgtctgcttcctataccaggttgttcctgattctgaacattgctattttctttgtcatgttggcaatgcaactgacttatttccagagggcccagagcctacatggccaaagatgtctttatgcagttcttctcatagatagctgtattttattatggttgtactcttcttgttcccaatcacagtgttag

SEQ ID NO: 20946 - DNA, 729 bp, Homo sapiens
  MAP TO AL117352.3; EXPRESSED IN PLACENTA, SIGNAL =   2; EXPRESSED IN BRAIN, SIGNAL = 3.1; EXPRESSED IN HELA, SIGNAL = 1.8; EXPRESSED IN ADULT LIVER, SIGNAL = 2.5; EXPRESSED IN LUNG, SIGNAL = 2.8; EXPRESSED IN FETAL LIVER, SIGNAL = 2.6; SWISSPROT HIT: P54937, EVALUE 1.90e+00; EST_HUMAN HIT: C03855.1, EVALUE 4.10e+00; NT HIT: AF032669.1, EVALUE 1.00e-109
agaaggtggaaggctgcaggcatctgctggagacgccgggacagtacttggtgtacaatggggacctagtggaatacgatgcggaccacatggcccaactgcagcgggtgcacggctttctcatgaacgattgcttgttggtggctacctggctgcctcagcggcgtgggatgtatcgctacaacgctctctattccctagatggtttggccgtagtcaatgtcaaggacaacccgcccatgaaggacatgttcaagctgcttatgttccccgagagccgtattttccaggccgaaaatgctaaaatcaaacgagagtggctggaagtgctggaggacaccaagagggccctcagtgagaaaaggcgaagggagcaggaggaggcagcggcccctcgagggccaccccaagtgacttccaaggccactaacccatttgaggatgacgaagaagaagaaccagctgttcctgaggtagaggaagagaaggtggacctctccatggaatggatccaggagttacctgaagacctggatgtctgcattgcgcagagagactttgaaggggcggttgacctgctggataaattgaaccattacctggaagataaacctagcccacctcctgtaaaagaactaagggccaaagtggaggagcgagttcgacagctcactgaggtgctagttttcgaactctccccagatcgttccctgagaggtggtccgaagg

SEQ ID NO: 20947 - DNA, 572 bp, Homo sapiens
  MAP TO AC011536.5; EXPRESSED IN FETAL LIVER, SIGNAL = 7.9; EXPRESSED IN LUNG, SIGNAL = 6.4; EXPRESSED IN PLACENTA, SIGNAL = 3.8; EXPRESSED IN HELA, SIGNAL = 9.3; EXPRESSED IN ADULT LIVER, SIGNAL = 6.3; SWISSPROT HIT: P57999, EVALUE 1.00e-36; EST_HUMAN HIT: BF342327.1, EVALUE 0.00e+00; NT HIT: gi13651412, EVALUE 0.00e+00
ctgctgcccctgagctaggctcacaacctggccagccacagtaaccaggaggcgttggagatctccagctgcattcttctcaagcacgatggaaaagtcctcgtccccaggctttgggtggcagacttgggccaagacataggagcaggagccatgcaggtcgtagacacggccatcaagggtgatgtagtggatgcccccgttggccaggcagcggccacagcctgtggcatgacaggcctggacaccatcctctaaccggcactcctcatggggcccacaggctgcgccctcctggcaggtgacatggccacctggcccacactcacagcgccgctcacactcagggcccgggtagaagacctcgcccagtgggtagtagcggccatcatggaggcagccacactggcccacgggtacgcaggtgtcaccactgagtacgaagccagcatcgcagacacagccttcacggcaggccgactcacagccctcgggtgctgagaggctcgggcagctcacagggcaggagtcaccgcagagctcatagtggctgtgggcagggcactgcaagg

SEQ ID NO: 20948 - DNA, 609 bp, Homo sapiens
  MAP TO AC005225.2; EXPRESSED IN ADULT LIVER, SIGNAL = 1.7; EXPRESSED IN HELA, SIGNAL = 0.95; EXPRESSED IN HEART, SIGNAL = 1.7; NT HIT: gi16190908, EVALUE 0.00e+00; SWISSPROT HIT: P49753, EVALUE 1.00e-118; EST_HUMAN HIT: BG285138.1, EVALUE 0.00e+00
ttacacttttgatgggattgtcccctcgtggccacccaagtgtttgtggaagaaagtctggagttgtttccaagcatccacctgagccatggcatgagccctgggctcccctccccagataataggactgcccaccaaggcatgcagggaagcccgacacagggggaagtaaggaggctcaatatagtgccctgtctctgggtaacagatgatctggggctttctcctcccatgggcctgcaagcgtttacaggcctcattagcatagaactcactcttccagttgtggtcatcctgacctaccaggaacaggaaggtgctctctgccctttccacaggaatgaagctcttctggtcaggtccttccaaagggctgttcaggacatccacaatgtctgcatagccatctttggtcaccttgatgcgatttctgttgacgcccacagggggcagggtctcgcccttgtagcgtaaggttcccccaacattggccacagagccgttgatgacgacagcagccgtgatgcccttcaggaaagaggccatggaaaggcagagctcaccccctttggaaattccaagcagcccaactcctggaccttttacctg

SEQ ID NO: 20949 - DNA, 454 bp, Homo sapiens
  MAP TO AC008151.1; EXPRESSED IN FETAL LIVER, SIGNAL = 1.7; EXPRESSED IN BRAIN, SIGNAL = 1.8; EXPRESSED IN ADULT LIVER, SIGNAL = 2.2; EXPRESSED IN LUNG, SIGNAL = 2.3; EXPRESSED IN HEART, SIGNAL = 1.9; EXPRESSED IN BONE MARROW, SIGNAL = 1.9; NT HIT: AF335470.1, EVALUE 1.70e+00; SWISSPROT HIT: P54258, EVALUE 6.00e-01; EST_HUMAN HIT: T70146.1, EVALUE 3.00e-98
gcatctgttcccacatggttttggcctccccttctgtgggggtttggttggtgataacagagaagcaataaggtgtgaagtgacagtgccagcccatctgaagataaagctgctggacaggcaatttgcacctaggaaaggaagggcccctgtaactgccagactccccatccgtctggccaaggctgtctcggtgctgcaccaccgcccgagggtcctcctatgtatgactctcccttccccctctctctccacaggggtgcaaaagtggttggaagtctctccccaccttttcctgctccctctcctttttgtccgacacagatgttctctcaataaatctctggccagtctaattccatcttggcatctacctctggaagaactgggactgatatagagggtggcagaggggctgggggtgatggctgggggtattcacgaaggagggcag

SEQ ID NO: 20950 - DNA, 1415 bp, Homo sapiens
  MAP TO AC010680.3; EXPRESSED IN ADULT LIVER, SIGNAL = 2.2; EXPRESSED IN LUNG, SIGNAL = 1.9; EXPRESSED IN BONE MARROW, SIGNAL = 2.1; EXPRESSED IN FETAL LIVER, SIGNAL = 1.8; EST_HUMAN HIT: BE815963.1, EVALUE 0.00e+00; SWISSPROT HIT: Q00872, EVALUE 5.00e-58; NT HIT: gi16157781, EVALUE 0.00e+00
ggatttttatttttcttaccaaatggatgttcagcaattattggtgctgattctagaggtttgctgacaccaaatctgttctctgaactgacacggaaagaatattccatgtattttgtgagatgagtgactttaatttgagtgcgcttgacactggaattgacaagctgccaagctgttgtacccgattcacgcttttcaactatgtaattagtaatttcagtgcctcctccatctttaggttctccccatgacaggacacacgattcagctgagacagatgagacctcaatggggccggttactggacctggccttccaatgaccacaactgtgacgctaaatgttttaacaccagctgtattttccagggtcaagaagtatcttccagagtcacctctcatgctgtcctttacagtcagtgtggttctgtcttttgttgttgtaatgctcactcgatctgtctctttaagtctcatttcttccagtttccatgttactttgggggcaggacgaccactgattggtacgtcaatggtaaatgggcttcctgctttgcaagttataagctgattggtaattccagtgaggtcagcagtgggctcgatttgaggctccttaatgatgacagaagagaaggcttctctgggttcactatagccagcatcattcttggccttcacacggaattcatattcagttttctcaacaagacgctctactgtgaaagttagctgtttggtgtgaccagcttcaacccagaagtcagatcccttttgtctcatttcaagcaggtagccagtgatccggctgcctccatcgtggtcaggtttaagccaagctaagactgcggaggatttgctagtatcaacaacatcaagtctcctaggtggagcaggctgttctgtggctacaattggttctggcatttcatagggctcaccaacaccatactcatttactgcagaaacacggaaatagtacggaacaccttcggccaggtcattgaccttgaagatctgacgagtgcatttttcactgataacctgccaactacggcgacttgcctctcgtttctctaccacataatgatggattcgggcaccaccgtcaagaagaggggcatcccacatcaatgtagcagatccccgggtcacatctttgaaggtaattgggccaggtgggcctggagtgtctagcactttcacggtgaatgtgattgacttactaccactgttgttttccacagtaagggtatatttccctgcatcatttctgttgcagttttccacagtgagggtgctgaaggaatctgttgtatggatatcagcccgaaggctaaggttagagtctggtttgctccacacagctgtaggagtaggtctaccttggtaggcaatgaagaggcgaatact

SEQ ID NO: 20951 - DNA, 696 bp, Homo sapiens
  MAP TO AL022334.1; EXPRESSED IN HELA, SIGNAL = 0.6; EXPRESSED IN ADULT LIVER, SIGNAL = 1.4; EXPRESSED IN LUNG, SIGNAL = 1.4; EST_HUMAN HIT: BI754083.1, EVALUE 0.00e+00; SWISSPROT HIT: P10301, EVALUE 4.00e-10; NT HIT: gi16168170, EVALUE 0.00e+00
gggatgtcttcatcctggtgttcagcctggataaccgggagtccttcgatgaggtcaagcgccttcagaagcagatcctggaggtcaagtcctgcctgaagaacaagaccaaggaggcggcggagctgcccatggtcatctgtggcaacaagaacgaccacggcgagctgtgccgccaggtgcccaccaccgaggccgagctgctggtgtcgggcgacgagaactgcgcctacttcgaggtgtcggccaagaagaacaccaacgtggacgagatgttctacgtgctcttcagcatggccaagctgccacacgagatgagccccgccctgcatcgcaagatctccgtgcagtacggtgacgccttccaccccaggcccttctgcatgcgccgcgtcaaggagatggacgcctatggcatggtctcgcccttcgcccgccgccccagcgtcaacagtgacctcaagtacatcaaggccaaggtccttcgggaaggccaggcccgtgagagggacaagtgcaccatccagtgagcgagggatgctggggcggggcttggccagtgccttcagggaggtggccccagatgcccactgtgcgcatctccccaccgaggccccggcagcagtcttgttcacagaccttaggcaccagactggaggcccccgggcgctggcctccgcacattcgtctgccttc

SEQ ID NO: 20952 - DNA, 832 bp, Homo sapiens
  MAP TO AC022154.3; EXPRESSED IN PLACENTA, SIGNAL =   3; EXPRESSED IN HELA, SIGNAL = 0.6; EXPRESSED IN BRAIN, SIGNAL = 2.5; EXPRESSED IN ADULT LIVER, SIGNAL =   2; EXPRESSED IN HEART, SIGNAL = 1.9; EXPRESSED IN BONE MARROW, SIGNAL = 1.6; NT HIT: gi16163058, EVALUE 0.00e+00; SWISSPROT HIT: P17473, EVALUE 1.30e+00; EST_HUMAN HIT: BE793998.1, EVALUE 0.00e+00
tcagggctcccgccccgggcagccaggaggcccagtgagcagtgtaccgatgccagggtgcatctgtgcctgtagcggcccatactccacctgctccccgtccactgtgagcacgccgcgtggtgtgagcggctctaggcggaaggcacgggccgcggcgtagcccagctgcggacagcccaggctgaagtggctaccacgctccatggccaagaaaaggcgcagcagcgcagcccgcgagatgccgctacgcacccagcacaggtgcaccaggccgtcgtcgaagcgcgcatgcggagctgccaccaggtcagcgcctaggtggctgggcgagatggccaacatgagcacaaagtccccctccagcgtcacccagtctgggggcagcggggtgcccagcggaggcagcaggtggtcgggcgggccgcaggtggaggcccctacccgggcatcaggggtgggaagtgggagcccagaggatgggggaattacgggggccccttcggagacgggtgagtgtagagctgccttgggagagccaggaggtgaagacagcagtgggtccggggacagcggagcatccccagccccaccccagtccccagccagctctgggcccccaccgttgagggacaggatgggcaggggttctggcgagccaggagaggccagggcaggctggggcaggggaagaggcaggtcagacacagaacgatgcaggggtgagtgggccatgggcggggctgggtctggggttagggtcagctccgacttggcacgaggcaggctatgggcaggggtgggcgaggcaggttccacagtggcggggagg

SEQ ID NO: 20953 - DNA, 546 bp, Homo sapiens
  MAP TO AC007262.4; EXPRESSED IN PLACENTA, SIGNAL = 1.5; EXPRESSED IN BRAIN, SIGNAL = 1.5; EXPRESSED IN ADULT LIVER, SIGNAL = 1.7; EXPRESSED IN BONE MARROW, SIGNAL = 1.8; EXPRESSED IN FETAL LIVER, SIGNAL = 1.7; EXPRESSED IN LUNG, SIGNAL = 1.6; EXPRESSED IN HEART, SIGNAL = 1.7; SWISSPROT HIT: P57848, EVALUE 5.10e+00; EST_HUMAN HIT: AV721065.1, EVALUE 2.00e-07; NT HIT: AF029308.1, EVALUE 1.00e-04
ctgtggtattttgctgtgccagtagactaagatagtcatcaggtctccctgagcaactcttgactctgacggtcttacagttttcttgtttttgatggccctgagagttttgagagtactggccagatattttgtagaatgtccctcaattgggatttgtctctttttttctcattaatagactggggttatgagttttagagaggaagaccagcaaggtgaaatgtcattctcatcacttcgtatcaagggttcatgctatccacatgtcctatcactgatgttgttgacattgatcacctggctgagatgctgtttatcaggtttctccactttctcccataatattactcttttctccttctttccatactgtattctcacttacagaatgggaagtttaggacttcacatgttatttgtaaaacagcaggactggattagtccatttctaagtcatctctagtttgttccttataatcaatgagaagtactgtcctgattgaaaaggaaatctgtattcacagaacagggtgagagagcagg

SEQ ID NO: 20954 - DNA, 585 bp, Homo sapiens
  MAP TO AC004687.1; EXPRESSED IN ADULT LIVER, SIGNAL = 2.4; EXPRESSED IN HELA, SIGNAL = 3.8; EXPRESSED IN FETAL LIVER, SIGNAL = 2.4; NT HIT: gi14769775, EVALUE 0.00e+00; SWISSPROT HIT: O35569, EVALUE 9.00e-03; EST_HUMAN HIT: BF337562.1, EVALUE 3.00e-03
gaacactgcagccgacttctcagcaacaatgggccccaggcctctggacgactgggccccacacgggagaggggtggcctccccgtaattgagggccccaggactggactagaggctagcgggagaggccggctgggcccttcccggaggtgctcccgtggccgggcgctggagcctggcctggccagctgcctttcccccaagtgcttggaaatcagcattgaatatgattcggaggatgagcaggaggcgggcagcgggggcatcagcatcaccagctcctgctaccctggagatggggaggcctggggcacagcaactgtaggaaggcccagggggcctccgaaggccaattcaggccccaagccctacccacgcctcccagcctgggagaaaggggaaccagagcggagaggccgcagtgcgacgggcagagccaaggagccactctcccgggtccgtgctcactccccgccctgggcagcccctgcctgctgccacctggtggccctgcttgctgcccaccagcagctcccattccacgctgcctgcctccatcagcagaggtggggccgggcctccggg

SEQ ID NO: 20955 - DNA, 2782 bp, Homo sapiens
  MAP TO AP001620.1; EXPRESSED IN PLACENTA, SIGNAL = 2.7; EXPRESSED IN ADULT LIVER, SIGNAL = 1.2; EXPRESSED IN HELA, SIGNAL =   1; EXPRESSED IN FETAL LIVER, SIGNAL = 1.2; EST_HUMAN HIT: AL544048.1, EVALUE 0.00e+00; SWISSPROT HIT: Q9ULJ3, EVALUE 0.00e+00; NT HIT: gi14780532, EVALUE 0.00e+00
agctttgttgcacacgtgacaaataaatggtttcacagagcacagaagctcctggtgacgctccagctgcttatgcaccgtgaacatcttcccacacttctcgcagggccacaggctggcttctttgctaggacccgcttctttgggggctgtgctggcctcgggtgcctcttcttcagcctcctccacaggctcctctttgacttggattttcagttgcttggaaagactaaggtcttcgggaagacaagaggaatcttccgagtcgaagttaacttgttctgaagaatcactgaacacgttgtcgtcttttgtggtgacgatgtggtttactttgttgggctcaggctgggattggggccttgaagaaccagtcacatcaccattgtggtccaaaacgggcaaagaaaagttttcggtgggtgccatgttgttctgattatggacttcaacctggtgccgccagatgctgaaagaggacttgaaggtgcgcatgcactcgaggcaggtcagcttcttatactcacacttgctctcgtgttcttgcttcagctcgggcgagaaaaacctgaggctgcagtaagggcagacggccgcgttccggcacagccgctcgtggcttccttgctctaggagagaagagagcttagcattacagaggcggcactggtaaacctccttgttttctactggacttgcaagaggagcatgctcttttggtttagcaactttatttactccaaggggtttttctcctggatgcatttttatatgctgcttaaattgagagagaaagcggtacgcttttccgcagtaagtacaaatgtaagctcctttggctcgagatctcaagttcctcttgatgacttgctgtgcttgggagctactctgtccctgaaaaccaggcttgccgcgccttaacttaatgatcagggccttcttaatttctctctctctcactatgtcaatcagctttctttggaatttttcatccaaaacagcatgtgaactagaggctggtgatgggttcttcactatgccgtgttgggtctgacagtgtgtccacactttgaagttggtgtgaaacctcttgtgacagatgtcacaagcgtagggcttttctgggttatggtacatgttaacatgacggtgaagacctgctgttgatctaaagatcttaaggcaatgtttgcatttaaattttttgtttggtctcgtcccctccaactcaccaaattcgtctttattcaaatcagaatctggaaaatctgcatcaaggagagtagggcttgagccttcctcaaaattatcttctgacacaggagacccgtgctcattcacctttaacttcttaaacggcaatcttcggtccgcttggaacctcctttttgctgggagtctgctcatgtctttttggtcatcttctgttttcagagacaggtctcttgtgaccgacgaagatgaggcagctgctgttgttgccgcatctcccacagtgacgcggatgatgtccgaggggtccgacagcgggctgctgggctcagtctttatgcgcacctcagtcacaggggaagctccctccctgtctgttgactgagaagcactaaaggacctgaggcgatgcggttgtagcacttgaggcctgtcatctagggctgttttttcactacaatcttttaaagatgacttctgagataaagcacacaacacattccctggtgcatcactggacaccgaagatgatccctgggaagatttcaaatctatggaaggtgaatagacaggaacctggctatccatcgacaatgaccgtctgaggagactcttaacaagtgggccactcctgtcaatgctttggtttccagaaccagatccactggatgggatcactaagcctaactttgaatagtacaacaagtttctatcttcaccttgaccatttcctttgttagtttcttttaatagatagggagtctctgatgagctacaaacagacaaaacaggtggccgtggtctcttcaaagccagctctagagcttttccttttggaagctgaccactcacacctggtttatcatccatagcttctctgtcttgcagaggctttgaaggcaacactgcatttcttttcaccaaactgattctattaggatcatccaaagatccagaatgctcaagagactttgcatataccacagaactatctttcggccaactcttttcagttaatgacaaattatgaagtggttctattggttttgggacatgtggcttattggtattggccttgactgcaatgctaggagagggccgggaagtatggcttacatcgggttgattttgactaacagtttttccttgcgcttcgtttctactttgacaaacaatgacacttctcttttgagaactgttttcatcatcttctacaaacactttttttctattaggacacgttggaaagggggcttgaggtgttttagaaacgatgttagtcagaaaggaaatcccaagactatagccaagttcttgcacagcagcaaggctgctcttctcaacaaatagagaggaagaataaatgtagtttaaaacattatcaaaagcatctggctcacagaagtcaagctgaaatacagtttgtgactcattttccttatttgtgaataaactctgaaagtattcgctgctggcagccaagacgtttttatgagctcggaacttttggtctccaacaatcagcagcacatcacacagctgtcctttgagacgctcctcattcagggca

SEQ ID NO: 20956 - DNA, 1754 bp, Homo sapiens
  MAP TO AC003682.1; EXPRESSED IN BRAIN, SIGNAL =   2; EXPRESSED IN HEART, SIGNAL = 2.1; EXPRESSED IN FETAL LIVER, SIGNAL = 2.4; EXPRESSED IN ADULT LIVER, SIGNAL = 2.2; EXPRESSED IN PLACENTA, SIGNAL = 2.1; EST_HUMAN HIT: AA532969.1, EVALUE 0.00e+00; SWISSPROT HIT: P52740, EVALUE 0.00e+00; NT HIT: gi10190695, EVALUE 5.00e-16
tatacttcacttgcatttttatgcttttaggttgtttgcatggaatagaggctgaggaggccccttctgagcagactctttctgcgcaaggagtgtcacaggccaggactccaaagctaggtccttccatcccaaatgctcattcttgtgagatgtgtatcctggtcatgaaagacattttgtacctcagtgagcatcaggggacacttccctggcagaaaccttatacgtctgtggccagtgggaaatggttttcatttggttctaacctgcaacagcaccagaaccaggacagtggagagaaacacatcagaaaggaggagagcagtgccttgcttctgaatagctgcaaaattcctctgtcagacaatcttttcccatgcaaagatgttgagaaggattttccaaccatcctgggccttctccaacaccagaccacccacagcagacaagagtatgcacatagaagcagggagacctttcaacaaagacgttacaaatgtgagcaagttttcaatgagaaagttcatgttactgagcatcagagagtccacactggagaaaaagcttataagcgtagggaatatgggaaatccttgaactctaaatacttatttgttgaacaccagagaacccataatgcagaaaagccttatgtgtgcaatatatgtgggaaatcattcctccataaacaaacactcgttgggcaccagcagagaattcacactagagaaaggtcttatgtgtgcatcgaatgtgggaaatccttgagctccaaatactcacttgtggaacaccagagaacccataatggagaaaagccttatgtgtgcaatgtatgtgggaaatcattccgccacaaacaaacatttgttggccatcagcagagaatccacactggagagaggccttatgtgtgtatggaatgtgggaaatcttttattcattcctatgaccgcattcgacaccagagagttcacactggagaaggggcttatcagtgcagtgaatgtgggaaatccttcatatacaaacagtcacttcttgatcaccatagaatccacacgggagaaaggccttatgagtgcaaagaatgtgggaaggccttcattcacaaaaaaagacttcttgagcaccagagaattcatactggagaaaagccttatgtgtgcatcatatgtgggaaatcatttatccgctcgtctgactacatgcgacaccagagaattcacactggagaaagggcttatgaatgcagtgactgtgggaaagccttcatctccaaacaaacacttcttaagcatcacaaaatccacactagagaaaggccttatgaatgcagtgaatgtggaaaaggcttctaccttgaggttaaacttcttcagcaccaaagaatccatactagagaacaactttgtgagtgcaatgaatgtggaaaagtcttcagccaccaaaaaagacttcttgagcaccagaaagttcacactggcgaaaagccctgtgagtgcagtgaatgtgggaaatgctttagacaccgcaccagcctcattcaacaccagaaagttcacagtggagagaggccttataactgcactgcatgtgagaaggcctttatctataaaaacaaacttgttgagcatcagcgaatccacaccggagaaaagccgtatgaatgtggtaaatgtgggaaagccttcaacaaaagatattcccttgtcaggcaccagaaggtacatataacagaagagccctag

SEQ ID NO: 20957 - DNA, 665 bp, Homo sapiens
  MAP TO AC004493.1; EXPRESSED IN ADULT LIVER, SIGNAL = 2.9; EXPRESSED IN PLACENTA, SIGNAL = 5.5; EXPRESSED IN BONE MARROW, SIGNAL = 5.2; NT HIT: gi14777924, EVALUE 0.00e+00; SWISSPROT HIT: P32583, EVALUE 5.20e-02; EST_HUMAN HIT: AW895217.1, EVALUE 0.00e+00
cagtctccaatctactctgccccaagagagaattcgagtccactgtaggatatgaagaagagtcagactggaacctgctctgctcaggagacattccagatttcaacataggactcgctgagaactcacctctatcttgtcttattggagatctggatgccagctcagtgactggagatgaagacctggaccgacctcccttaggtgatgtttgagatttgctctgcagagatggtgattctgaatgactctgtctcacttctggacttgaagtatcagatctgtggtctggtgaagtttgagattgtcctttcagttgcagagatgagacaccaaaatagctctcgcctggtggtgtgctagattttactcctgcacagagagagagggatccagggcaactttgaactagtgagtctttagacttctcttggggacatggtgactttgatccagaaagacttggccccggtggagtttgggcctttactttggggtatggtgaaatagaccctgagtgactttgtcttggcggtgtttcaggtttcactttggtatctggtgaggaggacccagaatgactgtatcttggcaacaatctggattccacattggagcagggagatactgatctgcttcgccgtggagttgttctcgacgtcacc

SEQ ID NO: 20958 - DNA, 771 bp, Homo sapiens
  MAP TO AF099810.1; EXPRESSED IN ADULT LIVER, SIGNAL = 1.7; EXPRESSED IN HEART, SIGNAL = 1.9; EXPRESSED IN PLACENTA, SIGNAL = 1.6; SWISSPROT HIT: P31696, EVALUE 1.00e-17; EST_HUMAN HIT: BI917181.1, EVALUE 7.00e-02; NT HIT: AF099810.1, EVALUE 0.00e+00
agatcctctccgggctgttccctggcctgtctgctcctccgggctctgtcccagcagcgacaatgagctccacactccactcggttttcttcaccctgaaggtcagcatcctgctggggtccctgctggggctctgcctgggccttgagttcatgggcctccccaaccagtgggcccgctacctccgctgggatgccagcacacgcagtgacctgagtttccagttcaagaccaacgtctctacggggctgctcctctacctggatgatggcggcgtctgcgacttcctatgcctctccctggtggatggccgcgttcagctccgcttcagcatggactgtgccgagactgccgtgctgtccaacaagcaggtgaatgacagcagctggcacttcctcatggtgagccgtgaccgcctgcgcacggtgctgatgcttgatggcgagggccagtctggggagctgcagccccagcggccctacatggatgtggtcagtgacttgttccttggtggagtccctactgacatacgaccttctgccctgacccttgatggagttcaggccatgcccggcttcaaggggttaattctggatctcaagtatggaaactcggagcctcggcttctggggagccggggtgtccagatggatgccgagggaccctgtggtgagcgtccctgtgaaaatggtgggatctgctttctcctggacggccaccccacctgtgactgttctaccactggctatggtggcaagctctgctcagaag

SEQ ID NO: 20959 - DNA, 494 bp, Homo sapiens
  MAP TO AC004235.1; EXPRESSED IN ADULT LIVER, SIGNAL = 2.5; EXPRESSED IN BONE MARROW, SIGNAL = 2.4; EXPRESSED IN LUNG, SIGNAL = 2.2; EXPRESSED IN HEART, SIGNAL = 2.8; EXPRESSED IN FETAL LIVER, SIGNAL = 2.9; SWISSPROT HIT: P07527, EVALUE 4.00e-24; EST_HUMAN HIT: BI831016.1, EVALUE 0.00e+00; NT HIT: gi14777979, EVALUE 0.00e+00
ctgaacacatccgctgctgtcccataggagccctgcagcagctcgggggccatgtagcgggggtctccctcctggacctcaccagctcctgctgtacccagctccaccagcagtccgaagtcacccagcttgcagcggccccggggccccaggaagatgttggcaggcttgacatcaaggtgcaccaggccctggctgtgcagatgggccagggcaagcagcgtgtcccgcaggtagccccagacctgggcctcaggcaggctggcaccccaggcctcacagtgttgctgcaggctgggcccgcacagctccgtctgcaggtacaggatgccgccctcctcccaggcctgctccagccgcacgcagcatgggtgctgccccaccttctcgtggctgcccacctcggccaacttgcgggcccggtccttggggccccggaatggtgacatggaacgctttaccgcatagagccggccgtcctccttggagcgcac

SEQ ID NO: 20960 - DNA, 807 bp, Homo sapiens
  MAP TO AC011248.8; EXPRESSED IN BRAIN, SIGNAL = 1.2; EXPRESSED IN HELA, SIGNAL = 0.56; EXPRESSED IN ADULT LIVER, SIGNAL = 1.2; EXPRESSED IN FETAL LIVER, SIGNAL = 1.2; SWISSPROT HIT: P56502, EVALUE 1.00e-02
gcttgcatgacttcaaagcggcctcctctggtagtagcaatattcaaaagctggaagattcccaaccagcctcccatctggtttctgccccggctgccgtattgcatcctagaaaccctgggactcccccagaatgcattgctctcacgcccccgaatccttccatctggaactgtctctcctccttctcaccagcccccacctccactgtcatggggaacagcagcaggcatttttaacatttgcagggaggcacctccctttgtgaacatgcagttcttgttttcagtcttcttttgggggcctacccctgtcacccttcttggcaccatcaacatccacaggattgacccctccagcatctggtctcacagttccctgacagtttactttcgggatctttccctccagccccggccattcgctcctgtgtccatcactcattaccagccatccccaggagctgtatctcctctgaagtctttcttccgatgccacgctctgagcccctggtcctcccattcagcactgacccaacccaacacactggctcccagttctgtatctccagccctgggcaccccccaattccagactcacgtggccagcttctttcacatttccaccttgatgcttcacagacatctgaaacttagcatgtccaggacacaattcctgattttcccctcaaagctcttctctcaccaacttccccaccccacagccactcaccatgcaactcaagcccaaagtctacaagtcagcctggatccctgtcttccccttacctctgtatccagcccatga

SEQ ID NO: 20961 - DNA, 511 bp, Homo sapiens
  MAP TO AC005877.2; EXPRESSED IN ADULT LIVER, SIGNAL = 1.6; EXPRESSED IN BONE MARROW, SIGNAL = 1.5; SWISSPROT HIT: P37275, EVALUE 5.00e-93; EST_HUMAN HIT: BE889791.1, EVALUE 0.00e+00; NT HIT: gi13540478, EVALUE 0.00e+00
gtgctttaattctggaagtgcattaatatctcctggacaatcatcacacagaagacaagtgctatcattcacccccccttcaaagcttttgtccttctcagacttaacagtaagatcttctggtaacttttcacttttacaactgtttgtagcgactggattttctttttttaaattttgaggaacaacttgaagttggctaggctgctcaagactgtagttgatgataattttggttgttccatcttgatcaaccaaaggaagactgatggctgaaataacagaatggccaccttgttgtatgggtgaagcattgattgtttcttgttctttggatgcaagattggcttgattattctccaacacttgccttattacattaccatctaccgccactttaagtacattctgaatatcacttaaattgatacttatgggagacaccaaaccaactgttggcagaacaacagcttgcaccatgccctgaggagaactggttgcctgtaatggg

SEQ ID NO: 20962 - DNA, 609 bp, Homo sapiens
  MAP TO AL118502.29; EXPRESSED IN ADULT LIVER, SIGNAL = 3.4; EXPRESSED IN BONE MARROW, SIGNAL = 3.4; EXPRESSED IN HEART, SIGNAL = 3.4; EXPRESSED IN FETAL LIVER, SIGNAL = 3.1; EXPRESSED IN LUNG, SIGNAL = 3.2; EST_HUMAN HIT: BI828913.1, EVALUE 0.00e+00; SWISSPROT HIT: Q01033, EVALUE 5.00e-03; NT HIT: gi15305658, EVALUE 0.00e+00
ataaagccaagtgctgagatggctccgggtgatgctgggtacctgtgcgatgtcagtctccctcgtgggtacagggcttggtacgctgtctgatatctcagtgacattgacgcaggtagtgagaccggagccctgggcaagagccaccagggcgggcaagaggccgctgagtccttcacccacaaagaaggtggtgaggtagtaggtgggcagccggctcatgaacggcaggaaggtcactgaagaggtgcagtccaccagggccaggaagaaggtgaggaccaagaaggcgatgctgtggtggccgtccagcacccaggaggtcatattccagaggaaggcaaagatgatgcaggtgacggttcccacgcccagcagggtgaagatgatgggcacttcggaaaggcagctgggccggaagtgatggagcagggtgaccaggaggggcccgatgttggccagctggatgaccaccgtgaggtaggagggcaggtaccagccctcgggcagctccatcaccagcaggggcagctctacccagagcccattgatggtcacccaggagcccattccgaagacgcagaccagcaggtgcatcaggaaggccat

SEQ ID NO: 20963 - DNA, 461 bp, Homo sapiens
  MAP TO D87016.2; EXPRESSED IN HELA, SIGNAL = 0.58; EXPRESSED IN ADULT LIVER, SIGNAL = 1.4; EST_HUMAN HIT: BG755949.1, EVALUE 0.00e+00; SWISSPROT HIT: P04208, EVALUE 3.00e-41; NT HIT: M94114.1, EVALUE 0.00e+00
ggtcctgggcccagtctgtgctgactcagccaccctcagcgtctgggacccccgggcagagggtcaccatctcttgttctggaagcagctccaacatcggaagtaattatgtatactggtaccagcagctcccaggaacggcccccaaactcctcatctatagtaataatcagcggccctcaggggtccctgaccgattctctggctccaagtctggcacctcagcctccctggccatcagtgggctccggtccgaggatgaggctgattattactgtgcagcatgggatgacagcctgagtggtcccacagtgctccaggcccagggggaactgagacaagaacccccttcctcctctgtcaggagggtgagccccggcagctgctgctcaggcccggcctgtggcttctgctgctgtagcttcccccatgggtccaagggcatccagggccctgcctga

SEQ ID NO: 20964 - DNA, 609 bp, Homo sapiens
  MAP TO AL033375.2; EXPRESSED IN FETAL LIVER, SIGNAL = 1.2; EXPRESSED IN ADULT LIVER, SIGNAL = 1.2; EXPRESSED IN HEART, SIGNAL = 1.4; SWISSPROT HIT: P14283, EVALUE 3.50e+00; EST_HUMAN HIT: T94319.1, EVALUE 3.40e+00; NT HIT: gi14756384, EVALUE 1.50e-01
agggctgcccactaaattacttcatcaaggtgttggcagtggaatttgtgctcgcttgcacatgccagcgattgcagcaatgctcagtgtgtatgtgaattgcctgggatgtgggaccagtggaagcagggcagtggcattcctgctgcacctcctcatgcaggtggttgtggtggtggtgacatgacagggtcagggcactgtggtaacaggttgtctggcatttgtgccagtggtggtggcatggggttgggtgtcagggtgtgctagcaccagcagagggaggttgtggtgggggaagaccgtggcagccctgtgtgtttcagccggttccagtgcactggaactctctgacagtcaggtgcagtctgccagcaaaggagctatggtaaagttttccaggaagcaccctgtttgggcatctgaggctgcactgcaagtgggtgcaaccagtctggagccctaggagaggccagaagacagggtagtgctcagatcagactagccccatctcacaaggaagaccaccctgctgtgtccaggtatgacagtcacccctaggctaatgtctcctagaggagcgtaggtgtccctggctgtgctccattg

SEQ ID NO: 20965 - DNA, 774 bp, Homo sapiens
  MAP TO AP001754.1; EXPRESSED IN ADULT LIVER, SIGNAL = 1.1; NT HIT: gi14780716, EVALUE 0.00e+00; EST_HUMAN HIT: AI809505.1, EVALUE 1.00e-12; SWISSPROT HIT: P24014, EVALUE 9.00e-10
atgggcaccgtgcgcccacctcgcccctcgctcctgctggtctccacccgggagtcttgtctcttcctcctcttctgcctgcacctgggcgccgcctgcccacagccctgccggtgccctgaccacgcaggggctgtggctgtcttctgcagcttgcggggccttcaggaggtccccgaggacatcccggccaacaccgtgctcctgaagctcgatgccaacaagatctcccacctcccggacggggccttccagcacctgcaccggctcagggagctggatctgtctcacaacgccatcgaggccatcggctccgccaccttcgcgggcctggccgggggcctgcggctgctggacctgtcttacaaccgcatccagaggatccccaaggacgccctgggcaaactcagcgccaagatacgcctgtcccacaaccccctgcactgcgagtgcgccctgcaggaggccctgtgggagctgaagctggaccccgactctgtggacgagatcgcctgccacacctcagtgcaggaggagtttgtggggaagcctctggttcaggctctggatgcgggtgccagcctctgcagcgtcccccacaggaccacagacgtggccatgctggtcaccatgttcggctggttcgccatggtgatcgcctacgtcgtgtactatgtgcgccacaaccaggaggatgcccggaggcacctggagtacctgaagtctctgcccagcgcccccgcctccaaggaccccatcggcccggggccctag

SEQ ID NO: 20966 - DNA, 759 bp, Homo sapiens
  MAP TO Z98750.1; EXPRESSED IN FETAL LIVER, SIGNAL = 2.2; EXPRESSED IN PLACENTA, SIGNAL = 2.1; EXPRESSED IN HELA, SIGNAL = 3.6; EXPRESSED IN ADULT LIVER, SIGNAL = 1.6; SWISSPROT HIT: Q99972, EVALUE 0.00e+00; NT HIT: AF049793.1, EVALUE 0.00e+00; EST_HUMAN HIT: BF725215.1, EVALUE 0.00e+00
gtacttatagcggttcttgaatgggatggtcagggtcttgctgatacctgtgcctgtgtcataagcaaagttgacggtagcatctgctgaggtgtagctgctgacggtgtacaaggtgccacagatgatgaaggcattggcgactgactgcttacggatgtttgtctcccaggtttgttcgagttccagattctctgggttcagtttggagaggacaatggcacctttggcctcatcggtgctgtaaatgacccagaggcctgcttcatccacagccaagtcaatgtccgtgtagccaccccaagaatacgggaactgtccgtggtagccagctccagggatttccttctcagccttcactgtctcggtattcagctcatatcttatgacagttctggactcagcgccctggaaatagaggctccccgagtacaccacagcacccgtgctttccagtggcctaggcagtatgtgaaccttagaagggtagccctgcataaactggctgatgaggtcatactcaaaaacctggcggacatccgtgccaactgtgtcgattctccacgtggtctcctgggtgtaggggtaggtgggcttggggtctcgcatccacacaccatacttgccagtaattgtttctgctgttctcagcgtgagaggctctcctacccaaactagttctccacatcctggtaaattcagaaaagaaaacgaagcaccacttaatccataatctttccaaacacagacaatgatcat

SEQ ID NO: 20967 - DNA, 557 bp, Homo sapiens
  MAP TO Z82188.2; EXPRESSED IN FETAL LIVER, SIGNAL = 1.5; EXPRESSED IN BRAIN, SIGNAL = 1.3; EXPRESSED IN ADULT LIVER, SIGNAL = 1.4; EXPRESSED IN LUNG, SIGNAL = 1.2; EXPRESSED IN BONE MARROW, SIGNAL = 1.3; NT HIT: U91328.1, EVALUE 2.00e-16; EST_HUMAN HIT: AW796604.1, EVALUE 4.00e-12; SWISSPROT HIT: P46248, EVALUE 6.90e+00
tgggccaacttgaataatgggcttatatgggtcctaggcccacattctatcctatagtacctctttttatgacagactgacacagaaagaaaaattcatagcactaagtacaccagattttctaaagcttaagactagcccccatgaattctttttcgtattaatcaaattccttgcaggagagacaaacagtgatttttatcatttattcaaccagtttgcaccaagagaggccagaagcctgactggtaagaaattcttaccctttgccagcatgccaggtttctgggttccctttctctctgtggctttgatggccctgcttactgtgccattgctatgggggccaagacacgttacaaaagaaaatcgtctttttccatttcatggaaccacaggcaaaagcctcttaattttgtaagatgctgtccaacaggctgcatggggaaaccaaattaacattttccattccaggagactagccaccccactcagtgcccaacatcaacctggcaaggctcaaacttgctcccgatggcccttgtcatctttgatcc

SEQ ID NO: 20968 - DNA, 586 bp, Homo sapiens
  MAP TO AL031588.1; EXPRESSED IN BONE MARROW, SIGNAL = 1.5; EXPRESSED IN FETAL LIVER, SIGNAL = 1.7; EXPRESSED IN LUNG, SIGNAL = 1.2; EXPRESSED IN ADULT LIVER, SIGNAL = 1.9; NT HIT: gi14776961, EVALUE 0.00e+00; EST_HUMAN HIT: BE174452.1, EVALUE 7.00e-57; SWISSPROT HIT: O08762, EVALUE 7.40e+00
ctgtcttgggcattcatctgcgtcctggcaattagctccagctctaatgacctgctctctgctttatgttgcacttattattcccagattgtaaagtttgtgccaaacatattaatgctaacatcccattttacagattagcaaagtaaggatctgagaggttatgtgatttttcccagagtctgcgagggcagggccctgtctgaagctgagacacaccttataacaccttgttatttggggcttcccatcagtaaaacgggagtcataatggggccctggcttctgggcagttcccataaaacattgtgcaatctgaagatgaaagtgtcagaggaaggtgagatgtcctttctgagagcgtctgccctcagaaggagacgggaccgcatcgcagctgtgtgaaccccgggcagtggttccagcagcggggcggacgcgagacagccccatttgagttttgctgctagatggcacgtagaacttgaacttcagagggtgctccttggaggccctgaccagacacagaagggaagggagactgttcccatggtcctgcctccgcggcagtgaggctgctcttctt

SEQ ID NO: 20969 - DNA, 938 bp, Homo sapiens
  MAP TO AL137070.3; EXPRESSED IN BRAIN, SIGNAL = 1.5; EXPRESSED IN ADULT LIVER, SIGNAL = 1.8; EXPRESSED IN BONE MARROW, SIGNAL = 6.5; NT HIT: AL163204.2, EVALUE 0.00e+00; EST_HUMAN HIT: BI760935.1, EVALUE 0.00e+00; SWISSPROT HIT: Q08094, EVALUE 1.00e-117
aaaaaagacttagcttccggtcctgtgggatccgccccgcggtggcgccctccagccgtaagctccacgcgttcaacaagggcccctcctacaggctcttggcggacgtccagaacaggcttctgttcaaatatgactcccagaaggaggcagagctccgcagctggatcaagggattcactggcctctccatccgccccgacttccagaagggcctgaaggacgggattattttatgcacactcgtgaacaaactgcagccgggctcagtccccaagatcaacggcttccgtgtagaactggcaccagctagaaaacctctccaacatcctcaaggcaatggtcagctacggcatgatcccgtggacctatttgaggccaacgacctgtttgagagtgggaacaatatgcaggtgcgggtgtctcttctcgccctggcagggaaggccaagactaaggggctgcagagcggggtggacatccgtgacaagtactcagagaagcagaacttcaacgacaccaccatgaaggccaggctgtgcgtcatccggctgcagattaccaacaaatgtgccagccagtcaggcatgaccgcatacgtcacgaggaggcatctctacgaccccaagaaccgcatcctgccccccatggacaactcgaccatcagcctccggatgggtacaaacaagtgcgccagccaggtgggcatgacggctcccgggaaccagtggcacatctatgacaccaagttgggaatcgacaagtgtgagaactcctccatgtccctgaagatgggctacacgcaggtcgccaatcacagcagacaggtctttggcctaggccggcaaatatatgaacccaagtaccagccgggtggcccagtggcccacggggctccctccgccggcaactgcccagggccaggggaggccccttag

SEQ ID NO: 20970 - DNA, 792 bp, Homo sapiens
  MAP TO AL078621.19; EXPRESSED IN PLACENTA, SIGNAL = 2.3; EXPRESSED IN ADULT LIVER, SIGNAL =   2; EXPRESSED IN HELA, SIGNAL = 4.2; NT HIT: gi14725103, EVALUE 0.00e+00; EST_HUMAN HIT: AL522987.1, EVALUE 0.00e+00; SWISSPROT HIT: P09661, EVALUE 0.00e+00
cgcgggggaaccggaggctgcaggatggtcaagctgacggcggagctgatcgagcaggcggcgcagtacaccaacgcagtgcgcgaccgggagctggacctccgggggtataaaattcccgtcattgaaaatctaggtgctacgttagaccagtttgatgctattgatttttctgacaatgagatcaggaaactggatggttttcctttgttgagaagactgaaaacattgttagggaacaacaacagaatatgccgtataggtgagggacttgatcaggctctgccctgtctgacagaactcattctcaccaataataggctcgtggaactgggtgatctggaccctctggcatctctcaaatcgctgacttacctaagtatcctaagaaatctggtaaccaataagaagcattacagattgtatgtgatttataaagttccgcaagtcagagtactggatttccagaaagtgaaactaaaagagcgtcaggaagcagagaaaatgttcaagggcaaacggggtgcacagcttgcaaaggatattgccaggagaagcaaaacttttaatccaggtgctggtttgccaactgacaaaaagaaaggtgggccatcgccaggggatgtagaaacaatcaagaatgctatagcaaatgcttcaactctggctgaagtggagcggctgaaggggttgctgcagtctggtcagatccctggcagagaacgcaaatcggggcccactggtgatggtgaagaagagatggaagaagacacagtcacaaacgggtcctga

SEQ ID NO: 20971 - DNA, 466 bp, Homo sapiens
  MAP TO AC006512.12; EXPRESSED IN ADULT LIVER, SIGNAL = 3.2; EXPRESSED IN PLACENTA, SIGNAL = 3.8; EXPRESSED IN FETAL LIVER, SIGNAL = 2.4; NT HIT: D38529.1, EVALUE 0.00e+00; EST_HUMAN HIT: AI092095.1, EVALUE 0.00e+00; SWISSPROT HIT: P54259, EVALUE 4.00e-49
gaactccctcggccacagtctccctccgatctggatagcttggacgggcggagccttaatgatgatggcagcagcgaccctagggatatcgaccaggacaaccgaagcacgtcccccagtatctacagccctggaagtgtggagaatgactctgactcatcttctggcctgtcccagggcccagcccgcccctaccacccacctccactctttcctccttcccctcaaccgccagacagcacccctcgacagccagaggctagctttgaaccccatccttctgtgacacccactggatatcatgctcccatggagccccccacatctcgaatgttccaggctcctcctggggcccctccccctcacccacagctctatcctgggggcactggtggagttttgtctggacccccaatgggtcccaaggggggaggggctgcctcatcagtggggggccctaatgggg

SEQ ID NO: 20972 - DNA, 1134 bp, Homo sapiens
  MAP TO AL096870.3; EXPRESSED IN ADULT LIVER, SIGNAL = 1.2; SWISSPROT HIT: Q15722, EVALUE 0.00e+00; NT HIT: AB008193.1, EVALUE 0.00e+00; EST_HUMAN HIT: BG911571.1, EVALUE 0.00e+00
ctagttcagttcgtttaacttgagagggctggaggcagtgaggctctcggaagggccgggctccagagcggcggggccgctcctagcggtctggcccaggctgcccccgcggcgcgtgctggacgcctcggagcccgtgccctccagcagcttggcgacgaagcccacgcccgccgagcgcagcaggccgccgccggcgcacgcgtacagcacggggttcacgctgctgctcaggaaggcgagtgcgatgagcacgttgcgggccaggctcagccgcttccccacgagccctaacccggcggcctggccggccagcgcgcggcccgcctcagccaggttcaccacgtggtagggcagccagaaggcggcgaaggtcaggatgatgagcaccaccaggcggccggtgcggcggctgcggcggaagcgccgggcctgtagccgacgccctatgtccgagtagctggccaccacagccaggaagggcagcaggaagcccgtgacagcctcgaagattagatggaaggcccggtgcccttcgctggggtaccgcgggaagcacaggctcatgttcgttttccagggcactactgtgcggtacgcgaggacgggtgtggccagcagaaaggacaacacccagatgcctgccagcacccgccgggccatcgccttggtgcgtagcttctgggacacaaaggggcgggccaccgccagtgagcggtctagactcatggccgtgataagcaggacgctggcgtacatgctgactccgcagacatagtgacacaggcggcaaccagccagtccaaaactccaggtgccttgggccaggaagtgaaggaaaaagggagcagtgagcaatacggccaggtcggccagggccaggttcagcaccatcagggcagtgacagagcgcttctgcatccttttcaggatactccacaccacaaagctgttgccgggaagccccacagccagcgccactgacagcaggatgatagccagcagagagatgaactctacacctagtgaggggggtgctgcagaagatgtagtgttcatggccgtcgggaggacctggagagtgagggcggacacacgcatgagagtagaggaccaagggtttcctgacgccat

SEQ ID NO: 20973 - DNA, 462 bp, Homo sapiens
  MAP TO AL163636.2; EXPRESSED IN ADULT LIVER, SIGNAL = 6.6; SWISSPROT HIT: P03950, EVALUE 2.00e-76; NT HIT: gi14751803, EVALUE 0.00e+00; EST_HUMAN HIT: BG564488.1, EVALUE 0.00e+00
gagcctgtgttggaagagatggtgatgggcctgggcgttttgttgttggtcttcgtgctgggtctgggtctgaccccaccgaccctggctcaggataactccaggtacacacacttcctgacccagcactatgatgccaaaccacagggccgggatgacagatactgtgaaagcatcatgaggagacggggcctgacctcaccctgcaaagacatcaacacatttattcatggcaacaagcgcagcatcaaggccatctgtgaaaacaagaatggaaaccctcacagagaaaacctaagaataagcaagtcttctttccaggtcaccacttgcaagctacatggaggttccccctggcctccatgccagtaccgagccacagcggggttcagaaacgttgttgttgcttgtgaaaatggcttacctgtccacttggatcagtcaattttccgtcgtccgtaa

SEQ ID NO: 20974 - DNA, 462 bp, Homo sapiens
  MAP TO AC005829.1; EXPRESSED IN ADULT LIVER, SIGNAL = 1.3; EXPRESSED IN FETAL LIVER, SIGNAL = 1.1; SWISSPROT HIT: Q9R1Z8, EVALUE 4.10e+00; EST_HUMAN HIT: AU142817.1, EVALUE 0.00e+00; NT HIT: gi13639211, EVALUE 0.00e+00
ccatgtgctcgggctccttggtgacctcgatggcgtaataggcagtaaagatgccccgggcaccagtgcgcatgttgtaggcctcgtaccagtagtcttcagcctggagctccactagcagagggtcatccacttccagctcaggttcgtcttcgtgtcgaggcacaaacctgaatatggtccggtgggtctgctcctgctcctcccggttgatgatgcaggagaacagcccgaaggactcggcactggaggagcgggagcggccactcatgaagatgttcaggaacttcttggagaaatggacgtcgggttcgtcaggcgtggagtccttggagaggcaggcaggaggctggggccgggaggcctcctcatattcctctccgatggctgactcatagggcgaggagacggaggcacagttgtcgtagacgatggccgagtcactctcgtcactgtagtctc

SEQ ID NO: 20975 - DNA, 556 bp, Homo sapiens
  MAP TO AL121907.2; EXPRESSED IN ADULT LIVER, SIGNAL = 2.5; EXPRESSED IN FETAL LIVER, SIGNAL =   2; NT HIT: gi9910237, EVALUE 9.00e-03; SWISSPROT HIT: P42694, EVALUE 3.00e-07; EST_HUMAN HIT: AI635083.1, EVALUE 3.10e+00
gagcccctgctacacgtggccctgctgaagcaggagccaggagccgacttctctctggtggctcccggcctcccgccaggccggctctacgcacggggtgagcgcttccgtgtgcccagctccactgccgacttccaggtgggagtgcgtgtgcaggctgcctcgttcggcacctttgagcaatgggtggtcttcgactttggccgccggccggtgctgctacaaaagctggggctgcagctgggccaggggcgtcgcccaggaccctgcaggaatctggcgctcggccaccctgaggagatggagcgctggcacactggcaaccgccacgtggtgcctggcgtggagcggacggccgagcagacggccctgatggccaagtacaagggccctgccctggccctggagttcaaccgcagcagcgtggcctcgggccccatctcaccaaccaactatcggcagaggatgcaccagtttctctatgaggaggaggcggctcagcagcagctggtggccaagtgagctgggggcaacaggagcagctggggtagcagga

SEQ ID NO: 20976 - DNA, 178 bp, Homo sapiens
  MAP TO CHR14.3; EXPRESSED IN BRAIN, SIGNAL = 1.5; EXPRESSED IN ADULT LIVER, SIGNAL = 1.4; EXPRESSED IN PLACENTA, SIGNAL = 1.3; NT HIT: AJ298878.1, EVALUE 4.00e-02; EST_HUMAN HIT: BG723333.1, EVALUE 3.60e+00; SWISSPROT HIT: O35242, EVALUE 1.90e+00
agatcacgggacttttcttttggctgcgtacgtacttggcttcagagagcctggaacacctggcagcgtcacagagacttgcctggagagtcccaggggtctctgtcaaggccttctcctcatccttgtcctcttcctcctcctgctcctcttcttcgccttggactttctccctttt

SEQ ID NO: 20977 - DNA, 205 bp, Homo sapiens
  MAP TO CHR18.3; EXPRESSED IN ADULT LIVER, SIGNAL = 1.2; EXPRESSED IN PLACENTA, SIGNAL = 1.4; EXPRESSED IN HELA, SIGNAL = 1.3; SWISSPROT HIT: P07947, EVALUE 7.40e-02
ccgcagaatttccacaggcacaatagagggcactacgtgccagatgtactgtgagccctctcttccttctgtctggtggtgttctaggttcagtactggcaaagcttcaatggtttccaaataaggtcgggaacgcccctctgcccccacctctttccgtctgtgcaagtgaagagaacttgtatgaagtccctttcctttgtcc

SEQ ID NO: 20978 - DNA, 79 bp, Homo sapiens
  MAP TO CHR18.3; EXPRESSED IN HEART, SIGNAL = 1.8; EXPRESSED IN LUNG, SIGNAL = 1.3; EXPRESSED IN FETAL LIVER, SIGNAL = 1.6; EXPRESSED IN BRAIN, SIGNAL =   1; EXPRESSED IN ADULT LIVER, SIGNAL = 1.1; EXPRESSED IN HELA, SIGNAL =   1; NT HIT: AL163227.2, EVALUE 3.70e+00; EST_HUMAN HIT: BE305142.1, EVALUE 1.40e+00; SWISSPROT HIT: O50468, EVALUE 8.20e+00
acagcctccatcaaacagaagattaatatttcagaagttgtcatgagcagttccgtcgactctgtcgctgccgatgtct

SEQ ID NO: 20979 - DNA, 245 bp, Homo sapiens
  MAP TO CHR14.3; EXPRESSED IN PLACENTA, SIGNAL = 2.9; EXPRESSED IN HELA, SIGNAL = 2.6; EXPRESSED IN LUNG, SIGNAL = 3.2; EXPRESSED IN FETAL LIVER, SIGNAL = 3.2; EXPRESSED IN BRAIN, SIGNAL = 2.2; EXPRESSED IN ADULT LIVER, SIGNAL = 2.5; NT HIT: AF234171.2, EVALUE 5.70e-02; EST_HUMAN HIT: AI267201.1, EVALUE 8.30e-02; SWISSPROT HIT: Q9XZC8, EVALUE 9.00e-01
gctaccgaggacctggggaagagaagggcagggaagcagagacagaggccaaacacaagtgcttctgccagcagggttcagagcacatctggcaaccccagctcccagccctgaagcaggcaccaggctacaaggacagacatagaccagggacaaggaaaaggaagggccagccccaaagcccttgggatgccttgtcaacaggccagtgtcctttggaaaacactccaaaggaaacaacaaat

SEQ ID NO: 20980 - DNA, 142 bp, Homo sapiens
  MAP TO CHR16.3; EXPRESSED IN BONE MARROW, SIGNAL = 1.7; EXPRESSED IN ADULT LIVER, SIGNAL = 1.7; EXPRESSED IN HELA, SIGNAL = 4.8; SWISSPROT HIT: Q06458, EVALUE 1.50e+00; NT HIT: gi15317796, EVALUE 2.00e-74; EST_HUMAN HIT: BG831800.1, EVALUE 3.00e-74
ctcaggacatgggctgccttgggtgtccagcgaggcgtcagctcctgcccgtccagcagcacgaaggcctctgagcccacaagaagcacatctgcaccggcgttccctgggacatgcatcaggtagcgcactgctccagagc

SEQ ID NO: 20981 - DNA, 129 bp, Homo sapiens
  MAP TO CHR19.3; EXPRESSED IN ADULT LIVER, SIGNAL = 2.1; EXPRESSED IN PLACENTA, SIGNAL = 2.1; EXPRESSED IN HELA, SIGNAL = 1.5; EXPRESSED IN HEART, SIGNAL = 4.8; EXPRESSED IN LUNG, SIGNAL = 1.7; EXPRESSED IN FETAL LIVER, SIGNAL = 4.4; EXPRESSED IN BRAIN, SIGNAL = 2.1; SWISSPROT HIT: Q01797, EVALUE 2.70e+00; NT HIT: gi14743012, EVALUE 1.70e+00; EST_HUMAN HIT: AA205278.1, EVALUE 1.00e-51
tgggggatgctcccctgcagatgtccagtctgctcaccccagccatggaagaagcctttctgctgacagagccctggaaagctgaggacccacaggcaaatgcagttaaggttaagatgaaaggggact

SEQ ID NO: 20982 - DNA, 253 bp, Homo sapiens
  MAP TO CHR16.3; EXPRESSED IN LUNG, SIGNAL =   9; EXPRESSED IN FETAL LIVER, SIGNAL = 6.5; EXPRESSED IN BRAIN, SIGNAL =   8; EXPRESSED IN HELA, SIGNAL = 9.2; EXPRESSED IN HEART, SIGNAL = 4.4; EXPRESSED IN BONE MARROW, SIGNAL =   7; EXPRESSED IN ADULT LIVER, SIGNAL = 6.9; EXPRESSED IN PLACENTA, SIGNAL = 8.2; EST_HUMAN HIT: BI765770.1, EVALUE 1.00e-110; SWISSPROT HIT: P15396, EVALUE 7.00e-05
gccccatcctggggcagtactcaccggtgaccagggtgaagtggcaggggctggtcatggtgacaaaggcgggggtcatgtagcgtgccttcaccccatctcgggccatggcgtccaggttgggggtgtccacgtcctgctcgtagttccagcggaagctgtcgaaggacaccaggagcagcttgttccgggagccctgactttgtaccggtgccccggccctgggagccaggagcgtgggcagagccacagt

SEQ ID NO: 20983 - DNA, 174 bp, Homo sapiens
  MAP TO CHR16.3; EXPRESSED IN FETAL LIVER, SIGNAL = 1.5; EXPRESSED IN BONE MARROW, SIGNAL = 1.4; EXPRESSED IN ADULT LIVER, SIGNAL = 1.4; EXPRESSED IN PLACENTA, SIGNAL = 1.4; EXPRESSED IN HELA, SIGNAL = 1.5; EST_HUMAN HIT: BF509789.1, EVALUE 4.00e-77; SWISSPROT HIT: Q95209, EVALUE 1.50e+00; NT HIT: M94764.1, EVALUE 3.90e-02
ttattccttgaaggctgtgctagccggataatcttgccgaatgcttttcgccagggtactgtccaagatccagcaaacacaaaagcttgcaggtggggggaccctccatgtcacgcagaggccaacgatttctccttctcttgtcaggaaacaaaatgtggtgtgaaagcttcc

SEQ ID NO: 20984 - DNA, 183 bp, Homo sapiens
  MAP TO CHR18.3; EXPRESSED IN LUNG, SIGNAL = 1.9; EXPRESSED IN BONE MARROW, SIGNAL =   2; EXPRESSED IN ADULT LIVER, SIGNAL =   2; EXPRESSED IN BRAIN, SIGNAL = 2.2; EXPRESSED IN PLACENTA, SIGNAL = 2.1; EXPRESSED IN HEART, SIGNAL = 2.5; EXPRESSED IN HELA, SIGNAL = 2.1; SWISSPROT HIT: Q57984, EVALUE 3.30e+00
agaactcaggatatgaattggagtcacggtcagatcatctcttctgggtctactgtctatgagaagaagggagaaggagatagaactagaaagccaaaaacaaacattctagtcattctccacccctgcctcagggccaacaataaggtattgggaaaagagggatttgaaacatctaaagag

SEQ ID NO: 20985 - DNA, 255 bp, Homo sapiens
  MAP TO CHR14.3; EXPRESSED IN HELA, SIGNAL = 1.4; EXPRESSED IN PLACENTA, SIGNAL = 1.2; EXPRESSED IN BONE MARROW, SIGNAL = 1.6; EXPRESSED IN BRAIN, SIGNAL = 1.1; EXPRESSED IN ADULT LIVER, SIGNAL = 1.1; NT HIT: gi15300468, EVALUE 0.00e+00; EST_HUMAN HIT: BG955187.1, EVALUE 0.00e+00; SWISSPROT HIT: P10819, EVALUE 9.70e+00
gtacctactgtcaacaacgggaagtggaggccattactgaaggtgtagaggaagatgaaggattttgctgttgtgaacctggccatattcctcacatgctttcatttaatgctgcatttagccagcgatggctagcttgggaagtgatagtcacaaagtacattctggagggttatagcatcactgataacagtgctgcttctatgcttcaagtctttgatcttcggaaagtactcaccacttactatgtcaagg

SEQ ID NO: 20986 - DNA, 271 bp, Homo sapiens
  MAP TO CHR16.3; EXPRESSED IN BRAIN, SIGNAL = 4.9; EXPRESSED IN ADULT LIVER, SIGNAL = 2.7; EXPRESSED IN HELA, SIGNAL = 2.5; EXPRESSED IN HEART, SIGNAL = 2.7; EXPRESSED IN BONE MARROW, SIGNAL = 3.1; NT HIT: gi14778274, EVALUE 0.00e+00; EST_HUMAN HIT: AL539381.1, EVALUE 0.00e+00; SWISSPROT HIT: Q29145, EVALUE 3.70e+00
tctgctgtgctgtgggctggcactcgatacctctggcaagaggatgattatctacctcactgataagaggcatcgcatggacgttctctggtctgtagtggagacaagcagttaacctagcaccatcctcatcctccctgcagaagccattagcagacctttgggccagggcagcctccctataattttcttcatctcttgctaatctctataataaggttgctttttctttcttagttgagtaaacaagtaagccacagtgtttgaaagg

SEQ ID NO: 20987 - DNA, 110 bp, Homo sapiens
  MAP TO CHR19.3; EXPRESSED IN BRAIN, SIGNAL = 2.9; EXPRESSED IN ADULT LIVER, SIGNAL = 2.8; EXPRESSED IN PLACENTA, SIGNAL = 3.6; EXPRESSED IN HEART, SIGNAL = 3.2; EXPRESSED IN LUNG, SIGNAL = 3.9; EXPRESSED IN FETAL LIVER, SIGNAL = 3.1; SWISSPROT HIT: P10301, EVALUE 2.00e-14; NT HIT: gi11424573, EVALUE 2.00e-55; EST_HUMAN HIT: BF992038.1, EVALUE 3.00e-55
cctggcgctgtgactccagatctgccttgttcccgaccaacacaacggggaagtcgtcgcggtccttgacccgcagaatctgcgtgaagagcttgcccacctcgttgaaa

SEQ ID NO: 20988 - DNA, 201 bp, Homo sapiens
  MAP TO CHR14.3; EXPRESSED IN PLACENTA, SIGNAL = 1.2; EXPRESSED IN HELA, SIGNAL = 2.7; EXPRESSED IN HEART, SIGNAL = 1.6; EXPRESSED IN LUNG, SIGNAL = 1.4; EXPRESSED IN BRAIN, SIGNAL = 1.6; EXPRESSED IN ADULT LIVER, SIGNAL = 1.2; SWISSPROT HIT: Q28651, EVALUE 8.00e-35; NT HIT: Z69030.1, EVALUE 1.00e-109; EST_HUMAN HIT: BG575933.1, EVALUE 1.00e-109
gatgttcctcctgctgatcaagagaagctttttatccagaagttacgtcagtgttgcgtcctctttgactttgtttctgatccactaagtgacctaaagtggaaggaagtaaaacgagctgctttaagtgaaatggtagaatatatcacccataatcggaatgtgatcacagagcctatttacccagaagtagtccatatg

SEQ ID NO: 20989 - DNA, 183 bp, Homo sapiens
  MAP TO CHR14.3; EXPRESSED IN PLACENTA, SIGNAL = 2.4; EXPRESSED IN HEART, SIGNAL = 3.1; EXPRESSED IN LUNG, SIGNAL = 2.3; EXPRESSED IN BONE MARROW, SIGNAL = 4.4; EXPRESSED IN ADULT LIVER, SIGNAL =   5; SWISSPROT HIT: P17350, EVALUE 3.80e-01; NT HIT: gi14748462, EVALUE 3.00e-92
ccataactgctgtgaggaccaatgttgctaacctcagcgatgcagccttatggaagatcaagagagctcgctttgcaagaaaccgccagaagagtgtacgttccctgagggacagcgtgaaagggcctgtggaatccaagagggcgctctccctccatgagaccctgacctccaaaattcgtt

SEQ ID NO: 20990 - DNA, 223 bp, Homo sapiens
  MAP TO CHR18.3; EXPRESSED IN BONE MARROW, SIGNAL = 1.3; EXPRESSED IN FETAL LIVER, SIGNAL = 1.8; EXPRESSED IN ADULT LIVER, SIGNAL =   1; EXPRESSED IN PLACENTA, SIGNAL = 0.88; EXPRESSED IN HEART, SIGNAL = 1.5; EXPRESSED IN LUNG, SIGNAL = 0.99; EST_HUMAN HIT: BG389052.1, EVALUE 3.00e-01; SWISSPROT HIT: Q9URU2, EVALUE 9.30e+00
ctacatactctatgatgagcatgatgccacactttgggatacagagtctatttcaagtaatctgttctctgacgtctttaaatatctagatatagacatagatagattcatccgttccagtgtatggttgagaaaatgtggaaatggtaatcgtatcacattgcaagagtgtcttcctactgcagatggtattgtcctttctgtacaaaaactgaccaactga

SEQ ID NO: 20991 - DNA, 183 bp, Homo sapiens
  MAP TO CHR14.3; EXPRESSED IN FETAL LIVER, SIGNAL = 3.1; EXPRESSED IN LUNG, SIGNAL = 1.7; EXPRESSED IN BONE MARROW, SIGNAL = 1.7; EXPRESSED IN BRAIN, SIGNAL = 1.7; EXPRESSED IN ADULT LIVER, SIGNAL = 3.7; EXPRESSED IN PLACENTA, SIGNAL = 3.6; EXPRESSED IN HELA, SIGNAL = 3.1; EST_HUMAN HIT: BE178092.1, EVALUE 1.00e-98; SWISSPROT HIT: O43847, EVALUE 8.50e-01; NT HIT: gi14748798, EVALUE 9.00e-99
ctttccatgaatttacttattggatccataatatcatcatcatttttagttttgtcagatggagacactacagcttctccatcttccatgtcatcttcatctgtgttaaaccacatctcttcttcatcttctagtgttctggcatctcttcgatatctgtgattcctcaaaatggaacgcata

SEQ ID NO: 20992 - DNA, 104 bp, Homo sapiens
  MAP TO CHR18.3; EXPRESSED IN HEART, SIGNAL = 1.5; EXPRESSED IN LUNG, SIGNAL = 1.2; EXPRESSED IN BONE MARROW, SIGNAL = 1.7; EXPRESSED IN FETAL LIVER, SIGNAL = 1.5; EXPRESSED IN BRAIN, SIGNAL = 1.5; EXPRESSED IN ADULT LIVER, SIGNAL = 1.3; EXPRESSED IN PLACENTA, SIGNAL = 1.2; NT HIT: gi12083618, EVALUE 1.30e+00; EST_HUMAN HIT: BF677617.1, EVALUE 1.90e+00
aacgagaggctcttgactttatcccaagagggcttatctaacatgctggtagactttaccctgaatgacaagatctctatgcaggcgtatggagccaaggagag

SEQ ID NO: 20993 - DNA, 194 bp, Homo sapiens
  MAP TO CHR14.3; EXPRESSED IN ADULT LIVER, SIGNAL = 2.6; EXPRESSED IN PLACENTA, SIGNAL = 1.7; EXPRESSED IN HEART, SIGNAL = 2.2; EXPRESSED IN HELA, SIGNAL =   6; NT HIT: gi14750860, EVALUE 1.00e-105; EST_HUMAN HIT: BG421450.1, EVALUE 1.00e-105; SWISSPROT HIT: P07566, EVALUE 1.10e+00
cttcctctgcagcacagccttgagcacgccacagagctcagcgaggcgcccagggggcttcagtgtgagggtcccacagctgcggagcacccctgtcagggcctccagcacggccatcaccacctggcgttcccgctccctgttcactgcctgcatgtaggatggcacgactcgggccagggcagcctgcaaag

SEQ ID NO: 20994 - DNA, 105 bp, Homo sapiens
  MAP TO CHR14.3; EXPRESSED IN FETAL LIVER, SIGNAL = 2.3; EXPRESSED IN BRAIN, SIGNAL = 1.7; EXPRESSED IN ADULT LIVER, SIGNAL = 1.3; EXPRESSED IN PLACENTA, SIGNAL = 1.5; NT HIT: gi13654882, EVALUE 2.00e-52; EST_HUMAN HIT: AI743840.1, EVALUE 2.00e-52; SWISSPROT HIT: P21522, EVALUE 7.00e-01
cttaagcacaggctctcgcatccgacatcagtacaaggctgggggttgttgggggacggttgagccttgggagggagggtcagggtctggacaggagccgcggcc

SEQ ID NO: 20995 - DNA, 124 bp, Homo sapiens
  MAP TO CHR14.3; EXPRESSED IN HEART, SIGNAL =  21; EXPRESSED IN HELA, SIGNAL =  25; EXPRESSED IN LUNG, SIGNAL =  18; EXPRESSED IN BONE MARROW, SIGNAL =  33; EXPRESSED IN FETAL LIVER, SIGNAL =  25; EXPRESSED IN BRAIN, SIGNAL =  40; EXPRESSED IN ADULT LIVER, SIGNAL =  25; EXPRESSED IN PLACENTA, SIGNAL =  27; SWISSPROT HIT: Q9ZJA1, EVALUE 3.50e+00; NT HIT: AE001594.1, EVALUE 4.10e-01; EST_HUMAN HIT: AI761040.1, EVALUE 1.50e-01
tgggttcttcatttaagttgaagaaaagaatgtacaggtttttcgggtattgtttattgtggaagcaaatttctacagctttttcacttttcttcttcctccagcagccctctcctctctgcct

SEQ ID NO: 20996 - DNA, 134 bp, Homo sapiens
  MAP TO CHR14.3; EXPRESSED IN FETAL LIVER, SIGNAL = 1.2; EXPRESSED IN ADULT LIVER, SIGNAL = 1.4; EXPRESSED IN BRAIN, SIGNAL = 1.9; EXPRESSED IN PLACENTA, SIGNAL = 1.5; EXPRESSED IN HELA, SIGNAL = 1.7; EXPRESSED IN LUNG, SIGNAL = 1.6; NT HIT: Y08017.1, EVALUE 1.10e-01
tccccaccatcacagttatggagcaagaagccatgttgatcaaaagaaaaggtgagagagaactaataaacccagaaagaagggttggtaggatgcaagagcaggagcttgggcagcagaacatgacaactcag

SEQ ID NO: 20997 - DNA, 97 bp, Homo sapiens
  MAP TO CHR14.3; EXPRESSED IN HELA, SIGNAL = 2.1; EXPRESSED IN PLACENTA, SIGNAL = 2.2; EXPRESSED IN HEART, SIGNAL = 2.3; EXPRESSED IN FETAL LIVER, SIGNAL = 1.9; EXPRESSED IN BONE MARROW, SIGNAL = 2.9; EXPRESSED IN LUNG, SIGNAL = 2.4; EXPRESSED IN BRAIN, SIGNAL =   3; EXPRESSED IN ADULT LIVER, SIGNAL = 3.2; EST_HUMAN HIT: AL530059.1, EVALUE 1.80e+00
atggctcagctaactgcagcaggaagaggcagacatggagctaaaagcacagcagctgggattccaggaaagcaggaagttctgcagttagcatcag

SEQ ID NO: 20998 - DNA, 157 bp, Homo sapiens
  MAP TO CHR18.3; EXPRESSED IN FETAL LIVER, SIGNAL = 1.6; EXPRESSED IN BRAIN, SIGNAL = 1.3; EXPRESSED IN ADULT LIVER, SIGNAL = 1.5; EXPRESSED IN PLACENTA, SIGNAL = 1.3; EXPRESSED IN BONE MARROW, SIGNAL = 1.7; EST_HUMAN HIT: AF150315.1, EVALUE 2.00e-01; SWISSPROT HIT: O51425, EVALUE 2.00e+00; NT HIT: AF161361.1, EVALUE 1.40e-01
aacatgcaaccagatatcccaggtccaaagaacatcgaaaaaatctttgcaaatgccacacactttctttttatcaccatcataaaatcaataaaaataaccatcagaatggctttagcaatccagaatatgcagaccatgtgtgcagtacaatgac

SEQ ID NO: 20999 - DNA, 378 bp, Homo sapiens
  MAP TO CHR19.3; EXPRESSED IN HELA, SIGNAL = 5.1; EXPRESSED IN HEART, SIGNAL =  49; EXPRESSED IN FETAL LIVER, SIGNAL =  40; EXPRESSED IN ADULT LIVER, SIGNAL = 4.8; NT HIT: gi16163770, EVALUE 6.00e-77; EST_HUMAN HIT: BG818171.1, EVALUE 2.00e-87; SWISSPROT HIT: P35789, EVALUE 2.00e-52
agaattcatactggagaaaaaaaccatacaaatgtgaagactgtggcaaagcttttaacgaatcctcaacacttactgcacataagagaattcatactggagagacaccttacaaatgtgaagaatgtggcaaagcttttaaccattcctcacaccttactacacataagagaattcatactggagagaaaccatacaaatgtgaagaatatggcaaagcttttagccaatcttcatcacttactaaacataagataatttatactggggagcaaccttacaaatgtgaagaatgtgacaaagcttttaacctatctgcaagccttattaagaataagaaaattcataccagggagaaactctacaaaaccagaaagt

SEQ ID NO: 21000 - DNA, 206 bp, Homo sapiens
  MAP TO CHR14.3; EXPRESSED IN BONE MARROW, SIGNAL = 1.9; EXPRESSED IN BRAIN, SIGNAL = 2.6; EXPRESSED IN ADULT LIVER, SIGNAL = 2.1; EXPRESSED IN PLACENTA, SIGNAL = 1.7; EXPRESSED IN HELA, SIGNAL = 1.7; EXPRESSED IN HEART, SIGNAL = 2.1; EXPRESSED IN LUNG, SIGNAL = 2.5; NT HIT: AF129002.1, EVALUE 3.00e-03; EST_HUMAN HIT: BI907343.1, EVALUE 6.90e-02; SWISSPROT HIT: P36953, EVALUE 5.50e+00
cggcagagactgatcaactcggccaatggtgtgagcagtaagccgcttcaaaacgggaggcacgagaacattgagaacgggaatgttcctgtggaaaaccccgaagaccctcagcagaatcaggagcagcagccgccgccacagccaccaccgccagagccagagccggtggaggctgacttcctgtcccccttctccgtgccggg

SEQ ID NO: 21001 - DNA, 135 bp, Homo sapiens
  MAP TO CHR19.3; EXPRESSED IN HELA, SIGNAL = 3.1; EXPRESSED IN LUNG, SIGNAL = 3.7; EXPRESSED IN ADULT LIVER, SIGNAL = 3.3; EXPRESSED IN BRAIN, SIGNAL = 1.5; EXPRESSED IN PLACENTA, SIGNAL = 4.4; NT HIT: gi13630697, EVALUE 1.00e-69; EST_HUMAN HIT: AW393076.1, EVALUE 8.00e-53; SWISSPROT HIT: O15444, EVALUE 4.00e-20
gattctacctccccaagagacacaggaaggtgtgtgggaaccccaaaagcagggaggtgcagagagccatgaagctcctggatgctcgaaataaggtttttgcaaagctccaccacaacacgcagaccttccaag

SEQ ID NO: 21002 - DNA, 168 bp, Homo sapiens
  MAP TO CHR18.3; EXPRESSED IN LUNG, SIGNAL = 1.7; EXPRESSED IN BONE MARROW, SIGNAL = 1.7; EXPRESSED IN FETAL LIVER, SIGNAL = 1.8; EXPRESSED IN ADULT LIVER, SIGNAL = 1.8; EXPRESSED IN BRAIN, SIGNAL = 1.6; EXPRESSED IN HELA, SIGNAL = 1.4; EXPRESSED IN PLACENTA, SIGNAL = 1.9; NT HIT: D87356.1, EVALUE 5.80e-01; SWISSPROT HIT: P15535, EVALUE 2.60e+00
agataatgtagctgtgcctttatatttgaaggtcagtgtcctctgggacgacagcactctaaagaacgtgtttacttccttgtacatgtgtctgtccaggtcccagagcatccagagcaggcctgtgttgaggaagtaccttttgggatggtgggtgacgctgggggt

SEQ ID NO: 21003 - DNA, 279 bp, Homo sapiens
  MAP TO CHR16.3; EXPRESSED IN LUNG, SIGNAL = 2.4; EXPRESSED IN BRAIN, SIGNAL = 1.9; EXPRESSED IN ADULT LIVER, SIGNAL = 1.5; EXPRESSED IN PLACENTA, SIGNAL = 2.1; EXPRESSED IN HELA, SIGNAL = 2.4; NT HIT: gi14777947, EVALUE 0.00e+00; EST_HUMAN HIT: AW383305.1, EVALUE 0.00e+00; SWISSPROT HIT: Q16651, EVALUE 4.00e-11
cctccatcttggatgctcccccagcctgagatccagcagtgggtgtttggagggaggtggatagaggcatcaggtaggcagatgggcaggacccgctctgagaactgtatggagcgctcgagacgcaccagggcaatgtctgcacaggcaccttccttccaggaatacacagggtggggctccacccaggcaacacccaccttctgggaccgagagccagggttccccagctgccaggcccccagcagcacagagaacaggtatggtttgttcaggttg

SEQ ID NO: 21004 - DNA, 171 bp, Homo sapiens
  MAP TO CHR16.3; EXPRESSED IN HELA, SIGNAL = 5.1; EXPRESSED IN HEART, SIGNAL = 3.9; EXPRESSED IN LUNG, SIGNAL = 3.1; EXPRESSED IN BONE MARROW, SIGNAL = 2.5; EXPRESSED IN BRAIN, SIGNAL = 6.8; EXPRESSED IN ADULT LIVER, SIGNAL = 3.9; SWISSPROT HIT: O43237, EVALUE 2.00e-28; NT HIT: gi14785654, EVALUE 1.00e-91; EST_HUMAN HIT: AA195065.1, EVALUE 7.00e-91
cctttgtgcacaccaccaacaccgggatccccaggttatgagtcagcacattgtcacccagaggcagggcaacattttcttcatcggagcctgaggtcagagggcctcttctctgtggggaaccttgacaaccttcttcaggttccatatagtcttgaaaatctttcacaa

SEQ ID NO: 21005 - DNA, 120 bp, Homo sapiens
  MAP TO CHR14.3; EXPRESSED IN HEART, SIGNAL = 1.7; EXPRESSED IN HELA, SIGNAL = 3.6; EXPRESSED IN PLACENTA, SIGNAL = 2.4; EXPRESSED IN FETAL LIVER, SIGNAL =   2; EXPRESSED IN LUNG, SIGNAL = 3.1; EXPRESSED IN BONE MARROW, SIGNAL = 2.7; EXPRESSED IN ADULT LIVER, SIGNAL =   3; EXPRESSED IN BRAIN, SIGNAL = 1.5; SWISSPROT HIT: Q05979, EVALUE 7.90e+00; EST_HUMAN HIT: BF105094.1, EVALUE 9.10e+00
gatgctgctgggccagatcccaagctcatcaacacttcctgtgtagctgtgggagtgggagtcccaaaggaagatgataaagcctctatcctcagtggtactttgccaaacggggactaa

SEQ ID NO: 21006 - DNA, 97 bp, Homo sapiens
  MAP TO CHR18.3; EXPRESSED IN ADULT LIVER, SIGNAL = 1.3; EXPRESSED IN HELA, SIGNAL = 1.9; EXPRESSED IN FETAL LIVER, SIGNAL = 0.86; EXPRESSED IN BONE MARROW, SIGNAL = 0.93; NT HIT: gi14761879, EVALUE 3.00e-47; EST_HUMAN HIT: AA314211.1, EVALUE 5.00e-47; SWISSPROT HIT: Q06136, EVALUE 4.00e-12
gcacaggagaaactgggtccagtggacatgctggtaaattgtgcaggaatggcagtgtcaggaaaatttgaagatcttgaagttagtacctttgaag

SEQ ID NO: 21007 - DNA, 185 bp, Homo sapiens
  MAP TO CHR19.3; EXPRESSED IN HELA, SIGNAL = 2.9; EXPRESSED IN LUNG, SIGNAL = 3.1; EXPRESSED IN FETAL LIVER, SIGNAL = 2.5; EXPRESSED IN BONE MARROW, SIGNAL = 3.2; EXPRESSED IN BRAIN, SIGNAL =   3; EXPRESSED IN ADULT LIVER, SIGNAL = 5.3; EXPRESSED IN PLACENTA, SIGNAL = 2.7; SWISSPROT HIT: O18835, EVALUE 3.30e+00; NT HIT: gi7705906, EVALUE 2.00e-50; EST_HUMAN HIT: BG709476.1, EVALUE 3.00e-50
ccgaaggcgcgcacgatcccagctccgatgccgcgcccgcccccggtcacgaccaccaccttcccggcatagcgcgttcccgtagccatcccgtgtacgtcggtctctctctctctctactctgggcctctttcacctccaaagccccgtgaggccgtcgcatcaaatcctcaatagaggctgga

SEQ ID NO: 21008 - DNA, 221 bp, Homo sapiens
  MAP TO CHR16.3; EXPRESSED IN HELA, SIGNAL = 3.4; EXPRESSED IN HEART, SIGNAL =   2; EXPRESSED IN LUNG, SIGNAL = 3.3; EXPRESSED IN FETAL LIVER, SIGNAL = 2.4; EXPRESSED IN ADULT LIVER, SIGNAL =   2; SWISSPROT HIT: Q10654, EVALUE 2.80e-01; EST_HUMAN HIT: BF445013.1, EVALUE 1.00e-113; NT HIT: gi15315213, EVALUE 1.00e-121
ctatactgacgttgcgcatctcctgggtgacctgtacttccatgttgcggctgtcgcgcttctcccgggcacgcttgctgttcttggagcccacgccatagtcccccaggggctgcaggctctcgttgaggggtgtgacggcggccgagggcacggaggatgtgggcgtgttggacttggtgcctgtggtgctgggtgtggcggccgccgaggactggcct

SEQ ID NO: 21009 - DNA, 213 bp, Homo sapiens
  MAP TO CHR14.3; EXPRESSED IN FETAL LIVER, SIGNAL = 1.3; EXPRESSED IN BRAIN, SIGNAL = 4.1; EXPRESSED IN ADULT LIVER, SIGNAL = 5.2; EXPRESSED IN PLACENTA, SIGNAL = 4.7; EXPRESSED IN LUNG, SIGNAL = 7.7; SWISSPROT HIT: O15117, EVALUE 1.70e-01; EST_HUMAN HIT: BE297173.1, EVALUE 1.00e-116; NT HIT: gi14916458, EVALUE 1.00e-116
ctgctgccctccttctaatttcttgttcaacttctgcagttgggtaaaaatctggaggttttcttgctgtagcttctgttgttcagccagacactttaacaccagaccctgcaatctctcaacctccacctgcagagagctgcacgcacacgcaggaggagtcagtggtgttcccttcccagcacaggttactgcaggattcagccgaggtga

SEQ ID NO: 21010 - DNA, 136 bp, Homo sapiens
  MAP TO CHR14.3; EXPRESSED IN HELA, SIGNAL = 2.9; EXPRESSED IN HEART, SIGNAL = 2.6; EXPRESSED IN LUNG, SIGNAL = 2.5; EXPRESSED IN FETAL LIVER, SIGNAL = 4.4; EXPRESSED IN BRAIN, SIGNAL = 3.8; EXPRESSED IN ADULT LIVER, SIGNAL = 3.6; EXPRESSED IN PLACENTA, SIGNAL = 3.2; SWISSPROT HIT: Q09381, EVALUE 4.50e+00; NT HIT: X04804.1, EVALUE 4.60e-01
ttgctcgtagatggatcgttcgcacatttgcagtaaaacctaaatgccaaattttcctccttcaagttcttgagagagttattttcatcactttcatttcttcctgtaccacagccattgctcatctctttgttcc

SEQ ID NO: 21011 - DNA, 194 bp, Homo sapiens
  MAP TO CHR14.3; EXPRESSED IN HEART, SIGNAL = 3.2; EXPRESSED IN HELA, SIGNAL =   3; EXPRESSED IN LUNG, SIGNAL = 2.1; EXPRESSED IN ADULT LIVER, SIGNAL = 2.3; SWISSPROT HIT: Q13046, EVALUE 3.30e+00; NT HIT: gi14748360, EVALUE 1.00e-105; EST_HUMAN HIT: BI963919.1, EVALUE 1.00e-105
ttattcctcatgtttctctgacttgagtgggggttttggaggttcaccttggggtacattttctcttgcctcatcttctttagcctcgggttcagctgggagagaagaagaaggtgaattccccaagcaggcccccaacactgacccaacagaggccaggaggatgttggatgatgtggagagtccagctgccc

SEQ ID NO: 21012 - DNA, 141 bp, Homo sapiens
  MAP TO CHR19.3; EXPRESSED IN HELA, SIGNAL = 2.6; EXPRESSED IN LUNG, SIGNAL = 2.4; EXPRESSED IN BONE MARROW, SIGNAL = 1.9; EXPRESSED IN ADULT LIVER, SIGNAL = 1.9; SWISSPROT HIT: P34186, EVALUE 1.50e+00; NT HIT: AB040965.1, EVALUE 3.00e-73; EST_HUMAN HIT: AL558824.1, EVALUE 4.00e-73
cgtttcggccgcacggtgagggcggcgctgtatgcgcctaaggagccggtgctggactacaacatggtcatcatcttcatcatggctgtgggcaccgtcgccatcggcggctactgggccgggagtcgggacgtgaagaag

SEQ ID NO: 21013 - DNA, 151 bp, Homo sapiens
  MAP TO CHR14.3; EXPRESSED IN HEART, SIGNAL = 6.9; EXPRESSED IN LUNG, SIGNAL =  10; EXPRESSED IN BONE MARROW, SIGNAL = 9.4; EXPRESSED IN ADULT LIVER, SIGNAL =  16; EXPRESSED IN PLACENTA, SIGNAL =  10; EXPRESSED IN HELA, SIGNAL = 8.7; NT HIT: U67781.1, EVALUE 1.30e-01; SWISSPROT HIT: P70447, EVALUE 3.90e-01
cagcaggtggccagagtccttcagcttggacttgtacagcatccactggtagcgcagatcttccagctcatccgaggtcccccttgctggcccgagacgaaggaggttctcaaagagatgctgaccttctggcacccgagcctccagctcc

SEQ ID NO: 21014 - DNA, 176 bp, Homo sapiens
  MAP TO CHR18.3; EXPRESSED IN ADULT LIVER, SIGNAL = 2.6; EXPRESSED IN PLACENTA, SIGNAL = 3.1; EXPRESSED IN HELA, SIGNAL =   4; EXPRESSED IN LUNG, SIGNAL = 2.4; EXPRESSED IN FETAL LIVER, SIGNAL = 2.7; EXPRESSED IN BRAIN, SIGNAL = 3.3; EST_HUMAN HIT: AA316156.1, EVALUE 2.00e-94; NT HIT: gi4505788, EVALUE 1.00e-94; SWISSPROT HIT: P36952, EVALUE 7.00e-26
cctgtccaatttcatttgcagtgtcacctttagcacccacttgagcaagtgacagagaggtggagagacagattggagagaagaggacattgcccagtggctccttttcacatagttgtttgaacagatcaacggcaaaagccgaatttgctagttgcagggcatccattgcgggc

SEQ ID NO: 21015 - DNA, 192 bp, Homo sapiens
  MAP TO CHR14.3; EXPRESSED IN PLACENTA, SIGNAL = 1.7; EXPRESSED IN HEART, SIGNAL = 1.7; EXPRESSED IN LUNG, SIGNAL = 1.9; EXPRESSED IN BRAIN, SIGNAL = 1.7; EXPRESSED IN ADULT LIVER, SIGNAL =   2; SWISSPROT HIT: P50447, EVALUE 5.00e-09; EST_HUMAN HIT: AA458648.1, EVALUE 8.00e-97; NT HIT: gi13386037, EVALUE 8.00e-13
ttattttccaatagggttaacaatctttcccaggaagagcacggaaggtattttctcgctgtaaatcagcagcagatagggtttgtctatcttgacgacgagtggtgtctccatgggcagagtctgtgctccggtgccagcggccccttccgtacccctctcatccatcttcagctcagccttgtgcacagc

SEQ ID NO: 21016 - DNA, 240 bp, Homo sapiens
  MAP TO CHR14.3; EXPRESSED IN FETAL LIVER, SIGNAL = 1.3; EXPRESSED IN BRAIN, SIGNAL = 1.4; EXPRESSED IN ADULT LIVER, SIGNAL = 0.96; EXPRESSED IN PLACENTA, SIGNAL =   1; SWISSPROT HIT: P15350, EVALUE 2.30e+00; EST_HUMAN HIT: AA018501.1, EVALUE 1.00e-128; NT HIT: gi14750002, EVALUE 0.00e+00
ctgacgaaatatctctgtcacaaagtttacattactccttttagaagaaaaaactctgcgaactatttcaatgtctgtgagatgttcttcatcaatactacagagactagatgagctaggttctcgctccgtgagagtgcttgtattggaatgagactgttcgggttctgtagttctgtctgttttatcagcattatcatttttgctttcttctctggatactaaactagcagctgctct

SEQ ID NO: 21017 - DNA, 161 bp, Homo sapiens
  MAP TO CHR18.3; EXPRESSED IN FETAL LIVER, SIGNAL = 1.2; EXPRESSED IN ADULT LIVER, SIGNAL = 1.2; EXPRESSED IN PLACENTA, SIGNAL =   1; SWISSPROT HIT: P09439, EVALUE 8.70e-01; EST_HUMAN HIT: AA480493.1, EVALUE 2.10e-01; NT HIT: U67550.1, EVALUE 9.00e-03
gatttccgtaataaccagactagagttggcagcccatgcttgtttggcatcactgcctgcattacgttgcctacagctcatccgccctgatcccttaaagaaacttgaaaaaacagaaatatgtcctttatcaacaccataagctgctgctgccacaagtc

SEQ ID NO: 21018 - DNA, 269 bp, Homo sapiens
  MAP TO CHR14.3; EXPRESSED IN ADULT LIVER, SIGNAL = 2.5; EXPRESSED IN PLACENTA, SIGNAL = 2.5; EXPRESSED IN HELA, SIGNAL = 2.2; EXPRESSED IN FETAL LIVER, SIGNAL = 1.5; EXPRESSED IN LUNG, SIGNAL = 3.2; EXPRESSED IN BONE MARROW, SIGNAL = 2.4; SWISSPROT HIT: P16808, EVALUE 2.90e+00; EST_HUMAN HIT: AL600013.1, EVALUE 1.40e+00; NT HIT: AF409115.1, EVALUE 9.80e-01
agggaaagcaacccactgtggccccgaaagacccagaccgccagcggccccgggcagccgccgagggcaccggctcacacttcctgcatttcacaagctcttgcttggcatgcattgatgacttgaactggggggttaacccaaaaagatcaagtgcgagctcaaggcggatgatgagaacagattcggggctggttaacctcagagagcgggagtccgttggtgctaatgaggccaagggagcccggctcctttctgcccccaggcag

SEQ ID NO: 21019 - DNA, 430 bp, Homo sapiens
  MAP TO CHR14.3; EXPRESSED IN HELA, SIGNAL = 2.9; EXPRESSED IN PLACENTA, SIGNAL = 1.8; EXPRESSED IN FETAL LIVER, SIGNAL = 2.8; EXPRESSED IN LUNG, SIGNAL = 2.5; EXPRESSED IN ADULT LIVER, SIGNAL = 2.2; SWISSPROT HIT: P45252, EVALUE 4.80e+00; EST_HUMAN HIT: R54506.1, EVALUE 0.00e+00; NT HIT: gi16191270, EVALUE 0.00e+00
caaacagtcctgcagtgcgtgctcataagcctttcgcgctttcaaaatgtgaacagccaacacctgtccagtgtagggcccataggggctgctctcagtcagcttggttaatatgtgaacagctcgagctgtggcagcccttctcacttctggcgacagctccacctccagctcagcatagagcagactgagctcacagaggtcagagtctttcagttctctgcttcctgccatgccaagtgctgtgtcaaaaacttttctggcatcctccgtgttgccaagcaaccactccagatgtgcatactgcttccacaggcaaaagttgttgcagttttctggctccttaaggagattcttggctagttttttgcagttcttcccttgagactttaatctcttcttgtttttagtgtgcaggcaccaaatgacc

SEQ ID NO: 21020 - DNA, 147 bp, Homo sapiens
  MAP TO CHR14.3; EXPRESSED IN HELA, SIGNAL = 2.3; EXPRESSED IN HEART, SIGNAL = 2.1; EXPRESSED IN FETAL LIVER, SIGNAL = 1.6; EXPRESSED IN ADULT LIVER, SIGNAL =   2; EXPRESSED IN BRAIN, SIGNAL = 2.2; SWISSPROT HIT: P06275, EVALUE 1.50e+00; EST_HUMAN HIT: BF530119.1, EVALUE 3.00e-77; NT HIT: AP003017.1, EVALUE 3.20e-02
cgcggctgtatttgcggcctgtgcgagtaggcgcttgggcactcagtctccctggcgagcgacgggcagaaatctcgaaccagtggagcgcactcgtaacctggatcccagaaggtcgcgaaggcagtaccgtttcctcagcggcgg

SEQ ID NO: 21021 - DNA, 123 bp, Homo sapiens
  MAP TO CHR18.3; EXPRESSED IN BRAIN, SIGNAL = 9.6; EXPRESSED IN ADULT LIVER, SIGNAL = 8.2; EXPRESSED IN PLACENTA, SIGNAL = 6.2; EXPRESSED IN HELA, SIGNAL = 4.9; EXPRESSED IN HEART, SIGNAL =  21; EXPRESSED IN LUNG, SIGNAL = 5.8; EXPRESSED IN BONE MARROW, SIGNAL =  14; EXPRESSED IN FETAL LIVER, SIGNAL =  27; NT HIT: AL583922.1, EVALUE 6.30e+00
gactccatgaagaagaaggagaaggagaaggcgaaggagaaggcgaaggagaagaagaaggagaaggagaaggagaaggagaaggaatagtaatgttaaatcaaagcagcaatgctgtgaggt

SEQ ID NO: 21022 - DNA, 456 bp, Homo sapiens
  MAP TO CHR18.3; EXPRESSED IN LUNG, SIGNAL = 3.5; EXPRESSED IN BONE MARROW, SIGNAL = 2.9; EXPRESSED IN BRAIN, SIGNAL = 2.3; EXPRESSED IN ADULT LIVER, SIGNAL = 5.6; EXPRESSED IN HELA, SIGNAL = 2.7; NT HIT: AL161498.2, EVALUE 4.30e-01; SWISSPROT HIT: Q64623, EVALUE 1.40e+00; EST_HUMAN HIT: BI912100.1, EVALUE 6.30e-01
atgtatgtgtgcaggaatggcatcagactagacacagactggcacagagcctgccaaggtgaagacaatgcaccttataaaacagttacagtaacatctattgcatacatgaaaacaatttgcagcagattaaatacccttaagaaaggaggctaccagacgaaccacctcaacaccaaagcagggtttggtcggcatctgacagcgctgtggacagtggccagatgtggcccagcggctctccttggatctgacagcactgtggacagtggccagatgtggccccagcaatctgacagcgctgcggacagtggccagatgtggcccagcggctctcctcgggctgtttcttccaggagcatgagcttcttctctatttcggtgagattctctgcctgagttggcgttctgaggagcattcagaaattgtttgttctgaatttctaaaacacgaac

SEQ ID NO: 21023 - DNA, 180 bp, Homo sapiens
  MAP TO CHR14.3; EXPRESSED IN ADULT LIVER, SIGNAL = 3.2; EXPRESSED IN BRAIN, SIGNAL =   3; EXPRESSED IN PLACENTA, SIGNAL = 2.9; EXPRESSED IN HEART, SIGNAL = 2.9; EXPRESSED IN HELA, SIGNAL = 4.4; EXPRESSED IN LUNG, SIGNAL =   4; EXPRESSED IN BONE MARROW, SIGNAL = 3.3; EST_HUMAN HIT: BE300684.1, EVALUE 8.00e-97; NT HIT: gi14784669, EVALUE 5.00e-97; SWISSPROT HIT: Q9ZL91, EVALUE 2.50e+00
taggtcttctctgtccctttactgctgctgcacagagatgatataaaagaggctctttggctatttgcattttgcttcctcttcttttccagattacagtatgaagctttattttctttgtacaagcttaaaatttcaacatcatcatccgccaaagttgttcctcccttttcggaggat

SEQ ID NO: 21024 - DNA, 132 bp, Homo sapiens
  MAP TO CHR14.3; EXPRESSED IN HELA, SIGNAL = 1.5; EXPRESSED IN PLACENTA, SIGNAL = 1.1; EXPRESSED IN HEART, SIGNAL = 2.5; EXPRESSED IN BONE MARROW, SIGNAL = 0.66; EXPRESSED IN ADULT LIVER, SIGNAL = 1.5; EXPRESSED IN BRAIN, SIGNAL =   2; SWISSPROT HIT: Q11125, EVALUE 3.50e+00; EST_HUMAN HIT: AA132886.1, EVALUE 2.00e-68; NT HIT: gi15828471, EVALUE 6.90e+00
catttcttaaaatgcttcacttcaggttcttggtcttggaaataaatttcaaggtgcattgtatccattttaagctgctttattttattttcacttgtatgagcaaattcttgggggagctttgcttttctt

SEQ ID NO: 21025 - DNA, 115 bp, Homo sapiens
  MAP TO CHR16.3; EXPRESSED IN BRAIN, SIGNAL = 2.1; EXPRESSED IN ADULT LIVER, SIGNAL = 1.8; EXPRESSED IN PLACENTA, SIGNAL = 1.2; EXPRESSED IN HELA, SIGNAL = 1.2; EXPRESSED IN HEART, SIGNAL = 3.9; SWISSPROT HIT: P23083, EVALUE 3.00e-10; EST_HUMAN HIT: BG745289.1, EVALUE 5.00e-32; NT HIT: M99640.1, EVALUE 1.00e-50
cgtgtaaagtatttggtgaaggtgtatctggaagcctggcaggagaccttcactgaggacccaggcttcttcacctcagccccaggctgcaacagctgaacctgggaatggacac

SEQ ID NO: 21026 - DNA, 124 bp, Homo sapiens
  MAP TO CHR19.3; EXPRESSED IN HEART, SIGNAL = 6.6; EXPRESSED IN LUNG, SIGNAL =  12; EXPRESSED IN FETAL LIVER, SIGNAL = 5.4; EXPRESSED IN BONE MARROW, SIGNAL =  15; EXPRESSED IN BRAIN, SIGNAL =  13; EXPRESSED IN ADULT LIVER, SIGNAL = 9.8; EXPRESSED IN PLACENTA, SIGNAL = 9.9; EXPRESSED IN HELA, SIGNAL =  14; SWISSPROT HIT: Q99439, EVALUE 1.00e-18; EST_HUMAN HIT: BI767035.1, EVALUE 5.00e-63; NT HIT: gi14765608, EVALUE 4.00e-63
cgtgcataagatagttccatccttcaggcccttctggaagtcggggccgatggagaggccggtgagtccctcgatccaggtgcggagctctgcctccttctgggggtcatatttggacaggagc

SEQ ID NO: 21027 - DNA, 102 bp, Homo sapiens
  MAP TO CHR18.3; EXPRESSED IN BONE MARROW, SIGNAL = 6.6; EXPRESSED IN BRAIN, SIGNAL = 1.5; EXPRESSED IN ADULT LIVER, SIGNAL = 1.6; EXPRESSED IN HELA, SIGNAL = 1.3; NT HIT: gi15312171, EVALUE 1.30e+00; EST_HUMAN HIT: BF790431.1, EVALUE 4.80e-01
ctagcaaggttaattggcctcacaacaccagtgcaaaagcctatcagaatagtcagccaggtcctgaagatctggagtccaaaacagaccacaaggccagag

SEQ ID NO: 21028 - DNA, 235 bp, Homo sapiens
  MAP TO CHR14.3; EXPRESSED IN ADULT LIVER, SIGNAL = 1.3; EXPRESSED IN LUNG, SIGNAL =   1; EXPRESSED IN FETAL LIVER, SIGNAL = 1.4; SWISSPROT HIT: Q07411, EVALUE 2.80e+00; EST_HUMAN HIT: R87787.1, EVALUE 1.00e-59
ctgcagaatctctgatcagacagaacatttgctccaaagccattgaatgggctgggatggagcatgcatggttttagcttcatctcccacaactgtggctttgttctgtgttggtggcaggtggtttccaaaaggaaaagctttgggagatagaagtcctcgttttgacctctgccctccttgtacaccaggagccagaaaaacttcatctcttttacaagaaacattgagattc

SEQ ID NO: 21029 - DNA, 113 bp, Homo sapiens
  MAP TO CHR18.3; EXPRESSED IN BONE MARROW, SIGNAL = 1.3; EXPRESSED IN BRAIN, SIGNAL = 1.3; EXPRESSED IN ADULT LIVER, SIGNAL =   2; EXPRESSED IN PLACENTA, SIGNAL = 1.6; EXPRESSED IN HELA, SIGNAL = 1.4; EXPRESSED IN HEART, SIGNAL =   2; EXPRESSED IN LUNG, SIGNAL = 1.4; NT HIT: AB025342.1, EVALUE 5.70e+00; SWISSPROT HIT: Q92890, EVALUE 4.60e+00
aattgtcatggtgtcaatcatcatccccactactctcgttggcctggtattgctaacttcaacttcatagaccttgggctcagagttggcagcccacacatcctccacaatac

SEQ ID NO: 21030 - DNA, 146 bp, Homo sapiens
  MAP TO CHR14.3; EXPRESSED IN PLACENTA, SIGNAL = 1.4; EXPRESSED IN HELA, SIGNAL = 1.6; EXPRESSED IN ADULT LIVER, SIGNAL = 1.2; EST_HUMAN HIT: BE708498.1, EVALUE 2.90e+00; NT HIT: gi15530171, EVALUE 3.20e-02; SWISSPROT HIT: P37385, EVALUE 4.50e+00
gctcttttagagcccagaaatggcagtcacctttcccatgtgtttctgcgtctttggcatcaccctgtgtcagcagcactgagtgcctaggtgagccaccctaccctatgctgcccgtgcagtctagggggcaagatgtcacatgg

SEQ ID NO: 21031 - DNA, 111 bp, Homo sapiens
  MAP TO CHR16.3; EXPRESSED IN ADULT LIVER, SIGNAL = 1.2; EXPRESSED IN LUNG, SIGNAL = 1.6; SWISSPROT HIT: P47551, EVALUE 7.90e+00; EST_HUMAN HIT: AI742342.1, EVALUE 4.00e-17; NT HIT: gi8922994, EVALUE 3.00e-17
gaggtgctgacgctgtggcagctgtggtcccggggccagcaggtcattgtctactacgaggaccagtgctctgtgggccggcaccacgagctgtagccaggaatcttctac

SEQ ID NO: 21032 - DNA, 186 bp, Homo sapiens
  MAP TO CHR14.3; EXPRESSED IN FETAL LIVER, SIGNAL = 0.92; EXPRESSED IN BRAIN, SIGNAL = 1.6; EXPRESSED IN ADULT LIVER, SIGNAL = 1.7; SWISSPROT HIT: Q93034, EVALUE 3.30e-02; EST_HUMAN HIT: BF212408.1, EVALUE 9.60e-01; NT HIT: X65657.1, EVALUE 6.50e-01
tggtgtgtctcattcatcatgagatggtgggtgatgcaggtgatgagttaatgataattaagcccacgctgtggaacccatgggagaagcatgtaatagccaatagtaatatcagcaaggccttcctcaattccacgcagaggaagacccaaaaggatcagtggacccagggccgtgggataccat

SEQ ID NO: 21033 - DNA, 201 bp, Homo sapiens
  MAP TO CHR14.3; EXPRESSED IN ADULT LIVER, SIGNAL = 1.2; EXPRESSED IN HELA, SIGNAL = 0.99; EXPRESSED IN PLACENTA, SIGNAL =   1; EXPRESSED IN FETAL LIVER, SIGNAL =   1; EXPRESSED IN BRAIN, SIGNAL = 2.5; SWISSPROT HIT: P02831, EVALUE 4.30e-02; EST_HUMAN HIT: H11386.1, EVALUE 4.00e-34; NT HIT: gi14748462, EVALUE 1.00e-109
cacttatctgcgggactccagcttcgcctccaggctattcagaaccacgtgaaccaccacagcctaaggacgctgccgggctcgggccagagcagtgctggcctggcagccctccgaaagtggttgcagtgcactcagttcaaaatggcccaggtggagatccagtcctcggaagcagcctctcaattttatcctctatga

SEQ ID NO: 21034 - DNA, 155 bp, Homo sapiens
  MAP TO CHR16.3; EXPRESSED IN HEART, SIGNAL = 1.5; EXPRESSED IN HELA, SIGNAL = 1.3; EXPRESSED IN LUNG, SIGNAL = 1.4; EXPRESSED IN BONE MARROW, SIGNAL = 1.6; EXPRESSED IN BRAIN, SIGNAL = 1.6; EXPRESSED IN ADULT LIVER, SIGNAL = 1.2; EXPRESSED IN PLACENTA, SIGNAL = 1.3; SWISSPROT HIT: Q27967, EVALUE 3.40e+00; NT HIT: D79206.1, EVALUE 2.10e+00
cctcactggaggttgtcgtcttcctggggagctggaaagctgcaggcaaggggctgtgcagtcatgacaccactattcaccctggcctggggccagctcagataatacctctcatcacccccggggcccctcgcttccttcttcctctgggatgg

SEQ ID NO: 21035 - DNA, 269 bp, Homo sapiens
  MAP TO CHR19.3; EXPRESSED IN BRAIN, SIGNAL = 1.1; EXPRESSED IN ADULT LIVER, SIGNAL =   1; EXPRESSED IN PLACENTA, SIGNAL = 0.85; EXPRESSED IN HELA, SIGNAL = 2.1; EXPRESSED IN LUNG, SIGNAL = 1.4; EXPRESSED IN BONE MARROW, SIGNAL = 0.79; SWISSPROT HIT: gi115305, EVALUE 2.50e-01; EST_HUMAN HIT: BG719640.1, EVALUE 1.00e-130; NT HIT: gi11034834, EVALUE 0.00e+00
cccatttgttcaaggttgcacaactgaaagcgccggcttcatgacgacataacccaaaaaaaactgtagctggcgtctgctctcgcgcccacttcgctctcacaacagtgccaagaggtcggcgccgtcatcaccccgcgtttacacggctcaacaggaaggccaggaaatgcccaaggccccggccgtggtcaaaccgcgcgcggacccagggccttagccccgccgtcgccgcgacccacacttgccggagtcctcagcagggcctc

SEQ ID NO: 21036 - DNA, 131 bp, Homo sapiens
  MAP TO CHR14.3; EXPRESSED IN LUNG, SIGNAL = 1.4; EXPRESSED IN FETAL LIVER, SIGNAL = 0.98; EXPRESSED IN BONE MARROW, SIGNAL = 3.1; EXPRESSED IN ADULT LIVER, SIGNAL = 1.5; EXPRESSED IN PLACENTA, SIGNAL = 1.1; NT HIT: gi6677952, EVALUE 1.10e-01; SWISSPROT HIT: Q92988, EVALUE 2.60e+00; EST_HUMAN HIT: AI540136.1, EVALUE 6.50e-01
ggaatctggctgcaggaaaaaccatccaagcgcaagacagagatgctgtgggcatcctcagttccagaactggggaatccatggaaaacctgcagaaaaacttgctgcccaagcagaggaggcgaagcagg

SEQ ID NO: 21037 - DNA, 98 bp, Homo sapiens
  MAP TO CHR19.3; EXPRESSED IN FETAL LIVER, SIGNAL = 3.1; EXPRESSED IN BONE MARROW, SIGNAL = 0.77; EXPRESSED IN ADULT LIVER, SIGNAL = 4.3; EXPRESSED IN HELA, SIGNAL = 0.91; NT HIT: gi14211948, EVALUE 9.00e-48; SWISSPROT HIT: Q63934, EVALUE 6.10e+00; EST_HUMAN HIT: BG291131.1, EVALUE 4.60e-01
gtcctgttgctgtcctttgccctcatcatcctcccctccatcagcccttttggccccaacaaaaccgagagccctggggactttgcgcctgtacgagg

SEQ ID NO: 21038 - DNA, 259 bp, Homo sapiens
  MAP TO CHR19.3; EXPRESSED IN ADULT LIVER, SIGNAL = 3.1; EXPRESSED IN HELA, SIGNAL = 3.1; EXPRESSED IN PLACENTA, SIGNAL = 2.1; EXPRESSED IN LUNG, SIGNAL = 1.8; EXPRESSED IN BRAIN, SIGNAL = 4.4; NT HIT: gi7705992, EVALUE 0.00e+00; SWISSPROT HIT: Q14157, EVALUE 1.50e-02; EST_HUMAN HIT: AL538670.1, EVALUE 0.00e+00
ccttcatagagaatgccctggttgtccctggtctggaaggacttcagcttccactgtcgcccactcttgtctgtcagcactgtccctgtgggcaaagcttcaagtgaggtggtcactcggctccgcttcagcgtctgagggctctgcctggtcttctgagggctacagctggtcttctgagggctacccctggtcacctgagggctcttcctggtcttctgagggctgcttttgggggttgggggtctgctcccggagc

SEQ ID NO: 21039 - DNA, 138 bp, Homo sapiens
  MAP TO CHR14.3; EXPRESSED IN BONE MARROW, SIGNAL = 2.7; EXPRESSED IN BRAIN, SIGNAL = 2.4; EXPRESSED IN ADULT LIVER, SIGNAL = 1.8; EXPRESSED IN PLACENTA, SIGNAL =   2; EXPRESSED IN HEART, SIGNAL = 2.1; EST_HUMAN HIT: AA482979.1, EVALUE 6.90e-01; NT HIT: AJ011712.1, EVALUE 7.30e+00
agttttatgattctgtatctcaggaatttttctaaacctatcttcattgtagcatttaccagccggatatttagactccctcctccctcaggttctcgaattcttagccccaggactgactccgtctccaggatgttc

SEQ ID NO: 21040 - DNA, 129 bp, Homo sapiens
  MAP TO CHR18.3; EXPRESSED IN BONE MARROW, SIGNAL = 0.78; EXPRESSED IN ADULT LIVER, SIGNAL = 1.8; EST_HUMAN HIT: AA723868.1, EVALUE 6.00e-35
tcgcaggtggatgagatttgtccactgaggaggaattgcacttttcgaccctcctaggatgtgacttgaatacctggcttgttccatgttgggcttgccacctgctcctgctctgaggtagccgctgac

SEQ ID NO: 21041 - DNA, 120 bp, Homo sapiens
  MAP TO CHR14.3; EXPRESSED IN BRAIN, SIGNAL = 2.5; EXPRESSED IN ADULT LIVER, SIGNAL = 2.3; EXPRESSED IN LUNG, SIGNAL = 1.7; EXPRESSED IN BONE MARROW, SIGNAL = 2.2; EST_HUMAN HIT: BI909012.1, EVALUE 1.50e-01; NT HIT: U16812.1, EVALUE 1.00e-01; SWISSPROT HIT: P15384, EVALUE 2.70e+00
ctgccatcgcagctgcacgcggcgcctccgggagccctcagtggggtgcagcgacagagcccggcaggtgcagcagccgccagcccctctctccggtaaccccagggctgctgcacacat

SEQ ID NO: 21042 - DNA, 401 bp, Homo sapiens
  MAP TO CHR14.3; EXPRESSED IN PLACENTA, SIGNAL = 3.6; EXPRESSED IN BONE MARROW, SIGNAL =  10; EXPRESSED IN BRAIN, SIGNAL = 4.1; EXPRESSED IN ADULT LIVER, SIGNAL = 2.9; SWISSPROT HIT: P07916, EVALUE 6.00e-08; EST_HUMAN HIT: BF893620.1, EVALUE 0.00e+00; NT HIT: gi13376297, EVALUE 0.00e+00
cacacatcttcaggttgcatgttcgtggagtagtttaggaataaatccacagcttgtggagtactaaaatacctagtggtctgctgtattacattatggccttccccagcagcttccaaggcagcctccaagtcactggcaggagaatttggctggaactgcatggaggactgcagagattcctctccatagttatagaagggactgttccaggcctgattgttccaggactgggtgcaccaggtctgagtgttccaggagtggttgctccaggactggatgttctgggtctggttgctccaggttgaattgttccaggtctggttgctccacattggaaagttcccagtcatgttcaccaggcatccccagtggtaggaagagtagaggctggggtaggt

SEQ ID NO: 21043 - DNA, 76 bp, Homo sapiens
  MAP TO CHR18.3; EXPRESSED IN HEART, SIGNAL = 1.6; EXPRESSED IN BONE MARROW, SIGNAL = 1.7; EXPRESSED IN FETAL LIVER, SIGNAL = 1.1; EXPRESSED IN ADULT LIVER, SIGNAL = 1.6; EXPRESSED IN HELA, SIGNAL = 1.4; EXPRESSED IN PLACENTA, SIGNAL = 1.2
gtccctccgcctgcttttctagttgtggtttaatcttctcaggacgattcactatgtcaatattgagcagattcat

SEQ ID NO: 21044 - DNA, 156 bp, Homo sapiens
  MAP TO CHR18.3; EXPRESSED IN HELA, SIGNAL = 2.6; EXPRESSED IN BONE MARROW, SIGNAL = 1.9; EXPRESSED IN ADULT LIVER, SIGNAL = 2.1; EXPRESSED IN BRAIN, SIGNAL = 2.2; NT HIT: gi4758393, EVALUE 2.10e+00; SWISSPROT HIT: P16724, EVALUE 5.80e+00
acctccagaaatctaagggaaagggaaacacctgcaactttgctccccaccctggccctcgacttgccctttaccctaagatcacccccattgttttgcaggtgcctgcggatactgccagactctgcaatgctcagcatgagagtggactggggg

SEQ ID NO: 21045 - DNA, 142 bp, Homo sapiens
  MAP TO CHR16.3; EXPRESSED IN BONE MARROW, SIGNAL = 0.8; EXPRESSED IN FETAL LIVER, SIGNAL = 8.8; EXPRESSED IN ADULT LIVER, SIGNAL = 0.93; NT HIT: gi14775527, EVALUE 2.00e-74; SWISSPROT HIT: P71606, EVALUE 1.20e+00; EST_HUMAN HIT: BI759722.1, EVALUE 3.00e-74
gcagaggcgtgcagcaccacggaggatggggccgaacccctgctctgtccctcgggctatgagtgccacatcctgagcccaggtgacgtggccgaaggtatccccaaccgtgggcagtgcgtcaagcagcgccggcaagcag

SEQ ID NO: 21046 - DNA, 85 bp, Homo sapiens
  MAP TO CHR18.3; EXPRESSED IN ADULT LIVER, SIGNAL = 1.5; EXPRESSED IN BRAIN, SIGNAL = 1.4; EXPRESSED IN HELA, SIGNAL = 1.1; EXPRESSED IN PLACENTA, SIGNAL = 1.2; EXPRESSED IN BONE MARROW, SIGNAL = 1.8; EXPRESSED IN FETAL LIVER, SIGNAL = 1.4; NT HIT: AL163279.2, EVALUE 7.00e-05; EST_HUMAN HIT: AA701546.1, EVALUE 2.40e-02
tttcgtctggggaatttcagaattgctatggaccagtaactgctcaatgctgctcagaattgtcctttctgaatcagcctccatt

SEQ ID NO: 21047 - DNA, 124 bp, Homo sapiens
  MAP TO CHR14.3; EXPRESSED IN ADULT LIVER, SIGNAL = 2.5; EXPRESSED IN BRAIN, SIGNAL = 1.8; EXPRESSED IN PLACENTA, SIGNAL = 1.5; EXPRESSED IN HELA, SIGNAL = 1.6; EXPRESSED IN LUNG, SIGNAL = 2.3; NT HIT: gi14763130, EVALUE 6.40e+00; SWISSPROT HIT: Q04747, EVALUE 2.00e+00; EST_HUMAN HIT: AV732092.1, EVALUE 6.10e-01
tgcagagcagagcacagctcagctgtgagttatggtcagagttggccaagcagaatgtcatgccggtgccgaaggaatgtcccgtgtttaccgggaacatgggagataatggcctcatgagtac

SEQ ID NO: 21048 - DNA, 221 bp, Homo sapiens
  MAP TO CHR18.3; EXPRESSED IN LUNG, SIGNAL = 1.7; EXPRESSED IN BONE MARROW, SIGNAL = 2.5; EXPRESSED IN BRAIN, SIGNAL = 1.7; EXPRESSED IN ADULT LIVER, SIGNAL = 1.7; EXPRESSED IN HEART, SIGNAL =   2; SWISSPROT HIT: Q07154, EVALUE 8.20e-01; NT HIT: Y14970.1, EVALUE 2.00e-01; EST_HUMAN HIT: BE263083.1, EVALUE 1.20e+00
tactgatcaaccttcagggcctgattcaaacaacttttaatcttgcccaggaactttctaaagtgttgatgaactttcttcaatccctgagaaactaggttgccagacgagaaaggtgtttctgggtcagaactgtcaaaccaacgtccgcaccctgttccattttttatgagaggtactgaagacaactttccaatgaagatagtgaaactaatgattac

SEQ ID NO: 21049 - DNA, 91 bp, Homo sapiens
  MAP TO CHR14.3; EXPRESSED IN ADULT LIVER, SIGNAL =   2; EXPRESSED IN PLACENTA, SIGNAL = 1.8; EXPRESSED IN LUNG, SIGNAL = 2.7; EXPRESSED IN FETAL LIVER, SIGNAL = 1.5; EXPRESSED IN BONE MARROW, SIGNAL = 2.6; NT HIT: AF111168.2, EVALUE 3.00e-44; EST_HUMAN HIT: BG251534.1, EVALUE 4.00e-44
atcaatgacgacatcatggcacttgaacttagtggctaagttcaacttcgtgtccacatcttccaccagattgacatactcctgtaatatc

SEQ ID NO: 21050 - DNA, 218 bp, Homo sapiens
  MAP TO CHR16.3; EXPRESSED IN ADULT LIVER, SIGNAL = 1.3; EXPRESSED IN BRAIN, SIGNAL = 1.5; EXPRESSED IN HELA, SIGNAL = 1.1; EXPRESSED IN PLACENTA, SIGNAL = 1.5; EST_HUMAN HIT: BF001956.1, EVALUE 1.00e-119; SWISSPROT HIT: P22544, EVALUE 1.40e+00; NT HIT: AF071893.1, EVALUE 7.80e-01
gacatgaggctctgcctgcagtcagcaacttggaatattcagacttcagaccagcatcacagattataaccctccgtaaatcatctgcatcccagctcccatcaaaagccagcctgaaggacccatggacacgtgactccagtgttctcaacaacatcttaagatcaagttggtttgcacaacatttgcatctacttgggacaaagcaagaacaataa

SEQ ID NO: 21051 - DNA, 337 bp, Homo sapiens
  MAP TO CHR14.3; EXPRESSED IN HELA, SIGNAL =  11; EXPRESSED IN FETAL LIVER, SIGNAL = 6.4; EXPRESSED IN ADULT LIVER, SIGNAL =  27; EST_HUMAN HIT: AW070239.1, EVALUE 2.00e-24; SWISSPROT HIT: Q15744, EVALUE 2.00e-58; NT HIT: U48865.1, EVALUE 0.00e+00
ctcagctgcaaccccccacgcccttgatgaggttggccgcctcaggaatctggcggaagaggttgcggagggtgtctagctcctgggtgagctgctccacgcggctgcggaggcgctcgttctctgccatgtactccagcaccttctgctgcgtctccagaatgcgcctcttggccttgtctcggctcttgcgcacggcgatgttgttgcgctcccgcctcagccggtactcaaggctatctttgttcactgccttcttgcccttgtgtaaggggccagccggggagggcgccttcaggaggggactgcaggggggtgcggcagtggccaaaggggc

SEQ ID NO: 21052 - DNA, 92 bp, Homo sapiens
  MAP TO CHR14.3; EXPRESSED IN LUNG, SIGNAL = 4.5; EXPRESSED IN ADULT LIVER, SIGNAL = 4.5; EXPRESSED IN PLACENTA, SIGNAL = 4.7; EXPRESSED IN HELA, SIGNAL = 4.3; EXPRESSED IN HEART, SIGNAL = 5.6; EXPRESSED IN BONE MARROW, SIGNAL = 7.1; EXPRESSED IN FETAL LIVER, SIGNAL = 4.6; EXPRESSED IN BRAIN, SIGNAL = 4.5; SWISSPROT HIT: P07311, EVALUE 4.00e-10; NT HIT: gi13654838, EVALUE 8.00e-45; EST_HUMAN HIT: BI560865.1, EVALUE 1.00e-44
ctgagtatgcttacggaaaaacaccccttgcaccttcccaaaaatttcataatccactgatatcagggtgtttccttctgccatgctcaaac

SEQ ID NO: 21053 - DNA, 145 bp, Homo sapiens
  MAP TO CHR18.3; EXPRESSED IN PLACENTA, SIGNAL = 1.3; EXPRESSED IN BONE MARROW, SIGNAL = 1.1; EXPRESSED IN ADULT LIVER, SIGNAL = 1.2; EXPRESSED IN BRAIN, SIGNAL = 1.3; SWISSPROT HIT: O14867, EVALUE 4.50e+00; EST_HUMAN HIT: BG722090.1, EVALUE 1.00e-73
tgccagccatagcaatagtttcagacccgtggagtcagctgtgctgttgccaacctccatcacctgtccgcctttatcctgggctctgttcctgtggatttgaacaaatagatgagcggcatcggaagaaagctttagctgcatg

SEQ ID NO: 21054 - DNA, 203 bp, Homo sapiens
  MAP TO CHR14.3; EXPRESSED IN BONE MARROW, SIGNAL = 1.5; EXPRESSED IN BRAIN, SIGNAL = 1.3; EXPRESSED IN ADULT LIVER, SIGNAL = 0.94; NT HIT: AF375663.1, EVALUE 3.00e-09; SWISSPROT HIT: P00957, EVALUE 5.50e+00; EST_HUMAN HIT: U82317.1, EVALUE 3.00e-07
aacttggctgtttggttcaagaggcctagctcttggcctatcttggtttttgacacaatttccttaccaagcataatcatgtgtatcttttcatttaaagtgagaaacatataactttttatttcacttaaacacttagaagccatgatagcattattaattggcctgatttcaatattgttgtctgaaggaatagggaggcc

SEQ ID NO: 21055 - DNA, 183 bp, Homo sapiens
  MAP TO CHR18.3; EXPRESSED IN HEART, SIGNAL = 1.6; EXPRESSED IN ADULT LIVER, SIGNAL = 1.3; EXPRESSED IN PLACENTA, SIGNAL = 1.3; EXPRESSED IN HELA, SIGNAL =   1; NT HIT: gi14784148, EVALUE 6.40e-01; SWISSPROT HIT: O05975, EVALUE 5.00e-01; EST_HUMAN HIT: AI633441.1, EVALUE 9.50e-01
ctgcaagctcctaaaagtcaggtacaaactgacagcctcaccagctttcagtccaacagaacacagcccactgtttgtctaaacacaatcttttcacctcagtcacacttactgattgaaagcatgcagggtgttgggacttttaagggaattggcttactaagagtgcttgtccagattcag

SEQ ID NO: 21056 - DNA, 135 bp, Homo sapiens
  MAP TO CHR18.3; EXPRESSED IN HELA, SIGNAL = 1.5; EXPRESSED IN BONE MARROW, SIGNAL = 1.2; EXPRESSED IN FETAL LIVER, SIGNAL = 1.4; EXPRESSED IN HEART, SIGNAL = 2.1; EXPRESSED IN LUNG, SIGNAL =   1; EXPRESSED IN ADULT LIVER, SIGNAL = 1.3; EXPRESSED IN PLACENTA, SIGNAL = 1.4; NT HIT: X68785.1, EVALUE 4.50e-01; SWISSPROT HIT: P58183, EVALUE 4.50e+00
cttctttccttcttttgctgaaagccgcagtctgactaggaaggttaataaatgagatgaccacagactgttttcctgaatgtgatactggccaaataggtctcctgcctggttgtaggtctcttttctgtgatt

SEQ ID NO: 21057 - DNA, 237 bp, Homo sapiens
  MAP TO CHR16.3; EXPRESSED IN LUNG, SIGNAL = 4.6; EXPRESSED IN BONE MARROW, SIGNAL = 7.2; EXPRESSED IN ADULT LIVER, SIGNAL = 7.7; EXPRESSED IN BRAIN, SIGNAL =  10; EXPRESSED IN PLACENTA, SIGNAL = 7.3; EXPRESSED IN HEART, SIGNAL = 7.8; EXPRESSED IN HELA, SIGNAL = 5.5
tgtctgggatgcttatagatttgattagataacatttgtcagctgcatcagccgcaggtaactcctgacgagaatttatttccctgtaggtagtggaacgaagcgatgttccaaatttcatggggctgccgaagaggcttgcaggagtgtcacgcctaagaggctgtacaacagttgtcaggataatcagactatttgcaatcaccattttctgctcttttttcccccttaagtacc

SEQ ID NO: 21058 - DNA, 148 bp, Homo sapiens
  MAP TO CHR19.3; EXPRESSED IN ADULT LIVER, SIGNAL = 1.3; EXPRESSED IN PLACENTA, SIGNAL = 0.95; EXPRESSED IN HELA, SIGNAL = 4.5; NT HIT: U09936.1, EVALUE 5.00e-78; SWISSPROT HIT: Q03405, EVALUE 6.00e-25; EST_HUMAN HIT: AW338725.1, EVALUE 8.00e-78
ccgtgagtgccggtggctaccagacattgattcatggggcctcggcagtcaatgaggaaagtctcttcagaggagcatccatgggtgctgttccccttgcagctgtaacactggcggccattctgcggcagattttcaagctccagga

SEQ ID NO: 21059 - DNA, 92 bp, Homo sapiens
  MAP TO CHR18.3; EXPRESSED IN HEART, SIGNAL = 1.8; EXPRESSED IN LUNG, SIGNAL = 1.9; EXPRESSED IN BONE MARROW, SIGNAL = 1.9; EXPRESSED IN FETAL LIVER, SIGNAL = 1.8; EXPRESSED IN ADULT LIVER, SIGNAL =   2; EXPRESSED IN HELA, SIGNAL = 1.5; EXPRESSED IN PLACENTA, SIGNAL = 1.8; EST_HUMAN HIT: AW075986.1, EVALUE 1.70e+00; NT HIT: X71792.1, EVALUE 1.10e+00
ggctggcctgtatcttgaacatggatttggcctgtccttgaagaggcccattgggcactgtctaggactcttctacctgccaaaccaccagg

SEQ ID NO: 21060 - DNA, 268 bp, Homo sapiens
  MAP TO CHR16.3; EXPRESSED IN FETAL LIVER, SIGNAL = 1.9; EXPRESSED IN BRAIN, SIGNAL = 1.7; EXPRESSED IN ADULT LIVER, SIGNAL = 1.3; EXPRESSED IN PLACENTA, SIGNAL = 1.6; EXPRESSED IN HELA, SIGNAL = 2.2; EXPRESSED IN LUNG, SIGNAL = 2.3; NT HIT: L39062.1, EVALUE 0.00e+00; SWISSPROT HIT: P51532, EVALUE 1.00e-03
tgacccaccatgtggcagatgggaagagtgaggcccaggagtggggctcacacaaggtccttcagcaggtgacacaaacctccaaggcccatcacaaggtccttcagcaggtgacacaaacctccaaggcccatcacaaggtccttcagcagatgacacaaacctccaaggcccatcacaaggtccttcagcagatgacacaaacctccaaggctcatcacaaaccttccactttggcccagggcactaaagggcgcacctttgccag

SEQ ID NO: 21061 - DNA, 155 bp, Homo sapiens
  MAP TO CHR16.3; EXPRESSED IN HEART, SIGNAL =   3; EXPRESSED IN HELA, SIGNAL =   2; EXPRESSED IN LUNG, SIGNAL = 2.5; EXPRESSED IN FETAL LIVER, SIGNAL = 3.1; EXPRESSED IN BONE MARROW, SIGNAL = 4.1; EXPRESSED IN ADULT LIVER, SIGNAL =   3; EXPRESSED IN PLACENTA, SIGNAL = 2.2; SWISSPROT HIT: Q63880, EVALUE 7.00e-15; NT HIT: gi14785624, EVALUE 4.00e-82; EST_HUMAN HIT: AL519832.1, EVALUE 5.00e-82
cactggagatgagcatgcacctggcaaccagggcttcctagatgtggtagctgctttgcgctgggtgcaagaaaacatcgcccccttcgggggtgacctcaactgtgtcactgtctttggtggatctgccggtgggagcatcatctctggcctgg

SEQ ID NO: 21062 - DNA, 132 bp, Homo sapiens
  MAP TO CHR18.3; EXPRESSED IN PLACENTA, SIGNAL = 3.2; EXPRESSED IN LUNG, SIGNAL = 3.4; EXPRESSED IN BONE MARROW, SIGNAL =   2; EXPRESSED IN FETAL LIVER, SIGNAL = 2.2; EXPRESSED IN BRAIN, SIGNAL = 2.9; EXPRESSED IN ADULT LIVER, SIGNAL =   2; SWISSPROT HIT: Q48919, EVALUE 9.00e-01; NT HIT: U17013.1, EVALUE 4.40e-01
cttgctccctgatgcctttcccaggcaatcggctgcagtggtcctggaacagcagcgaccagccccacacagcctgttccacagcacccactgcttcctgcatgacagggaccaccacacacagagcctggg

SEQ ID NO: 21063 - DNA, 354 bp, Homo sapiens
  MAP TO CHR19.3; EXPRESSED IN FETAL LIVER, SIGNAL =  16; EXPRESSED IN ADULT LIVER, SIGNAL =  11; SWISSPROT HIT: Q9Y284, EVALUE 6.00e-06; NT HIT: AF151898.1, EVALUE 0.00e+00; EST_HUMAN HIT: AI023128.1, EVALUE 0.00e+00
ggctgtccatctctgccgtggtgatgtcctatctgcagaatcctcagcccatgacgcccccatggtgataccagcctagaagggtcacattttggaccctgtctatccactaggcctgggctttggctgctaaacctgctgccttcagctgccatcctggacttccctgaatgaggccgtctcggtgcccccagctggatagagggaacctggccctttcctagggaacaccctaggcttacccctcctgcctcccttcccctgcctgctgctgggggagatgctgtccatgtttctaggggtattcatttgctttctcgttgaaacctgttgttaataaagtttttcactctg

SEQ ID NO: 21064 - DNA, 101 bp, Homo sapiens
  MAP TO CHR14.3; EXPRESSED IN BRAIN, SIGNAL = 3.9; EXPRESSED IN ADULT LIVER, SIGNAL = 6.9; EXPRESSED IN PLACENTA, SIGNAL = 5.9; EXPRESSED IN HEART, SIGNAL = 6.5; EXPRESSED IN HELA, SIGNAL = 3.9; EXPRESSED IN LUNG, SIGNAL = 5.6; SWISSPROT HIT: P40022, EVALUE 8.00e+00; NT HIT: X77586.1, EVALUE 3.20e-01; EST_HUMAN HIT: AA399527.1, EVALUE 3.00e-48
aaagtgaggcaaatacatccaaggagatgaaggataagacctctgaagaaaagatgcctgattttcagagcacagctctcaaggctgaagaatccaggtat

SEQ ID NO: 21065 - DNA, 177 bp, Homo sapiens
  MAP TO CHR16.3; EXPRESSED IN LUNG, SIGNAL = 3.3; EXPRESSED IN BONE MARROW, SIGNAL = 1.5; EXPRESSED IN ADULT LIVER, SIGNAL = 1.9; EXPRESSED IN BRAIN, SIGNAL = 2.4; EXPRESSED IN HELA, SIGNAL = 2.7; SWISSPROT HIT: Q9UGI0, EVALUE 3.80e-01; NT HIT: AJ295030.1, EVALUE 9.60e+00; EST_HUMAN HIT: BG259117.1, EVALUE 5.00e-95
cctcagtatgtgagactgttcctcgtagcaggtaatttcttccgaattcaaaaactcctcatggaagcatctgtttttgtcatcaaggagggggctgtatgtggaattgcaaggccaaagacatctcgggtcaactcttctcaggaccagatccaagtcgccagtgagaacacacat

SEQ ID NO: 21066 - DNA, 249 bp, Homo sapiens
  MAP TO CHR14.3; EXPRESSED IN FETAL LIVER, SIGNAL = 1.1; EXPRESSED IN ADULT LIVER, SIGNAL = 1.1; EXPRESSED IN BRAIN, SIGNAL = 1.1; EXPRESSED IN PLACENTA, SIGNAL = 0.86; SWISSPROT HIT: P06680, EVALUE 6.00e-03; NT HIT: AJ010770.1, EVALUE 1.50e-02; EST_HUMAN HIT: AI185990.1, EVALUE 1.30e+00
tacagggcctgcaggctggatgttctgagatttttattggcatctccatcaagatgagggccatgggggtccttcaggtcttccggagccgctttattggggctggccttccagacacggcggggagcagcgatttccaggggaatctggtttctctgctgggctcgcacccgtttcctctgtgtttggcttggcagcgcctgggcctggcctgttttgagcctcacctcgtgcttgggcttttgtggc

SEQ ID NO: 21067 - DNA, 470 bp, Homo sapiens
  MAP TO CHR18.3; EXPRESSED IN ADULT LIVER, SIGNAL = 1.5; EXPRESSED IN HELA, SIGNAL = 0.88; EXPRESSED IN LUNG, SIGNAL = 1.1; EST_HUMAN HIT: AW382741.1, EVALUE 0.00e+00; SWISSPROT HIT: P48594, EVALUE 2.00e-51; NT HIT: AB035089.1, EVALUE 0.00e+00
  unsure 231
  unsure 249
  unsure 323
gcttgaagagaaactcactgctgagaaattgatggaatggacaagtttgcagaatatgagagagacatgtgtcgatttacacttacctcggttcaaaatggaagagagctatgacctcaaggacacgttgagaaccatgggaatggtgaatatcttcaatggggatgcagacctctcaggcatgacctggagccacggtctctcagtatctaaagtcctacacaaggcctnttgtggaggtcactgagngagggagtggaagctgcagctgccaccgctgtagtagtagtcgaattatcatctccttcaactaatgaagagtntctgttgtaatcaccctttcctattcttcataaggcaaaataagaccaacagcatcctcttctatggcagattctcatccccatagatgcaattagtctgtcactccatttagaaaatgttcacctagaggtgttctggtaaactga

SEQ ID NO: 21068 - DNA, 121 bp, Homo sapiens
  MAP TO CHR18.3; EXPRESSED IN FETAL LIVER, SIGNAL = 2.6; EXPRESSED IN BRAIN, SIGNAL = 2.6; EXPRESSED IN ADULT LIVER, SIGNAL =   3; EXPRESSED IN PLACENTA, SIGNAL = 2.4; NT HIT: AE004026.1, EVALUE 1.60e+00; EST_HUMAN HIT: BE910363.1, EVALUE 1.50e-01
ctggaggcttgtttgagattaactcggggaggagaacacagtgtgctaactgcaccccttggcttggcttctgccatgtttttttgtggatttcagcccaagcagggagcagttgtggcat

SEQ ID NO: 21069 - DNA, 218 bp, Homo sapiens
  MAP TO CHR14.3; EXPRESSED IN LUNG, SIGNAL = 3.3; EXPRESSED IN BONE MARROW, SIGNAL = 3.1; EXPRESSED IN ADULT LIVER, SIGNAL =   3; EXPRESSED IN PLACENTA, SIGNAL = 2.6; EXPRESSED IN HEART, SIGNAL = 2.9; EXPRESSED IN HELA, SIGNAL = 3.2; NT HIT: gi14784657, EVALUE 1.00e-119; EST_HUMAN HIT: BE706362.1, EVALUE 1.00e-119; SWISSPROT HIT: P38604, EVALUE 2.80e-01
gcaatctttggcagccagacactacctaactccaatttatggacaatgaataatggtgcaggttgtagaatttccagtgccacagctagtggccagaagccaaccactctgccacaaaaagtggtaccacctccaagttcttgcgcctccctggttcccaaacccccacccaaccacgaacaagtgctcagaagggcaacatcccagaaagcttccaa

SEQ ID NO: 21070 - DNA, 112 bp, Homo sapiens
  MAP TO CHR16.3; EXPRESSED IN ADULT LIVER, SIGNAL = 1.8; EXPRESSED IN PLACENTA, SIGNAL = 1.1; EXPRESSED IN HELA, SIGNAL = 0.98; EXPRESSED IN LUNG, SIGNAL =   1; EXPRESSED IN BONE MARROW, SIGNAL = 1.2; NT HIT: AF041483.1, EVALUE 9.20e-02; EST_HUMAN HIT: BG179683.1, EVALUE 4.00e-54
ctccagcccaggtcctcccctctcatctccaattctgcttcacgggccatgacagcaggcaggccatggcctgctctcagcagtttgatcgatggactaaggagatcactcc

SEQ ID NO: 21071 - DNA, 162 bp, Homo sapiens
  MAP TO CHR14.3; EXPRESSED IN FETAL LIVER, SIGNAL = 1.3; EXPRESSED IN BRAIN, SIGNAL = 1.3; EXPRESSED IN ADULT LIVER, SIGNAL = 0.96; EXPRESSED IN PLACENTA, SIGNAL = 1.3; SWISSPROT HIT: Q02153, EVALUE 5.80e+00; NT HIT: X53765.1, EVALUE 8.70e+00; EST_HUMAN HIT: AI636631.1, EVALUE 3.30e+00
tcaaatgcattcttcttcttcttcttcttcttcttcttcttcttcttcttcttcttctttttttctgcttgccttgccttgtctttctaaaagaattgaatggtcctggtgttcagggcccatgggcccccttttgagttcttccatggcatttatacggcc

SEQ ID NO: 21072 - DNA, 159 bp, Homo sapiens
  MAP TO CHR16.3; EXPRESSED IN LUNG, SIGNAL = 1.3; EXPRESSED IN BONE MARROW, SIGNAL =   1; EXPRESSED IN ADULT LIVER, SIGNAL = 1.5; EXPRESSED IN PLACENTA, SIGNAL = 1.5; EST_HUMAN HIT: BE568488.1, EVALUE 8.00e-04; SWISSPROT HIT: Q08397, EVALUE 5.80e+00; NT HIT: gi16164128, EVALUE 3.50e-02
ctggccacgggcagtcgtgaaattaacatcacagcatgggataactatcacgatgtgggcatcagctatttggaatggacacccatgagctggaccaggatcctgaaggatcccttcagcaccaggtgtcgactccgcagtttctgaatgtggagtcat

SEQ ID NO: 21073 - DNA, 298 bp, Homo sapiens
  MAP TO CHR14.3; EXPRESSED IN ADULT LIVER, SIGNAL = 0.95; EXPRESSED IN BRAIN, SIGNAL = 1.3; EXPRESSED IN PLACENTA, SIGNAL = 1.6; EXPRESSED IN FETAL LIVER, SIGNAL = 1.5; EST_HUMAN HIT: AW361431.1, EVALUE 1.60e+00; SWISSPROT HIT: P15328, EVALUE 1.00e-01; NT HIT: AB010444.1, EVALUE 2.70e-01
tttcctgcaaaaggacatcagtgtcttcctcattggagcagctgataagaaggatgttgttgctcaaatagagacagaaaaacatatttcctatcacagacccaggccatcccaagggcatggagaattagaccaggttgtggaaataatagaagaacctgattttcatgcctatttccctggtgccatcttcctccctgaaatactctgcaataattacaccttccacttaagtaggatttcacacttttccaaagtagcatcacgttgtacggaagtagagttggctgcactgtag

SEQ ID NO: 21074 - DNA, 172 bp, Homo sapiens
  MAP TO CHR16.3; EXPRESSED IN ADULT LIVER, SIGNAL = 5.9; EXPRESSED IN HELA, SIGNAL = 6.4; EXPRESSED IN HEART, SIGNAL = 4.1; EXPRESSED IN FETAL LIVER, SIGNAL = 8.7; EXPRESSED IN LUNG, SIGNAL = 7.3; EST_HUMAN HIT: AI830616.1, EVALUE 2.00e-82
gaaaggcccagcgcctgcggccgctgtaccagtacgtcaactattgcaaccctgagctgaaccaggcagggaagggggacggggaggctgaggtggaggcagaggcagagctggccccggttcccgaggagggaggtgtggagcaactgcaggccttgctgcccttggcagg

SEQ ID NO: 21075 - DNA, 128 bp, Homo sapiens
  MAP TO CHR16.3; EXPRESSED IN LUNG, SIGNAL = 1.4; EXPRESSED IN ADULT LIVER, SIGNAL = 1.2; NT HIT: gi13629292, EVALUE 4.00e-66; EST_HUMAN HIT: BG108343.1, EVALUE 6.00e-66; SWISSPROT HIT: O75437, EVALUE 7.00e-14
cccagagagaccaggtttctgtagttttctaacatcacatcctgatacaaattcttctgagctggttccaggtgttcccactcctccaaagagaattctacggccacatccctgaatgtcaacagtcc

SEQ ID NO: 21076 - DNA, 159 bp, Homo sapiens
  MAP TO CHR16.3; EXPRESSED IN LUNG, SIGNAL = 2.6; EXPRESSED IN BONE MARROW, SIGNAL = 2.1; EXPRESSED IN ADULT LIVER, SIGNAL = 1.5; EXPRESSED IN PLACENTA, SIGNAL = 2.3; EXPRESSED IN HEART, SIGNAL = 1.8; EXPRESSED IN HELA, SIGNAL = 2.6; NT HIT: gi14777951, EVALUE 2.00e-84; EST_HUMAN HIT: AW603832.1, EVALUE 1.00e-70; SWISSPROT HIT: P42279, EVALUE 2.00e-07
ccagacaagcatcccgctccccctccaagtagccggcacacagcatgtcctcagtgatgggtccctgtcctgctccccgccagtacagatggctgcagacttccgagtcgatgataggaaccttcagcttctgcagggtctgagggtggggcaagggaa

SEQ ID NO: 21077 - DNA, 230 bp, Homo sapiens
  MAP TO CHR14.3; EXPRESSED IN LUNG, SIGNAL = 1.4; EXPRESSED IN FETAL LIVER, SIGNAL = 3.4; EXPRESSED IN BRAIN, SIGNAL = 4.4; EXPRESSED IN ADULT LIVER, SIGNAL =   3; SWISSPROT HIT: Q90867, EVALUE 3.10e-01; EST_HUMAN HIT: BE262652.1, EVALUE 1.20e+00
aactgcagttcccacgttagaagagcagttgtcacctgcttctcagcagggtgctgtggtcgtcacggaaacaggcctgttcggtactgcaagaggtgccactcaaatcatcacagtaatgaagtgggggccgctgcggagactcacctctatcagacctctcctccgcccatcaacacgcgggaatgcggcgctgaggagctggtctgcgccgtggaagccgtgatcag

SEQ ID NO: 21078 - DNA, 106 bp, Homo sapiens
  MAP TO CHR16.3; EXPRESSED IN FETAL LIVER, SIGNAL = 2.3; EXPRESSED IN BONE MARROW, SIGNAL = 2.1; EXPRESSED IN BRAIN, SIGNAL = 1.9; EXPRESSED IN ADULT LIVER, SIGNAL = 1.5; EXPRESSED IN PLACENTA, SIGNAL = 1.5; EXPRESSED IN HELA, SIGNAL = 1.5; EXPRESSED IN LUNG, SIGNAL = 1.5; SWISSPROT HIT: P33076, EVALUE 2.70e+00; NT HIT: gi6679562, EVALUE 8.60e-02; EST_HUMAN HIT: BG766530.1, EVALUE 2.00e+00
ctttctgttccctcagaatcgggttcctgtgaggctgggtagtgggaggcagggatggaggtagcaggatggcgtgggtgggattagcaagtctcggagtctgttg

SEQ ID NO: 21079 - DNA, 103 bp, Homo sapiens
  MAP TO CHR18.3; EXPRESSED IN HELA, SIGNAL = 2.1; EXPRESSED IN LUNG, SIGNAL = 2.2; EXPRESSED IN BONE MARROW, SIGNAL = 3.1; EXPRESSED IN FETAL LIVER, SIGNAL = 3.3; EXPRESSED IN BRAIN, SIGNAL = 2.8; EXPRESSED IN ADULT LIVER, SIGNAL = 2.6; SWISSPROT HIT: Q62101, EVALUE 3.60e+00; NT HIT: X83922.1, EVALUE 1.30e+00; EST_HUMAN HIT: AA669643.1, EVALUE 1.20e-01
gagacacatacgaaccatgatgaccatacaaagcaacagggagataaggaggagaagccaagcaccttcacaggagggatggctgtctgcctacgggagccag

SEQ ID NO: 21080 - DNA, 220 bp, Homo sapiens
  MAP TO CHR14.3; EXPRESSED IN LUNG, SIGNAL = 1.2; EXPRESSED IN BONE MARROW, SIGNAL = 1.1; EXPRESSED IN ADULT LIVER, SIGNAL =   1; EST_HUMAN HIT: BI860943.1, EVALUE 1.00e-115; SWISSPROT HIT: P03209, EVALUE 1.10e+00
gccttggtgtcaaatcttatatcaaccaaagaagagttaatgaaactacgacagatccttagactcttgagactcaggtgcacagaaaatgatggcatatgtttgctcaagattgtgtcggctctgtgggagaaatggctgagtttgctggaagctgctaaagagtgggagatgtggtgcgaagaactgaagcaggaatggaaatttgtcagtgaagaag

SEQ ID NO: 21081 - DNA, 175 bp, Homo sapiens
  MAP TO CHR14.3; EXPRESSED IN HELA, SIGNAL = 1.5; EXPRESSED IN BRAIN, SIGNAL =   1; EXPRESSED IN ADULT LIVER, SIGNAL = 1.1; EXPRESSED IN PLACENTA, SIGNAL = 0.99; EST_HUMAN HIT: AW958690.1, EVALUE 1.00e-89; SWISSPROT HIT: P08603, EVALUE 4.40e+00; NT HIT: U66526.1, EVALUE 6.10e-01
gtcttagtacccactgtgtctatggttggaaagcatttgggcgcaagaaaggatcatccaggcttaaaggctaaagaaaatgatgaaaattgtggtcctactaccactgtttttgttggcaacatttccgagaaagcttcagacatgcttataagacaactcttagctgtaagtt

SEQ ID NO: 21082 - DNA, 87 bp, Homo sapiens
  MAP TO CHR19.3; EXPRESSED IN ADULT LIVER, SIGNAL = 1.1; EXPRESSED IN BRAIN, SIGNAL = 2.6; EXPRESSED IN PLACENTA, SIGNAL = 1.6; EXPRESSED IN HELA, SIGNAL = 2.1; EXPRESSED IN LUNG, SIGNAL = 2.2; EST_HUMAN HIT: BF365806.1, EVALUE 2.00e-33; SWISSPROT HIT: P38675, EVALUE 4.70e+00; NT HIT: AF006508.1, EVALUE 4.20e+00
caaactcatcagcggagaagtgtcgtgtccagaaggacttgccattggtgaggaccatctcatactccagctgcaatccatcacccc

SEQ ID NO: 21083 - DNA, 144 bp, Homo sapiens
  MAP TO CHR18.3; EXPRESSED IN PLACENTA, SIGNAL = 2.1; EXPRESSED IN LUNG, SIGNAL = 2.5; EXPRESSED IN HELA, SIGNAL = 1.8; EXPRESSED IN BONE MARROW, SIGNAL = 1.9; EXPRESSED IN FETAL LIVER, SIGNAL = 2.1; EXPRESSED IN BRAIN, SIGNAL =   2; EXPRESSED IN ADULT LIVER, SIGNAL = 1.8; EST_HUMAN HIT: BE244333.1, EVALUE 4.00e-73; NT HIT: U82695.2, EVALUE 7.60e+00
gagagctctttgactataggcaggaaatgctgcacgggagcctggttagcaggggtgctgtgggccccgggctgcagggcctgctatgcatgcagcagcatctcgtgacgggtcatctcctggtgcgtcctgtgatgaagcagg

SEQ ID NO: 21084 - DNA, 75 bp, Homo sapiens
  MAP TO CHR14.3; EXPRESSED IN ADULT LIVER, SIGNAL = 6.2; EXPRESSED IN PLACENTA, SIGNAL =   6; EXPRESSED IN BRAIN, SIGNAL = 8.4; EST_HUMAN HIT: AI745199.1, EVALUE 3.20e-01
atggattcatctcgggcttcccgactgcccctgtactgccccagttgcagccctgcccctccacccctgcccatc

SEQ ID NO: 21085 - DNA, 201 bp, Homo sapiens
  MAP TO CHR16.3; EXPRESSED IN PLACENTA, SIGNAL = 2.1; EXPRESSED IN LUNG, SIGNAL = 4.2; EXPRESSED IN FETAL LIVER, SIGNAL = 3.3; EXPRESSED IN BONE MARROW, SIGNAL = 2.7; EXPRESSED IN ADULT LIVER, SIGNAL = 1.6; NT HIT: U70545.1, EVALUE 1.80e-01; EST_HUMAN HIT: BE146133.1, EVALUE 1.00e-86; SWISSPROT HIT: Q04561, EVALUE 1.40e+00
cacatcgtggagaagataccccggctcagtctcagtcagttccccaagcgcataggtgttcgggaagtggcctgcagacagctcctccatgccttgaaagcagaagtagccccctcctgtttccctgtcccagttgggtgaagcatgggagcctgctgggacagtcccaggcgtgccgtcacgcaggggcaggccgtccat

SEQ ID NO: 21086 - DNA, 118 bp, Homo sapiens
  MAP TO CHR18.3; EXPRESSED IN ADULT LIVER, SIGNAL = 2.4; EXPRESSED IN PLACENTA, SIGNAL = 2.4; EXPRESSED IN LUNG, SIGNAL = 2.4; EXPRESSED IN BONE MARROW, SIGNAL =   3; SWISSPROT HIT: P98161, EVALUE 1.10e-01; NT HIT: U41342.1, EVALUE 1.50e+00
gtctttatccgggaggagcctgcggatgtccacgtgagagcagtgccacccaggattcatgcccgtgttattatggccaatccgaattttttcaatgatttctcccacatcttctaac

SEQ ID NO: 21087 - DNA, 172 bp, Homo sapiens
  MAP TO CHR14.3; EXPRESSED IN HEART, SIGNAL = 6.4; EXPRESSED IN FETAL LIVER, SIGNAL = 8.7; EXPRESSED IN ADULT LIVER, SIGNAL = 5.5; EST_HUMAN HIT: BG818067.1, EVALUE 4.00e-92; SWISSPROT HIT: Q99538, EVALUE 2.00e-28; NT HIT: D55696.1, EVALUE 1.00e-91
ccgtgggggagtgccagttgaagcagtgggtccggaagtgcagcagggcctctgggtagcagctgtgccccgtgagcggggctctctcggacaggagctgctccacctcagcctcggacgctgccagcaaggagacgatcttacgcactgacttctcaatgaggtgcctggc

SEQ ID NO: 21088 - DNA, 371 bp, Homo sapiens
  MAP TO CHR18.3; EXPRESSED IN HELA, SIGNAL = 5.2; EXPRESSED IN HEART, SIGNAL = 3.7; EXPRESSED IN LUNG, SIGNAL = 3.6; EXPRESSED IN ADULT LIVER, SIGNAL =  42; EST_HUMAN HIT: AW514999.1, EVALUE 0.00e+00; SWISSPROT HIT: P00167, EVALUE 7.00e-10; NT HIT: L39945.1, EVALUE 0.00e+00
actttaaaagccaaatatatttttaaaagatcatgcttataataagtaaattacacattaaggaaacatcaaaataaagtagatgaataaaaaggcacactcgaaaaatttgagcgcagaaaggacagttctttttgttttgtttctaatgtcggaagaaaaagaaagagatatattaaaatcattgttttcaagtgaaggtttctgtcagttgaagtagttagcaatggcttcttttctcccgtgtccaaagcaggctcttcctgcgctgacttctgaggaggtgttcagtcctctgccatgtataggcgatacatcaaggcgacggccactgcagagatggcagggatcacccagttggtccaccaact

SEQ ID NO: 21089 - DNA, 183 bp, Homo sapiens
  MAP TO CHR18.3; EXPRESSED IN HELA, SIGNAL = 1.1; EXPRESSED IN PLACENTA, SIGNAL = 1.8; EXPRESSED IN LUNG, SIGNAL =   1; EXPRESSED IN BONE MARROW, SIGNAL = 1.3; EXPRESSED IN ADULT LIVER, SIGNAL = 2.2; EST_HUMAN HIT: BE502020.1, EVALUE 1.00e-98; SWISSPROT HIT: P11602, EVALUE 1.00e-08; NT HIT: gi16164049, EVALUE 9.00e-99
cgtccatccgtgaatgatgaaaaaggttttagctgtcatgttgaaactgcagtcttctaagggctggctgtggccgacggagaggtagcatccttcatgctctgggtccttggaggtgcggaggttaaacctcacagatggtttgacctcagtctgtgtagctttgggtttgtggagcttatc

SEQ ID NO: 21090 - DNA, 138 bp, Homo sapiens
  MAP TO CHR19.3; EXPRESSED IN PLACENTA, SIGNAL = 1.1; EXPRESSED IN HELA, SIGNAL = 1.4; EXPRESSED IN LUNG, SIGNAL =   1; EXPRESSED IN BRAIN, SIGNAL = 2.2; EXPRESSED IN ADULT LIVER, SIGNAL = 1.6; NT HIT: AF135023.1, EVALUE 5.00e-72; EST_HUMAN HIT: BF855758.1, EVALUE 7.00e-72; SWISSPROT HIT: Q9Y5K2, EVALUE 4.00e-13
gcagaatgcctaccgtgctgcagtgcgtgaacgtgtcggtggtgtctgaggaggtctgcagtaagctctatgacccgctgtaccaccccagcatgttctgcgccggcggagggcaagaccagaaggactcctgcaacg

SEQ ID NO: 21091 - DNA, 169 bp, Homo sapiens
  MAP TO CHR16.3; EXPRESSED IN HELA, SIGNAL = 3.7; EXPRESSED IN HEART, SIGNAL = 5.5; EXPRESSED IN FETAL LIVER, SIGNAL = 5.3; EXPRESSED IN BONE MARROW, SIGNAL = 4.4; EXPRESSED IN ADULT LIVER, SIGNAL = 4.7; EXPRESSED IN PLACENTA, SIGNAL = 4.7; SWISSPROT HIT: P26410, EVALUE 3.90e-01
gcatccgtgaccaggacagtgagtggtccacacagccatatgagcatccgtgaccaggacggtgagaatggtctgcacagccctgtgagcatccgtgaccaggacggtgagagtggtccacacagccatatgagcatccgtgaccagtgcactgataagacatcgtagg

SEQ ID NO: 21092 - DNA, 78 bp, Homo sapiens
  MAP TO CHR14.3; EXPRESSED IN HEART, SIGNAL = 4.2; EXPRESSED IN FETAL LIVER, SIGNAL =   2; EXPRESSED IN BRAIN, SIGNAL = 1.5; EXPRESSED IN ADULT LIVER, SIGNAL = 1.6; EXPRESSED IN PLACENTA, SIGNAL = 1.8; EXPRESSED IN HELA, SIGNAL = 1.7; EXPRESSED IN BONE MARROW, SIGNAL = 1.6; NT HIT: gi14784508, EVALUE 7.00e-20; EST_HUMAN HIT: BE620044.1, EVALUE 4.00e-10
ctgcctacagctccctgagtattctttctgctcatccacccacaccccttggacttcagcatggcctggacctggacc

SEQ ID NO: 21093 - DNA, 256 bp, Homo sapiens
  MAP TO CHR14.3; EXPRESSED IN HEART, SIGNAL = 3.2; EXPRESSED IN HELA, SIGNAL = 2.4; EXPRESSED IN LUNG, SIGNAL = 1.6; EXPRESSED IN FETAL LIVER, SIGNAL = 5.1; EXPRESSED IN ADULT LIVER, SIGNAL = 2.9; EXPRESSED IN BRAIN, SIGNAL =   4; SWISSPROT HIT: O41033, EVALUE 2.00e-03; NT HIT: AL163246.2, EVALUE 5.00e-61; EST_HUMAN HIT: BF508546.1, EVALUE 1.00e-77
gctaagaagggagctacagtgttggctggagtgattgacccagaatatcaagatgaaatcagtctacttctccacaatggaggtaagaaagagtatgcatggaattcaggagatcctttaggacatctcttagtattaccatgccctgtgattaaggtcaatgggaaactacaacagtccaatccaggcaggactacaaatggcccagacccttcgggaaagaaggtttgggtcactccaataggtaaaaaaccat

SEQ ID NO: 21094 - DNA, 147 bp, Homo sapiens
  MAP TO CHR16.3; EXPRESSED IN BONE MARROW, SIGNAL = 0.7; EXPRESSED IN ADULT LIVER, SIGNAL = 1.6; EXPRESSED IN HELA, SIGNAL = 1.2; EXPRESSED IN LUNG, SIGNAL = 1.5; SWISSPROT HIT: Q12968, EVALUE 2.00e+00; NT HIT: AF217491.1, EVALUE 2.00e+00; EST_HUMAN HIT: BF906759.1, EVALUE 2.90e+00
ctggagggggcagagctcccctgcttctttgcaggccttcatctctacagaaaaggtcaggcaaatgggtcccacatcattcaatcctaactgctccttcatagacttcagtttctgcctaatgtgcttgtctgggtctaatttcat

SEQ ID NO: 21095 - DNA, 79 bp, Homo sapiens
  MAP TO CHR18.3; EXPRESSED IN HEART, SIGNAL = 4.1; EXPRESSED IN LUNG, SIGNAL = 3.7; EXPRESSED IN FETAL LIVER, SIGNAL = 4.1; EXPRESSED IN BONE MARROW, SIGNAL = 3.6; EXPRESSED IN ADULT LIVER, SIGNAL =   3; EXPRESSED IN PLACENTA, SIGNAL = 3.4; EST_HUMAN HIT: BE735059.1, EVALUE 2.20e-02; NT HIT: U92082.1, EVALUE 1.50e-02
atggggcggggagggggggcagtgctgctggccggcacagcagtggcagcactgctattagtcatcgtgaaagctccag

SEQ ID NO: 21096 - DNA, 155 bp, Homo sapiens
  MAP TO CHR14.3; EXPRESSED IN BRAIN, SIGNAL = 1.2; EXPRESSED IN ADULT LIVER, SIGNAL = 1.1; EXPRESSED IN PLACENTA, SIGNAL =   1; SWISSPROT HIT: P38712, EVALUE 7.00e-05; EST_HUMAN HIT: BI261668.1, EVALUE 5.00e-82; NT HIT: gi14251213, EVALUE 4.00e-82
cctgagctgccgaaggttcctcaaatgataatgcttttctttaattaattcccacagccggcctggagtagcaaccacaatctcaggacgacggttcagcatcctctgctgtttctgcgtggacattccaccaaccaaaatagcagttttaattc

SEQ ID NO: 21097 - DNA, 146 bp, Homo sapiens
  MAP TO CHR19.3; EXPRESSED IN BONE MARROW, SIGNAL = 2.5; EXPRESSED IN ADULT LIVER, SIGNAL = 1.8; EXPRESSED IN PLACENTA, SIGNAL = 1.9; EXPRESSED IN LUNG, SIGNAL = 2.1; EXPRESSED IN FETAL LIVER, SIGNAL = 1.3; SWISSPROT HIT: P48546, EVALUE 4.00e-23; EST_HUMAN HIT: BG978572.1, EVALUE 1.00e-76; NT HIT: gi14761210, EVALUE 8.00e-77
ggcggctacattgcactagaaactatatccacatcaacctgttcacgtctttcatgctgcgagctgcggccattctcagccgagaccgtctgctacctcgacctggcccctaccttggggaccaggcccttgcgctgtggaaccag

SEQ ID NO: 21098 - DNA, 100 bp, Homo sapiens
  MAP TO CHR19.3; EXPRESSED IN HEART, SIGNAL = 1.9; EXPRESSED IN LUNG, SIGNAL = 3.7; EXPRESSED IN FETAL LIVER, SIGNAL = 2.1; EXPRESSED IN ADULT LIVER, SIGNAL = 1.6; EXPRESSED IN HELA, SIGNAL = 3.7; EXPRESSED IN PLACENTA, SIGNAL = 2.2; EST_HUMAN HIT: BG423717.1, EVALUE 2.00e-49; SWISSPROT HIT: Q13033, EVALUE 3.00e-06; NT HIT: gi14758789, EVALUE 1.00e-49
ctgtccgattgtccaggaagcggatgcccctgtcgtcgtgggcggtgatggtgagaggctggtttggatgactcaccacttggttgatctgggttggacc

SEQ ID NO: 21099 - DNA, 183 bp, Homo sapiens
  MAP TO CHR14.3; EXPRESSED IN FETAL LIVER, SIGNAL = 1.7; EXPRESSED IN BRAIN, SIGNAL = 1.7; EXPRESSED IN ADULT LIVER, SIGNAL = 1.4; NT HIT: gi7706642, EVALUE 3.00e-98; EST_HUMAN HIT: BE336778.1, EVALUE 5.00e-98; SWISSPROT HIT: P08567, EVALUE 1.00e-03
ctgcaggctgatgtgcgggggcagcttgaaggagtttctcaggctgtgcagctgctggaccttccccggctgccctgcatgaatagccccggtgatctcaaaggcccaggcatcccgctcctctcgagaacaggcctccaggaagtactccgtggatgtttgagtcttcagcttaatgaggag

SEQ ID NO: 21100 - DNA, 167 bp, Homo sapiens
  MAP TO CHR18.3; EXPRESSED IN HELA, SIGNAL =   1; EXPRESSED IN BONE MARROW, SIGNAL = 0.94; EXPRESSED IN ADULT LIVER, SIGNAL =   1; EXPRESSED IN PLACENTA, SIGNAL = 0.95; SWISSPROT HIT: Q55132, EVALUE 4.00e-09; NT HIT: AB043547.1, EVALUE 3.00e-89; EST_HUMAN HIT: AI870985.1, EVALUE 2.00e-88
agggtggaagatgtctatggatgtgacattcctggggacgggtgcagcatacccatctccaacccggggtgcctctgctgtggtccttcggtgtgaaggcgagtgctggctctttgactgtggggagggaacacagacacagcttatgaaaagccaacttaaagcag

SEQ ID NO: 21101 - DNA, 271 bp, Homo sapiens
  MAP TO CHR16.3; EXPRESSED IN ADULT LIVER, SIGNAL = 1.9; EXPRESSED IN HELA, SIGNAL = 1.3; EXPRESSED IN PLACENTA, SIGNAL = 1.7; EXPRESSED IN HEART, SIGNAL = 1.6; EXPRESSED IN LUNG, SIGNAL = 1.9; SWISSPROT HIT: Q9N2M8, EVALUE 8.50e-02; EST_HUMAN HIT: BE709296.1, EVALUE 9.20e-02
ctggtcaccccaaagccctccctctgtgggtgggaccagagggcccagagcacggatgacccaattgagcaggactcaggtggactcaggtgggtgctgggctggactcctggctgtggggagcagccaccaccctgcctactgcatccatgttccaactcgctgcctatcagagcagaggcattattgggcaccttgcgaaacatgcttctggtgcacctgctgcctgctgcccctcctgcagagtgcccgggctctccagaggggattc

SEQ ID NO: 21102 - DNA, 255 bp, Homo sapiens
  MAP TO CHR14.3; EXPRESSED IN PLACENTA, SIGNAL = 2.3; EXPRESSED IN HELA, SIGNAL =   2; EXPRESSED IN LUNG, SIGNAL = 2.2; EXPRESSED IN FETAL LIVER, SIGNAL = 1.7; EXPRESSED IN BRAIN, SIGNAL = 2.3; EXPRESSED IN ADULT LIVER, SIGNAL = 1.4; SWISSPROT HIT: O14598, EVALUE 1.50e+00; EST_HUMAN HIT: AI365263.1, EVALUE 2.00e-48; NT HIT: AF111167.2, EVALUE 0.00e+00
ttggccggaagctggttcgcttcatccaagggtctagtttgagggcattcatggcttctgcaagtttgagcatcccttgctcctggtgctggcagtgccactcagccatggactggagcatccacttggtttggagcttgtaccaataggagctgtaaaccacgacctcggtgaggtctgaagactccagagccttcagctggagcatggccttgctcatctgctcgatgtaagggattatccatacgggcctgc

SEQ ID NO: 21103 - DNA, 146 bp, Homo sapiens
  MAP TO CHR18.3; EXPRESSED IN PLACENTA, SIGNAL = 2.4; EXPRESSED IN ADULT LIVER, SIGNAL = 2.2; EXPRESSED IN BRAIN, SIGNAL = 2.8; SWISSPROT HIT: O66608, EVALUE 2.00e+00; EST_HUMAN HIT: BE972572.1, EVALUE 1.90e-01; NT HIT: AJ251973.1, EVALUE 5.00e-01
cttggtttgtgatattgaaaattctgggcctttctcatacgcttctgtttaatgtgactcctcttgtatcttacaatttccacgttgtccttagactccttgatgttgatgattgcatgacatctatctttgggaatctcgggaac

SEQ ID NO: 21104 - DNA, 370 bp, Homo sapiens
  MAP TO CHR18.3; EXPRESSED IN BRAIN, SIGNAL =   6; EXPRESSED IN ADULT LIVER, SIGNAL = 5.1; EXPRESSED IN PLACENTA, SIGNAL = 4.9; EXPRESSED IN HEART, SIGNAL = 4.5; EXPRESSED IN HELA, SIGNAL = 5.2; EXPRESSED IN LUNG, SIGNAL = 4.8; EXPRESSED IN BONE MARROW, SIGNAL = 7.3; EXPRESSED IN FETAL LIVER, SIGNAL = 7.5; SWISSPROT HIT: P19181, EVALUE 9.90e-01; EST_HUMAN HIT: AF143338.1, EVALUE 1.30e-01; NT HIT: AL161551.2, EVALUE 5.40e+00
tccttataattaactgagtattttctttgcttccttcaatggcagcattcctggttggattcagcttcccccaaaggttagccccctcagatgcattgctctttccccctgtgggaggaggggcatctagagtttcatcttttctctttttacaagcacatgaaacttggtccagaagcccaccaaccaagaaattaggatgggcctcagtaatgttttttcctgacatgcttctatccttgaaacacacaaggctcccagtgccaagaatcaaggtatcaagcgtcggcctacgacaagaagactgagggacagacccagcctggcagtttatcctcccatcccgacgactgtggggaggactacagag

SEQ ID NO: 21105 - DNA, 205 bp, Homo sapiens
  MAP TO CHR19.3; EXPRESSED IN ADULT LIVER, SIGNAL = 0.99; EXPRESSED IN HELA, SIGNAL = 1.5; EXPRESSED IN LUNG, SIGNAL =   2; EXPRESSED IN FETAL LIVER, SIGNAL = 0.84; SWISSPROT HIT: Q9JTX0, EVALUE 6.40e-01; EST_HUMAN HIT: BI916125.1, EVALUE 2.00e-51; NT HIT: gi14761534, EVALUE 1.00e-51
ctgcctcctggacagtgcagcgaccctgggcaggatctgctgctctcggcgggcctggcctgtccccggatgcatctggttcacagaggaggcccactggctggacacgtctctcggatcatctctgacactggcgggggcttcagccatctcgacatctgagttcagcataagatattctttgccgagcaagttgactatagac

SEQ ID NO: 21106 - DNA, 127 bp, Homo sapiens
  MAP TO CHR18.3; EXPRESSED IN HELA, SIGNAL =   2; EXPRESSED IN PLACENTA, SIGNAL = 1.8; EXPRESSED IN ADULT LIVER, SIGNAL = 1.5; SWISSPROT HIT: Q92750, EVALUE 3.00e-17; EST_HUMAN HIT: BI517527.1, EVALUE 9.00e-34; NT HIT: gi15305410, EVALUE 6.00e-65
gcaagtgaaaattacatcctgtgtagtgataccaggtcacagctcaaatttcttgaaaagctggatcaattggagaagcagagaaaggatttggaagaaagagaaatgttacttaaggcagccaagg

SEQ ID NO: 21107 - DNA, 223 bp, Homo sapiens
  MAP TO CHR18.3; EXPRESSED IN PLACENTA, SIGNAL = 3.9; EXPRESSED IN HELA, SIGNAL = 4.9; EXPRESSED IN FETAL LIVER, SIGNAL = 3.1; EXPRESSED IN LUNG, SIGNAL = 5.2; EXPRESSED IN BONE MARROW, SIGNAL = 4.7; EXPRESSED IN ADULT LIVER, SIGNAL =   3; EST_HUMAN HIT: BG289400.1, EVALUE 1.20e+00; SWISSPROT HIT: P36811, EVALUE 9.30e+00
ttttccttctgggtcatgtttctgacgtctgcaccatatgagctttcactctttctattgaaggttcttttaatactttggaatagcattaaggcccaaacattagcctcgtttaaggcagcaagcactctcatgaactcctctctgatcttgggatgtagtatcttctttgtggttattttgtttgtgcttatttttaccttttccaatttgaggagagcac

SEQ ID NO: 21108 - DNA, 163 bp, Homo sapiens
  MAP TO CHR19.3; EXPRESSED IN LUNG, SIGNAL = 1.8; EXPRESSED IN BONE MARROW, SIGNAL = 1.9; EXPRESSED IN ADULT LIVER, SIGNAL = 1.3; SWISSPROT HIT: Q9XSJ7, EVALUE 5.80e+00; NT HIT: AL163284.2, EVALUE 8.80e+00; EST_HUMAN HIT: BE830428.1, EVALUE 8.30e-01
ggaccgaaggtcccaatggcctcttcgacgtggcctcacccgatggctccgcgactcctgcggactcctgtggagtggtccaggcctctgtaaggaggttcctcgattaccctgggtcgattgtgacctctgccaccccccgaaacaccgcccaacccactag

SEQ ID NO: 21109 - DNA, 308 bp, Homo sapiens
  MAP TO CHR14.3; EXPRESSED IN PLACENTA, SIGNAL = 2.5; EXPRESSED IN LUNG, SIGNAL = 3.8; EXPRESSED IN FETAL LIVER, SIGNAL =   3; EXPRESSED IN BONE MARROW, SIGNAL = 3.1; EXPRESSED IN ADULT LIVER, SIGNAL = 1.3; EXPRESSED IN BRAIN, SIGNAL = 1.8; SWISSPROT HIT: P28928, EVALUE 2.10e+00; EST_HUMAN HIT: AW188614.1, EVALUE 2.00e-03; NT HIT: gi14775223, EVALUE 1.10e+00
tgaagtcttgaatggatcatatacattttcaaggcttcagttttgtcatcagtagcgacggcaggagtaggccacccggagcagccactgccatcagccggctgcagcagggggtcactagctgtggtggcaggagtggctgtgggagcagcagtggcagtggtcgatcccctgtgcccaacttttctcaggcagtggactgtgacacccctacccttgcatagctgggcaggacccactcccaggcccggatcttccaccacagtctcagcctcaccccttgccacatcctggggacccacaagcac

SEQ ID NO: 21110 - DNA, 242 bp, Homo sapiens
  MAP TO CHR18.3; EXPRESSED IN LUNG, SIGNAL = 5.9; EXPRESSED IN BONE MARROW, SIGNAL = 8.8; EXPRESSED IN BRAIN, SIGNAL =  12; EXPRESSED IN ADULT LIVER, SIGNAL = 8.3; EXPRESSED IN PLACENTA, SIGNAL = 7.9; EXPRESSED IN HEART, SIGNAL = 4.5; EXPRESSED IN HELA, SIGNAL = 7.1; SWISSPROT HIT: P34167, EVALUE 3.50e-01; EST_HUMAN HIT: BF347987.1, EVALUE 8.20e-02
tgagggatgtggcctgggccgtgggaacacagaggcggccagaggggaaagcctcagagctgcgtggacaggcttcttctgcttacacacgggcttctgccctgctcttgcccctcgggggttcttttgtcactggagaccctgctgttgccctttgctctccagtgcgtgtccccttcttccatatgccccctccttggtggggacaggctgctctgggaggtacagtgactgcgctagat

SEQ ID NO: 21111 - DNA, 128 bp, Homo sapiens
  MAP TO CHR16.3; EXPRESSED IN LUNG, SIGNAL =   1; EXPRESSED IN BONE MARROW, SIGNAL = 1.2; EXPRESSED IN FETAL LIVER, SIGNAL = 1.1; EXPRESSED IN BRAIN, SIGNAL = 1.5; EXPRESSED IN ADULT LIVER, SIGNAL = 1.2; EXPRESSED IN PLACENTA, SIGNAL = 1.2; SWISSPROT HIT: Q9NYC9, EVALUE 3.50e+00; EST_HUMAN HIT: BG819153.1, EVALUE 2.50e+00; NT HIT: gi12742414, EVALUE 1.70e+00
tgaaatccaaagatgctgttttccctaaagtgagtccattcttcatggaagaggaaataatgactctgaacctgcccggtgcaattgcggggcacgtttggacttgtgtggagtggtcccactcaaag

SEQ ID NO: 21112 - DNA, 213 bp, Homo sapiens
  MAP TO CHR16.3; EXPRESSED IN HELA, SIGNAL = 1.9; EXPRESSED IN ADULT LIVER, SIGNAL = 1.4; EXPRESSED IN PLACENTA, SIGNAL = 1.1; SWISSPROT HIT: P31503, EVALUE 2.80e+00; EST_HUMAN HIT: BG682584.1, EVALUE 2.80e-01
gacatccaagctcacctcggaaaacgacggaaactccaaggcaaggtggcctcccgaagtggccttttcccttccctcctcatccctgggctgtttccagcagacggcagtgaacgcctaaatgagggtttgatcaatggaggccaagctgatattgacaaagcagctgcagtttccgcaaatcacccagcactcatagatactgaagattaa

SEQ ID NO: 21113 - DNA, 143 bp, Homo sapiens
  MAP TO CHR14.3; EXPRESSED IN HELA, SIGNAL = 5.7; EXPRESSED IN HEART, SIGNAL = 3.9; EXPRESSED IN BRAIN, SIGNAL = 1.7; EXPRESSED IN ADULT LIVER, SIGNAL = 2.7; EXPRESSED IN PLACENTA, SIGNAL = 2.1; SWISSPROT HIT: Q15388, EVALUE 8.00e-10; EST_HUMAN HIT: BI825727.1, EVALUE 2.80e+00; NT HIT: AF271739.1, EVALUE 3.10e-02
gagagcacagaatggggattcaacacctcggcaatgcccttttagtgtgcgagcaaccacgggaacttctgaaagttttcaaacacactctccctcccaaggtatttgagatgctgttgcacaaaattccccttatttgccag

SEQ ID NO: 21114 - DNA, 247 bp, Homo sapiens
  MAP TO CHR16.3; EXPRESSED IN BRAIN, SIGNAL = 5.7; EXPRESSED IN ADULT LIVER, SIGNAL = 5.4; SWISSPROT HIT: O13146, EVALUE 3.10e+00; NT HIT: gi12597626, EVALUE 8.90e-01; EST_HUMAN HIT: BG769101.1, EVALUE 1.30e+00
tccttggctccctgcatgaacagaacccagccctggtctggatcggaagcaagaaaagaagcctgaacccaagtacggcctttgggcacggtctttctaccacatgtccacccgctctgcaactgccgggcacagcggacagtcaagctgtggtccatgatcaacaacctacgacctcccagtggccgctgggccactgccctgcccttggtaacctgagcaaagcagaggtaggaaagcaggttag

SEQ ID NO: 21115 - DNA, 100 bp, Homo sapiens
  MAP TO CHR18.3; EXPRESSED IN HELA, SIGNAL = 1.7; EXPRESSED IN HEART, SIGNAL = 1.7; EXPRESSED IN LUNG, SIGNAL = 1.5; EXPRESSED IN BONE MARROW, SIGNAL = 1.6; EXPRESSED IN ADULT LIVER, SIGNAL = 1.6; EXPRESSED IN BRAIN, SIGNAL = 1.4; EXPRESSED IN PLACENTA, SIGNAL = 1.5; SWISSPROT HIT: P28863, EVALUE 8.00e+00; NT HIT: AF007900.1, EVALUE 1.30e+00; EST_HUMAN HIT: BF129376.1, EVALUE 1.80e+00
tcattctttcttctctcttccgcataggaaccatgagtttcctttgttatagtggtgaacttttttgtcacatccaggtggaggaaattctgggtattcg

SEQ ID NO: 21116 - DNA, 219 bp, Homo sapiens
  MAP TO CHR16.3; EXPRESSED IN ADULT LIVER, SIGNAL = 2.5; EXPRESSED IN PLACENTA, SIGNAL = 3.1; EXPRESSED IN HELA, SIGNAL = 4.4; EXPRESSED IN HEART, SIGNAL = 2.7; EXPRESSED IN FETAL LIVER, SIGNAL =   3; EXPRESSED IN LUNG, SIGNAL =   6; SWISSPROT HIT: Q02433, EVALUE 8.20e-01; NT HIT: gi13385179, EVALUE 7.80e-01
ccagctatccatcggccagccacccggccacccgcacctcccgctccagggcctctgacatcccctccacccctctccgtgcagaattcgaaccccgatcctctcccttccgctcgccccagcccgggtcccgcagccccgcggcacgcccggcactcaccctcagagctcccggcactcaccctcagcgctcgcggctcctccgcgctctgcacgaaa

SEQ ID NO: 21117 - DNA, 264 bp, Homo sapiens
  MAP TO CHR18.3; EXPRESSED IN ADULT LIVER, SIGNAL =   7; EXPRESSED IN HELA, SIGNAL =  30; EXPRESSED IN HEART, SIGNAL =  20; EXPRESSED IN FETAL LIVER, SIGNAL =  10; SWISSPROT HIT: P24539, EVALUE 2.00e-41; EST_HUMAN HIT: BE874645.1, EVALUE 0.00e+00; NT HIT: gi4502298, EVALUE 0.00e+00
tcaacacatcatgttctgcacagatatatgatagtccaggcgattctttacttccttatatactctatacagtcgttcccggtaagtaacttccaaagccatagcaatgttattcctttgcacatcaaaaaggtaatggcgcttctgaaccagtgcctgttgtgacttctccatatcaattgcattctggatttgttggatggaagcctgcttcgcctcttctagttgggcaaggttttgctcattgagtttatcagcaaagtc

SEQ ID NO: 21118 - DNA, 296 bp, Homo sapiens
  MAP TO CHR16.3; EXPRESSED IN BRAIN, SIGNAL = 1.6; EXPRESSED IN ADULT LIVER, SIGNAL = 1.9; EXPRESSED IN PLACENTA, SIGNAL = 1.5; EXPRESSED IN HELA, SIGNAL = 2.5; EXPRESSED IN LUNG, SIGNAL = 2.2; EXPRESSED IN BONE MARROW, SIGNAL = 1.2; SWISSPROT HIT: Q08303, EVALUE 2.60e+00; EST_HUMAN HIT: BG259473.1, EVALUE 0.00e+00
tgacacgtgattgtcctggtgctttgcgagtctaacagtgcgcccgggtgaatcaagctactggtacctccgctaccgccaccaccaccaccaaaacgcattggcgaagtggagggttcattagggcaatgagcacagcagcttactttggggacagaagaaagctgtattttaggctgctgaagagaacgaatatcaggaagtgggactgctggaaaaagcttagagccagcatgaaggggtgatggtacatcctttagttccacagcaactttcttgttctccatgtactcttt

SEQ ID NO: 21119 - DNA, 163 bp, Homo sapiens
  MAP TO CHR19.3; EXPRESSED IN ADULT LIVER, SIGNAL = 1.2; EXPRESSED IN PLACENTA, SIGNAL = 2.1; EXPRESSED IN BONE MARROW, SIGNAL = 1.4; EXPRESSED IN BRAIN, SIGNAL = 3.1; SWISSPROT HIT: Q03923, EVALUE 1.00e-15; NT HIT: gi16163579, EVALUE 8.00e-28; EST_HUMAN HIT: BF797755.1, EVALUE 2.00e-32
tatgggggcttgaggaccatgtaaaggtttttataccatttatagcatttctctccagtatgaattgtcttatgtatagtaaggtgtgaaaaatggttgaaggctttgccacattcttcacatttgtagagtttctctccagtatgaatcttctcatgttcac

SEQ ID NO: 21120 - DNA, 87 bp, Homo sapiens
  MAP TO CHR14.3; EXPRESSED IN FETAL LIVER, SIGNAL = 3.2; EXPRESSED IN BONE MARROW, SIGNAL = 4.7; EXPRESSED IN BRAIN, SIGNAL = 4.7; EXPRESSED IN ADULT LIVER, SIGNAL = 5.6; EXPRESSED IN PLACENTA, SIGNAL = 6.4; EXPRESSED IN HELA, SIGNAL = 4.7; EXPRESSED IN HEART, SIGNAL = 2.6; NT HIT: U12683.1, EVALUE 2.70e-01
tcccaacatcacaggccatgaaggcaggggccagtcgtgtcttcctcaccaggtcccagcacttagcacacttgctgctacatcgtt

SEQ ID NO: 21121 - DNA, 115 bp, Homo sapiens
  MAP TO CHR16.3; EXPRESSED IN ADULT LIVER, SIGNAL = 1.9; EXPRESSED IN PLACENTA, SIGNAL = 1.9; EXPRESSED IN HELA, SIGNAL = 1.7; EXPRESSED IN LUNG, SIGNAL = 1.5; EXPRESSED IN FETAL LIVER, SIGNAL =   2; EXPRESSED IN BRAIN, SIGNAL = 2.6; EST_HUMAN HIT: BF744092.1, EVALUE 1.40e-01; NT HIT: gi13638696, EVALUE 9.50e-02
aggttgtcttgggtcttatggttgtctggggtggggggcgtgttgttgttgagggaggttatgtgctcttggagcatccgtacaatggtgggaatgcagaccttgaccatggggt

SEQ ID NO: 21122 - DNA, 133 bp, Homo sapiens
  MAP TO CHR14.3; EXPRESSED IN PLACENTA, SIGNAL =   2; EXPRESSED IN BONE MARROW, SIGNAL = 1.9; EXPRESSED IN ADULT LIVER, SIGNAL = 1.4
tggcctgcattcagccacaagttggtgagaaatatttggaaacgtcagaactagcaaagaacataaaatgtgcaattgaaaactcacccagagatttcagtgaggctaactcttctgagatctgcaagaggca

SEQ ID NO: 21123 - DNA, 78 bp, Homo sapiens
  MAP TO CHR19.3; EXPRESSED IN ADULT LIVER, SIGNAL = 1.6; EXPRESSED IN PLACENTA, SIGNAL = 1.8; EXPRESSED IN HELA, SIGNAL = 1.8; EXPRESSED IN LUNG, SIGNAL = 2.5; EXPRESSED IN FETAL LIVER, SIGNAL = 0.78; SWISSPROT HIT: O59923, EVALUE 1.10e-01; NT HIT: AF160214.1, EVALUE 6.00e-36; EST_HUMAN HIT: AA010171.1, EVALUE 8.00e-36
ttgctgatgagggaggcaaagggctgcacctgcaaggaggtacccatgaccaggaggaggtccaccttcaggaagtcc

SEQ ID NO: 21124 - DNA, 84 bp, Homo sapiens
  MAP TO CHR19.3; EXPRESSED IN BRAIN, SIGNAL = 3.9; EXPRESSED IN ADULT LIVER, SIGNAL = 2.4; EXPRESSED IN PLACENTA, SIGNAL =   4; EXPRESSED IN HEART, SIGNAL = 3.5; EXPRESSED IN HELA, SIGNAL = 4.8; EXPRESSED IN LUNG, SIGNAL = 4.3; EXPRESSED IN FETAL LIVER, SIGNAL = 2.9; NT HIT: AF208004.1, EVALUE 4.00e-40; EST_HUMAN HIT: BE409200.1, EVALUE 6.00e-40; SWISSPROT HIT: P00517, EVALUE 4.00e-10
ctgaaccttccgatccgccgtaggtgtgagaacatctccccgccgggcacgtactccatgaccatgtataagtttgagttgtcc

SEQ ID NO: 21125 - DNA, 161 bp, Homo sapiens
  MAP TO CHR14.3; EXPRESSED IN BONE MARROW, SIGNAL = 0.98; EXPRESSED IN FETAL LIVER, SIGNAL = 1.5; EXPRESSED IN ADULT LIVER, SIGNAL = 1.4; EXPRESSED IN PLACENTA, SIGNAL = 1.1; EXPRESSED IN HELA, SIGNAL =   6; NT HIT: gi14748653, EVALUE 4.00e-85; EST_HUMAN HIT: AU132572.1, EVALUE 6.00e-85; SWISSPROT HIT: Q10568, EVALUE 8.00e-27
gcatgttcaccagattgatgcagtgctgttgtctcaccctgatcctctccaccttggtgccctcccgtatgctgtcggaaagttgggtctgaactgtgctatctatgcaaccattcctgtttataaaatgggacagatgttcatgtatgatctttatcagg

SEQ ID NO: 21126 - DNA, 206 bp, Homo sapiens
  MAP TO CHR14.3; EXPRESSED IN ADULT LIVER, SIGNAL = 0.96; EXPRESSED IN PLACENTA, SIGNAL = 0.92; EXPRESSED IN BONE MARROW, SIGNAL = 1.3; EXPRESSED IN FETAL LIVER, SIGNAL = 0.86; SWISSPROT HIT: Q03385, EVALUE 1.10e+00; NT HIT: AF421855.1, EVALUE 1.80e-01
gcgtgcataaggaactttctgaaaccatgtcaagtattctccagattgaacaagaggatatagaatggggaccctcagaagcagaaagcatagtatttaaacctcaggaaatttcgcaagttcagccagcagaggaattaagtaaacctttggaagatggacagcccacaagtgattcaaaagaagccaagtgggtgtctttaacg

SEQ ID NO: 21127 - DNA, 214 bp, Homo sapiens
  MAP TO CHR18.3; EXPRESSED IN HELA, SIGNAL = 2.2; EXPRESSED IN LUNG, SIGNAL = 2.3; EXPRESSED IN FETAL LIVER, SIGNAL = 1.1; EXPRESSED IN BONE MARROW, SIGNAL = 1.9; EXPRESSED IN BRAIN, SIGNAL = 1.8; EXPRESSED IN ADULT LIVER, SIGNAL = 3.4; SWISSPROT HIT: P23142, EVALUE 9.50e-01; NT HIT: AL163204.2, EVALUE 2.00e-93; EST_HUMAN HIT: BI001636.1, EVALUE 2.00e-79
gtggcttctccggtatcttaatttgccatggaaggtgctggataaaggagggacagtcagatatgtcttagagatgactgtagaaggctgcctggaaggagtgaacaagagccaggagacccaggagggagcttgtggggcaggtctggagatggcaagggagggatcctgcttggatgaaaagtcttcagggactgtctcaggttacactcag

SEQ ID NO: 21128 - DNA, 206 bp, Homo sapiens
  MAP TO CHR16.3; EXPRESSED IN ADULT LIVER, SIGNAL = 3.6; EXPRESSED IN PLACENTA, SIGNAL = 2.3; EXPRESSED IN HELA, SIGNAL = 2.7; EXPRESSED IN HEART, SIGNAL = 1.9; EXPRESSED IN LUNG, SIGNAL = 3.7; EXPRESSED IN BONE MARROW, SIGNAL = 3.7; EXPRESSED IN FETAL LIVER, SIGNAL = 1.4; SWISSPROT HIT: Q63880, EVALUE 7.00e-21; NT HIT: gi14785624, EVALUE 1.00e-112; EST_HUMAN HIT: AL519832.1, EVALUE 1.00e-112
ggcccgaagttgctcagcctgaagtagacaccaccctgggtcgtgtgcgaggccggcaggtgggcgtgaagggcacagaccgccttgtgaatgtctttctgggcattccatttgcccagccgccactgggccctgaccggttctcagccccacacccagcacagccctgggagggtgtgcgggatgccagcactgcgcccccaatg

SEQ ID NO: 21129 - DNA, 125 bp, Homo sapiens
  MAP TO CHR18.3; EXPRESSED IN ADULT LIVER, SIGNAL = 1.4; EXPRESSED IN PLACENTA, SIGNAL = 1.2; EXPRESSED IN LUNG, SIGNAL =   1; EXPRESSED IN FETAL LIVER, SIGNAL = 1.4; EXPRESSED IN BONE MARROW, SIGNAL = 1.9; EXPRESSED IN BRAIN, SIGNAL = 1.6; SWISSPROT HIT: P22272, EVALUE 1.20e+00; NT HIT: AB031663.1, EVALUE 1.60e+00; EST_HUMAN HIT: BE184611.1, EVALUE 6.10e-01
ttgcattgggctgctctacatggaatctcattgcagcttcaactgccagatgtacgatgatgacccatgtgcttgggacccatgtctccagatggttccatgaggataaccagataggtctcatt

SEQ ID NO: 21130 - DNA, 154 bp, Homo sapiens
  MAP TO CHR18.3; EXPRESSED IN HELA, SIGNAL = 1.2; EXPRESSED IN BONE MARROW, SIGNAL = 1.9; EXPRESSED IN BRAIN, SIGNAL = 1.6; EXPRESSED IN ADULT LIVER, SIGNAL = 1.2; EXPRESSED IN PLACENTA, SIGNAL = 1.2; EST_HUMAN HIT: AW853137.1, EVALUE 2.00e-81; SWISSPROT HIT: P27435, EVALUE 1.20e+00; NT HIT: gi14765941, EVALUE 1.00e-81
ctatcgtatgtggtccaaataatgcacttctggatacagacagttaacgagaagagccaagaagcttttcccatcttgaaggcaatggccaggatgccttataaattgggtggcttgcaatatttgatcctggtattcaacatactgcttactt

SEQ ID NO: 21131 - DNA, 130 bp, Homo sapiens
  MAP TO CHR16.3; EXPRESSED IN ADULT LIVER, SIGNAL = 1.7; EXPRESSED IN PLACENTA, SIGNAL = 1.1; EXPRESSED IN HELA, SIGNAL = 1.6; NT HIT: gi14724248, EVALUE 1.00e-59; EST_HUMAN HIT: BF196068.1, EVALUE 2.00e-59; SWISSPROT HIT: Q61085, EVALUE 4.00e-05
tctgtgttctgatagacgcccactgagatgttcagcccctccagctcttccttgagcatctgcaggtctgagttgacgaagctcagctccagccgcacttgctcccgcacctttgggtttgcggccactc

SEQ ID NO: 21132 - DNA, 144 bp, Homo sapiens
  MAP TO CHR18.3; EXPRESSED IN LUNG, SIGNAL =   1; EXPRESSED IN ADULT LIVER, SIGNAL = 0.99; EXPRESSED IN BONE MARROW, SIGNAL = 1.5; SWISSPROT HIT: Q03297, EVALUE 3.40e+00; NT HIT: AB038961.1, EVALUE 1.20e-01; EST_HUMAN HIT: BE047486.1, EVALUE 2.80e+00
ttgatgagggagagtgagcagggaagaggagtagcccttaaatggaggctgaaaagcaatattgtgttggcagacaacaggaacacctgactggcccttttctgatggattaggtagagtgacatggcctgaaccttgaagccc

SEQ ID NO: 21133 - DNA, 120 bp, Homo sapiens
  MAP TO CHR16.3; EXPRESSED IN ADULT LIVER, SIGNAL = 1.3; EXPRESSED IN BRAIN, SIGNAL = 1.5; NT HIT: AB055658.1, EVALUE 1.00e-01; EST_HUMAN HIT: AW819290.1, EVALUE 5.80e-01
ttattaagacattgccactctgaagagtggagtcattcccaaggcccccgttgtcactggcaggcagcggttgactgacaagtgtcagttgcagcttgctgagcagcagaggccaataga

SEQ ID NO: 21134 - DNA, 137 bp, Homo sapiens
  MAP TO CHR16.3; EXPRESSED IN BRAIN, SIGNAL = 2.2; EXPRESSED IN ADULT LIVER, SIGNAL = 1.8; EXPRESSED IN PLACENTA, SIGNAL = 2.1; EXPRESSED IN HELA, SIGNAL = 1.7; EXPRESSED IN FETAL LIVER, SIGNAL = 3.1; SWISSPROT HIT: P31429, EVALUE 4.00e-04; NT HIT: gi14776078, EVALUE 2.00e-71; EST_HUMAN HIT: AI887572.1, EVALUE 3.00e-71
gttccctcaggggctggaggatgtgtccacatacccagtcctgatagaggagttgctgagtcgtagctggagcgaggaagagcttcaaggtgtccttcgtggaaacctgctgcgggtcttcagacaagtggaaaagg

SEQ ID NO: 21135 - DNA, 135 bp, Homo sapiens
  MAP TO CHR18.3; EXPRESSED IN FETAL LIVER, SIGNAL = 1.8; EXPRESSED IN ADULT LIVER, SIGNAL = 1.2; EXPRESSED IN BRAIN, SIGNAL = 1.3; EST_HUMAN HIT: BF742706.1, EVALUE 6.70e-01
gaacattcttccagtttacttctataagaatgtgcttgagaactccaaaatgacacagtccaaatgttgtaaatatggtccagcaaactacagaaaggcacacaaggaggctgccatcaatgccattcaaagagg

SEQ ID NO: 21136 - DNA, 126 bp, Homo sapiens
  MAP TO CHR18.3; EXPRESSED IN ADULT LIVER, SIGNAL = 1.5; EXPRESSED IN PLACENTA, SIGNAL = 1.7; EXPRESSED IN HELA, SIGNAL = 5.7; EXPRESSED IN LUNG, SIGNAL =  10; EXPRESSED IN FETAL LIVER, SIGNAL =   3; EXPRESSED IN BONE MARROW, SIGNAL = 5.7; SWISSPROT HIT: Q9X781, EVALUE 7.80e+00; EST_HUMAN HIT: AI190370.1, EVALUE 2.40e+00
ttttctcaggctggtttttcgtcgtcttcctttccagcagtcttagattttggtttactccagtttgttttagccacttaacactgttgtcatctgccgtaattcgctttgtgattttcttcgttc

SEQ ID NO: 21137 - DNA, 442 bp, Homo sapiens
  MAP TO CHR14.3; EXPRESSED IN BRAIN, SIGNAL =   3; EXPRESSED IN ADULT LIVER, SIGNAL = 3.2; EXPRESSED IN PLACENTA, SIGNAL = 4.1; EXPRESSED IN HEART, SIGNAL = 3.3; EXPRESSED IN HELA, SIGNAL = 3.9; EXPRESSED IN LUNG, SIGNAL = 5.3; SWISSPROT HIT: Q92356, EVALUE 1.10e-01; NT HIT: gi14750570, EVALUE 0.00e+00; EST_HUMAN HIT: AW134979.1, EVALUE 2.00e-84
ccttgtgcgcagtttctgcaaactgctgggcgctgttcttcaggtcttctgtcttctcctctgctcggcctaatcgctctccacgctcattcaaggcctggcttgccttctgcactgcgctggtcacgctgtcagcagctgaatggaggatgctgtttcctgaaaggaggagagcaggagcatcagaaactggctcagctgacccacagtgaccagactccggcagggtgagtatcctgtaagaggaaggcaggtcacactgcagaaaggccgctcgtctagtgtctaggaaacaagccgacatttcttttgattgggtttgactgacgcacttgcagcaagaacacccactgactgcaggacctaggaaaatcctaaatgcttctctataaactcatcactgacatgccagtcatttccattctgccagtattctatctgt

SEQ ID NO: 21138 - DNA, 223 bp, Homo sapiens
  MAP TO CHR19.3; EXPRESSED IN PLACENTA, SIGNAL = 3.5; EXPRESSED IN HELA, SIGNAL =   4; EXPRESSED IN FETAL LIVER, SIGNAL = 4.3; EXPRESSED IN BRAIN, SIGNAL = 6.8; EXPRESSED IN ADULT LIVER, SIGNAL = 3.8; EST_HUMAN HIT: BG773563.1, EVALUE 3.00e-84; SWISSPROT HIT: O88322, EVALUE 8.20e-01; NT HIT: gi16163780, EVALUE 8.00e-75
gacgctgggctgggaactgtccaatcaggcacgcagcttgagcggagaggacggcttccgggatgtggcgggatttgtccgcttctttgtctttggctgccgctggaactccgggtctcgtcttcactgctctgtgtcctctgctcctagaggcccagcctctggtcctgtgacctgcaggtattgggaatccacagctaagacgccgggacaccctggaagc

SEQ ID NO: 21139 - DNA, 212 bp, Homo sapiens
  MAP TO CHR19.3; EXPRESSED IN PLACENTA, SIGNAL = 1.8; EXPRESSED IN HELA, SIGNAL = 1.3; EXPRESSED IN ADULT LIVER, SIGNAL = 1.4; EST_HUMAN HIT: AV712765.1, EVALUE 1.00e-115; SWISSPROT HIT: Q05315, EVALUE 3.00e-37; NT HIT: gi14763853, EVALUE 1.00e-115
ggaatgaaccatatctgcaggtggatttccacactgagatgaaggaggaatcagacattgtcttccatttccaagtgtgctttggtcgtcgtgtggtcatgaacagccgtgagtatggggcctggaagcagcaggtggaatccaagaatatgccctttcaggatggccaagaatttgaactgagcatctcagtgctgccagataagtaccag

SEQ ID NO: 21140 - DNA, 222 bp, Homo sapiens
  MAP TO CHR14.3; EXPRESSED IN BRAIN, SIGNAL = 1.7; EXPRESSED IN ADULT LIVER, SIGNAL = 1.6; EXPRESSED IN PLACENTA, SIGNAL = 1.9; EXPRESSED IN HELA, SIGNAL = 1.6; EXPRESSED IN FETAL LIVER, SIGNAL = 2.7; EXPRESSED IN BONE MARROW, SIGNAL = 5.4; NT HIT: X58274.1, EVALUE 7.90e-01; EST_HUMAN HIT: BE963663.2, EVALUE 2.90e-01; SWISSPROT HIT: P09278, EVALUE 7.10e+00
tgccgccttgttgatgagagtccttctagcatcccccttctccacatcaggagctgctactgagatcccaacctgtagctcaaatcttctttccatgtcaactgtttgcttgcccctgtccctagcaaaagctaacccttccttctctaggctcctacagcactttgtccagtgccaaccatagtctttctgtagattttgacaattgctctctccaacgtc

SEQ ID NO: 21141 - DNA, 75 bp, Homo sapiens
  MAP TO CHR14.3; EXPRESSED IN ADULT LIVER, SIGNAL =   2; EXPRESSED IN LUNG, SIGNAL = 3.8; EXPRESSED IN BONE MARROW, SIGNAL = 2.4; NT HIT: gi15299846, EVALUE 3.00e-34; EST_HUMAN HIT: BF801600.1, EVALUE 1.00e-34
ccatcgcgccaaactctcttcgctacagcagctgccgacaccgccgccgttacacgagcttaactacaacgccgc

SEQ ID NO: 21142 - DNA, 105 bp, Homo sapiens
  MAP TO CHR16.3; EXPRESSED IN FETAL LIVER, SIGNAL = 2.7; EXPRESSED IN BONE MARROW, SIGNAL =   2; EXPRESSED IN BRAIN, SIGNAL = 1.2; EXPRESSED IN ADULT LIVER, SIGNAL = 1.2; EXPRESSED IN LUNG, SIGNAL = 1.7; SWISSPROT HIT: O55192, EVALUE 2.00e-13; NT HIT: X91127.1, EVALUE 2.00e-52; EST_HUMAN HIT: BE313934.1, EVALUE 6.00e-50
ggtggaatttacgtcttgaccctcctggacacctttgctgcgggcacctccatcctttttgctgtcctcatggaagccatcggagtttcctggttttatggtatg

SEQ ID NO: 21143 - DNA, 148 bp, Homo sapiens
  MAP TO CHR16.3; EXPRESSED IN PLACENTA, SIGNAL = 5.5; EXPRESSED IN HELA, SIGNAL = 5.1; EXPRESSED IN FETAL LIVER, SIGNAL =   4; EXPRESSED IN LUNG, SIGNAL = 4.6; EXPRESSED IN BONE MARROW, SIGNAL = 5.3; EXPRESSED IN ADULT LIVER, SIGNAL = 6.2; EXPRESSED IN BRAIN, SIGNAL = 4.1; SWISSPROT HIT: Q07008, EVALUE 7.70e+00; NT HIT: J03733.1, EVALUE 2.00e+00
tgccctctggaaactcccaagatgaaatggacaacagcaggctggacccagaccacaccgggaacacatgtacaaccagcctaaaggccagtttggtgtacatcctgggcccaggaggacaccggaagctttggctgctgccaggaag

SEQ ID NO: 21144 - DNA, 106 bp, Homo sapiens
  MAP TO CHR16.3; EXPRESSED IN BONE MARROW, SIGNAL = 1.4; EXPRESSED IN ADULT LIVER, SIGNAL = 1.1; EXPRESSED IN PLACENTA, SIGNAL = 1.1; EXPRESSED IN HELA, SIGNAL =   1; NT HIT: gi13654717, EVALUE 2.00e-52; EST_HUMAN HIT: BG184448.1, EVALUE 2.00e-52; SWISSPROT HIT: P21415, EVALUE 6.20e-02
gagggcaaagataaaatgttcctgatagaaaaattgatcaagctgcaggatatggagaagaaagcaaaccccagctcacttgttctggaaaggagagaggtggagg

SEQ ID NO: 21145 - DNA, 399 bp, Homo sapiens
  MAP TO CHR18.3; EXPRESSED IN HELA, SIGNAL = 1.5; EXPRESSED IN LUNG, SIGNAL = 1.1; EXPRESSED IN BONE MARROW, SIGNAL = 1.8; EXPRESSED IN BRAIN, SIGNAL = 1.8; EXPRESSED IN ADULT LIVER, SIGNAL = 1.6; EXPRESSED IN PLACENTA, SIGNAL =   2; SWISSPROT HIT: O02739, EVALUE 5.00e-24; NT HIT: D88575.1, EVALUE 0.00e+00; EST_HUMAN HIT: BI871335.1, EVALUE 0.00e+00
attgaaaacaaactgacctttcagaatctaatggaatggaccaatccaaggcgaatgacctctaagtatgttgaggtattttttcctcagttcaagatagagaagaattatgaaatgaaacaatatttgagagccctagggctgaaagatatctttgatgaatccaaagcagatctctctgggattgcttcggggggtcgtctgtatatatcaaggatgatgcacaaatcttacatagaggtcactgaggagggcaccgaggctactgctgccacaggaagtaatattgtagaaaagcaactccctcagtccacgctgtttagagctgaccacccattcctatttgttatcaggaaggatgacatcatcttattcagtggcaaagtttcttgcccttga

SEQ ID NO: 21146 - DNA, 185 bp, Homo sapiens
  MAP TO CHR18.3; EXPRESSED IN BRAIN, SIGNAL = 1.1; EXPRESSED IN ADULT LIVER, SIGNAL = 1.1; SWISSPROT HIT: P21769, EVALUE 1.90e+00; NT HIT: AL139794.3, EVALUE 4.20e-02; EST_HUMAN HIT: AW840949.1, EVALUE 2.40e-01
tatccctaataagagagagagaaagctagagacagagaatgtgttccaggtgctcaatgtcttactggtgctgtgcctgcaactatcatcattccagcttctgtgtacacacacctggcttcccacagttaaggtggaggaggaggcagccagccagctgtgtgaaggactgaacccgttaggct

SEQ ID NO: 21147 - DNA, 159 bp, Homo sapiens
  MAP TO CHR16.3; EXPRESSED IN FETAL LIVER, SIGNAL =   2; EXPRESSED IN BONE MARROW, SIGNAL =  40; EXPRESSED IN ADULT LIVER, SIGNAL = 8.9; EXPRESSED IN PLACENTA, SIGNAL = 2.7; EXPRESSED IN HELA, SIGNAL = 2.4; SWISSPROT HIT: P01771, EVALUE 6.00e-15; NT HIT: Z29612.1, EVALUE 2.00e-84; EST_HUMAN HIT: BI464043.1, EVALUE 4.00e-46
cttcagtaacagtgacatgaactgggtcctctaggctccaggaaaggggctggagtgggtctcgggtattagttggaatggcggtaagacgcactatgtggactccgtgaagggccaatttaccatctccagagacaattccagcaagtccctgtatct

SEQ ID NO: 21148 - DNA, 140 bp, Homo sapiens
  MAP TO CHR18.3; EXPRESSED IN FETAL LIVER, SIGNAL = 1.4; EXPRESSED IN BONE MARROW, SIGNAL = 1.6; EXPRESSED IN ADULT LIVER, SIGNAL = 1.3; EXPRESSED IN BRAIN, SIGNAL = 1.7; EXPRESSED IN PLACENTA, SIGNAL = 1.2; EST_HUMAN HIT: BG183843.1, EVALUE 1.80e-01; SWISSPROT HIT: Q9NG98, EVALUE 1.50e+00; NT HIT: U82671.3, EVALUE 7.40e+00
ttcatcagcacccatcccccaacaccactatcactctgggtacattcctcctttattttttcccattcctgccttccttccactactacctgtcccactgagccaaccctaaacattttgtcctcatagttgttcctcat

SEQ ID NO: 21149 - DNA, 361 bp, Homo sapiens
  MAP TO CHR19.3; EXPRESSED IN ADULT LIVER, SIGNAL = 1.9; EXPRESSED IN BRAIN, SIGNAL = 1.5; EXPRESSED IN FETAL LIVER, SIGNAL = 2.9; NT HIT: gi14756175, EVALUE 0.00e+00; EST_HUMAN HIT: BI824253.1, EVALUE 0.00e+00; SWISSPROT HIT: P40199, EVALUE 1.00e-65
gcctcacttctaaccttctggaacccacccaccactgccaagctcactattgaatccacgccgttcaatgtcgcagaggggaaggaggttcttctactcgcccacaacctgccccagaatcgtattggttacagctggtacaaaggcgaaagagtggatggcaacagtctaattgtaggatatgtaataggaactcaacaagctaccccagggcccgcatacagtggtcgagagacaatataccccaatgcatccctgctgatccagaacgtcacccagaatgacacaggattctataccctacaagtcataaagtcagatcttgtgaatgaagaagcaaccggacagttccatgtatacc

SEQ ID NO: 21150 - DNA, 82 bp, Homo sapiens
  MAP TO CHR19.3; EXPRESSED IN HELA, SIGNAL = 1.6; EXPRESSED IN PLACENTA, SIGNAL = 1.4; EXPRESSED IN LUNG, SIGNAL = 1.9; EXPRESSED IN BONE MARROW, SIGNAL =   2; EXPRESSED IN ADULT LIVER, SIGNAL = 1.4; NT HIT: gi15304432, EVALUE 3.00e-38; EST_HUMAN HIT: BG334378.1, EVALUE 4.00e-38
cttctcctcctgcttctggtctatctcctcctgcagcctccgcagaagccggtcctgcccgcacaacttggtcagcagcgtc

SEQ ID NO: 21151 - DNA, 79 bp, Homo sapiens
  MAP TO CHR19.3; EXPRESSED IN PLACENTA, SIGNAL = 6.4; EXPRESSED IN HELA, SIGNAL = 3.8; EXPRESSED IN LUNG, SIGNAL =   6; EXPRESSED IN FETAL LIVER, SIGNAL = 8.3; EXPRESSED IN ADULT LIVER, SIGNAL =  48; EXPRESSED IN BRAIN, SIGNAL = 5.9; NT HIT: gi16193601, EVALUE 4.00e-37; EST_HUMAN HIT: BG616562.1, EVALUE 5.00e-37; SWISSPROT HIT: Q10586, EVALUE 4.80e+00
gagtgcccctccggcctcgccatgaggctcttcctgtcgctcccggtcctggtggtggttctgtcgatcgtcttggaag

SEQ ID NO: 21152 - DNA, 366 bp, Homo sapiens
  MAP TO CHR14.3; EXPRESSED IN HELA, SIGNAL = 1.3e+02; EXPRESSED IN HEART, SIGNAL = 1.4e+02; EXPRESSED IN BRAIN, SIGNAL =  40; EXPRESSED IN ADULT LIVER, SIGNAL =  46; SWISSPROT HIT: P42740, EVALUE 5.00e-21; NT HIT: X56999.1, EVALUE 1.00e-118; EST_HUMAN HIT: BG029767.1, EVALUE 1.00e-118
aatgtcaaaaccaaaattcaggacaaggagggtatcccacctgaccagcagcgtctgatatttgctgggaaacggctggaggatggccacactctctcaggctacaacatccagaaagagtccaccctaaacctggtgctgcgcctgcgaggtggcattactgagccttccctccgccagctcgtccagaaatacaactgcgacgagatgatctgctgcaagtgctatgcttgcctgcaccccggtgctatcaactgccacaagaagaaatgcggccacaccaacaacctgtaccccaggaagaaggtcaaataaggctcttccttccttgaagggcagcagccttctgcccaggccccatggccc

SEQ ID NO: 21153 - DNA, 112 bp, Homo sapiens
  MAP TO CHR18.3; EXPRESSED IN FETAL LIVER, SIGNAL = 1.2; EXPRESSED IN ADULT LIVER, SIGNAL = 1.2; EXPRESSED IN HEART, SIGNAL = 1.7; EXPRESSED IN BONE MARROW, SIGNAL = 1.9
ctgtctcgggggccctcaccgtgggctttgtgatcccctgacagctccaaaagcctttatcctcatccaatatctggtgaacagctgacacctcctgggaatctttaaaatt

SEQ ID NO: 21154 - DNA, 144 bp, Homo sapiens
  MAP TO CHR16.3; EXPRESSED IN PLACENTA, SIGNAL = 1.4; EXPRESSED IN FETAL LIVER, SIGNAL = 1.6; EXPRESSED IN BONE MARROW, SIGNAL = 1.5; EXPRESSED IN BRAIN, SIGNAL = 1.4; EXPRESSED IN ADULT LIVER, SIGNAL = 4.1; EST_HUMAN HIT: BI837691.1, EVALUE 4.00e-55; SWISSPROT HIT: P23141, EVALUE 5.00e-20; NT HIT: gi14778598, EVALUE 2.00e-55
tgcacccaagatcccaaggtagggcagtttctctcagaactattgaccaaccgaaaggaaaacattcctttcaagctttctgaagactgtctttacctcaatatttacactcctgctgacttgaccaagaaaaacaggctgctg

SEQ ID NO: 21155 - DNA, 94 bp, Homo sapiens
  MAP TO CHR14.3; EXPRESSED IN HELA, SIGNAL = 1.3; EXPRESSED IN PLACENTA, SIGNAL = 1.2; EXPRESSED IN LUNG, SIGNAL = 1.5; EXPRESSED IN ADULT LIVER, SIGNAL = 0.96; NT HIT: Y13049.1, EVALUE 7.40e-02; EST_HUMAN HIT: BE972361.1, EVALUE 8.00e-46; SWISSPROT HIT: O28344, EVALUE 1.20e+00
catatttgtgctacgtcttccttaccaagaagaagtatgaacaaagaatcagaaatataccattatgttcaggtttcaagaatagtgcttcaag

SEQ ID NO: 21156 - DNA, 108 bp, Homo sapiens
  MAP TO CHR18.3; EXPRESSED IN ADULT LIVER, SIGNAL = 1.2; EXPRESSED IN PLACENTA, SIGNAL = 1.1; NT HIT: M18818.1, EVALUE 3.50e-01; SWISSPROT HIT: P26565, EVALUE 2.70e+00
tgaagaaactctttttcataccccaaatgtctttgcccctcctcctggagatagagccctgctttttcctggtgatcgctagtcccccctacacaactcagagacagg

SEQ ID NO: 21157 - DNA, 142 bp, Homo sapiens
  MAP TO CHR18.3; EXPRESSED IN LUNG, SIGNAL = 1.9; EXPRESSED IN FETAL LIVER, SIGNAL = 1.9; EXPRESSED IN BRAIN, SIGNAL = 2.5; EXPRESSED IN ADULT LIVER, SIGNAL = 2.1; EXPRESSED IN PLACENTA, SIGNAL = 1.9; SWISSPROT HIT: P13889, EVALUE 5.90e+00; EST_HUMAN HIT: BE274367.1, EVALUE 7.10e-01
tgtgcaggagccattccagcggacaggaccgtacacgcaggtgctgaggaagatgcgactatcaacaaggccgctaccctcaaagtgaggagggtcccccgctgcagcaagccatggctccttatctgcctggctgatcctg

SEQ ID NO: 21158 - DNA, 144 bp, Homo sapiens
  MAP TO CHR14.3; EXPRESSED IN PLACENTA, SIGNAL = 5.9; EXPRESSED IN HEART, SIGNAL =   8; EXPRESSED IN LUNG, SIGNAL = 7.3; EXPRESSED IN FETAL LIVER, SIGNAL = 9.8; EXPRESSED IN BONE MARROW, SIGNAL = 8.8; EXPRESSED IN ADULT LIVER, SIGNAL = 9.5; SWISSPROT HIT: P98088, EVALUE 3.00e-01; EST_HUMAN HIT: AW969565.1, EVALUE 1.80e-01
atgaggggaggaaaaacaaaggaaattaaatgcaaaatcactgctggtgaaaaaccacatggaggccttgactttaataccgccagagccgatgggggaagtggccccaaagagtcggaaccgaaggacgttggcctggtattc

SEQ ID NO: 21159 - DNA, 376 bp, Homo sapiens
  MAP TO CHR14.3; EXPRESSED IN LUNG, SIGNAL = 3.4; EXPRESSED IN ADULT LIVER, SIGNAL = 2.7; EXPRESSED IN PLACENTA, SIGNAL = 2.5; EXPRESSED IN HELA, SIGNAL =   4; EXPRESSED IN HEART, SIGNAL =   3; EXPRESSED IN BONE MARROW, SIGNAL = 5.4; EXPRESSED IN FETAL LIVER, SIGNAL = 2.8; EXPRESSED IN BRAIN, SIGNAL = 4.5; SWISSPROT HIT: P33485, EVALUE 7.80e-01; NT HIT: gi14749539, EVALUE 0.00e+00; EST_HUMAN HIT: BE880986.1, EVALUE 0.00e+00
agccagccagtcttcctactgctatagcagccggcattcatccctccggatgtccaccactgggtttgtgccttgtcggcgctcttctactagtcagatatcgcttcgaaacttgccatcatccatccaatcccgactgtcgatggtgaaccaaatggaaccctcaggtcagagcggcctggcctgtgtgcagcacggcctgccttcctccagcagctccagccaaagcatcccagcctgcaaacatcacactctcgtgggctttcttgcgacagagggaggtcagagcagtgccactgatgcacagccaggcaacaccttaagtcctgccaacaattcacactccagaaaggcagaagtgatttacagagtccaa

SEQ ID NO: 21160 - DNA, 386 bp, Homo sapiens
  MAP TO CHR16.3; EXPRESSED IN BONE MARROW, SIGNAL =   4; EXPRESSED IN BRAIN, SIGNAL = 3.7; EXPRESSED IN ADULT LIVER, SIGNAL = 2.6; EXPRESSED IN HELA, SIGNAL = 3.4; EXPRESSED IN PLACENTA, SIGNAL = 2.8; EXPRESSED IN HEART, SIGNAL = 2.4; EXPRESSED IN LUNG, SIGNAL = 3.9; SWISSPROT HIT: P14076, EVALUE 1.80e+00; EST_HUMAN HIT: AW294552.1, EVALUE 1.00e-123
tcagacagacccactggcgtctctctgctgagtgaccgtaagctcggcgtctggccctctgcctgcctctccctgagtgtggctgacagccacgcagctgtgtctgtctgtctgcggcccgtgcatccctgctgcggccgcctggtaccttccttgccgtctctttcctctgtctgctgctctgtgggacacctgcctggaggcccagctgcccgtcatcagagtgacaggtcttatgacagcctgattggtgactcgggctgggtgtggattctcaccccaggcctctgcctgctttctcagaccctcatctgtcacccccacgctgaacccagctgccacccccagaagcccatcagactgcccccagcacacggaatggattt

SEQ ID NO: 21161 - DNA, 280 bp, Homo sapiens
  MAP TO CHR19.3; EXPRESSED IN ADULT LIVER, SIGNAL = 1.1; EXPRESSED IN HELA, SIGNAL = 2.1; EST_HUMAN HIT: BG772726.1, EVALUE 0.00e+00; SWISSPROT HIT: Q9UPR5, EVALUE 2.00e-43; NT HIT: gi15301799, EVALUE 0.00e+00
gggacgaggaggaggaggaggacgggtcccgggaggagcggctgccgtcgtgctttgactacgtgatgcacttcctgacggtgttctggaaggtgctcttcgcctgtgtgccccccaccgagtactgccacggctgggcctgctttggtgtctccatcctggtcatcggcctgctcaccgccctcattggggacctcgcctcccacttcggctgcaccgttggcctcaaggactctgtcaatgctgttgtcttcgttgccctgggcacctccatccctgg

SEQ ID NO: 21162 - DNA, 235 bp, Homo sapiens
  MAP TO CHR18.3; EXPRESSED IN LUNG, SIGNAL = 1.1; EXPRESSED IN ADULT LIVER, SIGNAL = 1.1; EXPRESSED IN PLACENTA, SIGNAL = 0.99; EXPRESSED IN HELA, SIGNAL =   1; SWISSPROT HIT: P06571, EVALUE 2.80e+00
gagaccttctgctctaggaatagtaactaatcttttccctaaaccaataatagtttctctacagctgaagccagattcaaggtcatatcagtttaaaagaaaattgaaaagacaattattttggactcttaaggaaaagcagacagtgaaaattcaatggctatattcagaacataccgaagtatttgaaaagaaactttttcagcccatggaagaagacacatgtaattattag

SEQ ID NO: 21163 - DNA, 130 bp, Homo sapiens
  MAP TO CHR18.3; EXPRESSED IN FETAL LIVER, SIGNAL = 2.6; EXPRESSED IN BONE MARROW, SIGNAL = 1.8; EXPRESSED IN BRAIN, SIGNAL = 2.7; EXPRESSED IN ADULT LIVER, SIGNAL = 2.1; EXPRESSED IN PLACENTA, SIGNAL = 2.2; NT HIT: gi16183725, EVALUE 1.10e-01; EST_HUMAN HIT: AL550243.1, EVALUE 1.60e-01; SWISSPROT HIT: P53774, EVALUE 4.00e-01
ctcaccctggctgtcacaaccagagccaggttgcccaactgtatggatgctttcttcaatcttcatatgtccccacactgtcctcctttctagatggacatcctcctcaccctgcttattttctgacatc

SEQ ID NO: 21164 - DNA, 135 bp, Homo sapiens
  MAP TO CHR16.3; EXPRESSED IN HELA, SIGNAL = 3.5; EXPRESSED IN HEART, SIGNAL =   3; EXPRESSED IN PLACENTA, SIGNAL = 2.5; EXPRESSED IN LUNG, SIGNAL = 3.6; EXPRESSED IN BONE MARROW, SIGNAL = 3.8; EXPRESSED IN ADULT LIVER, SIGNAL = 2.6; SWISSPROT HIT: P15301, EVALUE 6.80e-01; NT HIT: AE005781.1, EVALUE 4.50e-01; EST_HUMAN HIT: AL524245.1, EVALUE 6.00e-69
gagtcaaggtggacgcgagagaccacagtggagccacagcccggatgctggccaagcagtacggacacatgaagatcgtggccttgatggacacttactcgccctctctgcccaagagcctctatcggagcccag

SEQ ID NO: 21165 - DNA, 133 bp, Homo sapiens
  MAP TO CHR16.3; EXPRESSED IN HELA, SIGNAL = 1.3; EXPRESSED IN BONE MARROW, SIGNAL = 2.1; EXPRESSED IN ADULT LIVER, SIGNAL = 1.3; NT HIT: gi14776228, EVALUE 2.00e-68; EST_HUMAN HIT: BI061679.1, EVALUE 1.00e-66
gagcagcgggagcagctgcaggtcctacgccaggctgccttcgaggtggagggggagtcctcgggtgccgggctaagtgctgaccgtcgccgttccctctgtgcccgagagttccgcaaactgggcttttctg

SEQ ID NO: 21166 - DNA, 195 bp, Homo sapiens
  MAP TO CHR18.3; EXPRESSED IN ADULT LIVER, SIGNAL = 1.2; EXPRESSED IN HELA, SIGNAL = 1.3; EXPRESSED IN BONE MARROW, SIGNAL = 1.5; EXPRESSED IN FETAL LIVER, SIGNAL = 1.8; EXPRESSED IN BRAIN, SIGNAL = 1.9; SWISSPROT HIT: O14497, EVALUE 6.40e-01; NT HIT: gi15295347, EVALUE 1.70e-01; EST_HUMAN HIT: BF918648.1, EVALUE 1.00e-71
gaagtttggatgattatttcacccatgcgaccaagaatgagccttcgcacttctggagagacagaactctgcaaatagagctgagggaatactcaaaagacagatttgggagttctaagaactcgtgcagtaaaatgacagcagaggagaaggggcaggaaaatgttaccctaagagcatggctggcaggaagga

SEQ ID NO: 21167 - DNA, 163 bp, Homo sapiens
  MAP TO CHR18.3; EXPRESSED IN ADULT LIVER, SIGNAL = 1.3; EXPRESSED IN PLACENTA, SIGNAL = 1.5; EXPRESSED IN HELA, SIGNAL = 1.7; EXPRESSED IN LUNG, SIGNAL = 1.9; EXPRESSED IN BONE MARROW, SIGNAL =   2; SWISSPROT HIT: P98195, EVALUE 3.00e-22; NT HIT: gi7656917, EVALUE 3.00e-36; EST_HUMAN HIT: AA479950.1, EVALUE 1.00e-86
gtcgctctggtgcagtggacagagagtgtgggcctcacgctggtcagcagggacctcacctccatgcagctgaagacccccagtggccaggtcctcagcttctgcattctgcagctgtttcccttcacctccgagagcaagcggatgggcgtcatcgtcaggg

SEQ ID NO: 21168 - DNA, 194 bp, Homo sapiens
  MAP TO CHR18.3; EXPRESSED IN FETAL LIVER, SIGNAL = 1.8; EXPRESSED IN BRAIN, SIGNAL = 1.5; EXPRESSED IN ADULT LIVER, SIGNAL = 1.1; EXPRESSED IN PLACENTA, SIGNAL = 1.2; EST_HUMAN HIT: BF677204.1, EVALUE 2.60e-01; SWISSPROT HIT: P33213, EVALUE 2.90e-01
tgtttgtgtggttgttctttacacctcccgtgatgatgaccaaagtcaatccaagccacttggcatctgccttgcccaccactgcagggggtacatagtcatcatttagcactgagcacgtctccctagcagtgctggaaggaggggtgccatcaacagcctccaatgcagctgaactcggaggggtggcaagc

SEQ ID NO: 21169 - DNA, 368 bp, Homo sapiens
  MAP TO CHR16.3; EXPRESSED IN ADULT LIVER, SIGNAL = 4.5; EXPRESSED IN PLACENTA, SIGNAL = 2.4; EXPRESSED IN HELA, SIGNAL = 4.2; EST_HUMAN HIT: BG743360.1, EVALUE 0.00e+00; SWISSPROT HIT: O75153, EVALUE 5.00e-30; NT HIT: gi14771279, EVALUE 2.00e-30
aaagtcagtggagccatagatgacactctgctcctggtcccactccaggatgccagggatgaggactggaacctgacccagtagctgcggtcatccacctctgctgtgtccagcgtgtacagaccctccatgtccgctgccttgtgcgggtgctcaccgttcaggtcattggtgaatgctatggaggctgccacatccctggcaaagtccttgtagtggccactaatgacaaagcccaggctgaagatgatgcggctccacatgaacatctgcagcttggtctcctcactgggactgatggccatgacgatgcctccctgactaccatggcgccccatgtggctgccattctgaagttgctgtgtacc

SEQ ID NO: 21170 - DNA, 179 bp, Homo sapiens
  MAP TO CHR18.3; EXPRESSED IN ADULT LIVER, SIGNAL = 1.3; EXPRESSED IN BRAIN, SIGNAL = 1.5; EXPRESSED IN PLACENTA, SIGNAL = 1.2; EXPRESSED IN FETAL LIVER, SIGNAL = 1.7; SWISSPROT HIT: P47776, EVALUE 5.70e+00; NT HIT: U67600.1, EVALUE 1.60e-01
tgtgagcccctgggactcctcttccctgctcaggatgcgctcagctctgatcagggtgttgtcttcatcttttgggggtgagaatttgtgggtgacttttttatttttgtgaccaagtcctgttgttgctggtttggcgtatttgtccatgtcctcaggtttgataggtctcctgtcac

SEQ ID NO: 21171 - DNA, 124 bp, Homo sapiens
  MAP TO CHR16.3; EXPRESSED IN FETAL LIVER, SIGNAL = 0.93; EXPRESSED IN ADULT LIVER, SIGNAL = 1.1; NT HIT: AL583917.1, EVALUE 1.00e-01; EST_HUMAN HIT: BF239484.1, EVALUE 6.10e-01
ttttctgaatttgccgaacagaaatgcgatcaggtgcctactaagtccagtacccagcacgatgtctagcattgaaacatacagtgtatacaccagcacctccaccaaacccatatccagcatg

SEQ ID NO: 21172 - DNA, 109 bp, Homo sapiens
  MAP TO CHR16.3; EXPRESSED IN HELA, SIGNAL = 3.3; EXPRESSED IN BRAIN, SIGNAL = 1.6; EXPRESSED IN ADULT LIVER, SIGNAL = 1.3; EXPRESSED IN PLACENTA, SIGNAL = 1.3; SWISSPROT HIT: Q03112, EVALUE 3.60e-02; NT HIT: gi16164987, EVALUE 7.00e-55; EST_HUMAN HIT: BE207609.1, EVALUE 1.00e-54
cggtgtggcccctcttgtgggcctccagggtggctgctgtcgggaaggtctcactgcactgaggacatgggtgggtcctgggcaccgctgaggcctcgctggccacctg

SEQ ID NO: 21173 - DNA, 185 bp, Homo sapiens
  MAP TO CHR18.3; EXPRESSED IN ADULT LIVER, SIGNAL = 4.2; EXPRESSED IN PLACENTA, SIGNAL = 4.4; EXPRESSED IN HEART, SIGNAL = 1.9; EXPRESSED IN HELA, SIGNAL =  13; EXPRESSED IN LUNG, SIGNAL =  14; EST_HUMAN HIT: R53920.1, EVALUE 2.00e-94; SWISSPROT HIT: Q16787, EVALUE 1.00e-30; NT HIT: gi15305851, EVALUE 1.00e-100
ggtcacagtttgctgtggacatgcagacaacatcctccagaggactggtgtttcacacgggcactaagaactcctttatggctctttatctttcaaaaggacgtctggtctttgcactggggacagatgggaaaaaattgaggatcaaaagcaaggagaaatgcaatgatgggaaatggcacacg

SEQ ID NO: 21174 - DNA, 222 bp, Homo sapiens
  MAP TO CHR14.3; EXPRESSED IN ADULT LIVER, SIGNAL = 1.8; EXPRESSED IN PLACENTA, SIGNAL =   2; EXPRESSED IN HELA, SIGNAL = 2.2; EXPRESSED IN LUNG, SIGNAL = 2.7; EST_HUMAN HIT: BI518425.1, EVALUE 1.00e-119; SWISSPROT HIT: P18597, EVALUE 3.20e+00; NT HIT: gi15920163, EVALUE 5.10e-02
ctttctgaaaaacttttcacctctcagggaaaggggacctgagagaagcctaagagaaaactcctgatgcttagccaactccttgagaaggaaagtgagaatggaggctgaagccccttccatccttcctggtaaagcagcggagacgccaacacccacgatctgcaactcaaagtcaagggattccgtgtccctgcttgtgtcaacatagaaaacgcccat

SEQ ID NO: 21175 - DNA, 202 bp, Homo sapiens
  MAP TO CHR19.3; EXPRESSED IN ADULT LIVER, SIGNAL = 2.6; EXPRESSED IN PLACENTA, SIGNAL = 2.2; EXPRESSED IN LUNG, SIGNAL = 2.3; EST_HUMAN HIT: BI759580.1, EVALUE 1.00e-49; SWISSPROT HIT: P98187, EVALUE 2.00e-25; NT HIT: AF133298.1, EVALUE 1.00e-110
ccaggcccaggtgacccaagaaccagttctgtttccggggctgcgggaaacaccggaggcggcggccgttgtgatagaaggcataggtccaggccaggatgcgggccaggagccaggaggccccgaccaccagcaggagcagccacggggatgctgccaccggcctgaggcccagccaagacaggctcagcagcgacatcct

SEQ ID NO: 21176 - DNA, 149 bp, Homo sapiens
  MAP TO CHR14.3; EXPRESSED IN FETAL LIVER, SIGNAL = 2.1; EXPRESSED IN LUNG, SIGNAL = 1.1; EXPRESSED IN ADULT LIVER, SIGNAL = 1.9; EXPRESSED IN BRAIN, SIGNAL = 1.6; EXPRESSED IN HELA, SIGNAL = 1.6; EXPRESSED IN PLACENTA, SIGNAL = 1.4; EST_HUMAN HIT: BF766751.1, EVALUE 3.00e+00; SWISSPROT HIT: P49341, EVALUE 8.80e-01; NT HIT: M74088.1, EVALUE 5.10e-01
ttgcaggtgtactggttttcctcattttcattcttttcactgattcttttttagcctctgattccttactgaaatctattgaaaagtgcacaattgcaattttagcattaaatttctctttaatactgcttgtcacttttcctctcatt

SEQ ID NO: 21177 - DNA, 81 bp, Homo sapiens
  MAP TO CHR18.3; EXPRESSED IN HELA, SIGNAL = 0.94; EXPRESSED IN BONE MARROW, SIGNAL = 1.6; EXPRESSED IN FETAL LIVER, SIGNAL = 1.4; EXPRESSED IN ADULT LIVER, SIGNAL = 1.1; EXPRESSED IN PLACENTA, SIGNAL = 0.99; SWISSPROT HIT: P07248, EVALUE 2.10e+00; NT HIT: gi4507998, EVALUE 9.70e-01
attctggaggacaaagagagcctgcagacaggaaactgtcaatccttctgcacagaacatcagagaacccctctgaagaag

SEQ ID NO: 21178 - DNA, 138 bp, Homo sapiens
  MAP TO CHR18.3; EXPRESSED IN HEART, SIGNAL =   4; EXPRESSED IN LUNG, SIGNAL = 1.3; EXPRESSED IN FETAL LIVER, SIGNAL = 1.2; EXPRESSED IN BRAIN, SIGNAL = 2.6; EXPRESSED IN ADULT LIVER, SIGNAL = 1.3; SWISSPROT HIT: P51152, EVALUE 3.00e-21; NT HIT: Z22818.1, EVALUE 7.00e-65; EST_HUMAN HIT: AW631379.1, EVALUE 7.00e-72
gacacagcaggtcaggagagattcaacagcattacctcagcttattacagaagtgccaaggggatcatattagtatatgatatcactaagaaggagacatttgatgatttgccgaaatggatgaagatgattgataag

SEQ ID NO: 21179 - DNA, 158 bp, Homo sapiens
  MAP TO CHR19.3; EXPRESSED IN HEART, SIGNAL = 3.2; EXPRESSED IN HELA, SIGNAL = 5.5; EXPRESSED IN LUNG, SIGNAL = 6.9; EXPRESSED IN BRAIN, SIGNAL = 2.5; EXPRESSED IN ADULT LIVER, SIGNAL = 4.4; EXPRESSED IN PLACENTA, SIGNAL = 2.7; SWISSPROT HIT: Q09695, EVALUE 6.70e-01; NT HIT: gi15306461, EVALUE 6.00e-84; EST_HUMAN HIT: AI143738.1, EVALUE 9.00e-84
ggatatttcatgtctgaatcgggacccagctcgagtagtagttgtggactgcaagaaggaagccttccgcctgcagccctataacggcgttgccctgcggccctgggacggcaactctgatgaccgggtcttgttggatctgtctgccttcctcaaga

SEQ ID NO: 21180 - DNA, 166 bp, Homo sapiens
  MAP TO CHR14.3; EXPRESSED IN ADULT LIVER, SIGNAL = 2.2; EXPRESSED IN HELA, SIGNAL = 2.9; EXPRESSED IN PLACENTA, SIGNAL = 2.8; EXPRESSED IN FETAL LIVER, SIGNAL = 3.2; EXPRESSED IN BONE MARROW, SIGNAL = 3.1; SWISSPROT HIT: P08799, EVALUE 1.50e+00; EST_HUMAN HIT: BE172224.1, EVALUE 3.00e-53
tctcttcatcatgaactgtctttatatgttcaacaactaaaaatagatattgaaaaaggaaagcttagtgacaatattttaaaacttgaaaagcaaataaataaagaaaagaaacttatccgtagaggaaggaccaagggtctcatcaaagaacatgaggtacaat

SEQ ID NO: 21181 - DNA, 154 bp, Homo sapiens
  MAP TO CHR19.3; EXPRESSED IN HELA, SIGNAL = 1.5; EXPRESSED IN LUNG, SIGNAL = 2.2; EXPRESSED IN BONE MARROW, SIGNAL = 1.8; EXPRESSED IN FETAL LIVER, SIGNAL = 2.1; EXPRESSED IN ADULT LIVER, SIGNAL = 1.9
ctgggggtagcaggactcagcgcctcctcatcagtaaccccatggagacatgaaggtgcctgagcgccatggcatcctccagggcccaggcccggaagaactggtcctggatgagctcccccaggctggactgggacagcttcatgagatgctc

SEQ ID NO: 21182 - DNA, 337 bp, Homo sapiens
  MAP TO CHR19.3; EXPRESSED IN HEART, SIGNAL = 7.5; EXPRESSED IN LUNG, SIGNAL = 1.1; EXPRESSED IN FETAL LIVER, SIGNAL =  11; EXPRESSED IN BONE MARROW, SIGNAL = 1.4; EXPRESSED IN ADULT LIVER, SIGNAL =   1; EXPRESSED IN HELA, SIGNAL = 1.5; EST_HUMAN HIT: BG399973.1, EVALUE 0.00e+00; SWISSPROT HIT: P16415, EVALUE 3.00e-45; NT HIT: gi5032238, EVALUE 4.00e-47
taacacatactggaaatggacctcataaatgtaagatatgtgggaaaggctttgattatcccagttcagtgcaaagacatgaaagaactcacactggagagaaaccctatgaatgcaaggaatgtggtaaagccttcagtcattcaagttacttacgaatacacgaaagagttcatactggagagaagccgtataaatgtaaggaatgtgggaaaccattccattgtcccagtgcctttcataaacatgaaaggacccacagtatggagaaaccctataagtgtaaagaatgtggggaagcatttcattgtatcagttcctttcataaacatgaaat

SEQ ID NO: 21183 - DNA, 78 bp, Homo sapiens
  MAP TO CHR19.3; EXPRESSED IN BRAIN, SIGNAL = 2.7; EXPRESSED IN ADULT LIVER, SIGNAL = 2.1; EXPRESSED IN FETAL LIVER, SIGNAL = 5.1; NT HIT: gi16177795, EVALUE 1.00e-36; EST_HUMAN HIT: AU118770.1, EVALUE 2.00e-36
catgtcctgtccgttcctgagctctttgaggagctccctgctcctcgcagccggtgcaggtgagcacgacggggacac

SEQ ID NO: 21184 - DNA, 214 bp, Homo sapiens
  MAP TO CHR16.3; EXPRESSED IN HELA, SIGNAL =   2; EXPRESSED IN LUNG, SIGNAL = 2.1; EXPRESSED IN FETAL LIVER, SIGNAL = 3.4; EXPRESSED IN ADULT LIVER, SIGNAL = 2.6; SWISSPROT HIT: Q12849, EVALUE 1.30e-02; NT HIT: gi13435148, EVALUE 1.00e-117; EST_HUMAN HIT: BE872463.1, EVALUE 1.00e-117
gtcttgaaccgctatgcatccggcccactccttcctacactgactgccccactgctgcccatccccttcccactggcacctgggactgggagggactgtgtacgcctccgaggcctgccctacacggccaccattgaagacatcctgagctttctgggggaggcagcagctgacattcggccccacggtgtacacatggtgctcaaccagcagg

SEQ ID NO: 21185 - DNA, 271 bp, Homo sapiens
  MAP TO CHR19.3; EXPRESSED IN HELA, SIGNAL = 1.7; EXPRESSED IN ADULT LIVER, SIGNAL = 1.8; EXPRESSED IN PLACENTA, SIGNAL = 1.8; SWISSPROT HIT: P98160, EVALUE 5.00e-08; NT HIT: gi14754833, EVALUE 1.00e-108; EST_HUMAN HIT: BI906741.1, EVALUE 2.00e-39
ctgtgccctcattctgcagggagaggctcagggaaatgtgctgggagccccgagggttctgagctcggcaggtgaattccccttcatccctcgcgtgcactcgaggcagcttcagcagcccatggttcgaggactgtgaggggctcagggtcaggctcccttgggtccagctcagcctggcagggggattgctgtcgacagcacagaccaggcgcagagactggccctccaggactgagagggatgagctgttccccaaggctgtggatgc

SEQ ID NO: 21186 - DNA, 139 bp, Homo sapiens
  MAP TO CHR14.3; EXPRESSED IN HELA, SIGNAL =   3; EXPRESSED IN HEART, SIGNAL = 1.7; EXPRESSED IN FETAL LIVER, SIGNAL = 2.3; EXPRESSED IN BONE MARROW, SIGNAL = 2.6; EXPRESSED IN ADULT LIVER, SIGNAL = 1.8; EXPRESSED IN PLACENTA, SIGNAL = 2.6; EST_HUMAN HIT: BG153111.1, EVALUE 1.80e-01; NT HIT: AF067601.1, EVALUE 4.70e-01
tgtctttaacgtccacttgcaaatcaatgacttcggtgcctttgtttttgccacagtttctgctaatccacttaagctggttgattgtcagaagcaattctggtggctttaaaaagcattttacaacaagtgtggccat

SEQ ID NO: 21187 - DNA, 143 bp, Homo sapiens
  MAP TO CHR16.3; EXPRESSED IN ADULT LIVER, SIGNAL = 1.5; EXPRESSED IN PLACENTA, SIGNAL = 1.2; EXPRESSED IN BONE MARROW, SIGNAL = 1.6; EXPRESSED IN FETAL LIVER, SIGNAL = 1.1; EXPRESSED IN BRAIN, SIGNAL = 2.1; EST_HUMAN HIT: AL040183.1, EVALUE 3.00e-49; SWISSPROT HIT: P34688, EVALUE 4.50e+00; NT HIT: AE005865.1, EVALUE 2.00e-03
gtggggttacagaggaaaggcggggtgctggcccagatcaagagccagaaagtgcaggacatcctcgccttctatctgggccgcctggagaccaccaacgaggtgattgacagtgacttcgagaccaggaacttctggatcgg

SEQ ID NO: 21188 - DNA, 105 bp, Homo sapiens
  MAP TO CHR18.3; EXPRESSED IN HELA, SIGNAL = 1.6; EXPRESSED IN BRAIN, SIGNAL = 1.5; EXPRESSED IN ADULT LIVER, SIGNAL = 1.8; EXPRESSED IN PLACENTA, SIGNAL = 1.3; NT HIT: AY054172.1, EVALUE 1.30e+00; EST_HUMAN HIT: BI059385.1, EVALUE 2.00e+00
gataacaccagctgaaccaactggaacttcggacaaatctttgtccatttcttggccatggacgttacaatcagtcagaaatgccgatgccagaatgatcaccat

SEQ ID NO: 21189 - DNA, 93 bp, Homo sapiens
  MAP TO CHR16.3; EXPRESSED IN BONE MARROW, SIGNAL = 2.3; EXPRESSED IN FETAL LIVER, SIGNAL = 1.9; EXPRESSED IN ADULT LIVER, SIGNAL = 1.4; EXPRESSED IN BRAIN, SIGNAL = 2.4; EXPRESSED IN PLACENTA, SIGNAL = 1.5; NT HIT: gi14249535, EVALUE 2.00e-45; EST_HUMAN HIT: T97111.1, EVALUE 3.00e-45
gtggggaaaggtgatttttcggagagcggcatcgtaattctttacttccaccttctccatgagaggacgaaagactaagtgggtgtcagtgcc

SEQ ID NO: 21190 - DNA, 190 bp, Homo sapiens
  MAP TO CHR16.3; EXPRESSED IN BRAIN, SIGNAL = 1.2; EXPRESSED IN ADULT LIVER, SIGNAL = 1.5; EXPRESSED IN PLACENTA, SIGNAL = 1.5; NT HIT: AF108133.1, EVALUE 4.30e-02; EST_HUMAN HIT: BF798855.1, EVALUE 1.60e-02; SWISSPROT HIT: P35869, EVALUE 5.60e+00
taagaataaaaattgaatttcgtctgcctgttgacaagctgattgatctgggggctctcgtgaccgaatcgtctcctaagcacattctcatttatcatgtgcgagattgtttcaaaatcaatagcagccctgcgcagatgagtgtctgctggggacctgtcagggcccacggccttccctgtaatgctgc

SEQ ID NO: 21191 - DNA, 124 bp, Homo sapiens
  MAP TO CHR18.3; EXPRESSED IN ADULT LIVER, SIGNAL = 1.1; EXPRESSED IN BRAIN, SIGNAL = 1.2; EXPRESSED IN BONE MARROW, SIGNAL = 1.2; SWISSPROT HIT: P47163, EVALUE 1.60e+00; NT HIT: AF267747.1, EVALUE 6.40e+00; EST_HUMAN HIT: BF360601.1, EVALUE 1.50e-01
tgtgatggaagccagacagttggaaccagttacgggtggggagaaaggatggaaacaaatgaatgtcaggttggtccgaggtccaagtggcattgttaccattgcctatctgcaggtggaaagg

SEQ ID NO: 21192 - DNA, 79 bp, Homo sapiens
  MAP TO CHR14.3; EXPRESSED IN ADULT LIVER, SIGNAL = 2.7; EXPRESSED IN BRAIN, SIGNAL = 3.1; EXPRESSED IN HELA, SIGNAL = 2.8; EXPRESSED IN BONE MARROW, SIGNAL = 3.8; NT HIT: AL163303.2, EVALUE 3.00e-07; EST_HUMAN HIT: BF981537.1, EVALUE 6.00e-12
actttagcggaagaggtcactgcagatatgctggaaatagcaagagaactagaattagaaaccaagcctgaagatgcag

SEQ ID NO: 21193 - DNA, 190 bp, Homo sapiens
  MAP TO CHR16.3; EXPRESSED IN ADULT LIVER, SIGNAL = 4.2; EXPRESSED IN BRAIN, SIGNAL = 5.5; EXPRESSED IN HEART, SIGNAL = 6.2; EXPRESSED IN FETAL LIVER, SIGNAL = 4.1; EXPRESSED IN BONE MARROW, SIGNAL = 2.6; EST_HUMAN HIT: BG679294.1, EVALUE 4.00e-83; SWISSPROT HIT: Q10427, EVALUE 1.10e+00; NT HIT: gi14779133, EVALUE 1.00e-102
ctgaatcgcacagaatttgaagatcaagatgatgaagccagagttccatatgagggttttcggcctggggtgtacgtccgcgttgagattgaaaatgttccctgtgaatttgtgcagaactttgacccccattaccccattatcctgggtggcttgggcaacagtgagggaaatgttggagacgtgcagg

SEQ ID NO: 21194 - DNA, 181 bp, Homo sapiens
  MAP TO CHR16.3; EXPRESSED IN LUNG, SIGNAL = 2.7; EXPRESSED IN FETAL LIVER, SIGNAL = 0.93; EXPRESSED IN ADULT LIVER, SIGNAL = 1.5; EXPRESSED IN HELA, SIGNAL = 4.3; EST_HUMAN HIT: BF800568.1, EVALUE 7.00e-85; SWISSPROT HIT: P13468, EVALUE 2.20e-01
ctcttttcttctccgcttattgggccattttcgggcccgatccccagggggccggccaggctctcgatcagagctgtcccctggctccccggtggccccactggagcccccccttttccgcttcccagaatgcttcagccgatgttccagtcgctctgggggctgaagagatgcatccttc

SEQ ID NO: 21195 - DNA, 237 bp, Homo sapiens
  MAP TO CHR18.3; EXPRESSED IN BONE MARROW, SIGNAL = 2.2; EXPRESSED IN LUNG, SIGNAL = 1.9; EXPRESSED IN ADULT LIVER, SIGNAL = 1.5; EST_HUMAN HIT: BF907256.1, EVALUE 3.00e-75; SWISSPROT HIT: Q9Z6J7, EVALUE 6.40e+00; NT HIT: AF141965.1, EVALUE 8.50e-01
ttagagcctgtggccccaagttctactctgattgtacctatgttaatgcacatagaattctatgtgaatggacagtctccacgtccatggctgaagtccttgatcctttcttctgtcctgttgagggttttgcaggctttgccttagctgaatttgtcatctgtatgttatctgcaaaccagcgtcctgccagctttcttgttattgccactagagccagcatttttctagctcatt

SEQ ID NO: 21196 - DNA, 228 bp, Homo sapiens
  MAP TO CHR14.3; EXPRESSED IN PLACENTA, SIGNAL = 1.6; EXPRESSED IN HELA, SIGNAL = 3.8; EXPRESSED IN LUNG, SIGNAL = 3.8; EXPRESSED IN ADULT LIVER, SIGNAL = 2.6; EXPRESSED IN BRAIN, SIGNAL = 3.1; EST_HUMAN HIT: BG777069.1, EVALUE 1.00e-117; SWISSPROT HIT: Q64181, EVALUE 6.70e-01; NT HIT: gi14748505, EVALUE 9.00e-10
accgtctcagagctcaccgtccaagtcctcgtctggagccgccgccacccggtgctgcacttccccctgtaccagagggtcgaataattccgttaccatgtccttcatctgggccacgccagacaacaggccctggaaagggtcgccgtcacccggcgcctcacaggacacccgcagcttctgcggcttcccttcctgcccgacgtactctcccagcagctccatggt

SEQ ID NO: 21197 - DNA, 156 bp, Homo sapiens
  MAP TO CHR16.3; EXPRESSED IN HELA, SIGNAL = 8.6; EXPRESSED IN ADULT LIVER, SIGNAL = 7.4; NT HIT: gi14775826, EVALUE 4.00e-82; EST_HUMAN HIT: AI571672.1, EVALUE 1.00e-82; SWISSPROT HIT: P22695, EVALUE 1.00e-22
ggaacaagctgaaagctggatacctaatgtcagtggagtcttctgagtgtttcctggaagaagtcgggtcccaggctctagttgctggttcttacatgccaccatccacagtccttcagcagattgattcagtggctaatgctgatatcataaatg

SEQ ID NO: 21198 - DNA, 238 bp, Homo sapiens
  MAP TO CHR14.3; EXPRESSED IN PLACENTA, SIGNAL = 4.9; EXPRESSED IN FETAL LIVER, SIGNAL =   3; EXPRESSED IN ADULT LIVER, SIGNAL = 3.2; NT HIT: gi14750985, EVALUE 0.00e+00; EST_HUMAN HIT: BI523233.1, EVALUE 1.00e-127; SWISSPROT HIT: O95741, EVALUE 9.00e-40
gaagtactcggtgctgctggtgctcactgacggtgtggtgagcgacatggctgagactcgcactgctatcgtgcgtgcctcccgcctgcccatgtccatcatcatcgtaggcgtgggcaatgctgacttctctgacatgcggctgctggatggcgacgacggccccttgcgctgcccccgaggggtgcctgcagcccgagacattgtccagttcgtgcccttccgagacttcaaggat

SEQ ID NO: 21199 - DNA, 197 bp, Homo sapiens
  MAP TO CHR14.3; EXPRESSED IN HELA, SIGNAL =   2; EXPRESSED IN PLACENTA, SIGNAL =   2; EXPRESSED IN HEART, SIGNAL = 3.2; EXPRESSED IN ADULT LIVER, SIGNAL = 1.8; SWISSPROT HIT: Q13625, EVALUE 1.00e-06; NT HIT: AJ318887.1, EVALUE 1.00e-107; EST_HUMAN HIT: AI792614.1, EVALUE 1.00e-107
ctgtagttcttggtacagtctttttaactccaccgccgctggtcccgtcaatttgccattgtaagactggaacccattcagttttcctttctttaaatcttccaattgctgactaagctgatcaacccttaaaattgcagtctgtacttcctgcttcttttcctggaacatggcactgaacctttctatttcagcag

SEQ ID NO: 21200 - DNA, 156 bp, Homo sapiens
  MAP TO CHR18.3; EXPRESSED IN ADULT LIVER, SIGNAL = 2.9; EXPRESSED IN PLACENTA, SIGNAL = 1.3; EXPRESSED IN HELA, SIGNAL = 0.86; EXPRESSED IN BONE MARROW, SIGNAL = 1.1; SWISSPROT HIT: P07776, EVALUE 7.60e+00; NT HIT: AF117949.1, EVALUE 1.40e-01; EST_HUMAN HIT: BI667905.1, EVALUE 1.00e-79
acgctgaaggagtgggtggccatcgagagcgactctgtccagcctgtgcctcgcttcagacaagagctcttcagaatgatggccgtggctgcggacacgctgcagcgcctgggggcccgtgtggcctcggtggacatgggtcctcagcaggtgctg

SEQ ID NO: 21201 - DNA, 210 bp, Homo sapiens
  MAP TO CHR18.3; EXPRESSED IN FETAL LIVER, SIGNAL =   2; EXPRESSED IN BONE MARROW, SIGNAL = 0.75; EXPRESSED IN ADULT LIVER, SIGNAL = 1.7; EXPRESSED IN PLACENTA, SIGNAL = 1.4; EXPRESSED IN HELA, SIGNAL = 1.6; EST_HUMAN HIT: BE142803.1, EVALUE 1.00e-108; SWISSPROT HIT: P35241, EVALUE 2.00e-03; NT HIT: gi14763118, EVALUE 1.00e-108
ctagagagattgcaagctgaaaatacctcggagtgggacaagagggaaatacttgaaagagaaaagcagggactggagagagaaaatagaaggctgaagatccaggtgaaagaaatggaagagcttttggataagaaaaatagattaagtgcaaactctcaaagtcctgatttcaagatgtcacaaattgatctgcaagaaaaaaaccag

SEQ ID NO: 21202 - DNA, 84 bp, Homo sapiens
  MAP TO CHR16.3; EXPRESSED IN BRAIN, SIGNAL = 2.1; EXPRESSED IN ADULT LIVER, SIGNAL = 2.1; EXPRESSED IN LUNG, SIGNAL = 1.3; EXPRESSED IN BONE MARROW, SIGNAL = 1.3; EST_HUMAN HIT: AA329471.1, EVALUE 4.00e-10; NT HIT: AL163203.2, EVALUE 1.00e-09
ctgggtgcggagggctggctgggtctgaatttttctgcttctcctgctccccgaggagtgcagccccggtgggcccaatggttc

SEQ ID NO: 21203 - DNA, 195 bp, Homo sapiens
  MAP TO CHR14.3; EXPRESSED IN ADULT LIVER, SIGNAL =   7; EXPRESSED IN HELA, SIGNAL =  15; EXPRESSED IN HEART, SIGNAL =  12; EXPRESSED IN FETAL LIVER, SIGNAL =  37; EXPRESSED IN BONE MARROW, SIGNAL = 7.7; EST_HUMAN HIT: AU134555.1, EVALUE 7.00e-79; SWISSPROT HIT: Q13772, EVALUE 5.00e-24; NT HIT: X77548.1, EVALUE 5.00e-79
tcttttctagaaggacagaaccacatgttcagggaatctttatgcttctcaggctcaggtttgggttcctcaggcatcccatttttatcctttccttctttcttcagaagccacttgcacagagcttccttctcacaattctcatcacacacacactttgcaaagcttgtgcagggctcattggctttgcacatc

SEQ ID NO: 21204 - DNA, 144 bp, Homo sapiens
  MAP TO CHR19.3; EXPRESSED IN ADULT LIVER, SIGNAL = 1.6; EXPRESSED IN PLACENTA, SIGNAL = 0.84; EXPRESSED IN FETAL LIVER, SIGNAL = 1.1; EXPRESSED IN BONE MARROW, SIGNAL = 1.3; NT HIT: D64002.1, EVALUE 1.90e+00; EST_HUMAN HIT: BE784034.1, EVALUE 2.00e-75; SWISSPROT HIT: P20398, EVALUE 7.80e-02
gtgaacaaactgtcttccaggttccggattcgggcctgagcctggccctcgggtgactgggggtccttcgaggtggggtcttcggatggctctggcactgcagctgccccatccattagccaacgttcccggagagacttcctc

SEQ ID NO: 21205 - DNA, 113 bp, Homo sapiens
  MAP TO CHR14.3; EXPRESSED IN PLACENTA, SIGNAL =  21; EXPRESSED IN HELA, SIGNAL =  20; EXPRESSED IN FETAL LIVER, SIGNAL =  20; EXPRESSED IN LUNG, SIGNAL =  15; EXPRESSED IN ADULT LIVER, SIGNAL =  27; NT HIT: AF211170.1, EVALUE 9.30e-02; EST_HUMAN HIT: BE141965.1, EVALUE 2.10e+00
cactggtcaggtactggtgtggtttctactggtgtagaaactggtgtagatactggtgtagatactggtgtggtttctactggtgtggtttctaccatgcaggcgtttagtct

SEQ ID NO: 21206 - DNA, 223 bp, Homo sapiens
  MAP TO CHR19.3; EXPRESSED IN HELA, SIGNAL = 1.1; EXPRESSED IN HEART, SIGNAL = 1.8; EXPRESSED IN FETAL LIVER, SIGNAL = 1.9; EXPRESSED IN ADULT LIVER, SIGNAL = 1.4; EXPRESSED IN PLACENTA, SIGNAL = 1.1; NT HIT: gi9626821, EVALUE 3.10e+00; SWISSPROT HIT: Q9UGF6, EVALUE 3.00e-08; EST_HUMAN HIT: BI770416.1, EVALUE 1.20e+00
aggaaaatgggacctgtctggtgacagaattcctgatgatgggattctccaacctcccacacctgaggaacacactcttcaccctgttcttccttacctacctggtcaccctcggtggcaacgtcaccatcatcaccatcacccatgcggataggtcccgccacactcccatgtaccacttcctggtggtgctgtccctctcggagacctgctatacacgctg

SEQ ID NO: 21207 - DNA, 125 bp, Homo sapiens
  MAP TO CHR14.3; EXPRESSED IN HELA, SIGNAL = 4.2; EXPRESSED IN LUNG, SIGNAL = 3.8; EXPRESSED IN FETAL LIVER, SIGNAL = 1.9; EXPRESSED IN BONE MARROW, SIGNAL = 4.8; EXPRESSED IN BRAIN, SIGNAL = 5.9; EXPRESSED IN ADULT LIVER, SIGNAL =   3; EXPRESSED IN PLACENTA, SIGNAL =   4; NT HIT: AF312033.1, EVALUE 2.00e-03; SWISSPROT HIT: P97874, EVALUE 2.70e+00; EST_HUMAN HIT: AA773134.1, EVALUE 8.00e-62
aggttgaaggagctggggacctctgaggtttccagctggggcctctggtttgggaagctgaactctgtgttcagtgtggtacctggctggtagcagagccacttaaggatctggggactgactga

SEQ ID NO: 21208 - DNA, 168 bp, Homo sapiens
  MAP TO CHR14.3; EXPRESSED IN PLACENTA, SIGNAL = 1.3; EXPRESSED IN BONE MARROW, SIGNAL = 0.7; EXPRESSED IN ADULT LIVER, SIGNAL = 1.5; EXPRESSED IN HELA, SIGNAL = 1.1; SWISSPROT HIT: P01764, EVALUE 1.00e-06; EST_HUMAN HIT: BG697050.1, EVALUE 6.00e-14; NT HIT: Z27453.1, EVALUE 4.00e-51
ggaaacactgaaaatatgtgccagtttctgaccaggatgcccctgtgtttttgggtgtccagtgtgaggcgcagttgttggagcctgggggagacttggtacagcctggcgcggtgggggtgggggtccctgagactgtcctgtgcagcctctggatttgccttcagt

SEQ ID NO: 21209 - DNA, 189 bp, Homo sapiens
  MAP TO CHR14.3; EXPRESSED IN FETAL LIVER, SIGNAL = 2.3; EXPRESSED IN LUNG, SIGNAL = 2.3; EXPRESSED IN BRAIN, SIGNAL = 2.6; EXPRESSED IN ADULT LIVER, SIGNAL = 3.3; EXPRESSED IN PLACENTA, SIGNAL = 2.7; EXPRESSED IN HELA, SIGNAL = 2.8; SWISSPROT HIT: P50792, EVALUE 1.90e+00; EST_HUMAN HIT: AI638208.1, EVALUE 6.30e-02; NT HIT: AL163227.2, EVALUE 7.00e-07
gctgagaagtccaagatcgggatgccagcagatttagtgtctcatgagggcttattttctctgcttcaagatggtgtcttcttgctgcattcccacatggcagaaggcgaagggggtgaccgagcttcctcaggcctcttttataaaggcactaatctcatttatgagggtggagctctcatgaactaa

SEQ ID NO: 21210 - DNA, 97 bp, Homo sapiens
  MAP TO CHR18.3; EXPRESSED IN HELA, SIGNAL = 1.3; EXPRESSED IN BRAIN, SIGNAL = 1.1; EXPRESSED IN ADULT LIVER, SIGNAL = 0.94; EST_HUMAN HIT: BF217450.1, EVALUE 4.50e-01; NT HIT: gi9628835, EVALUE 7.70e-02
tctccagctgaaactgtctctgctgctcctcttcgggaccagcaatggaacctcccgctgtgcctcatcaggtcttcccatggtgggtggcttctag

SEQ ID NO: 21211 - DNA, 143 bp, Homo sapiens
  MAP TO CHR14.3; EXPRESSED IN FETAL LIVER, SIGNAL = 0.85; EXPRESSED IN BONE MARROW, SIGNAL = 0.91; EXPRESSED IN BRAIN, SIGNAL = 1.3; EXPRESSED IN ADULT LIVER, SIGNAL = 1.1; NT HIT: AY036106.1, EVALUE 1.90e+00; SWISSPROT HIT: P53622, EVALUE 4.00e-03; EST_HUMAN HIT: AI744341.1, EVALUE 2.80e+00
ggacacatggaaggagaggtgtggggtttagctacacacccttatctgcccatctgtgctactgtaagcgatgataaaaccttaagaatatgggatctctcacctagtcattgtatgttggctgtccggaagctgaaaaaggg

SEQ ID NO: 21212 - DNA, 202 bp, Homo sapiens
  MAP TO CHR18.3; EXPRESSED IN BONE MARROW, SIGNAL = 2.2; EXPRESSED IN ADULT LIVER, SIGNAL = 1.6; EXPRESSED IN PLACENTA, SIGNAL = 1.9; EXPRESSED IN HELA, SIGNAL = 2.3; EXPRESSED IN FETAL LIVER, SIGNAL = 2.1; EXPRESSED IN LUNG, SIGNAL = 1.7; NT HIT: X83393.1, EVALUE 7.10e-01
tacatcaatgatgaataatcatcagaatcattgtctttaattgtggaatcatcattcatgtttattagtgtttccttataggcacctacgtgatacgtggaaaagaaatctgcaaaatcaaagggtagctttagtgtctgttgcttttcacaaatgaatgtactcatgatgaaaggcctaacattgcttggactacttcgat

SEQ ID NO: 21213 - DNA, 120 bp, Homo sapiens
  MAP TO CHR18.3; EXPRESSED IN BRAIN, SIGNAL = 1.4; EXPRESSED IN ADULT LIVER, SIGNAL =   1; EXPRESSED IN PLACENTA, SIGNAL = 0.97; SWISSPROT HIT: Q90346, EVALUE 6.00e+00; NT HIT: gi7661695, EVALUE 3.00e-11; EST_HUMAN HIT: BE799977.1, EVALUE 4.00e-11
caaatgacttggatacgctccctgagtgtatccagctgtgtgttgaagtcctccacactctgctggtgcatggtggatgcttcctcctggaacctttccatttgctgcttctcctgcatt

SEQ ID NO: 21214 - DNA, 120 bp, Homo sapiens
  MAP TO CHR16.3; EXPRESSED IN HELA, SIGNAL = 3.8; EXPRESSED IN HEART, SIGNAL = 5.4; EXPRESSED IN PLACENTA, SIGNAL = 4.5; EXPRESSED IN LUNG, SIGNAL = 3.4; EXPRESSED IN FETAL LIVER, SIGNAL = 5.9; EXPRESSED IN BONE MARROW, SIGNAL = 3.1; EXPRESSED IN ADULT LIVER, SIGNAL = 4.3; EXPRESSED IN BRAIN, SIGNAL = 5.3; NT HIT: AF098576.1, EVALUE 1.60e+00; EST_HUMAN HIT: BF315768.1, EVALUE 1.50e-01
tggcaagtttgaaaacgaggattgctgggcgaagtaatgtccaatctttaaactcatggacatatcaggaagcatctgtgcatctggatatttatgatgctcaataatggataaagacac

SEQ ID NO: 21215 - DNA, 128 bp, Homo sapiens
  MAP TO CHR18.3; EXPRESSED IN PLACENTA, SIGNAL = 1.1; EXPRESSED IN BONE MARROW, SIGNAL = 1.2; EXPRESSED IN ADULT LIVER, SIGNAL = 0.94; EST_HUMAN HIT: BG945125.1, EVALUE 6.30e-01; NT HIT: AL163281.2, EVALUE 1.10e-01; SWISSPROT HIT: O78484, EVALUE 1.50e+00
tatttgtacaaaatgactggtagaactgtcattttcatccaaacagaatcaattgtcctctttatgtagtaattgtccactagcttgttcaacacagttctcaaagtcaatttgtcagttttgtgacc

SEQ ID NO: 21216 - DNA, 91 bp, Homo sapiens
  MAP TO CHR14.3; EXPRESSED IN FETAL LIVER, SIGNAL = 2.5; EXPRESSED IN LUNG, SIGNAL = 2.2; EXPRESSED IN BONE MARROW, SIGNAL =   3; EXPRESSED IN BRAIN, SIGNAL = 1.6; EXPRESSED IN ADULT LIVER, SIGNAL = 2.9; EXPRESSED IN PLACENTA, SIGNAL = 2.1; EXPRESSED IN HELA, SIGNAL = 2.4; EST_HUMAN HIT: BE256326.1, EVALUE 4.20e-01
cagctttccttggtctgtaagtcatatcctttaacctccacctgggtgtagctctcagagttggagggcattttgccatggctgctgcagc

SEQ ID NO: 21217 - DNA, 171 bp, Homo sapiens
  MAP TO CHR14.3; EXPRESSED IN BRAIN, SIGNAL = 1.4; EXPRESSED IN ADULT LIVER, SIGNAL = 1.1; EXPRESSED IN PLACENTA, SIGNAL = 0.96; EXPRESSED IN BONE MARROW, SIGNAL = 0.83; EST_HUMAN HIT: BI835430.1, EVALUE 2.00e-91; NT HIT: gi14748798, EVALUE 1.00e-91; SWISSPROT HIT: Q00383, EVALUE 9.80e+00
ccactctaataaattcaaacatctctattatggcagagttcatcagattgtagcgggatccattgttgagaaatgctttcactactggttcaaacaaaaaacttttcattatgtagcggttgtaaaactcatcttttaatccaataatctttcttttaaaacgaagggcac

SEQ ID NO: 21218 - DNA, 254 bp, Homo sapiens
  MAP TO CHR19.3; EXPRESSED IN HELA, SIGNAL =  16; EXPRESSED IN LUNG, SIGNAL = 9.7; EXPRESSED IN BRAIN, SIGNAL = 5.8; EXPRESSED IN ADULT LIVER, SIGNAL = 6.7; EST_HUMAN HIT: BE781673.1, EVALUE 0.00e+00; SWISSPROT HIT: P33946, EVALUE 2.00e-45; NT HIT: gi14760348, EVALUE 0.00e+00
gatcctctggaccttctccatctacctggagtcagtggccatcttgccgcagctgttcatggtgagcaagaccggcgaggcggagaccatcaccagccactacttgtttgcgctaggcgtttaccgcacgctctatctcttcaactggatctggcgctaccatttcgagggcttcttcgacctcatcgccattgtggcaggcctggtccagacagtcctctactgcgatttcttctacctctatatcaccaaag

SEQ ID NO: 21219 - DNA, 202 bp, Homo sapiens
  MAP TO CHR18.3; EXPRESSED IN FETAL LIVER, SIGNAL = 1.2; EXPRESSED IN ADULT LIVER, SIGNAL = 1.1; EXPRESSED IN PLACENTA, SIGNAL = 0.92; EXPRESSED IN BONE MARROW, SIGNAL = 1.2; SWISSPROT HIT: Q00532, EVALUE 4.20e+00; NT HIT: AE000641.1, EVALUE 7.10e-01
ctgtattccggttcaagaaacagctgcatctcttcagtcttaatgtttggtttggctgaatcagacttcctatgccagaaagtacagaaccaatttgttctcttaaaatctcaaatgttaaaggtagggaagaaaggtctttatctttaaaaggcagcttggagatatcagttaaatttgctgccacccacagatgcttaac

SEQ ID NO: 21220 - DNA, 114 bp, Homo sapiens
  MAP TO CHR18.3; EXPRESSED IN LUNG, SIGNAL = 1.4; EXPRESSED IN BONE MARROW, SIGNAL =   1; EXPRESSED IN FETAL LIVER, SIGNAL =   2; EXPRESSED IN ADULT LIVER, SIGNAL = 1.2; SWISSPROT HIT: P52958, EVALUE 3.50e+00
gcaacattacatccagttctgccagtgcagaatcctacgtcctttgtgcgggctgtgcagagtcctgcgaggcccctggtagacaaaagatgggccgtgagaagcgggtcccac

SEQ ID NO: 21221 - DNA, 137 bp, Homo sapiens
  MAP TO CHR16.3; EXPRESSED IN PLACENTA, SIGNAL = 0.92; EXPRESSED IN HELA, SIGNAL = 1.8; EXPRESSED IN LUNG, SIGNAL = 1.8; EXPRESSED IN ADULT LIVER, SIGNAL = 2.3; NT HIT: gi14777194, EVALUE 2.00e-71; SWISSPROT HIT: P37769, EVALUE 8.00e-04; EST_HUMAN HIT: AL559552.1, EVALUE 3.00e-71
ggccgccaggaagctggctggggccaccggccggcgctgcctccctctctctatggacgtccgagcgcccccagctgtcatggccgccgtggaccaggctctgaaggagtttggcagaatcgacattctcattaact

SEQ ID NO: 21222 - DNA, 145 bp, Homo sapiens
  MAP TO CHR14.3; EXPRESSED IN LUNG, SIGNAL =   1; EXPRESSED IN BONE MARROW, SIGNAL = 0.9; EXPRESSED IN ADULT LIVER, SIGNAL = 0.92; EXPRESSED IN PLACENTA, SIGNAL = 1.3; NT HIT: gi14752832, EVALUE 3.00e-76; EST_HUMAN HIT: BI517361.1, EVALUE 5.00e-76
gccagaaaagctgtaacaatgatgtttttctccaattttccattctcatggattcgccattttttgatcactctagcactcaatattatcatcgttttacttgcaatatatgttcctgacattagaaatgtatttggtgtagttg

SEQ ID NO: 21223 - DNA, 81 bp, Homo sapiens
  MAP TO CHR16.3; EXPRESSED IN FETAL LIVER, SIGNAL = 3.2; EXPRESSED IN ADULT LIVER, SIGNAL = 3.4; EXPRESSED IN LUNG, SIGNAL = 2.8; EXPRESSED IN PLACENTA, SIGNAL = 3.5; EXPRESSED IN HELA, SIGNAL = 4.8; SWISSPROT HIT: Q10502, EVALUE 6.20e+00; EST_HUMAN HIT: BE311579.1, EVALUE 9.00e-02
ttaatccaggaccttcgatgccccctgcagagcgggagcggctgggcttggggaagggtgtgcaccctgtgcgggtggttc

SEQ ID NO: 21224 - DNA, 134 bp, Homo sapiens
  MAP TO CHR14.3; EXPRESSED IN BRAIN, SIGNAL = 1.3; EXPRESSED IN ADULT LIVER, SIGNAL = 1.7; EXPRESSED IN PLACENTA, SIGNAL = 1.3; NT HIT: gi14748633, EVALUE 3.00e-33; SWISSPROT HIT: Q13671, EVALUE 2.60e+00; EST_HUMAN HIT: BI020569.1, EVALUE 4.00e-33
ctcacccagggcccttcttgtgtctccccagtattgtacctggaaggctcggctcttgtgtttgaggacatcttcagattgattgcgttctactgtgtcagtaggtgagtagacccggccctgcaggaggttat

SEQ ID NO: 21225 - DNA, 154 bp, Homo sapiens
  MAP TO CHR19.3; EXPRESSED IN HEART, SIGNAL = 1.7; EXPRESSED IN LUNG, SIGNAL = 5.4; EXPRESSED IN ADULT LIVER, SIGNAL = 6.3; EXPRESSED IN PLACENTA, SIGNAL = 6.1; EST_HUMAN HIT: BG472964.1, EVALUE 2.00e-81; NT HIT: gi14756303, EVALUE 1.00e-81; SWISSPROT HIT: Q16478, EVALUE 2.00e-23
ctgtcagccgccctgatgtttgacgccgtgcacgtggtggtgagcgctgtccgagagctgaaccgcagccaggagatcggtgtgaagcctctggcctgtacatcggccaacatttggccccacgggaccagcctcatgaactacctgcgcatgg

SEQ ID NO: 21226 - DNA, 118 bp, Homo sapiens
  MAP TO CHR18.3; EXPRESSED IN BONE MARROW, SIGNAL = 1.2; EXPRESSED IN ADULT LIVER, SIGNAL = 1.2; EXPRESSED IN PLACENTA, SIGNAL = 1.3; NT HIT: AB022281.1, EVALUE 3.90e-01
agttgttatcttgggtgttgaatttctctcccaccagctgagtcataacctgcttcaaagcagactgggtttctgatttctgatggcagagttctccattctgaatggtggggcacat

SEQ ID NO: 21227 - DNA, 175 bp, Homo sapiens
  MAP TO CHR16.3; EXPRESSED IN LUNG, SIGNAL = 2.4; EXPRESSED IN FETAL LIVER, SIGNAL = 1.4; EXPRESSED IN ADULT LIVER, SIGNAL = 1.9; EST_HUMAN HIT: BG528516.1, EVALUE 9.00e-01; SWISSPROT HIT: P19556, EVALUE 1.50e+00
tgttgttcaaatatgcaaattcatctctataacaaagtaggttttgattttctagaatctgatcatccaatcatgacaaatccctctgattattatttttttccttgcaagttacaatttaaggttctacacagtagcagtgggcctgagaatattggttgatgtaattcttggt

SEQ ID NO: 21228 - DNA, 142 bp, Homo sapiens
  MAP TO CHR16.3; EXPRESSED IN PLACENTA, SIGNAL = 2.4; EXPRESSED IN HELA, SIGNAL = 2.3; EXPRESSED IN FETAL LIVER, SIGNAL = 2.7; EXPRESSED IN BRAIN, SIGNAL =   2; EXPRESSED IN BONE MARROW, SIGNAL =   2; EXPRESSED IN ADULT LIVER, SIGNAL = 2.8
tctagaggattttgtctcttggataatgacatgattctgtctttcataggctactccaaaacttctataatgatggtagagtttagtgaagtggagcatcggcatgccatccccatgctcctgacaagcagcagcagctaac

SEQ ID NO: 21229 - DNA, 285 bp, Homo sapiens
  MAP TO CHR18.3; EXPRESSED IN HELA, SIGNAL = 1.1; EXPRESSED IN LUNG, SIGNAL = 1.4; EXPRESSED IN BONE MARROW, SIGNAL = 1.5; EXPRESSED IN BRAIN, SIGNAL = 1.2; EXPRESSED IN ADULT LIVER, SIGNAL = 1.3; EXPRESSED IN PLACENTA, SIGNAL = 1.1; NT HIT: AF026492.1, EVALUE 6.70e-02; SWISSPROT HIT: P16729, EVALUE 3.20e+00
ctcagctcccacaagctccgtcttctcagtgtcctcatgactagaacgatcagacacacatacagtggtttgaactcgaccttcctttttttgatgacacagatcactgtggataaaactcttcccaagatttctaacttcctattcccttcccagtgtcttccaatactcgtctccagagatttgtttatcctgcagagagaggaacaaaaggatgatactggctttttccaagcaacccacagaaaggatctcaaagcttcacgtacatttagcaacccctaa

SEQ ID NO: 21230 - DNA, 171 bp, Homo sapiens
  MAP TO CHR18.3; EXPRESSED IN FETAL LIVER, SIGNAL = 1.1; EXPRESSED IN ADULT LIVER, SIGNAL =   1; EXPRESSED IN PLACENTA, SIGNAL =   1; SWISSPROT HIT: Q10210, EVALUE 4.40e+00; EST_HUMAN HIT: BG722859.1, EVALUE 3.50e+00; NT HIT: gi16077068, EVALUE 1.50e-01
tgttgttgactttgaagaagtccctcatctctgatatctgcaagacatacatgcctacggatcaaaccaagaacctgagtataagggtggaagagccaattaaatcgtcaaaccccacacttgcggagagaagtgggatgctaatatctgctaagaagacagatagacagt

SEQ ID NO: 21231 - DNA, 179 bp, Homo sapiens
  MAP TO CHR19.3; EXPRESSED IN HEART, SIGNAL =   2; EXPRESSED IN LUNG, SIGNAL = 2.2; EXPRESSED IN FETAL LIVER, SIGNAL =   2; EXPRESSED IN BRAIN, SIGNAL = 2.9; EXPRESSED IN ADULT LIVER, SIGNAL = 1.3; EXPRESSED IN PLACENTA, SIGNAL = 1.6; NT HIT: gi14766572, EVALUE 5.00e-23; SWISSPROT HIT: O83019, EVALUE 5.00e-01; EST_HUMAN HIT: BG708202.1, EVALUE 8.00e-23
ctgaatctccctgagttggggacgtcttctgggtccacctgaagccgccagacaacctgcatgcaacaagagtcactcaggtgcaagggggcgggattgaggcacccaacccacccccgcttcagtatctcctgcatgggttgtgacctgttgtcaggctgcccatgtggccctcccat

SEQ ID NO: 21232 - DNA, 223 bp, Homo sapiens
  MAP TO CHR14.3; EXPRESSED IN PLACENTA, SIGNAL =   6; EXPRESSED IN FETAL LIVER, SIGNAL = 3.5; EXPRESSED IN LUNG, SIGNAL = 7.3; EXPRESSED IN ADULT LIVER, SIGNAL = 6.1; EXPRESSED IN HELA, SIGNAL = 8.5; NT HIT: AF412083.1, EVALUE 8.00e-01; SWISSPROT HIT: Q09778, EVALUE 2.40e+00; EST_HUMAN HIT: BE972628.1, EVALUE 7.50e-02
ccaaggaagaccaaagactttggatatgaaatttttaaagtaaccactgaagaagaggcttcaattgtattggcccaactggcaatctatggaaggccacatgaattgcttagagataatactctcgcctttcaccttgcagtcaccagtttgaatcaagcagagattaacagtgtccaagggttgttatcatctggtgatgccttgggagctgatatgaaat

SEQ ID NO: 21233 - DNA, 114 bp, Homo sapiens
  MAP TO CHR14.3; EXPRESSED IN LUNG, SIGNAL = 3.6; EXPRESSED IN FETAL LIVER, SIGNAL = 6.7; EXPRESSED IN BONE MARROW, SIGNAL = 6.4; EXPRESSED IN ADULT LIVER, SIGNAL =   3; EXPRESSED IN HEART, SIGNAL = 3.9; NT HIT: AB045011.1, EVALUE 1.50e+00; SWISSPROT HIT: P38288, EVALUE 6.00e+00; EST_HUMAN HIT: BF944297.1, EVALUE 5.50e-01
ctgccttgcagccagtgggtgtcagagccagcagcagactggagtctaagggcactgctttctgtccgtgagcttgagaaggcttcttgcccttctgaatctccaagtccttgc

SEQ ID NO: 21234 - DNA, 181 bp, Homo sapiens
  MAP TO CHR14.3; EXPRESSED IN ADULT LIVER, SIGNAL = 1.9; EXPRESSED IN HELA, SIGNAL = 2.3; EXPRESSED IN PLACENTA, SIGNAL =   2; NT HIT: gi15807672, EVALUE 9.90e+00; SWISSPROT HIT: P20186, EVALUE 2.20e-01; EST_HUMAN HIT: BF674879.1, EVALUE 1.00e-49
cgcgctgcgggcacctctcggacaaggccccagccgtcgcgggttgccgggcagagtcggacgccgccagctcttcactccacgcccacctctctcctggagcgctgggccttcgctggccgcaccggcagccatgagctcggagatggagccgctgctcctggcctggagctattttagg

SEQ ID NO: 21235 - DNA, 220 bp, Homo sapiens
  MAP TO CHR18.3; EXPRESSED IN HELA, SIGNAL =   2; EXPRESSED IN BONE MARROW, SIGNAL =   2; EXPRESSED IN ADULT LIVER, SIGNAL = 1.8; EST_HUMAN HIT: AA889813.1, EVALUE 1.00e-115; NT HIT: gi6912469, EVALUE 1.00e-120; SWISSPROT HIT: P48193, EVALUE 7.00e-30
cctgtggctcttgtgcagctcgatcactttgtcttccagttctttagtgtggtttggtgcaaagcggaactcactaatgtaatcgctcccacattcatctgggtcatagtctccgagctctgactggacagtgtaggagcccagcaaggccagggtaacaaaggagcagggcagccttccggacacgatgtcatctcgcaactgcaagcagaggtagtac

SEQ ID NO: 21236 - DNA, 286 bp, Homo sapiens
  MAP TO CHR18.3; EXPRESSED IN PLACENTA, SIGNAL = 0.97; EXPRESSED IN FETAL LIVER, SIGNAL = 1.1; EXPRESSED IN ADULT LIVER, SIGNAL = 0.92; NT HIT: gi16164058, EVALUE 0.00e+00; SWISSPROT HIT: Q9ULV0, EVALUE 1.00e-49; EST_HUMAN HIT: BG183509.1, EVALUE 0.00e+00
ctgagttgcatgcctgtgctccaagagcagacgtccttccgcaagagcaggttgttaagagtcactgcgttgatcatgtagaagagctgtttgaatacctgcaggatgatctcagggtccaagccctggtcacacatgactgtatgaaaggcattcatctggcggatgatagcttccaggcagtatgagttatccccatctgccatgctggaggagcgcttccggtagccggtgggcttcacaccagatagaccctgaatgctctcattttccaacatggcagaaa

SEQ ID NO: 21237 - DNA, 115 bp, Homo sapiens
  MAP TO CHR16.3; EXPRESSED IN ADULT LIVER, SIGNAL = 2.7; EXPRESSED IN HEART, SIGNAL = 3.1; EXPRESSED IN LUNG, SIGNAL = 1.5; EXPRESSED IN BONE MARROW, SIGNAL = 1.8; NT HIT: gi14774874, EVALUE 3.00e-51; SWISSPROT HIT: Q64731, EVALUE 1.60e+00; EST_HUMAN HIT: BG250440.1, EVALUE 4.00e-51
aaaaagaaaaaaccaaactgcagaagcagagagaggatgagctaatccagaagatccacaaactggtgcagaagagagacttcctggtggacgatgcggaggtcgagcggttaag

SEQ ID NO: 21238 - DNA, 115 bp, Homo sapiens
  MAP TO CHR16.3; EXPRESSED IN ADULT LIVER, SIGNAL = 1.5; EXPRESSED IN HELA, SIGNAL = 2.3; EXPRESSED IN HEART, SIGNAL = 2.4; EXPRESSED IN FETAL LIVER, SIGNAL = 1.4; EXPRESSED IN BONE MARROW, SIGNAL = 1.6; NT HIT: AJ306731.1, EVALUE 2.00e-58; SWISSPROT HIT: P55194, EVALUE 5.00e-10; EST_HUMAN HIT: BG684292.1, EVALUE 3.00e-58
ccttcatttctggcccataacaagttagggcctaacacaatcgcaatgttgctgggagtcattttattcacatcgctggtctgagcaagctttgcaaggaacttgatcaaatatc

SEQ ID NO: 21239 - DNA, 149 bp, Homo sapiens
  MAP TO CHR18.3; EXPRESSED IN HEART, SIGNAL = 1.7; EXPRESSED IN LUNG, SIGNAL = 1.6; EXPRESSED IN BRAIN, SIGNAL = 1.3; EXPRESSED IN ADULT LIVER, SIGNAL = 1.5; EXPRESSED IN PLACENTA, SIGNAL = 1.3; NT HIT: AE000631.1, EVALUE 7.90e+00; SWISSPROT HIT: P98161, EVALUE 5.90e-02; EST_HUMAN HIT: AI907626.1, EVALUE 7.50e-01
ctgggacaggaaccaacctgcagagccccccttattgttgtggccaacattgatcttcatcagctgccccaaatccggggcatccaggatgaacctgtcttcagctcccttttcaaagttgtccttttcattttctagcctacgctccc

SEQ ID NO: 21240 - DNA, 84 bp, Homo sapiens
  MAP TO CHR18.3; EXPRESSED IN FETAL LIVER, SIGNAL = 2.5; EXPRESSED IN BRAIN, SIGNAL = 2.1; EXPRESSED IN ADULT LIVER, SIGNAL = 1.6; NT HIT: U92882.1, EVALUE 1.70e-02; EST_HUMAN HIT: R47760.1, EVALUE 9.50e-02
ggtgaaagcatttgggaaagtgaaaggagagatgataggagcactgaaagagagcccattattgctgggtatgatagctatagg

SEQ ID NO: 21241 - DNA, 280 bp, Homo sapiens
  MAP TO CHR19.3; EXPRESSED IN LUNG, SIGNAL = 3.1; EXPRESSED IN ADULT LIVER, SIGNAL = 2.5; EXPRESSED IN BRAIN, SIGNAL = 1.7; EXPRESSED IN HELA, SIGNAL = 3.1; EXPRESSED IN PLACENTA, SIGNAL = 2.5; SWISSPROT HIT: Q14943, EVALUE 3.00e-15; EST_HUMAN HIT: BI909184.1, EVALUE 0.00e+00; NT HIT: gi14762477, EVALUE 0.00e+00
gaaatgtatgacacacccaccctctcggttcatcctggacccgaagtgatctcgggagagaaggtgaccttctactgccgtctagacactgcaacaagcatgttcttactgctcaaggagggaagatccagccacgtacagcgcggatacgggaaggtccaggcggagttccccctgggccctgtgaccacagcccaccgagggacataccgatgttttggctcctataacaaccatgcctggtctttccccagtgagccagtgaagctcctggtcacag

SEQ ID NO: 21242 - DNA, 105 bp, Homo sapiens
  MAP TO CHR16.3; EXPRESSED IN HELA, SIGNAL = 2.4; EXPRESSED IN LUNG, SIGNAL = 2.3; EXPRESSED IN BONE MARROW, SIGNAL = 3.6; EXPRESSED IN ADULT LIVER, SIGNAL = 1.7; SWISSPROT HIT: P40313, EVALUE 3.00e-15; EST_HUMAN HIT: BI833975.1, EVALUE 2.00e-52; NT HIT: gi4503136, EVALUE 2.00e-52
ggctgcggcattcctgccatcaaaccggcactgagcttcagccagaggattgtcaacggggagaatgcagtgttgggctcctggccctggcaggtgtccctgcag

SEQ ID NO: 21243 - DNA, 176 bp, Homo sapiens
  MAP TO CHR18.3; EXPRESSED IN LUNG, SIGNAL =   2; EXPRESSED IN ADULT LIVER, SIGNAL = 1.3; EXPRESSED IN HELA, SIGNAL = 1.6; EXPRESSED IN PLACENTA, SIGNAL = 1.2; SWISSPROT HIT: P33124, EVALUE 4.30e+00; EST_HUMAN HIT: BI831188.1, EVALUE 2.00e-94; NT HIT: gi6754801, EVALUE 1.60e-01
ccaggatgtcgctggtcttaactgcgacggtgtaggaggtccactccatcatttcttcctcatcgataacggcacacatttcacacaccagggtcttcttgcccttccgctgggacagccagtctccatagtagaacatggtcaggtctccagtgttcatgttcttcagtaggatc

SEQ ID NO: 21244 - DNA, 115 bp, Homo sapiens
  MAP TO CHR14.3; EXPRESSED IN BRAIN, SIGNAL = 1.2; EXPRESSED IN ADULT LIVER, SIGNAL = 1.2; EXPRESSED IN HELA, SIGNAL = 1.3; EXPRESSED IN PLACENTA, SIGNAL = 1.3; EXPRESSED IN LUNG, SIGNAL = 1.1; NT HIT: AJ414152.1, EVALUE 2.40e-02; SWISSPROT HIT: Q9BQI3, EVALUE 2.10e+00; EST_HUMAN HIT: BG337668.1, EVALUE 2.20e+00
ccacagcagccatatgagaagcgttattatcgtgatctttacttcgcaggtcagaacaccgagacttcagggagttaggcaactggcccgatgccacgccagttaagtctatggc

SEQ ID NO: 21245 - DNA, 126 bp, Homo sapiens
  MAP TO CHR14.3; EXPRESSED IN FETAL LIVER, SIGNAL = 0.93; EXPRESSED IN LUNG, SIGNAL = 1.3; EXPRESSED IN ADULT LIVER, SIGNAL = 1.6; EXPRESSED IN PLACENTA, SIGNAL = 1.4; NT HIT: AB011179.1, EVALUE 1.70e+00; EST_HUMAN HIT: BF206850.1, EVALUE 1.60e-01
ttggacccatgccatttctgaagtatgcaagtgcagtatgcaaagcctcgccaatggtttggccagttgtctgatcttacttcttcctggcatgttgtgggtcccttcaagcatgctcatgggcat

SEQ ID NO: 21246 - DNA, 149 bp, Homo sapiens
  MAP TO CHR14.3; EXPRESSED IN FETAL LIVER, SIGNAL = 1.1; EXPRESSED IN BONE MARROW, SIGNAL = 1.3; EXPRESSED IN ADULT LIVER, SIGNAL =   1; EST_HUMAN HIT: BF739066.1, EVALUE 7.50e-01; SWISSPROT HIT: P43418, EVALUE 7.70e+00
tatccctcatttccttcttgaaccagctgccgaggaggggctagaagttgaagtgtcaacaaagccatcttttcatttcttgagcctttagtattgggagagctggggtcatggttgggatttgagcttgtcagtccaaacacaactcc

SEQ ID NO: 21247 - DNA, 209 bp, Homo sapiens
  MAP TO CHR19.3; EXPRESSED IN BRAIN, SIGNAL = 1.6; EXPRESSED IN ADULT LIVER, SIGNAL = 1.6; EXPRESSED IN PLACENTA, SIGNAL = 3.3; EXPRESSED IN HELA, SIGNAL = 2.3; EXPRESSED IN LUNG, SIGNAL = 2.1; EST_HUMAN HIT: BF342536.1, EVALUE 1.00e-114; SWISSPROT HIT: P45101, EVALUE 7.20e+00; NT HIT: gi15302718, EVALUE 1.00e-114
ctgcttggcccggcagagggtcccgcgacggtacatgtagtcctcggagttcacgatgaacaccatcttgtgagtgctgagcttgaagcggcagtccacgtcgcaggcgctctccacgcccaccagccgcttccaggagctcctggcctcaccgcgcagggcccgcgcctgctcgctctgccaccggcggcggaacttcttgaggttcc

SEQ ID NO: 21248 - DNA, 248 bp, Homo sapiens
  MAP TO CHR14.3; EXPRESSED IN PLACENTA, SIGNAL = 1.9; EXPRESSED IN HEART, SIGNAL = 1.8; EXPRESSED IN HELA, SIGNAL = 2.2; EXPRESSED IN LUNG, SIGNAL =   2; EXPRESSED IN BONE MARROW, SIGNAL = 1.5; EXPRESSED IN BRAIN, SIGNAL = 1.9; EXPRESSED IN ADULT LIVER, SIGNAL = 2.2; EST_HUMAN HIT: BF983132.1, EVALUE 0.00e+00; SWISSPROT HIT: Q01643, EVALUE 2.10e+00; NT HIT: AB002319.1, EVALUE 0.00e+00
ctgatcgtttctccctctgagggtatggaaagtccagggctttctctgcgtatctggaaagcagtgagtccacctcgtccatagtgaagccaatctcctgtccaaccagcagctgctggagagtctgcacagccacagtggcccaatccaccttcatgttcataagcagctgctccagcatgaacagggggttagaggacaagtgggaatagctggcccggtgctgctcaggcagggtcagcagaatc

SEQ ID NO: 21249 - DNA, 189 bp, Homo sapiens
  MAP TO CHR14.3; EXPRESSED IN HELA, SIGNAL = 2.1; EXPRESSED IN PLACENTA, SIGNAL = 1.5; EXPRESSED IN BONE MARROW, SIGNAL = 1.4; EXPRESSED IN ADULT LIVER, SIGNAL = 1.6; SWISSPROT HIT: P42098, EVALUE 2.20e-01; NT HIT: AE004849.1, EVALUE 1.70e-01
ctgagtgacaggcataccagatctctgcatgaaatggaaggcattctggaatgacacaggaccagggtgggggaactgagtacagaagacagattctggtagcccaaacactttggtcacatagagatcagtttctgcctgtactgtgacatggtcccattctgggatcaaggccggcaccaggggatc

SEQ ID NO: 21250 - DNA, 361 bp, Homo sapiens
  MAP TO CHR19.3; EXPRESSED IN HEART, SIGNAL = 3.7; EXPRESSED IN LUNG, SIGNAL = 5.2; EXPRESSED IN BONE MARROW, SIGNAL =  13; EXPRESSED IN ADULT LIVER, SIGNAL = 7.9; EXPRESSED IN HELA, SIGNAL = 3.3; NT HIT: gi14756084, EVALUE 0.00e+00; EST_HUMAN HIT: BG768642.1, EVALUE 0.00e+00; SWISSPROT HIT: P13688, EVALUE 1.00e-66
gcctcacttctaaccttctggaacccgcccaccactgcccagctcactactgaatccatgccattcaatgttgcagaggggaaggaggttcttctccttgtccacaatctgccccagcaactttttggctacagctggtacaaaggggaaagagtggatggcaaccgtcaaattgtaggatatgcaataggaactcaacaagctaccccagggcccgcaaacagcggtcgagagacaatataccccaatgcatccctgctgatccagaacgtcacccagaatgacacaggattctacaccctacaagtcataaagtcagatcttgtgaatgaagaagcaactggacagttccatgtatacc

SEQ ID NO: 21251 - DNA, 116 bp, Homo sapiens
  MAP TO CHR16.3; EXPRESSED IN ADULT LIVER, SIGNAL =   2; EXPRESSED IN HELA, SIGNAL = 2.4; EXPRESSED IN LUNG, SIGNAL = 2.2; EXPRESSED IN BONE MARROW, SIGNAL = 5.1; EXPRESSED IN FETAL LIVER, SIGNAL = 1.6; SWISSPROT HIT: P33837, EVALUE 1.60e+00; EST_HUMAN HIT: AA453851.1, EVALUE 2.20e+00; NT HIT: AB010108.1, EVALUE 1.50e+00
ggagcatctggaggcagccatcagtgggctgaacatcgtgatgctcaggttggccactggtcaggttgggtttggcagaggttggccatcgtagcggaattcacttatcaggccag

SEQ ID NO: 21252 - DNA, 172 bp, Homo sapiens
  MAP TO CHR18.3; EXPRESSED IN PLACENTA, SIGNAL = 5.3; EXPRESSED IN HEART, SIGNAL =  18; EXPRESSED IN HELA, SIGNAL =  49; EXPRESSED IN BONE MARROW, SIGNAL = 1.1; EXPRESSED IN FETAL LIVER, SIGNAL =  49; EXPRESSED IN ADULT LIVER, SIGNAL = 6.6; EXPRESSED IN BRAIN, SIGNAL = 4.6; NT HIT: X15096.1, EVALUE 6.00e-38; SWISSPROT HIT: P19945, EVALUE 2.00e-18; EST_HUMAN HIT: AV703401.1, EVALUE 1.00e-42
gaagacagggcaacctggaagtccaactacttccttaaggtcatcgaacatttggatgattatccaaaatgcttcattgtgggagtgaacaatgtgggctccgagcagatgaagcagatccaaatgtccctgcaagggaaggctggtggacaagagcaccatgatgcatgag

SEQ ID NO: 21253 - DNA, 127 bp, Homo sapiens
  MAP TO CHR14.3; EXPRESSED IN FETAL LIVER, SIGNAL = 1.4; EXPRESSED IN ADULT LIVER, SIGNAL =   1; EXPRESSED IN PLACENTA, SIGNAL = 1.1; EXPRESSED IN HEART, SIGNAL = 2.5; NT HIT: Y09537.1, EVALUE 2.00e-24; SWISSPROT HIT: P09896, EVALUE 2.00e-14; EST_HUMAN HIT: AA490146.1, EVALUE 7.00e-44
cgtagccactctgcttctgatcacagcgcatcttcccctgggcataggaggaatccttgcccttatactggggcactttgtaaggctgatgcttgccacacttcttacagaaagctcttctggtttt

SEQ ID NO: 21254 - DNA, 430 bp, Homo sapiens
  MAP TO CHR19.3; EXPRESSED IN ADULT LIVER, SIGNAL = 2.4; EXPRESSED IN LUNG, SIGNAL = 3.3; EXPRESSED IN FETAL LIVER, SIGNAL = 2.8; SWISSPROT HIT: P29128, EVALUE 4.20e-01; NT HIT: gi14759458, EVALUE 0.00e+00; EST_HUMAN HIT: AI654760.1, EVALUE 0.00e+00
gggcatggccttgcagcagcgagctggggaggagcgggcgcctgcccatgcccagtcattcctggcacagcagcggctggcaaccaattctcgccgtggacccttgggacgcctggcatctctgaaccttcgccccactgacaagcactgacagacctcacaatcaagccagcctgggctccacccaccctggcttcctccagctcacatggcgcccagcactgggcttcagccaggtgctcgagagctttgaggccatgatctctgctcttccctctcccagattggtggggagggagggcgggaggtagatataggcctgttctttttagcaatgtgattcttgttgttgattctctctctggagttcatgtgctgcctcaggagactctgattttatatttgagaaaaataaaggcgttcaatctgc

SEQ ID NO: 21255 - DNA, 182 bp, Homo sapiens
  MAP TO CHR16.3; EXPRESSED IN ADULT LIVER, SIGNAL = 3.3; EXPRESSED IN BRAIN, SIGNAL = 3.3; EXPRESSED IN HELA, SIGNAL = 2.6; EXPRESSED IN PLACENTA, SIGNAL = 2.7; EXPRESSED IN HEART, SIGNAL = 2.3; EXPRESSED IN LUNG, SIGNAL = 2.1; EXPRESSED IN BONE MARROW, SIGNAL = 3.7; SWISSPROT HIT: P42702, EVALUE 1.50e+00; NT HIT: AF336797.2, EVALUE 2.50e+00
tcctggggctgaggaagcctcctccatctcatgccactggcgtctccacacaaagcttccagatcctgggaagagaaggctggagagtcaagccggctcataccttactggccatgactagtcagagaaacaaggaattacgaccctccacgtgtctggaagtagaagagaagtggcttcag

SEQ ID NO: 21256 - DNA, 128 bp, Homo sapiens
  MAP TO CHR16.3; EXPRESSED IN FETAL LIVER, SIGNAL = 1.2; EXPRESSED IN ADULT LIVER, SIGNAL = 0.92; SWISSPROT HIT: Q06806, EVALUE 6.00e+00; NT HIT: gi16165709, EVALUE 4.00e-66; EST_HUMAN HIT: Z43391.1, EVALUE 6.00e-66
gatgcactccagaaattgactgaaattctcaatttaaatggagaagtagcttgccaggactcaagccatcctgccaaacacaggaacacatctgcagtcctaggctgcttggccgagaaactagcagg

SEQ ID NO: 21257 - DNA, 76 bp, Homo sapiens
  MAP TO CHR16.3; EXPRESSED IN BONE MARROW, SIGNAL = 1.4; EXPRESSED IN ADULT LIVER, SIGNAL = 1.3; EXPRESSED IN BRAIN, SIGNAL = 1.3; EXPRESSED IN PLACENTA, SIGNAL = 1.1; EXPRESSED IN HELA, SIGNAL = 1.3; NT HIT: AY007367.1, EVALUE 2.30e-01; EST_HUMAN HIT: BF700008.1, EVALUE 1.30e+00
acggttgatgggaacactttgtggacaaacctgcaggcctgcatttcttctgactgagtattcatcagctctgatg

SEQ ID NO: 21258 - DNA, 329 bp, Homo sapiens
  MAP TO CHR19.3; EXPRESSED IN HELA, SIGNAL = 1.3; EXPRESSED IN BRAIN, SIGNAL = 1.2; EXPRESSED IN ADULT LIVER, SIGNAL = 1.4; EXPRESSED IN PLACENTA, SIGNAL = 1.4; SWISSPROT HIT: Q05858, EVALUE 1.10e+00; NT HIT: gi14756192, EVALUE 0.00e+00; EST_HUMAN HIT: AI242105.1, EVALUE 1.00e-97
gaagtggcttcttagcttccgccaggagctgctcctgtgggttgatggagagtccccaaggcccccagccctggggatggggaaggacatgaagcctgagccagagaaccagctataagtcctgagaagacactggtgtctggggacagggagggatgggggtccctgatgaatatctggagacctcgacagcctgccctaggccctgggtgggtcaggacaaaggcctctcatcaccgcagaaagcgggggcttgcagggaaagtgaatgggcctgtggcccacctggggtcacttggaaaggatctgaataaaggggacccttcctc

SEQ ID NO: 21259 - DNA, 79 bp, Homo sapiens
  MAP TO CHR14.3; EXPRESSED IN ADULT LIVER, SIGNAL = 1.1; EXPRESSED IN LUNG, SIGNAL = 1.4; EXPRESSED IN BONE MARROW, SIGNAL = 2.6; EXPRESSED IN FETAL LIVER, SIGNAL = 2.2; EXPRESSED IN BRAIN, SIGNAL = 1.6; SWISSPROT HIT: P49763, EVALUE 2.00e-09; NT HIT: gi14784539, EVALUE 1.00e-36; EST_HUMAN HIT: AL552106.1, EVALUE 2.00e-36
accggcattcgcagcgaacgtgctgagagaacgtcagctccacgtaggagggccggtccccagaacggatctttaggag

SEQ ID NO: 21260 - DNA, 106 bp, Homo sapiens
  MAP TO CHR18.3; EXPRESSED IN PLACENTA, SIGNAL = 0.88; EXPRESSED IN HELA, SIGNAL = 1.4; EXPRESSED IN ADULT LIVER, SIGNAL = 1.1; EST_HUMAN HIT: AL596821.1, EVALUE 2.00e-52; SWISSPROT HIT: P50520, EVALUE 2.00e-03; NT HIT: gi14763498, EVALUE 2.00e-52
gagaatttagttgagagcaaacaccacaagcttgcccggagtttaagaagtggaccttctgaccacgatctgaaacccaatgctgccacgagagatcagttaaatg

SEQ ID NO: 21261 - DNA, 267 bp, Homo sapiens
  MAP TO CHR14.3; EXPRESSED IN BRAIN, SIGNAL = 2.1; EXPRESSED IN ADULT LIVER, SIGNAL =   2; EXPRESSED IN PLACENTA, SIGNAL = 1.8; EXPRESSED IN HELA, SIGNAL = 2.2; EST_HUMAN HIT: AW997245.1, EVALUE 5.60e+00; SWISSPROT HIT: P09099, EVALUE 2.80e+00
gaattgtttactccaagagcatccatggaacagaaataaaagggaagggaataaagccaaaggatatgcaaaatatctactcactgcagggcatgctcctcaagcttggtactcagtatcatttacctcaattaagtgtgagcagctcaccttgtaagactccccagcccatgtcacctggctttgagactgtcaactatctctgggttcagtcacatcaagaatctgttcataggaataatcaggttgtgctggctgagagcatgt

SEQ ID NO: 21262 - DNA, 175 bp, Homo sapiens
  MAP TO CHR16.3; EXPRESSED IN HELA, SIGNAL = 1.3; EXPRESSED IN LUNG, SIGNAL = 1.3; EXPRESSED IN BONE MARROW, SIGNAL = 0.96; EXPRESSED IN ADULT LIVER, SIGNAL = 0.98; SWISSPROT HIT: P16320, EVALUE 1.90e+00; NT HIT: AE002274.1, EVALUE 2.40e+00
ttgctgagcaacccagaatgcctctcacctcagtgcgcagggaacaatggtttttcagctcagggcttgagaagggcaaagagggaatccaaaagcagaaatatgggcaacccttcagaatgggccattgttcagctgggagcagaaagggatttgcaacagacaaaaagagaag

SEQ ID NO: 21263 - DNA, 235 bp, Homo sapiens
  MAP TO CHR16.3; EXPRESSED IN ADULT LIVER, SIGNAL = 1.9; EXPRESSED IN HELA, SIGNAL = 3.9; EXPRESSED IN BONE MARROW, SIGNAL = 1.4; EXPRESSED IN FETAL LIVER, SIGNAL =  11; NT HIT: gi14743619, EVALUE 2.00e-54; SWISSPROT HIT: P29341, EVALUE 2.00e-20; EST_HUMAN HIT: AA664267.1, EVALUE 1.00e-56
caaaaggaaacgagtgaatggctgtttcctcttcttcaagccatgccctagtcgtgctggtaaaatcattggtatgttgttggagattggtaatttggaactccttcatatgcttgaatctccagagcctctctatactaaggttgacaaaggtatagctgtactacaagaccaccaagctaaagaggctgcccagaaagcagttaatggtgccactggtgttccaattgtttaa

SEQ ID NO: 21264 - DNA, 378 bp, Homo sapiens
  MAP TO CHR14.3; EXPRESSED IN ADULT LIVER, SIGNAL = 1.1; EXPRESSED IN LUNG, SIGNAL = 1.1; NT HIT: U43842.1, EVALUE 0.00e+00; SWISSPROT HIT: P12644, EVALUE 9.00e-59; EST_HUMAN HIT: BE870587.1, EVALUE 0.00e+00
ccttcgtggtggaagctcctcacggtgttggcccggctggccgggcgctcaggatactcaagaccagtgctgtggatctgctcttcctcctcctccccagactgaagccggtaaagatcccgcatgtagtccggaatgacggcactcttgctaggctgcgggcggcggcgcagcccaaacatctgcagaagtgtcgcctcgaagtcccgcaggagctcatggctctgccctgagcggcgtcctcccgcgtggccctgaatctcggcgacttttttcttccccgtctcaggtatcaaactagcatggctcgcgcctcctagcaggacttggcataataaaacgaccatcagcattcggttaccaggaatcatggtgtct

SEQ ID NO: 21265 - DNA, 272 bp, Homo sapiens
  MAP TO CHR19.3; EXPRESSED IN BONE MARROW, SIGNAL = 1.6; EXPRESSED IN ADULT LIVER, SIGNAL =  11; EXPRESSED IN BRAIN, SIGNAL = 1.3; EST_HUMAN HIT: AI761193.1, EVALUE 1.00e-109; NT HIT: gi14767694, EVALUE 0.00e+00; SWISSPROT HIT: P78329, EVALUE 7.00e-37
cttgctcagcagaagcacatcaatgaaatccaaagtcttggacttggctttgtctttgaaaaaatcatcaataccctgagtggggagggtgcgacgccgctcctggatgagagcgtctgtgaagtcgtgcaccaggcggcaggccctgcgaaagcgccgcccatcatgggagaggtaatacagaaagtccatgtgctggaggatatgctggcttcttttctctacaagggcactgagctccaagatggtggcaatatattcactgggcctcc

SEQ ID NO: 21266 - DNA, 110 bp, Homo sapiens
  MAP TO CHR16.3; EXPRESSED IN BONE MARROW, SIGNAL = 1.1; EXPRESSED IN FETAL LIVER, SIGNAL = 2.4; EXPRESSED IN ADULT LIVER, SIGNAL = 0.93; EXPRESSED IN PLACENTA, SIGNAL = 0.96; EXPRESSED IN HELA, SIGNAL = 1.4; EXPRESSED IN LUNG, SIGNAL = 1.2; EST_HUMAN HIT: AW386461.1, EVALUE 3.00e-18; SWISSPROT HIT: P46297, EVALUE 2.00e-03; NT HIT: gi15297223, EVALUE 2.00e-15
ttggtgaagttctgattgctggatttggtcacaaagatcatgctgttggtgacatccctggggtccgagttaaggttctcagagtagtcagtgtagctctcccttggtcc

SEQ ID NO: 21267 - DNA, 111 bp, Homo sapiens
  MAP TO CHR16.3; EXPRESSED IN ADULT LIVER, SIGNAL =   1; EXPRESSED IN BRAIN, SIGNAL =   1; EXPRESSED IN PLACENTA, SIGNAL = 0.96; EST_HUMAN HIT: BE261644.1, EVALUE 2.10e+00; SWISSPROT HIT: P46531, EVALUE 4.60e+00; NT HIT: X54254.1, EVALUE 1.40e+00
gcccaaggaggcctcctgaagcctcttggctctgttattgcccctctccctttcatacaacccttggagcgagcacctgagtgccctgtgataaagatagcatttcgactt

SEQ ID NO: 21268 - DNA, 142 bp, Homo sapiens
  MAP TO CHR16.3; EXPRESSED IN ADULT LIVER, SIGNAL = 1.8; EST_HUMAN HIT: BE869517.1, EVALUE 3.00e-06; SWISSPROT HIT: Q9QYM0, EVALUE 2.00e-05; NT HIT: AF367202.1, EVALUE 2.00e-74
tttggacatttttgtctgaggcatcatggactgacagtggagggatggtgttctcatctaagcgactccgtaagctttggatcatgagcggggtgagccatgacacggtgaggtaggagaacaggccagcattgtccagggg

SEQ ID NO: 21269 - DNA, 131 bp, Homo sapiens
  MAP TO CHR18.3; EXPRESSED IN BONE MARROW, SIGNAL = 3.2; EXPRESSED IN ADULT LIVER, SIGNAL = 3.4; EXPRESSED IN PLACENTA, SIGNAL = 2.7; EXPRESSED IN HELA, SIGNAL = 5.6; NT HIT: AF305057.1, EVALUE 6.00e-68; EST_HUMAN HIT: BG109889.1, EVALUE 4.00e-67
tgccacaatagagtgatatttaagcaactcctacaggcgaaggccctgcagttcctccagattgacagttgcagactgggcagtgtcaatgagaacctctcagtattgctgatggccaaaaagtttgaaag

SEQ ID NO: 21270 - DNA, 185 bp, Homo sapiens
  MAP TO CHR19.3; EXPRESSED IN HELA, SIGNAL =  22; EXPRESSED IN ADULT LIVER, SIGNAL =   2; EXPRESSED IN BRAIN, SIGNAL = 1.9; EXPRESSED IN PLACENTA, SIGNAL = 0.9; SWISSPROT HIT: Q9Y4Z0, EVALUE 2.00e-16; NT HIT: gi14766098, EVALUE 1.00e-100; EST_HUMAN HIT: BI598457.1, EVALUE 1.00e-100
cctcggccagcgccgcccatgccgcggcctttctgctgcttctgctgctgcaggcctccgcggccgcggcccttggccaccacctcctccttgaccatgtcgatgatctcgtcggggatgcgcaggtacttgatggtgctgccgcggatgtagcactcgggcatccgccagaacttgtccccgtc

SEQ ID NO: 21271 - DNA, 286 bp, Homo sapiens
  MAP TO CHR18.3; EXPRESSED IN FETAL LIVER, SIGNAL = 2.2; EXPRESSED IN BONE MARROW, SIGNAL = 1.9; EXPRESSED IN ADULT LIVER, SIGNAL = 2.6; EXPRESSED IN PLACENTA, SIGNAL = 1.9; SWISSPROT HIT: P98107, EVALUE 4.20e+00; NT HIT: AL163203.2, EVALUE 0.00e+00; EST_HUMAN HIT: BE869242.1, EVALUE 3.90e-01
caggggtggtggatccatccctgctgaaaatgagactgtgcctgctgtggctttcacaaggggtggggtccaactcccccttccaacacagagtggcagcaccctgacaacagaggatagactacaaagttgtgtgtcctgtactggaggaagaggttctaccctgaccctcgttatagtggtagccatcagagaggcagatccatggcccacaaaggcactgtgctgggaactaaaggatgaagattttacaaacaaggtcatgagacctgtgacagggatatga

SEQ ID NO: 21272 - DNA, 209 bp, Homo sapiens
  MAP TO CHR14.3; EXPRESSED IN PLACENTA, SIGNAL = 2.7; EXPRESSED IN HELA, SIGNAL = 1.8; EXPRESSED IN BONE MARROW, SIGNAL = 1.7; EXPRESSED IN BRAIN, SIGNAL = 2.7; EXPRESSED IN ADULT LIVER, SIGNAL = 2.2; SWISSPROT HIT: P46599, EVALUE 3.20e+00; NT HIT: U18313.1, EVALUE 7.40e-01
catatgtgatcatactttggacagttaatgaatatgaatgttgtttgtgctaactcttgcagctgtaaaaggctagatatggaatcagtgccagcttttatcttaagaaaagtttcaggaaataatgcaatgtcgggtctgtcagattcaaaggggacatcagggtcgagagaaatgagtcttgtatgtaactttttcctcttgttccc

SEQ ID NO: 21273 - DNA, 125 bp, Homo sapiens
  MAP TO CHR16.3; EXPRESSED IN ADULT LIVER, SIGNAL = 1.6; EXPRESSED IN PLACENTA, SIGNAL =   2; EXPRESSED IN HELA, SIGNAL = 3.3; EXPRESSED IN BONE MARROW, SIGNAL = 1.5; EXPRESSED IN FETAL LIVER, SIGNAL = 1.1; EXPRESSED IN LUNG, SIGNAL = 3.9; EST_HUMAN HIT: AW976160.1, EVALUE 3.00e-64; SWISSPROT HIT: P79197, EVALUE 2.00e+00; NT HIT: gi14779692, EVALUE 2.00e-64
cacatgcagatccggggtcggggcagcggcggctgcggaaagaaagcgaattggggaaggcagctgcggtgtcctggcccgtagcgaatctccagcaggccggagaagccgctgtaacttgccat

SEQ ID NO: 21274 - DNA, 92 bp, Homo sapiens
  MAP TO CHR14.3; EXPRESSED IN HELA, SIGNAL = 2.4; EXPRESSED IN FETAL LIVER, SIGNAL = 3.1; EXPRESSED IN BONE MARROW, SIGNAL = 2.2; EXPRESSED IN ADULT LIVER, SIGNAL = 2.4; EXPRESSED IN PLACENTA, SIGNAL = 2.2; EST_HUMAN HIT: BE958622.1, EVALUE 1.70e+00; SWISSPROT HIT: P26168, EVALUE 3.60e+00; NT HIT: AF378889.1, EVALUE 2.90e-01
ccatgacaccaactgcctcggcagggacactgctcttgcaagttccaaagtcagtggagcatttggtgacgttatcgtagcagaaagccata

SEQ ID NO: 21275 - DNA, 217 bp, Homo sapiens
  MAP TO CHR14.3; EXPRESSED IN BONE MARROW, SIGNAL = 3.3; EXPRESSED IN BRAIN, SIGNAL = 3.9; EXPRESSED IN ADULT LIVER, SIGNAL = 3.3; EXPRESSED IN PLACENTA, SIGNAL = 3.4; EXPRESSED IN HELA, SIGNAL =   3; SWISSPROT HIT: Q9M2L4, EVALUE 8.60e+00
tacgcagagttcccagcgatgccaacggaagaaggcctgtagttgctgaagccagagtcaccagtgtggatctccacttcttcccacctcctcaagcccctcccatacctgtgtttagaaacttcacaggaagcagagttggcaagcatacctgagctgattgctctcgcctctctcaccatcttgagtacatcatcgtcaccctccagagccctcc

SEQ ID NO: 21276 - DNA, 87 bp, Homo sapiens
  MAP TO CHR19.3; EXPRESSED IN HELA, SIGNAL = 1.7; EXPRESSED IN LUNG, SIGNAL = 1.3; EXPRESSED IN BONE MARROW, SIGNAL = 2.3; EXPRESSED IN ADULT LIVER, SIGNAL = 1.5; EXPRESSED IN BRAIN, SIGNAL = 1.9; EST_HUMAN HIT: BF740696.1, EVALUE 1.00e-41
tgtgcacccaactgctggtgtcccgaccagacgaggagaacatcaccagttacctccagctcatcgaaaagtgcctgactcatgagg

SEQ ID NO: 21277 - DNA, 112 bp, Homo sapiens
  MAP TO CHR14.3; EXPRESSED IN FETAL LIVER, SIGNAL = 1.9; EXPRESSED IN LUNG, SIGNAL =   5; EXPRESSED IN BONE MARROW, SIGNAL = 1.1; EXPRESSED IN ADULT LIVER, SIGNAL = 0.96; EXPRESSED IN HELA, SIGNAL = 4.7; EST_HUMAN HIT: BF332448.1, EVALUE 7.00e-56; SWISSPROT HIT: Q14204, EVALUE 8.00e-15; NT HIT: U53530.1, EVALUE 5.00e-56
cttcgacaaaatttggatgccctcctgaaccagctgaaaagcttccctgcccggttgcgacagtatgcgtcctatgagtttgttcagaggcttctgaaaggttacatgaagg

SEQ ID NO: 21278 - DNA, 202 bp, Homo sapiens
  MAP TO CHR18.3; EXPRESSED IN ADULT LIVER, SIGNAL =   2; EXPRESSED IN PLACENTA, SIGNAL = 1.2; EXPRESSED IN BONE MARROW, SIGNAL = 0.78; EXPRESSED IN BRAIN, SIGNAL = 1.8; EST_HUMAN HIT: BF746564.1, EVALUE 1.00e-107; SWISSPROT HIT: Q99728, EVALUE 3.00e-06; NT HIT: gi14140237, EVALUE 1.00e-110
gattccacaccaaatcatccatcacaaacaacgcctgcccaaaagaaaactcccagttcttcatctcgacagaaagataaagttaataaaagaaatgaacgtggtgaaactcctttacacatggctgctattcgaggagatgtgaaacaagttaaagaattaataagtttaggggcaaatgtgaatgtgaaagattttgcag

SEQ ID NO: 21279 - DNA, 302 bp, Homo sapiens
  MAP TO CHR16.3; EXPRESSED IN BONE MARROW, SIGNAL =   1; EXPRESSED IN ADULT LIVER, SIGNAL = 0.96; EXPRESSED IN BRAIN, SIGNAL = 1.1; SWISSPROT HIT: Q13563, EVALUE 2.80e-02; NT HIT: gi9789904, EVALUE 1.10e+00; EST_HUMAN HIT: BG332616.1, EVALUE 7.00e-09
cttgacgtgctttggcgagtgcatccaaggggaccacgtagcctcctccccggtacacagtgagtttgccccagatgggatacccttgacgttggtcctggctctggtactgccattactgagggtggtgcattccagccttccccatagtctgccatgtcttcagcatccagggaatatggtgcacggcatccgttgagatactgcggctgctgggcaagagggcaagagctttcctggaccctcacttgacgaatctgggcactgccaaccagcttggagttcccatcagtgataaagcc

SEQ ID NO: 21280 - DNA, 206 bp, Homo sapiens
  MAP TO CHR19.3; EXPRESSED IN FETAL LIVER, SIGNAL = 1.5; EXPRESSED IN ADULT LIVER, SIGNAL = 0.92; SWISSPROT HIT: P71675, EVALUE 5.60e-02; NT HIT: gi14760362, EVALUE 1.00e-108; EST_HUMAN HIT: BG754314.1, EVALUE 1.00e-110
cagtctgcgctcggtggtagagcacataggcctcctcgtccatgaccagctcctccccttcgcgtagcggcggcccccggccgggcaggtagacctgggccgggccctcggaacttgtgtcgccggactcggcttccatgggttccccggtttcacacgtgcgccgccgacccttgcgcgccgccatcttcgaaccctctcgctgc

SEQ ID NO: 21281 - DNA, 132 bp, Homo sapiens; identical to SEQ ID NO: 19436
  MAP TO CHR16.3; EXPRESSED IN LUNG, SIGNAL = 4.1; EXPRESSED IN BONE MARROW, SIGNAL = 6.8; EXPRESSED IN FETAL LIVER, SIGNAL =  16; EXPRESSED IN ADULT LIVER, SIGNAL = 5.7; EXPRESSED IN PLACENTA, SIGNAL =   5; EXPRESSED IN HELA, SIGNAL = 4.1; EXPRESSED IN HEART, SIGNAL =  11; SWISSPROT HIT: P16861, EVALUE 2.00e+00; NT HIT: AE006590.1, EVALUE 4.40e-01; EST_HUMAN HIT: BI561156.1, EVALUE 2.00e-68

SEQ ID NO: 21282 - DNA, 162 bp, Homo sapiens
  MAP TO CHR16.3; EXPRESSED IN ADULT LIVER, SIGNAL = 4.1; EXPRESSED IN PLACENTA, SIGNAL = 2.9; EXPRESSED IN HEART, SIGNAL = 2.7; EXPRESSED IN LUNG, SIGNAL = 2.6; EXPRESSED IN BONE MARROW, SIGNAL = 2.6; EXPRESSED IN FETAL LIVER, SIGNAL =   3; NT HIT: M62320.1, EVALUE 5.60e-01; SWISSPROT HIT: P35421, EVALUE 7.60e+00; EST_HUMAN HIT: R49912.1, EVALUE 8.20e-01
tgatgggatttcagagttcattctgcttccagccagaacaaaaacccagtgaccttatggccatccatgaacaaggaattaccagccccctcattggccaagaccctgtatggctactttttacatctggccagtgtgccagtaccatgggaaagcctgctg

SEQ ID NO: 21283 - DNA, 235 bp, Homo sapiens
  MAP TO CHR19.3; EXPRESSED IN LUNG, SIGNAL = 2.2; EXPRESSED IN BONE MARROW, SIGNAL = 1.3; EXPRESSED IN ADULT LIVER, SIGNAL = 1.1; EXPRESSED IN PLACENTA, SIGNAL = 1.2; EST_HUMAN HIT: AA573517.1, EVALUE 4.00e-56; NT HIT: gi8923136, EVALUE 1.00e-129; SWISSPROT HIT: O76090, EVALUE 1.00e-24
ccagcctccaccacgtggtctatggtggggaagcgcttgaacaccgcggtgctgacggagcgcaggatgagcacggccgagagccctgcgtagcgcatgagtgtgcgccggtagaggcggccgcggtcgtcgcgtccgtgcacggtgcccgccaccacgcacatgagcgcgtcgggcagcggcatgcataggtactggctccaccagcggttcaccaccagcgtcacataaaagc

SEQ ID NO: 21284 - DNA, 156 bp, Homo sapiens
  MAP TO CHR18.3; EXPRESSED IN ADULT LIVER, SIGNAL = 1.5; EXPRESSED IN PLACENTA, SIGNAL = 1.6; EST_HUMAN HIT: BF244809.1, EVALUE 7.90e-01; NT HIT: U92471.1, EVALUE 5.40e-01; SWISSPROT HIT: Q9Y5X4, EVALUE 7.60e+00
tacaaaccactagcattttctgaattatatttgacagcgtacactacttgcttcatgatccaaatatagtatattgaatagatgacgatgtccttcacagtcactattgagtcataaggcgctgaagggaagtctggctcatgggaagtgctctct

SEQ ID NO: 21285 - DNA, 205 bp, Homo sapiens
  MAP TO CHR19.3; EXPRESSED IN BRAIN, SIGNAL = 2.5; EXPRESSED IN ADULT LIVER, SIGNAL = 1.8; SWISSPROT HIT: Q90404, EVALUE 5.60e-02; EST_HUMAN HIT: BF316076.1, EVALUE 1.00e-111; NT HIT: gi15309250, EVALUE 1.00e-112
cagcagctgcaataaccccataggcagttgggcttccagactggtctccggcagaggaggatgtggcattcccgacagaggggacactctccagggtcacagggggccccatggttgtggcattcctgagagaggtgacactctccagggtcacagggggccccatggttgtggcatccccttccgggaggatctcattggttcc

SEQ ID NO: 21286 - DNA, 188 bp, Homo sapiens
  MAP TO CHR16.3; EXPRESSED IN FETAL LIVER, SIGNAL = 0.87; EXPRESSED IN BONE MARROW, SIGNAL = 1.3; EXPRESSED IN BRAIN, SIGNAL = 1.3; EXPRESSED IN ADULT LIVER, SIGNAL = 1.4; NT HIT: gi14776350, EVALUE 9.00e-59; SWISSPROT HIT: Q9UL36, EVALUE 2.90e-01; EST_HUMAN HIT: BG211769.1, EVALUE 1.00e-58
ctgagaccgtcggtgctgacgggggaaccgaggaccatcaggcggcgtggtgcagcggatgtgggcacccacctgcagctcggtctggaagaagaacttctgagggcactgtgagcagtcgtagatcttgtcctcctgcccgtgcacggcaaagatgtgctgctgcaacttgttggcctggacgaaga

SEQ ID NO: 21287 - DNA, 337 bp, Homo sapiens
  MAP TO CHR18.3; EXPRESSED IN PLACENTA, SIGNAL = 4.1; EXPRESSED IN HELA, SIGNAL = 3.4; EXPRESSED IN FETAL LIVER, SIGNAL = 5.3; EXPRESSED IN LUNG, SIGNAL = 3.4; EXPRESSED IN BONE MARROW, SIGNAL = 5.6; EXPRESSED IN ADULT LIVER, SIGNAL = 3.7; SWISSPROT HIT: P98064, EVALUE 7.80e-01; EST_HUMAN HIT: AI935380.1, EVALUE 1.00e-53
gaccagcccatcgtccacaacgtggaagtccagcttccgttcaaatcggagttctttcttcatgacatttctttgcaaagtcccggaacccacagctctgagactctggctgtcccccaacccaccccatcttccttgtcctcacccctggtcaggagaagccaaaacatcagtcagcttcccagtaatcaagcctggctttctcacccagggctcgccccagaacaaccaccggcttctttcagtgtagccaaaaggctattggagtcttctcaaatgaaagagattttatcaaaggcttggagaagaaaagaaaaagaggattatataataaaac

SEQ ID NO: 21288 - DNA, 100 bp, Homo sapiens
  MAP TO CHR18.3; EXPRESSED IN FETAL LIVER, SIGNAL = 2.4; EXPRESSED IN BRAIN, SIGNAL = 2.1; EXPRESSED IN LUNG, SIGNAL = 1.9; EXPRESSED IN BONE MARROW, SIGNAL = 3.8; EXPRESSED IN ADULT LIVER, SIGNAL = 2.8; EXPRESSED IN PLACENTA, SIGNAL =   2; EXPRESSED IN HELA, SIGNAL = 2.5; NT HIT: gi13937343, EVALUE 1.30e+00; SWISSPROT HIT: P47299, EVALUE 8.00e+00
catggcctgggacggtgccaatggagatgtatttcttggacttgctgagaaaggctccatcccactgatggatgttggctgtgctggcagctccgcataa

SEQ ID NO: 21289 - DNA, 388 bp, Homo sapiens
  MAP TO CHR16.3; EXPRESSED IN PLACENTA, SIGNAL = 1.6; EXPRESSED IN HELA, SIGNAL = 1.7; EXPRESSED IN BONE MARROW, SIGNAL = 1.7; EXPRESSED IN FETAL LIVER, SIGNAL = 1.4; EXPRESSED IN LUNG, SIGNAL = 2.6; EXPRESSED IN ADULT LIVER, SIGNAL = 2.5; SWISSPROT HIT: Q9XHM1, EVALUE 1.00e-03; EST_HUMAN HIT: AI673526.1, EVALUE 1.00e-32; NT HIT: X17279.1, EVALUE 6.00e-03
gacgccagtagagccggcagccgagtctgctgctcccgccctcagagccgcggcggcggggacaaaaatcctcggcggcgggggcaaaaagtcgcggtggcaaaaagcggcggcgacgggggcaaaaagtcgcggcagcaaaaagccgcggcggcggggacaaaaagccgcggcggcgtgggggcagaaagccacggcgggcaaaaagccgcggcggcaaaaagccatggcggcgagggtgcaaaaagctgtgtcggcggtggggcaaaaagcctggtcgggaaaaaagccgcggcagcggcgaagggcaaaaagccgcggcggcggagggcgaaaagtcgcggcggcgggaggaaaaaagccgcggaggtcaaaaagccgaggcagg

SEQ ID NO: 21290 - DNA, 103 bp, Homo sapiens
  MAP TO CHR19.3; EXPRESSED IN PLACENTA, SIGNAL =   1; EXPRESSED IN HEART, SIGNAL = 2.5; EXPRESSED IN BONE MARROW, SIGNAL = 1.5; EXPRESSED IN FETAL LIVER, SIGNAL = 1.7; EXPRESSED IN ADULT LIVER, SIGNAL = 1.4; EXPRESSED IN BRAIN, SIGNAL = 1.1; NT HIT: gi5729985, EVALUE 2.00e-51; SWISSPROT HIT: O95707, EVALUE 2.00e-13; EST_HUMAN HIT: AW247259.1, EVALUE 4.00e-51
gtgacaaaatccaaatgcccctcttatgtgggtattacaggaatccttctacaggaaacaaagcacattttcaaaattatcaccaaagaagaccgcctgaaag

SEQ ID NO: 21291 - DNA, 83 bp, Homo sapiens
  MAP TO CHR14.3; EXPRESSED IN HEART, SIGNAL = 1.6; EXPRESSED IN HELA, SIGNAL = 1.3; EXPRESSED IN LUNG, SIGNAL = 1.7; EXPRESSED IN ADULT LIVER, SIGNAL = 1.3; EXPRESSED IN PLACENTA, SIGNAL = 1.1; SWISSPROT HIT: P40803, EVALUE 3.60e+00; EST_HUMAN HIT: BF858352.1, EVALUE 5.80e+00
gtcagcgctttgcgaggccctgagaaccagcgcagagctcatgtggagcaccagcatgagtggccctgagctgggcatccagg

SEQ ID NO: 21292 - DNA, 88 bp, Homo sapiens
  MAP TO CHR18.3; EXPRESSED IN BONE MARROW, SIGNAL = 1.8; EXPRESSED IN ADULT LIVER, SIGNAL = 1.1; EXPRESSED IN HELA, SIGNAL = 1.1; EXPRESSED IN PLACENTA, SIGNAL = 1.5; NT HIT: AE006785.1, EVALUE 1.10e+00
tgcaatacccttctccctcgagtaagtcaactccatgtcatcttgtcctccaatgctatcttccagtctttcactttctaacggaagt

SEQ ID NO: 21293 - DNA, 84 bp, Homo sapiens
  MAP TO CHR18.3; EXPRESSED IN BRAIN, SIGNAL = 2.2; EXPRESSED IN ADULT LIVER, SIGNAL =   2; EXPRESSED IN PLACENTA, SIGNAL = 2.3; EXPRESSED IN HELA, SIGNAL = 2.8; EXPRESSED IN BONE MARROW, SIGNAL = 1.9; NT HIT: AF132123.1, EVALUE 4.00e-03; SWISSPROT HIT: O60266, EVALUE 6.20e+00
taacactgtgggagttcccaaagcgttattgggataatgagatgggtaatgagaggaagaattcgaagacccagaataactaat

SEQ ID NO: 21294 - DNA, 119 bp, Homo sapiens
  MAP TO CHR16.3; EXPRESSED IN PLACENTA, SIGNAL = 4.3; EXPRESSED IN HELA, SIGNAL =   3; EXPRESSED IN BONE MARROW, SIGNAL = 7.8; EXPRESSED IN LUNG, SIGNAL = 4.9; EXPRESSED IN ADULT LIVER, SIGNAL = 5.5; NT HIT: AB055519.1, EVALUE 3.90e-01; SWISSPROT HIT: P12977, EVALUE 1.60e+00; EST_HUMAN HIT: BF815337.1, EVALUE 1.50e-01
cggggttccatgccgcagtgaactggaatctgcactcggggaccaaccaaccactccctgctgcctgctctccaggcctccaactcccacgttcctgggctccaggtcagctgacagcg

SEQ ID NO: 21295 - DNA, 125 bp, Homo sapiens
  MAP TO CHR19.3; EXPRESSED IN ADULT LIVER, SIGNAL =  25; EXPRESSED IN BRAIN, SIGNAL = 5.7; EXPRESSED IN HELA, SIGNAL =  55; EXPRESSED IN HEART, SIGNAL = 5.7; EXPRESSED IN FETAL LIVER, SIGNAL =  11; NT HIT: gi15431298, EVALUE 2.00e-64; SWISSPROT HIT: Q07020, EVALUE 8.00e-17; EST_HUMAN HIT: BI860113.1, EVALUE 3.00e-64
ccggagagcaggacagtgccacagcccttaggggagtccagggccagctggtcgaaagtgaggatcttgccccctgccctgaggatgcggctgcgggcccggctggtcacgcgcagtgcacatac

SEQ ID NO: 21296 - DNA, 152 bp, Homo sapiens
  MAP TO CHR16.3; EXPRESSED IN ADULT LIVER, SIGNAL = 2.4; EXPRESSED IN PLACENTA, SIGNAL = 2.6; EXPRESSED IN HELA, SIGNAL = 3.6; EXPRESSED IN FETAL LIVER, SIGNAL =   3; EST_HUMAN HIT: BI522496.1, EVALUE 8.00e-75; NT HIT: gi14779477, EVALUE 2.00e-80; SWISSPROT HIT: O02193, EVALUE 6.00e-11
gttatgagctctccaagctggagagcacagtcggctccccggagaagccactgtctgacctgggcaagctcagctaccgcagctactggtcctgggtgctgctagagatcctgcgggacttccggggcacactgtccatcaaggacctcagg

SEQ ID NO: 21297 - DNA, 179 bp, Homo sapiens
  MAP TO CHR16.3; EXPRESSED IN HEART, SIGNAL = 2.3; EXPRESSED IN BONE MARROW, SIGNAL =   4; EXPRESSED IN FETAL LIVER, SIGNAL = 2.7; EXPRESSED IN ADULT LIVER, SIGNAL = 3.5; EXPRESSED IN PLACENTA, SIGNAL = 3.7; EXPRESSED IN HELA, SIGNAL = 3.9; SWISSPROT HIT: P17778, EVALUE 7.40e+00; EST_HUMAN HIT: BF923605.1, EVALUE 7.00e-94; NT HIT: gi15318237, EVALUE 2.00e-96
gccttcagctgaatttcactgcctcctggggagacttgcactacctggggctcactggcctggaagtggtgggcaaggagggccaggcgctgcccatccacctgcaccagatctctgcttcccccagagacttaaatgagctccccgagtactctgacgactcccgggccctggacaag

SEQ ID NO: 21298 - DNA, 98 bp, Homo sapiens
  MAP TO CHR18.3; EXPRESSED IN HELA, SIGNAL =   3; EXPRESSED IN LUNG, SIGNAL = 3.1; EXPRESSED IN BONE MARROW, SIGNAL = 4.4; EXPRESSED IN FETAL LIVER, SIGNAL = 3.3; EXPRESSED IN BRAIN, SIGNAL = 4.3; EXPRESSED IN ADULT LIVER, SIGNAL =   3; EXPRESSED IN PLACENTA, SIGNAL =   3; EST_HUMAN HIT: BF896335.1, EVALUE 2.00e-03; NT HIT: gi15321255, EVALUE 7.80e-02
gactctcaaaatcaagagggaaaagaaggaagctcagtacttcttgcggcgagagaagccagtgccggtgcggacactcttggctggtggaatctgtg

SEQ ID NO: 21299 - DNA, 124 bp, Homo sapiens
  MAP TO CHR16.3; EXPRESSED IN HELA, SIGNAL =  10; EXPRESSED IN HEART, SIGNAL =  16; EXPRESSED IN LUNG, SIGNAL =  11; EXPRESSED IN BONE MARROW, SIGNAL =  10; EXPRESSED IN FETAL LIVER, SIGNAL =  18; EXPRESSED IN ADULT LIVER, SIGNAL =  15; EXPRESSED IN PLACENTA, SIGNAL =  14; SWISSPROT HIT: Q9UKN7, EVALUE 1.20e+00; EST_HUMAN HIT: AW582266.1, EVALUE 1.00e-63; NT HIT: gi14777377, EVALUE 9.00e-64
attcatggggatacggtccagaaccagctggtggtccaaggagtggagctcccatcttacctccccttgtacccgcctgccatggactggatcttccagtgcatctcctaccatgcccccgagg

SEQ ID NO: 21300 - DNA, 291 bp, Homo sapiens
  MAP TO CHR19.3; EXPRESSED IN PLACENTA, SIGNAL = 1.6; EXPRESSED IN HELA, SIGNAL = 1.6; EXPRESSED IN BONE MARROW, SIGNAL = 1.2; EXPRESSED IN FETAL LIVER, SIGNAL = 2.1; EXPRESSED IN ADULT LIVER, SIGNAL = 1.5; EXPRESSED IN BRAIN, SIGNAL =   1; NT HIT: L10038.1, EVALUE 0.00e+00; SWISSPROT HIT: P06870, EVALUE 1.00e-53; EST_HUMAN HIT: BG758556.1, EVALUE 0.00e+00
gcaattaccagctctggctgggtcgccacaacttgtttgacgacgaaaacacagcccagtttgttcatgtcagtgagagcttcccacaccctggcttcaacatgagcctcctggagaaccacacccgccaagcagacgaggactacagccacgacctcatgctgctccgcctgacagagcctgctgataccatcacagacgctgtgaaggtcgtggagttgcccacccaggaacccgaagtggggagcacctgtttggcttccggctggggcagcatcgaaccagagaatt

SEQ ID NO: 21301 - DNA, 159 bp, Homo sapiens
  MAP TO CHR19.3; EXPRESSED IN LUNG, SIGNAL = 0.99; EXPRESSED IN BRAIN, SIGNAL = 1.8; EXPRESSED IN ADULT LIVER, SIGNAL = 1.4; EXPRESSED IN PLACENTA, SIGNAL = 1.4; NT HIT: L23195.1, EVALUE 1.40e-01; SWISSPROT HIT: P51905, EVALUE 1.20e-02; EST_HUMAN HIT: AA370318.1, EVALUE 2.00e-01
cagactgtgagcatagctcatgctgcacagccaggggacaagctgcttccagacccggatgttgtccacatgcagccactgccccatgatcacctccatgtataagagcgggatcccgaataagagaagcatgaagaagtacatcaggatgaagctgcc

SEQ ID NO: 21302 - DNA, 192 bp, Homo sapiens
  MAP TO CHR16.3; EXPRESSED IN HELA, SIGNAL = 1.2; EXPRESSED IN LUNG, SIGNAL = 1.1; EXPRESSED IN ADULT LIVER, SIGNAL = 1.1; EXPRESSED IN PLACENTA, SIGNAL = 1.3; NT HIT: AE005503.1, EVALUE 2.70e+00; SWISSPROT HIT: Q09288, EVALUE 3.30e+00
ggtccagtagacttcggggattcccaaccgaaacaatcccctcccctagtgtccctttggcggggaacgccagccagaaagcaagccaggttgtgactagagttggggcgctttgcatcctgggatgtgtagtcgcgctcctctaccccgttcccatcgcagaagtaatgcgtcttcgttcgtcgctgcgcc

SEQ ID NO: 21303 - DNA, 150 bp, Homo sapiens
  MAP TO CHR16.3; EXPRESSED IN HELA, SIGNAL = 3.3; EXPRESSED IN LUNG, SIGNAL = 2.5; EXPRESSED IN BRAIN, SIGNAL = 2.3; EXPRESSED IN BONE MARROW, SIGNAL =   3; EXPRESSED IN ADULT LIVER, SIGNAL = 3.8; EST_HUMAN HIT: BI825551.1, EVALUE 2.00e-78; NT HIT: AF332579.1, EVALUE 1.30e-01; SWISSPROT HIT: Q02113, EVALUE 4.50e+00
tgtcagagcaacaaatggacctgaaggatttaatgcccacaaagaggaaatacatgtggaagactgctgaagataggcgcatgtctgacctcacctgtgtgctggagtggctggagcggaggcaggggaagaagaaacaagctcccgagg

SEQ ID NO: 21304 - DNA, 485 bp, Homo sapiens
  MAP TO CHR19.3; EXPRESSED IN PLACENTA, SIGNAL = 3.4; EXPRESSED IN HELA, SIGNAL = 2.8; EXPRESSED IN FETAL LIVER, SIGNAL = 2.3; EXPRESSED IN LUNG, SIGNAL = 2.9; EXPRESSED IN BRAIN, SIGNAL = 2.9; EXPRESSED IN ADULT LIVER, SIGNAL = 4.3; SWISSPROT HIT: Q9Y337, EVALUE 2.00e-26; EST_HUMAN HIT: W73140.1, EVALUE 0.00e+00; NT HIT: gi6912643, EVALUE 0.00e+00
gggtgattctggggggcctgtggtctgcaatggctccctgcagggactcgtgtcctggggagattacccttgtgcccggcccaacagaccgggtgtctacacgaacctctgcaagttcaccaagtggatccaggaaaccatccaggccaactcctgagtcatcccaggactcagcacaccggcatccccacctgctgcagggacagccctgacactcctttcagaccctcattccttcccagagatgttgagaatgttcatctctccagcccctgaccccatgtctcctggactcagggtctgcttcccccacattgggctgaccgtgtctctctagttgaaccctgggaacaatttccaaaactgtccagggcgggggttgcgtctcaatctccctggggcactttcatcctcaagctcagggcccatcccttctctgcagctctgacccaaatttagtcccagaaataaactgagaagtggaa

SEQ ID NO: 21305 - DNA, 168 bp, Homo sapiens
  MAP TO CHR19.3; EXPRESSED IN FETAL LIVER, SIGNAL = 5.8; EXPRESSED IN ADULT LIVER, SIGNAL =  13; EXPRESSED IN HELA, SIGNAL =   1; SWISSPROT HIT: O43272, EVALUE 2.00e-09; EST_HUMAN HIT: AI823488.1, EVALUE 1.00e-89; NT HIT: gi14767206, EVALUE 7.00e-90
ggacacattcgagcggctggggagggatgcagaggctgcgcacagggccggcctggccttcggagtgaagctggtacgaggtgcatatctggacaaggagagagcggtggcccagctccatgggatggaagaccccactcagcctgactatgaggccaccagtcagag

SEQ ID NO: 21306 - DNA, 315 bp, Homo sapiens
  MAP TO CHR16.3; EXPRESSED IN HELA, SIGNAL = 5.1; EXPRESSED IN LUNG, SIGNAL = 5.7; EXPRESSED IN FETAL LIVER, SIGNAL = 4.3; EXPRESSED IN BONE MARROW, SIGNAL = 4.9; EXPRESSED IN BRAIN, SIGNAL = 3.3; EXPRESSED IN ADULT LIVER, SIGNAL = 3.6; NT HIT: gi14779472, EVALUE 0.00e+00; SWISSPROT HIT: Q16651, EVALUE 1.00e-08; EST_HUMAN HIT: AU142128.1, EVALUE 0.00e+00
cctgtccccgaccggagtaatccaagatagagcagaatggccacagcccccagctgcccaggccccaggacccccttctgggccatggcccaggacaagggcccctggggcagactccaggcacgcaaggtaggaagccttggggtggtgtcgaaggcaggacccagatgttggctcagagggaaggatcccagaatccgggctggaaaggggcagcaagtgtccaaggctggcctctaaggcagggagcggccgcaacgggagacgcctggagtatccgaagcgagcagtgtggacgagtcaccagcaccgtct

SEQ ID NO: 21307 - DNA, 223 bp, Homo sapiens
  MAP TO CHR18.3; EXPRESSED IN ADULT LIVER, SIGNAL = 4.1; EXPRESSED IN PLACENTA, SIGNAL = 3.2; EXPRESSED IN HELA, SIGNAL = 8.3; EXPRESSED IN LUNG, SIGNAL = 7.6; EXPRESSED IN FETAL LIVER, SIGNAL = 5.1; EXPRESSED IN BONE MARROW, SIGNAL = 5.7; EXPRESSED IN BRAIN, SIGNAL = 7.6; NT HIT: AJ000334.1, EVALUE 1.00e-122; SWISSPROT HIT: O43776, EVALUE 4.00e-40; EST_HUMAN HIT: BG260345.1, EVALUE 1.00e-122
cttcatagtaccccctatcaaagaagtgatctctaaagcacctggtgaccatggatcgtgcttttaggattttggacatgttttctcctcggatcatcatgtgtctgttgttgagctggacatcaacgtcagactcctcattgatcaggttgtcagctcctccagcaggggccaacccaattagttcccagaagtcacaactcagctcatggccacctggagc

SEQ ID NO: 21308 - DNA, 131 bp, Homo sapiens
  MAP TO CHR14.3; EXPRESSED IN PLACENTA, SIGNAL = 5.6; EXPRESSED IN HELA, SIGNAL = 6.5; EXPRESSED IN HEART, SIGNAL = 5.5; EXPRESSED IN BONE MARROW, SIGNAL =  11; EXPRESSED IN FETAL LIVER, SIGNAL = 7.7; EXPRESSED IN LUNG, SIGNAL = 6.3; EXPRESSED IN ADULT LIVER, SIGNAL = 7.2; EXPRESSED IN BRAIN, SIGNAL = 7.4; NT HIT: AB026898.1, EVALUE 1.70e+00; SWISSPROT HIT: P18466, EVALUE 7.80e+00; EST_HUMAN HIT: AW519218.1, EVALUE 1.60e-01
gcaacaggaaagtcaaggagaaaaagtcagacctgaaggggctttggtgtggaggagaagacagagtggtggctgccacccacactcatggctgtggaggtctgacgagctctgaggtccagacagaagag

SEQ ID NO: 21309 - DNA, 128 bp, Homo sapiens
  MAP TO CHR16.3; EXPRESSED IN HELA, SIGNAL = 2.7; EXPRESSED IN PLACENTA, SIGNAL =   2; EXPRESSED IN HEART, SIGNAL = 4.7; EXPRESSED IN FETAL LIVER, SIGNAL = 4.7; EXPRESSED IN ADULT LIVER, SIGNAL = 3.6; EXPRESSED IN BRAIN, SIGNAL = 7.3; NT HIT: gi9507032, EVALUE 1.00e-56; SWISSPROT HIT: P10512, EVALUE 3.50e+00; EST_HUMAN HIT: AL540465.1, EVALUE 8.00e-59
gaaccacagaataagagaactccagatttgcctgaagaagagtatgtgaaggaagaaatccaggagaatgaagaagcagtcaaaaagatgcttgtggaacgccaccccgggagtttgaggaggttgtg

SEQ ID NO: 21310 - DNA, 117 bp, Homo sapiens
  MAP TO CHR18.3; EXPRESSED IN ADULT LIVER, SIGNAL = 1.4; EXPRESSED IN BRAIN, SIGNAL = 2.4; EXPRESSED IN HELA, SIGNAL = 1.4; EXPRESSED IN PLACENTA, SIGNAL = 1.4; EXPRESSED IN BONE MARROW, SIGNAL = 1.3; EST_HUMAN HIT: W81679.1, EVALUE 8.80e+00; NT HIT: AJ238741.1, EVALUE 3.80e-01
atgtctacctgcaataccagcctggacacagtgagacaaaagagtctgggggtggacagaggaatggctggctgtgatggtcggatgtctgcaggattcaggatgacaagttgcttg

SEQ ID NO: 21311 - DNA, 141 bp, Homo sapiens
  MAP TO CHR18.3; EXPRESSED IN ADULT LIVER, SIGNAL = 1.3; EXPRESSED IN PLACENTA, SIGNAL = 1.1; EST_HUMAN HIT: BI488758.1, EVALUE 4.50e-02; SWISSPROT HIT: P18160, EVALUE 5.90e+00; NT HIT: AF037402.1, EVALUE 4.80e-01
ttggactgaggggcagcccgagatcttcagactctcctggctttgtggcttcacattccagggggcttcaggctttcctctgttggaaaatggctgatcatgtgtttctgtttttgcttcattcggagctgcttggcacag

SEQ ID NO: 21312 - DNA, 211 bp, Homo sapiens
  MAP TO CHR18.3; EXPRESSED IN LUNG, SIGNAL = 1.7; EXPRESSED IN ADULT LIVER, SIGNAL = 1.4; EXPRESSED IN HELA, SIGNAL = 1.6; EXPRESSED IN BONE MARROW, SIGNAL = 2.3; SWISSPROT HIT: P12499, EVALUE 2.20e-01; NT HIT: AF305821.1, EVALUE 3.00e+00; EST_HUMAN HIT: AL561281.1, EVALUE 1.10e+00
cgtgcgtctgactcatttggaaaattcaaagcacatgtttattcctgctgtggacccagccattactgtgcaatttacaggccctgtgcgacccagagcacacaatgtggtggagagcgctgccaaggagctgccccaggctcttggtgctgctaggtttgattactttgctatcagctttgtaaatggagatggcacccctcagcctcta

SEQ ID NO: 21313 - DNA, 148 bp, Homo sapiens
  MAP TO CHR16.3; EXPRESSED IN HELA, SIGNAL = 2.2; EXPRESSED IN HEART, SIGNAL =   2; EXPRESSED IN LUNG, SIGNAL =   3; EXPRESSED IN BONE MARROW, SIGNAL = 2.1; EXPRESSED IN ADULT LIVER, SIGNAL = 2.9; EXPRESSED IN PLACENTA, SIGNAL = 2.7; SWISSPROT HIT: P20849, EVALUE 3.00e-01; NT HIT: AF288462.1, EVALUE 1.30e-01; EST_HUMAN HIT: AI742196.1, EVALUE 7.40e-01
gtcctcccagcggaggtcacctcctcagccactacccacgttctgcttcctcctgatgatgcaggacccagccctctgcaaagctccactcccccaggtgtttctggaaggttggcagggggtgtatcactcatgctcatgaatcagt

SEQ ID NO: 21314 - DNA, 138 bp, Homo sapiens
  MAP TO CHR16.3; EXPRESSED IN ADULT LIVER, SIGNAL = 1.3; EXPRESSED IN PLACENTA, SIGNAL = 1.6; EXPRESSED IN HELA, SIGNAL = 1.2; EXPRESSED IN LUNG, SIGNAL = 2.6; SWISSPROT HIT: P02452, EVALUE 1.00e-01; NT HIT: AF399755.1, EVALUE 2.00e-34; EST_HUMAN HIT: AW502580.1, EVALUE 1.00e-60
cggtccccggagatcgatgagctcctgcctcatctgggacacgagggcttccttggctaccagggccctgtgcaggcgctcgttgaactcaatcagctcgccatgcatctctgccacctggaacacaagcacggaaag

SEQ ID NO: 21315 - DNA, 179 bp, Homo sapiens
  MAP TO CHR16.3; EXPRESSED IN FETAL LIVER, SIGNAL = 1.6; EXPRESSED IN BRAIN, SIGNAL = 1.6; EXPRESSED IN ADULT LIVER, SIGNAL = 1.8; EXPRESSED IN PLACENTA, SIGNAL = 1.7; SWISSPROT HIT: Q03164, EVALUE 5.00e-01; NT HIT: AJ303140.1, EVALUE 2.00e-96; EST_HUMAN HIT: BG542261.1, EVALUE 1.00e-40
ggccttgcaaagcagctgcacgccaggcagccctggggagggtgggagcaggcagctcacctggtgtctcctgtgcttctcgggccggactcagacctgcagagcgcaaggccccgagcagagaccaagcccactgaggacctgcggagctgggagaagaagcagcgagccccgctcag

SEQ ID NO: 21316 - DNA, 289 bp, Homo sapiens
  MAP TO CHR19.3; EXPRESSED IN ADULT LIVER, SIGNAL = 4.2; EXPRESSED IN HELA, SIGNAL = 1.5; EXPRESSED IN FETAL LIVER, SIGNAL = 1.4; SWISSPROT HIT: P32942, EVALUE 1.00e-43; NT HIT: gi12545399, EVALUE 0.00e+00; EST_HUMAN HIT: BF882694.1, EVALUE 0.00e+00
ctaaagaccgtcaagttctcccgggcctcccgtctctcgccccctagggtcacgttgcagacgatctcccgggcaccctcctgatccgcgcgcgccgtggctgtggctgtggccgttagcgtgtccccgtggttcatgactgtcgcattcagcatctggtcccccagcgccaggtagacctgggcctctgaggctggaaaaagcccgtctagggtgcagtccaccggccacgacgtttccacctccaagaaccggggggccacgaggcgcgggggggtcacgggcagga

SEQ ID NO: 21317 - DNA, 244 bp, Homo sapiens
  MAP TO CHR19.3; EXPRESSED IN ADULT LIVER, SIGNAL =   1; EXPRESSED IN HELA, SIGNAL = 1.4; EXPRESSED IN LUNG, SIGNAL = 1.2; EXPRESSED IN BONE MARROW, SIGNAL = 0.92; SWISSPROT HIT: P01229, EVALUE 5.00e-45; NT HIT: gi16162814, EVALUE 0.00e+00; EST_HUMAN HIT: AV751658.1, EVALUE 0.00e+00
tttagaggaagaggaggcctgagagttgggggtggtcacaggtcaaggggtggtctttgggacccccacagtcagaggtgctgcggcggcagggtccacagcgacagctgagagccacagggaaggagaccacggggtccacaccacgcgggcagccagggagccggatggactcgaagcgcacatcacggtaggtgcacaccacctgaggcaggggcggcaggaccgcctgcagcacgcgcat

SEQ ID NO: 21318 - DNA, 172 bp, Homo sapiens
  MAP TO CHR14.3; EXPRESSED IN PLACENTA, SIGNAL = 1.5; EXPRESSED IN LUNG, SIGNAL = 1.6; EXPRESSED IN BONE MARROW, SIGNAL = 1.8; EXPRESSED IN ADULT LIVER, SIGNAL = 1.1; SWISSPROT HIT: P10415, EVALUE 3.40e-02
ccaacacagcttcaggagctgaagcagaacccctgggggaagccactgaagcagaagctcgctgaggctggggacggggtacacaggatggaagggatctgccgggacaccgactggccgggtctgctccagggtcctgtggtcccacagccccacggtcccacagatgttc

SEQ ID NO: 21319 - DNA, 111 bp, Homo sapiens
  MAP TO CHR18.3; EXPRESSED IN HELA, SIGNAL = 8.4; EXPRESSED IN PLACENTA, SIGNAL = 4.9; EXPRESSED IN LUNG, SIGNAL = 7.9; EXPRESSED IN ADULT LIVER, SIGNAL = 3.4; EXPRESSED IN BRAIN, SIGNAL = 2.3
atggcggccgtgcactccttgcccacagctggccttttctccactttcggtctccatcgtaacgcggctggctctctcggcgccggcttaggccttgcaagtagggaaatg

SEQ ID NO: 21320 - DNA, 90 bp, Homo sapiens
  MAP TO CHR19.3; EXPRESSED IN ADULT LIVER, SIGNAL = 2.9; EXPRESSED IN HELA, SIGNAL = 1.7; EXPRESSED IN PLACENTA, SIGNAL = 1.7; EXPRESSED IN LUNG, SIGNAL = 2.1; EXPRESSED IN BONE MARROW, SIGNAL =   3; SWISSPROT HIT: P08123, EVALUE 1.20e+00; NT HIT: gi14755767, EVALUE 1.00e-43; EST_HUMAN HIT: AU143397.1, EVALUE 2.00e-43
cctgtgcacaggccttcgggggctctgggggcttctcatcctgctcttccatgctctcctccaggcacagcagggtgctgaggtcctgag

SEQ ID NO: 21321 - DNA, 107 bp, Homo sapiens
  MAP TO CHR18.3; EXPRESSED IN BRAIN, SIGNAL = 1.8; EXPRESSED IN ADULT LIVER, SIGNAL = 1.7; EXPRESSED IN PLACENTA, SIGNAL = 1.5; EXPRESSED IN HELA, SIGNAL = 1.6; EXPRESSED IN LUNG, SIGNAL = 1.9; EXPRESSED IN FETAL LIVER, SIGNAL = 1.2; EXPRESSED IN BONE MARROW, SIGNAL = 1.9; SWISSPROT HIT: P35365, EVALUE 3.50e+00; EST_HUMAN HIT: BG027151.1, EVALUE 5.10e-01
tctgcgattgttggagacagacactggggtgagccagcatcagccaggctgcagcgaatcagacaagcacaagcaccaacaaagccttcatttgctgcttccggacc

SEQ ID NO: 21322 - DNA, 193 bp, Homo sapiens
  MAP TO CHR16.3; EXPRESSED IN LUNG, SIGNAL =   4; EXPRESSED IN BONE MARROW, SIGNAL = 5.6; EXPRESSED IN FETAL LIVER, SIGNAL = 2.4; EXPRESSED IN BRAIN, SIGNAL = 3.3; EXPRESSED IN ADULT LIVER, SIGNAL = 5.6; EXPRESSED IN PLACENTA, SIGNAL = 3.4; EXPRESSED IN HEART, SIGNAL = 2.5; EXPRESSED IN HELA, SIGNAL = 2.6; SWISSPROT HIT: P10667, EVALUE 4.00e-05
tggtgcagggctcaccagaaggcgtcctctgtgcacctccatccccacatccccacagacatggacccccgtccccgcgtccccacagatgtgcacctctgtcctgggatccccagagatgtgcacctccatccccgcgtccccacagacgtggacccccgtccccacatccccacagacgtgcacccccatc

SEQ ID NO: 21323 - DNA, 350 bp, Homo sapiens
  MAP TO CHR18.3; EXPRESSED IN BRAIN, SIGNAL =   1; EXPRESSED IN ADULT LIVER, SIGNAL = 1.2; EXPRESSED IN LUNG, SIGNAL = 1.1; SWISSPROT HIT: Q99460, EVALUE 8.00e-02; NT HIT: AL163300.2, EVALUE 3.30e-01; EST_HUMAN HIT: BF133034.1, EVALUE 4.80e-01
ttagagctccttggcacactgaacaaagcaaggtagtgattcttttgaatttgttctgggcataggcagtaggaatggtgaatccatccttcttggattgctcatataggcaatcaaagcccacatctttaaatgctgagacaactggataactgcagtaggtggaagctgaagaagtatagaatgcgtaagaggaaatgctgtgttttctctattaccaagaggccttgaaccatcttgaagagggatccacatatcagatgatttttccgaaacatttcgatgatgtgttggtgtttctggtggtccattgttttccatattatcccttgatttcgaccaaggtcttt

SEQ ID NO: 21324 - DNA, 493 bp, Homo sapiens
  MAP TO CHR16.3; EXPRESSED IN HEART, SIGNAL = 4.7; EXPRESSED IN BONE MARROW, SIGNAL = 1.8; EXPRESSED IN FETAL LIVER, SIGNAL = 3.5; EXPRESSED IN ADULT LIVER, SIGNAL = 3.4; SWISSPROT HIT: P25129, EVALUE 3.40e+00; NT HIT: gi14779133, EVALUE 0.00e+00; EST_HUMAN HIT: BE466150.1, EVALUE 0.00e+00
acactgctggatgctctgagtatggtgcacagtcagaagatgaagaaggccaaggagcagcggcacctgcacaataaagagcacttcagagccaagcagaaggaggaggaggagaagctgaagtggcagaaggacctcaggaagaagctcttccaaattcaggggcagaaggaaagaagaaaccagaagtccagtttgaagggggctgagggccagtttcagtgagcctttggactggagggactgtccctggatctgcagaggtggacagtttcaaacatcacagtttgaatgcctgtgaatgacaagtcagtgggcaagaactcaagagatgtctctacacaaactgtgcctgcaagaggaacagagaagcctggactacttggaccgggttcattctcatcacttggggctgtcgagatttaaagtgatgtaagctgtggttgtgtggattctcttactttcctctgcctgcctcagtttaattattttg

SEQ ID NO: 21325 - DNA, 155 bp, Homo sapiens
  MAP TO CHR18.3; EXPRESSED IN BRAIN, SIGNAL = 1.2; EXPRESSED IN ADULT LIVER, SIGNAL = 0.93; SWISSPROT HIT: Q46455, EVALUE 1.00e+01; NT HIT: U04444.1, EVALUE 5.30e-01; EST_HUMAN HIT: BF999870.1, EVALUE 7.80e-01
atacttggcaatatcagtggctgcttgcattccacgcccagctcaaggaaatgctgaatgggaaagactgctaccccttgaacaatggtgttcagtcacagatgttgaggtctttgtcaccagtcgtgtatggagttacaaggcaagggaaccag

SEQ ID NO: 21326 - DNA, 155 bp, Homo sapiens
  MAP TO CHR16.3; EXPRESSED IN HELA, SIGNAL = 1.2; EXPRESSED IN LUNG, SIGNAL = 1.3; EXPRESSED IN FETAL LIVER, SIGNAL = 1.3; EXPRESSED IN BRAIN, SIGNAL = 1.2; EXPRESSED IN ADULT LIVER, SIGNAL = 1.4; EST_HUMAN HIT: BI762647.1, EVALUE 7.80e-01; SWISSPROT HIT: P10435, EVALUE 4.40e+00; NT HIT: AL161518.2, EVALUE 1.30e-01
tcttcttctctttttttccaccctggtggtgaacaccctcaaattggtgattgaagaccttgaaggtgctgtttacaaaggctgttaatgcccctgtcctcatttcctgtgttcctgccaacaagcctgacacaaagccctcctcagtagacaca

SEQ ID NO: 21327 - DNA, 181 bp, Homo sapiens
  MAP TO CHR18.3; EXPRESSED IN LUNG, SIGNAL = 1.5; EXPRESSED IN BONE MARROW, SIGNAL = 1.7; EXPRESSED IN BRAIN, SIGNAL =   1; EXPRESSED IN ADULT LIVER, SIGNAL = 1.5; NT HIT: gi5031696, EVALUE 1.00e-97; EST_HUMAN HIT: AW997038.1, EVALUE 1.00e-06; SWISSPROT HIT: O43520, EVALUE 4.00e-20
cttttctgaatggctcccggttctcctctgcttccctgttgactcggttttgttctggttcaacagcagacccctggtcatcaagttcatcttctgtttcatcatcactgtagggaaccacttcgtcattaggctgagaatcctcgtcaaatgtcgtttctgagtctctttctgtactcat

SEQ ID NO: 21328 - DNA, 99 bp, Homo sapiens
  MAP TO CHR19.3; EXPRESSED IN HELA, SIGNAL = 4.2; EXPRESSED IN HEART, SIGNAL =   4; EXPRESSED IN BONE MARROW, SIGNAL = 4.1; EXPRESSED IN FETAL LIVER, SIGNAL = 2.9; EXPRESSED IN BRAIN, SIGNAL = 3.6; EXPRESSED IN ADULT LIVER, SIGNAL =   4; NT HIT: AJ133534.1, EVALUE 6.00e-49; EST_HUMAN HIT: AI432438.1, EVALUE 8.00e-49; SWISSPROT HIT: Q05000, EVALUE 4.70e+00
ccaaagagcacaagcttggactccaaggtgcgcagatagagaatgtaacaggcgccgaaaaagacagccagagccaccagcaacataggggacgtcacc

SEQ ID NO: 21329 - DNA, 83 bp, Homo sapiens
  MAP TO CHR18.3; EXPRESSED IN ADULT LIVER, SIGNAL = 1.2; EXPRESSED IN LUNG, SIGNAL = 1.4; EXPRESSED IN BONE MARROW, SIGNAL = 1.2; EXPRESSED IN BRAIN, SIGNAL = 1.6; NT HIT: D85880.1, EVALUE 2.50e-01; EST_HUMAN HIT: BE858778.1, EVALUE 3.70e-01
gtgttttcctatcgtatgtctgctggcactcatcttcactgtgatttcttatgactggaatgatgctgttgtgatttcacatg

SEQ ID NO: 21330 - DNA, 162 bp, Homo sapiens
  MAP TO CHR18.3; EXPRESSED IN HELA, SIGNAL = 2.4; EXPRESSED IN BONE MARROW, SIGNAL =   2; EXPRESSED IN ADULT LIVER, SIGNAL = 1.9; SWISSPROT HIT: Q61789, EVALUE 3.00e-19; NT HIT: gi15305813, EVALUE 3.00e-86; EST_HUMAN HIT: BE393933.1, EVALUE 8.20e-01
ctgtagttgcagctgtaaatgttcacctggcctgccagaacagacccggagctcttcacattcacatcaaccacaaacagctgagctgcctccgtggaatactcgaccacaaccacgtagtggccaacctgtgggatgcgcagccgcagatgcaattccacc

SEQ ID NO: 21331 - DNA, 87 bp, Homo sapiens
  MAP TO CHR16.3; EXPRESSED IN FETAL LIVER, SIGNAL = 1.7; EXPRESSED IN ADULT LIVER, SIGNAL = 6.8; EXPRESSED IN HELA, SIGNAL = 1.7; EXPRESSED IN PLACENTA, SIGNAL = 1.4; NT HIT: gi14777259, EVALUE 7.00e-42; EST_HUMAN HIT: BI261391.1, EVALUE 8.00e-24
tcgtccatcccccgagacagagactcccgagcagacacaggtgcagacgcaggtgcaggccaggagccaggtgcccatgtcttgcct

SEQ ID NO: 21332 - DNA, 370 bp, Homo sapiens
  MAP TO CHR18.3; EXPRESSED IN ADULT LIVER, SIGNAL = 0.91; EXPRESSED IN PLACENTA, SIGNAL =   1; EXPRESSED IN HELA, SIGNAL = 1.7; EXPRESSED IN BONE MARROW, SIGNAL =   1; EST_HUMAN HIT: AI589624.1, EVALUE 0.00e+00; SWISSPROT HIT: P38482, EVALUE 3.40e-01; NT HIT: gi14762663, EVALUE 0.00e+00
agtttagaagtggttgcatacaagaaatgtcagataaaagaaaactgcttttcggtggtagcaggtatttctgtcccattaaagtaatcacttttgtaaagctagagttgttttcaacaactcgcaaaaataaatcctgttctgtaacagatgtatcctcttccaccaattgtaatgtctgatgttccatttcattcagagaaggcaaatgctttgccatttcacataattctgacaaactgcaggcgtcaagtggtaaagtaatgggcttactacccttgtcctgtttttcaaaaagtggataaagaaaaccacttttgagaccttcctggatcaactgtaaagatccatccaaaatcagctccctgat

SEQ ID NO: 21333 - DNA, 89 bp, Homo sapiens
  MAP TO CHR16.3; EXPRESSED IN HELA, SIGNAL = 2.2; EXPRESSED IN FETAL LIVER, SIGNAL = 1.3; EXPRESSED IN ADULT LIVER, SIGNAL = 1.9; EXPRESSED IN PLACENTA, SIGNAL = 1.7
ttagatgcgtctctgcaagtttcctgagatggtgatggcaggtggcagggcaggacccaggtatcctgcctcctgggcctgggctgtgc

SEQ ID NO: 21334 - DNA, 203 bp, Homo sapiens
  MAP TO CHR16.3; EXPRESSED IN PLACENTA, SIGNAL = 1.1; EXPRESSED IN HELA, SIGNAL = 1.1; EXPRESSED IN LUNG, SIGNAL = 1.4; EXPRESSED IN BONE MARROW, SIGNAL =   1; EXPRESSED IN BRAIN, SIGNAL = 1.3; EXPRESSED IN ADULT LIVER, SIGNAL = 1.4; NT HIT: AL161541.2, EVALUE 4.60e-02; EST_HUMAN HIT: BE971005.1, EVALUE 2.70e-01; SWISSPROT HIT: O30409, EVALUE 9.50e+00
ctcctgtttgagttcaagggaaggtttgcagattggcctgaaggaagacttctcttgaaaaactcaaaccaaagagcacaccgccgtccccaaccctgagccatttctgtccttttcatggaaagggaactgtgttcgccagctcgtaaagccccggcgtctcctcctagaagaaacacccacattgacccagcagtgttcat

SEQ ID NO: 21335 - DNA, 173 bp, Homo sapiens
  MAP TO CHR18.3; EXPRESSED IN FETAL LIVER, SIGNAL = 2.7; EXPRESSED IN LUNG, SIGNAL = 2.5; EXPRESSED IN BONE MARROW, SIGNAL = 2.7; EXPRESSED IN ADULT LIVER, SIGNAL = 4.7; EXPRESSED IN BRAIN, SIGNAL = 3.1; EXPRESSED IN PLACENTA, SIGNAL = 2.7; SWISSPROT HIT: O15255, EVALUE 2.50e+00
cccctgctcccccaaggcccaggatggcccggaggcacttgctctgggtgtgctacttagtgcatggaaccagggctgggtgcaggaagagggaggaaggctgcaggtcaggatgggggactgggagctgggtgagcacctccctgaggatgagcaggcagcaggccagaggg

SEQ ID NO: 21336 - DNA, 124 bp, Homo sapiens
  MAP TO CHR18.3; EXPRESSED IN BRAIN, SIGNAL = 1.1; EXPRESSED IN ADULT LIVER, SIGNAL =   1; EXPRESSED IN HELA, SIGNAL = 1.5; EXPRESSED IN PLACENTA, SIGNAL = 0.88; EXPRESSED IN LUNG, SIGNAL = 1.4; EXPRESSED IN BONE MARROW, SIGNAL = 0.81; SWISSPROT HIT: Q64689, EVALUE 3.00e-16; NT HIT: gi13647511, EVALUE 9.00e-64; EST_HUMAN HIT: AI681762.1, EVALUE 3.00e-61
ggtcacaatttgcgctgaagtttctagacccgtcattcgtgcccattacgaattctctcacccaggaactccaagagaaaccttctaagtggacatttaatcggacagcgtttttacatcaaag

SEQ ID NO: 21337 - DNA, 295 bp, Homo sapiens
  MAP TO CHR16.3; EXPRESSED IN HEART, SIGNAL = 1.7; EXPRESSED IN FETAL LIVER, SIGNAL = 1.9; EXPRESSED IN LUNG, SIGNAL = 6.5; EXPRESSED IN ADULT LIVER, SIGNAL = 1.9; EXPRESSED IN BRAIN, SIGNAL = 4.4; EXPRESSED IN HELA, SIGNAL = 9.1; SWISSPROT HIT: Q9WUI9, EVALUE 2.00e+00; NT HIT: gi8393008, EVALUE 1.00e-112; EST_HUMAN HIT: BF309636.1, EVALUE 1.00e-112
catgtctgtctcactgtcctcagctgggccagagggcactctcgacgcagcttgcctaggtaaacttccgggtcgaagtgcaccccgttcagatcagtcgtgtccaggggttcgggccccgcggggcgtcccgccgcctccccttccgagaagccatagtaaagcatcccgtgtgccttccgccgacgctccggagcctccccctcgggcccttctggggagtccccaggtccagaccccgggctatgtccagcagcagctgccgccgccatagctccaactgcagcccacgggt

SEQ ID NO: 21338 - DNA, 289 bp, Homo sapiens
  MAP TO CHR19.3; EXPRESSED IN ADULT LIVER, SIGNAL =  43; EXPRESSED IN HEART, SIGNAL =  44; EXPRESSED IN BONE MARROW, SIGNAL = 4.3; EXPRESSED IN FETAL LIVER, SIGNAL =  21; SWISSPROT HIT: Q13011, EVALUE 8.00e-12; NT HIT: gi16163662, EVALUE 0.00e+00; EST_HUMAN HIT: AI355172.1, EVALUE 0.00e+00
ctttgctttattgtttgtggggtgaagataaggccttgggcttgagaaactcattgtcataaagttataaactgggaaactgggtcagaaggcatagaaacaactgtcatcgcccatcctccctttctgtggatgaggcgggacaaggccggccccctggctggggcctgggacgcgagggctctcagagcttggagaaggtgacggttttcagttccttgttctcagtcgtggcctggaccgacttcacgaggtcttgggtctgcagcatgctcatgttccaggacgc

SEQ ID NO: 21339 - DNA, 152 bp, Homo sapiens
  MAP TO CHR19.3; EXPRESSED IN ADULT LIVER, SIGNAL = 9.6; EXPRESSED IN HELA, SIGNAL = 6.6; EXPRESSED IN PLACENTA, SIGNAL = 9.3; EXPRESSED IN HEART, SIGNAL =  12; EXPRESSED IN LUNG, SIGNAL = 6.3; EXPRESSED IN FETAL LIVER, SIGNAL =  17; EXPRESSED IN BONE MARROW, SIGNAL = 7.2; EXPRESSED IN BRAIN, SIGNAL =  14; EST_HUMAN HIT: AA357418.1, EVALUE 2.00e-78; NT HIT: gi14149901, EVALUE 2.00e-80
gcccggccgtgctggcactccatgatgtgctgaagcagcagctgagcctgacgcagcagttcatccaggccagccggcacctgcacgcctccctcctgcgctccctggacgcggactccttccactaccacaccctggaggaagccaaagag

SEQ ID NO: 21340 - DNA, 87 bp, Homo sapiens
  MAP TO CHR16.3; EXPRESSED IN HELA, SIGNAL = 1.2; EXPRESSED IN FETAL LIVER, SIGNAL = 1.3; EXPRESSED IN LUNG, SIGNAL = 1.7; EXPRESSED IN ADULT LIVER, SIGNAL = 2.5; EST_HUMAN HIT: AW294938.1, EVALUE 4.00e-41; SWISSPROT HIT: P11597, EVALUE 4.00e-09
atctcgagtgataatctcagggttgatgatgtcgaagaggctcacgcctttgctgttcatgagggctgtaaacactacctcgagccc

SEQ ID NO: 21341 - DNA, 84 bp, Homo sapiens
  MAP TO CHR18.3; EXPRESSED IN FETAL LIVER, SIGNAL =  13; EXPRESSED IN ADULT LIVER, SIGNAL = 7.7; EXPRESSED IN PLACENTA, SIGNAL = 7.8; EXPRESSED IN HELA, SIGNAL =   7; EXPRESSED IN HEART, SIGNAL = 7.5; EXPRESSED IN LUNG, SIGNAL = 6.4; EXPRESSED IN BONE MARROW, SIGNAL =  10; NT HIT: X07221.1, EVALUE 1.70e-02
tcttctggcaaattctgcctgtcctctcttccatcacttaatgaatgtacattttccacaagggtccgtagtaggatctccatt

SEQ ID NO: 21342 - DNA, 239 bp, Homo sapiens
  MAP TO CHR14.3; EXPRESSED IN PLACENTA, SIGNAL =   1; EXPRESSED IN LUNG, SIGNAL = 1.3; EXPRESSED IN BONE MARROW, SIGNAL =   2; EXPRESSED IN ADULT LIVER, SIGNAL = 1.2; EST_HUMAN HIT: BG940337.1, EVALUE 0.00e+00; SWISSPROT HIT: Q92610, EVALUE 1.00e+00; NT HIT: gi14277125, EVALUE 0.00e+00
gattccatatggctctcatatcattccattccatctctgccaagatttggataccgcaaaaatttgtgtttgtggaagattctgtctgaactctttcattcaaggaactactaccatgaatctgcattctgttgcccacactgtggtcttagtagataatttgggtggtactgaagcacctattatctcttatttctgttctctaggctgttatgttaattcctctgatatgttaaagt

SEQ ID NO: 21343 - DNA, 280 bp, Homo sapiens
  MAP TO CHR19.3; EXPRESSED IN HELA, SIGNAL = 2.7; EXPRESSED IN LUNG, SIGNAL = 3.2; EXPRESSED IN BRAIN, SIGNAL =   2; EXPRESSED IN ADULT LIVER, SIGNAL = 2.2; EXPRESSED IN PLACENTA, SIGNAL = 4.7; EST_HUMAN HIT: BI518434.1, EVALUE 1.00e-118; SWISSPROT HIT: P20138, EVALUE 2.00e-32; NT HIT: AF135027.1, EVALUE 0.00e+00
caggacacgttgagatggacggtcttgttcgtggtcacgctggccccagggaaggtcacctgacaggtgaggctggtgccatggtcctggggctgtgggatgagggtgagcaccgaggagcgggtggtggaggggtccaggggggacacggaggtccctatccaggagatcatagggggtgtcccctgctcacaggcccagggcacagagcaggtcagattctgggggcagccggactccagggtgcctgggatgaggatgttgggcctgtgggtcaagg

SEQ ID NO: 21344 - DNA, 163 bp, Homo sapiens
  MAP TO CHR14.3; EXPRESSED IN BONE MARROW, SIGNAL = 0.8; EXPRESSED IN FETAL LIVER, SIGNAL = 1.6; EXPRESSED IN ADULT LIVER, SIGNAL = 0.98; EXPRESSED IN HEART, SIGNAL = 2.5; EXPRESSED IN LUNG, SIGNAL = 2.7; NT HIT: gi15300984, EVALUE 7.00e-87; EST_HUMAN HIT: BI869352.1, EVALUE 1.00e-86; SWISSPROT HIT: Q9JHU4, EVALUE 7.00e-26
gtccataggaagtacacaggggaagactttgatgaagatctacggacagtgttgagacgttctggctgtaaaaatgaaaagatagcatttataatggatgaatctaatgtgttagattctggattcctggagcgaatgaatacccttctggccaatggagagg

SEQ ID NO: 21345 - DNA, 141 bp, Homo sapiens
  MAP TO CHR18.3; EXPRESSED IN ADULT LIVER, SIGNAL = 1.3; EXPRESSED IN HELA, SIGNAL = 0.9; EXPRESSED IN BONE MARROW, SIGNAL = 1.1; NT HIT: AF104663.1, EVALUE 8.00e-03; EST_HUMAN HIT: AA339369.1, EVALUE 1.80e-01
tgagggtggagatgacagagaaagtcagtgtgaaatatgaggacacagtaatgactacttcgaaaaatggctgttctagaattacggtctcttggttctactatggctgcaaaatcttattaatttatattattgttaagt

SEQ ID NO: 21346 - DNA, 430 bp, Homo sapiens
  MAP TO CHR16.3; EXPRESSED IN HELA, SIGNAL = 1.7; EXPRESSED IN HEART, SIGNAL = 1.9; EXPRESSED IN BONE MARROW, SIGNAL = 1.2; EXPRESSED IN ADULT LIVER, SIGNAL = 1.1; SWISSPROT HIT: Q9Y5P8, EVALUE 1.00e-20; NT HIT: gi7019500, EVALUE 1.00e-59; EST_HUMAN HIT: AI675608.1, EVALUE 1.00e-120
atgagcccgcccggttcctctctgtgcacctcatgcctggggctccgtcccgtcctgggtgggttttcacctgcaccgctggcccctcccccgggagcgttggtggagccggctttctcagccaggagcctgttgcggggtcagcggctggagctcaaggtctgctcaggggactttctcgtgctggaggttggctgcggagcagcctgcatttctcggaaaacagggcccagggcctgctccacgccgctgtccacgtcttcaccatcccctcgttgcaggttcgaggccgagctcagacctgtggagcagaagctgagtgcgctgcagtccccgctggcccagaggcccttcttcgaggtgccctcacccctgggcgccgtggacctgtacgagtatgcatgcggggatgaggacctggagccactgt

SEQ ID NO: 21347 - DNA, 390 bp, Homo sapiens
  MAP TO CHR18.3; EXPRESSED IN LUNG, SIGNAL =  31; EXPRESSED IN FETAL LIVER, SIGNAL =  12; EXPRESSED IN ADULT LIVER, SIGNAL = 9.8; EST_HUMAN HIT: BG025243.1, EVALUE 0.00e+00; SWISSPROT HIT: P18669, EVALUE 3.00e-66; NT HIT: gi14744534, EVALUE 0.00e+00
tcacttcttggccttgccctgggcagccacagcttccatggctttgcgtaccatctcttcatcccccagaaactgcatgggcttgataggcttcaagttcttgtcccattcatagacaatgggaataccagtcggcaggttcagctccatgatagcctcttcagagagaccctccagatgcttggcaatgccccggaggctgttgccatgggctgcaatcagtacacgtttcccctccttgatctggggaactatttcttcattccagaaggtcagagctctggcaatagtgtccttcagactctcacaggagggtagcagatcttctgtgaggtctgcatacctgcgatccttactgatgttgctatagaaaggatggttgggctccat

SEQ ID NO: 21348 - DNA, 89 bp, Homo sapiens
  MAP TO CHR18.3; EXPRESSED IN ADULT LIVER, SIGNAL = 1.1; EXPRESSED IN PLACENTA, SIGNAL =   1; EST_HUMAN HIT: T72730.1, EVALUE 2.00e-36; SWISSPROT HIT: Q13133, EVALUE 4.70e+00
aacttggatatcgaagagaagaaagcagatgcccccattctgctacctcttcacaaggcctgggggcttccgccacagatttacactga

SEQ ID NO: 21349 - DNA, 376 bp, Homo sapiens
  MAP TO CHR14.3; EXPRESSED IN HEART, SIGNAL =   4; EXPRESSED IN LUNG, SIGNAL = 5.4; EXPRESSED IN BONE MARROW, SIGNAL = 8.5; EXPRESSED IN FETAL LIVER, SIGNAL = 3.2; EXPRESSED IN ADULT LIVER, SIGNAL = 4.4; EXPRESSED IN PLACENTA, SIGNAL =   5; EXPRESSED IN HELA, SIGNAL = 4.2; EST_HUMAN HIT: AW959157.1, EVALUE 0.00e+00; SWISSPROT HIT: Q04500, EVALUE 1.00e+00; NT HIT: gi11434029, EVALUE 0.00e+00
cctgattccctcggggtccaggacttggtgttccagttgaggtagggctgggcatctggtttctgaaagttgaggtctctggagtctggggaggttgggccatcgaatctgaagatgtgcctgctgtccaggcttgtggaacctgctcctcttgtgccctgctcctcttggtaaggctcgggcattttttaggaacagagctgggaggctcctctagattcagtttgtttagccactcagaaaccatgacatcattacgagagtgctggttttctatggttctcctaaagccatccatttctgtccctccttggcctgactctgggatagaaaatctcctattgctgctcctgagctgagacaggaaatcctttac

SEQ ID NO: 21350 - DNA, 358 bp, Homo sapiens
  MAP TO CHR18.3; EXPRESSED IN ADULT LIVER, SIGNAL =  12; EXPRESSED IN HELA, SIGNAL = 1.1e+02; EXPRESSED IN HEART, SIGNAL =  52; EXPRESSED IN BONE MARROW, SIGNAL = 7.8; EXPRESSED IN FETAL LIVER, SIGNAL =  40; NT HIT: AF261085.1, EVALUE 1.00e-71; EST_HUMAN HIT: AL517473.1, EVALUE 2.00e-71; SWISSPROT HIT: P04406, EVALUE 4.00e-22
gtcaggtccatgaccaacacgttggtggtggagacaaggaaggccatgccagtaagctttctattcagctccaggatgactttgcctacagccttggtagcaccagtagatgcagggatgatgttctggagagccccgtggctgtcatgccagtttcttggaggggccatccacagttttctgggtggcagtaatggcgtggaccatggccatgagtccttccacgattccaaagttgtcatggatgaccttggctggtggggggcaaagcccttggtggcacaggaggcgttgccgatgatcttgaggctgttttcatacttctcatcgttcatgcccatcagcagagggggcagag

SEQ ID NO: 21351 - DNA, 202 bp, Homo sapiens
  MAP TO CHR16.3; EXPRESSED IN HELA, SIGNAL =  13; EXPRESSED IN LUNG, SIGNAL = 7.4; EXPRESSED IN FETAL LIVER, SIGNAL = 3.5; EXPRESSED IN ADULT LIVER, SIGNAL = 5.5; NT HIT: gi16166201, EVALUE 3.00e-52; EST_HUMAN HIT: BF979738.1, EVALUE 8.00e-88; SWISSPROT HIT: P50638, EVALUE 9.70e-02
cagcaggttggtgctgcgattatctccctccgccatcgtctcggggatgcagtctctacaagcgcaggccacctccccaacgagtcctccaaccgaaacccgcacaccaaccacaacccgagggaacgccccgcaggctgcttatatgggtcggccgcccttcccgacggcccccgcgacgctcgctcctcattggacagac

SEQ ID NO: 21352 - DNA, 76 bp, Homo sapiens
  MAP TO CHR16.3; EXPRESSED IN LUNG, SIGNAL = 1.2; EXPRESSED IN ADULT LIVER, SIGNAL = 1.2; EXPRESSED IN HELA, SIGNAL = 1.2; SWISSPROT HIT: P25578, EVALUE 2.80e+00
atgaggttctttgatgattgttgcagataccctgaagaactggcccttgttgtagaagaatggcacagggcacatg

SEQ ID NO: 21353 - DNA, 114 bp, Homo sapiens
  MAP TO CHR16.3; EXPRESSED IN FETAL LIVER, SIGNAL = 0.84; EXPRESSED IN ADULT LIVER, SIGNAL = 1.2; EXPRESSED IN PLACENTA, SIGNAL = 1.3; NT HIT: gi11419053, EVALUE 1.50e+00; EST_HUMAN HIT: AA459204.1, EVALUE 3.50e-02
cagcctccgagtcacatttggatataaagctaatgtagggggtgggggcagaggtttcagcatcccgccttcgaagagtgcagcttgctgggaactgctgtggagcatggattc

SEQ ID NO: 21354 - DNA, 419 bp, Homo sapiens
  MAP TO CHR16.3; EXPRESSED IN PLACENTA, SIGNAL = 3.4; EXPRESSED IN BONE MARROW, SIGNAL =   3; EXPRESSED IN BRAIN, SIGNAL =   4; EXPRESSED IN ADULT LIVER, SIGNAL = 2.7; SWISSPROT HIT: P20129, EVALUE 2.10e-02; NT HIT: U32177.1, EVALUE 6.20e+00
ctgctccaggcctaggccccatcctcacctctcagagcacacacctgcctgtgttctggcttgtggttcaggagcggacagccatgtgtcacctggctgtgggtctccaggagccattgcaggggaccggccacacggccatattccagaggccctgagcccggaggcactgactgcatggaatcatggatctctgggcttgtggggcctcggggaccttgtgcagaaagcacttcttctggggggttgggcgggcaggaacacatggcttccttacgtgagccacagttcgggtccaactgggaggggctcccagaagaggcttggggacaagaacaggagggaccctggaccctctgcactgtgagctccctcagcaggtctgtggcccgtggagacggcccaggtttccccattcg

SEQ ID NO: 21355 - DNA, 181 bp, Homo sapiens
  MAP TO CHR16.3; EXPRESSED IN FETAL LIVER, SIGNAL = 1.9; EXPRESSED IN BONE MARROW, SIGNAL = 2.4; EXPRESSED IN BRAIN, SIGNAL = 1.4; EXPRESSED IN ADULT LIVER, SIGNAL = 1.2; EXPRESSED IN HELA, SIGNAL =   2; EXPRESSED IN PLACENTA, SIGNAL = 1.6; EXPRESSED IN LUNG, SIGNAL = 1.9; EST_HUMAN HIT: AI302534.1, EVALUE 7.00e-88; SWISSPROT HIT: O15063, EVALUE 2.20e-01; NT HIT: gi14778649, EVALUE 1.00e-97
ggaatttaaaagttttgccttaaagcatccagaatatgctaagatatttacaacatacctagacctccagacgtgccatgtgttttcattaccaaaagaagtccacacaaccccctccaccgccagtaataaagtcagccctgaaaagcatgaagagagtaccctcagaccaaaaagatga

SEQ ID NO: 21356 - DNA, 94 bp, Homo sapiens
  MAP TO CHR18.3; EXPRESSED IN PLACENTA, SIGNAL = 1.2; EXPRESSED IN ADULT LIVER, SIGNAL = 1.1; EXPRESSED IN BRAIN, SIGNAL = 1.5; EST_HUMAN HIT: BF360835.1, EVALUE 4.30e-01; NT HIT: X52691.1, EVALUE 1.20e+00
ctggcacaacatctggaacataatgggggggccctgtgttgttgactgtgtgaatctttgatgaatacctgaatgagtaactgtgcacagtgcc

SEQ ID NO: 21357 - DNA, 115 bp, Homo sapiens
  MAP TO CHR18.3; EXPRESSED IN ADULT LIVER, SIGNAL = 3.6; EXPRESSED IN PLACENTA, SIGNAL = 3.2; EXPRESSED IN BONE MARROW, SIGNAL = 3.9; EXPRESSED IN LUNG, SIGNAL = 3.2; EXPRESSED IN FETAL LIVER, SIGNAL =   4; EST_HUMAN HIT: BG113675.1, EVALUE 5.50e-01; SWISSPROT HIT: P25632, EVALUE 7.90e+00
ctttcctccaggacttgtttctccaaatcccacttggctgtttgggctttcctctgtctttcgtgggtgaagactttgtggtcctggagacatgggccctgatttgagattttac

SEQ ID NO: 21358 - DNA, 174 bp, Homo sapiens
  MAP TO CHR18.3; EXPRESSED IN PLACENTA, SIGNAL = 1.1; EXPRESSED IN HELA, SIGNAL = 1.1; EXPRESSED IN BONE MARROW, SIGNAL = 1.3; EXPRESSED IN ADULT LIVER, SIGNAL = 1.3; EST_HUMAN HIT: BG537924.1, EVALUE 2.30e-01; SWISSPROT HIT: P17109, EVALUE 2.50e+00; NT HIT: L23313.1, EVALUE 9.50e+00
ctcatattcatcagttcaggagacctcaatcagaggctgagctgctgcaatgtgcttccacaaacatacacacactgcatccagctgcctgatgggggggacctgctaattggagaagtctgctctggtcccctgtcaccagttggcagacagaacagtctgggccgaagctga

SEQ ID NO: 21359 - DNA, 135 bp, Homo sapiens
  MAP TO CHR18.3; EXPRESSED IN FETAL LIVER, SIGNAL = 1.9; EXPRESSED IN BONE MARROW, SIGNAL = 1.1; EXPRESSED IN ADULT LIVER, SIGNAL = 1.3; EXPRESSED IN PLACENTA, SIGNAL = 1.1; EXPRESSED IN LUNG, SIGNAL = 1.1; EST_HUMAN HIT: BE909430.1, EVALUE 2.60e+00; NT HIT: AF048727.1, EVALUE 7.10e+00
gtttgtgagtgaggcctggcggtaggtgagcatggcgtggagctcgcgggagagttggagatgtgatcgcttctgtccgtgtgtcagcgtgatggcctgtccacgccgctttcttctgactgtgagctggcccat

SEQ ID NO: 21360 - DNA, 79 bp, Homo sapiens
  MAP TO CHR18.3; EXPRESSED IN HEART, SIGNAL = 2.1; EXPRESSED IN LUNG, SIGNAL = 2.4; EXPRESSED IN FETAL LIVER, SIGNAL = 2.3; EXPRESSED IN BONE MARROW, SIGNAL =   2; EXPRESSED IN BRAIN, SIGNAL = 2.9; EXPRESSED IN ADULT LIVER, SIGNAL = 2.7; EXPRESSED IN HELA, SIGNAL = 2.1; EXPRESSED IN PLACENTA, SIGNAL = 2.3; NT HIT: AL110652.1, EVALUE 6.00e-02; EST_HUMAN HIT: BG329883.1, EVALUE 8.80e-02
aagaacctgaaaaattcttcctttaataataaacagagtaagaaaaagtgtgcaaaagcaagtgcctgtgctaagaagg

SEQ ID NO: 21361 - DNA, 166 bp, Homo sapiens
  MAP TO CHR18.3; EXPRESSED IN BONE MARROW, SIGNAL =   1; EXPRESSED IN ADULT LIVER, SIGNAL =   1; NT HIT: gi11067372, EVALUE 1.00e-48; EST_HUMAN HIT: AU136662.1, EVALUE 2.00e-88; SWISSPROT HIT: P49606, EVALUE 3.90e-01
ttgcatcccagcgcattagctcagtggacctctcgtgttgtagcctggaacatctgcctgccaacctcttctacagccaagacctcactcatctcaatttaaaacaaaacttcctaaggcagaaccctagccttccagctgccagggggcttaatgaactgcaaag

SEQ ID NO: 21362 - DNA, 411 bp, Homo sapiens
  MAP TO CHR16.3; EXPRESSED IN HELA, SIGNAL = 4.8; EXPRESSED IN PLACENTA, SIGNAL = 4.3; EXPRESSED IN HEART, SIGNAL = 4.4; EXPRESSED IN LUNG, SIGNAL = 6.9; EXPRESSED IN BONE MARROW, SIGNAL = 7.6; EXPRESSED IN BRAIN, SIGNAL = 5.2; EXPRESSED IN ADULT LIVER, SIGNAL = 5.2; NT HIT: gi14776130, EVALUE 0.00e+00; EST_HUMAN HIT: BG679364.1, EVALUE 0.00e+00; SWISSPROT HIT: P27571, EVALUE 2.00e+00
cctttgcacttggtccagtcaggccgcggcgtggaagtgcgctggatctcctgcagctcagagaagaattggtcccgttccttcagcgtgctcatgtgcagctgcatgaggatctcatgctccttgcgaacctcctcgtagctggctctcagggtgtccagctgtgggcaaggacattggccctggccccccacctgtgagaccccgtcctaccctcctggccctgcctgcctgccagcacctgctcctgaagatccttgttggtcttctcctgcatttcaaagtccctcctggggaccacatctccaaagttggccttcatgttgttgagttccatctgcgtgcgggtcaggtcttgccgggtcatcttaagagccagggttaacttcacagggtcctccccccagatgc

SEQ ID NO: 21363 - DNA, 185 bp, Homo sapiens
  MAP TO CHR18.3; EXPRESSED IN LUNG, SIGNAL =   1; EXPRESSED IN BONE MARROW, SIGNAL = 0.91; EXPRESSED IN BRAIN, SIGNAL =   1; EXPRESSED IN ADULT LIVER, SIGNAL = 1.3; EXPRESSED IN HELA, SIGNAL =   1; NT HIT: gi14742707, EVALUE 2.60e+00; EST_HUMAN HIT: AA826700.1, EVALUE 3.80e+00; SWISSPROT HIT: P47843, EVALUE 2.50e+00
aagcatttcccaaaacactgagcagagaattccagaaggactctgagaaaacacatggcctctgcagtcagcagcagatccaaggcctcttctgtggagtctgttccctcttcccacccacacatctctggatacttctgccagccatagattttccttctgtgtttacctcgtttgaggctcag

SEQ ID NO: 21364 - DNA, 90 bp, Homo sapiens
  MAP TO CHR16.3; EXPRESSED IN ADULT LIVER, SIGNAL = 1.1; EXPRESSED IN HELA, SIGNAL = 1.1; EXPRESSED IN PLACENTA, SIGNAL =   1; EST_HUMAN HIT: BI756608.1, EVALUE 7.00e-43; SWISSPROT HIT: O00142, EVALUE 2.00e-11; NT HIT: gi16164677, EVALUE 5.00e-43
cctatcaaatcaacagacacgtccatgttcctcaagatccagtcaaaccattccgacagaactacatagtccacttctggcatcttccca

SEQ ID NO: 21365 - DNA, 157 bp, Homo sapiens
  MAP TO CHR16.3; EXPRESSED IN BONE MARROW, SIGNAL = 1.6; EXPRESSED IN BRAIN, SIGNAL = 1.4; EXPRESSED IN ADULT LIVER, SIGNAL = 1.4; EXPRESSED IN PLACENTA, SIGNAL = 1.2; EXPRESSED IN HELA, SIGNAL = 1.5; EST_HUMAN HIT: BF923097.1, EVALUE 5.00e-76; SWISSPROT HIT: P17394, EVALUE 5.10e-01; NT HIT: AF050075.1, EVALUE 2.00e-71
cttggtgaacttgtgaaccgttgctctaacacccaccgccaactgcagggccagcgtggtgccactcaccttggtgaatcgctgctctaacacttcatgctcccactgcaggtctttcagctctttctccctgactttcaaacgggcttttgtgcac

SEQ ID NO: 21366 - DNA, 144 bp, Homo sapiens
  MAP TO CHR18.3; EXPRESSED IN ADULT LIVER, SIGNAL =   2; EXPRESSED IN HELA, SIGNAL = 2.4; EXPRESSED IN PLACENTA, SIGNAL = 2.4; EXPRESSED IN LUNG, SIGNAL = 3.7; EXPRESSED IN FETAL LIVER, SIGNAL = 2.2; EXPRESSED IN BONE MARROW, SIGNAL = 1.9; EXPRESSED IN BRAIN, SIGNAL = 2.2; SWISSPROT HIT: P51690, EVALUE 2.60e+00; NT HIT: AE003871.1, EVALUE 1.90e+00
cacagagttgatatagagattagaagtgagtgtgcgtggtacagggtagatgcctaagaagtaggagttctgagagggtgacgttatgcaacttctcatggtgcatcttgtggttttgacgccttcctcttcaccacgagtcat

SEQ ID NO: 21367 - DNA, 156 bp, Homo sapiens
  MAP TO CHR18.3; EXPRESSED IN PLACENTA, SIGNAL = 1.6; EXPRESSED IN HELA, SIGNAL = 1.8; EXPRESSED IN BONE MARROW, SIGNAL = 2.7; EXPRESSED IN FETAL LIVER, SIGNAL = 2.3; EXPRESSED IN LUNG, SIGNAL = 1.7; EXPRESSED IN ADULT LIVER, SIGNAL = 1.7; EST_HUMAN HIT: BF126095.1, EVALUE 4.00e-15; SWISSPROT HIT: P12894, EVALUE 1.00e+01; NT HIT: gi14734843, EVALUE 4.00e-08
cttttgggcagcaggtccaggagctgttgggtgggggtgaactctctctaggtgcacaggaaggaacatgaggaggtaaaagaggtggcagctctggaaggtgggcaccacgggctcctcctgctgccccaccacgcctgcactgatggagtccac

SEQ ID NO: 21368 - DNA, 177 bp, Homo sapiens
  MAP TO CHR18.3; EXPRESSED IN FETAL LIVER, SIGNAL = 2.2; EXPRESSED IN BONE MARROW, SIGNAL =   3; EXPRESSED IN BRAIN, SIGNAL = 1.4; EXPRESSED IN ADULT LIVER, SIGNAL = 2.1; NT HIT: D00596.1, EVALUE 3.00e-95; EST_HUMAN HIT: BG679404.1, EVALUE 5.00e-95; SWISSPROT HIT: P04818, EVALUE 3.00e-29
ccttcaggcccgtgatgtgcgcaatcatgtacgtgagcagggcgtagctggcgatgttgaaaggcacaccgaggcccatgtctcccgatctctggtacagctggcaggacagctcactgttcaccacatagaactggcagagggcatggcatggaggcagcgccatcagaggaagat

SEQ ID NO: 21369 - DNA, 189 bp, Homo sapiens
  MAP TO CHR18.3; EXPRESSED IN ADULT LIVER, SIGNAL = 1.1; EXPRESSED IN PLACENTA, SIGNAL = 1.1; EXPRESSED IN BONE MARROW, SIGNAL = 1.1; NT HIT: gi9628002, EVALUE 1.70e-01; EST_HUMAN HIT: AA315965.1, EVALUE 1.00e-102; SWISSPROT HIT: Q01992, EVALUE 2.50e+00
cttaaccaatctgcttaacaggttcagaacctcttccttcatcggaacggacgggaaattgaaccattccagcaaatgaagaaaaagttgcctctcctgaatgagatcagcgtagcagattaagttgtgctcaatcttgcagagaatactcttgagagcgcgctccctgatctcggccagctgatgacc

SEQ ID NO: 21370 - DNA, 272 bp, Homo sapiens
  MAP TO CHR14.3; EXPRESSED IN FETAL LIVER, SIGNAL =  14; EXPRESSED IN ADULT LIVER, SIGNAL =  18; NT HIT: gi11437411, EVALUE 0.00e+00; EST_HUMAN HIT: AV691121.1, EVALUE 0.00e+00; SWISSPROT HIT: P08185, EVALUE 3.00e-47
cctgctggtcaggcctgcggaccacctgttaatcgtgtcccggctcagtgcagcgatgactgtgttcatcttccccttgtccggaaggatgaagaagacagtcccattgcccacgtagttcatctgcaccagctggcaggggagctccgagtcatgaaggtaactgatggtgctcgactgcaacatcatgggcaccttcaccacagttgtctcgtccacatagaagttctcctccctggtgcttgccaggtcaaagggctgtgtccatgtgc

SEQ ID NO: 21371 - DNA, 257 bp, Homo sapiens
  MAP TO CHR19.3; EXPRESSED IN BONE MARROW, SIGNAL = 1.2; EXPRESSED IN ADULT LIVER, SIGNAL = 1.2; EXPRESSED IN PLACENTA, SIGNAL = 1.5; EXPRESSED IN HELA, SIGNAL = 1.7; SWISSPROT HIT: Q08493, EVALUE 4.00e-35; NT HIT: AF157811.1, EVALUE 0.00e+00; EST_HUMAN HIT: AW006350.1, EVALUE 5.00e-99
ccgcctgcaggaggaaacgggccaggagagccgcgacttcctgagctccggccgcgggctcaggtccctctcgcggcagcccgcggacttgtccggatccgaatagaagcgctgttggatgcggatggggcgccggggttgccgccacaggtgcttcggggctctggtcatgctgtggcggccgcgagagcgactcaacctgctgcaagcctctgccccttcgccgacccccaggttctccatgcgccagagaaagg

SEQ ID NO: 21372 - DNA, 101 bp, Homo sapiens
  MAP TO CHR14.3; EXPRESSED IN ADULT LIVER, SIGNAL =   1; EXPRESSED IN PLACENTA, SIGNAL = 0.94; EXPRESSED IN HELA, SIGNAL = 1.1; EXPRESSED IN BONE MARROW, SIGNAL = 1.1; EXPRESSED IN BRAIN, SIGNAL =   1; EST_HUMAN HIT: BF207043.1, EVALUE 1.20e-01; NT HIT: AE006273.1, EVALUE 1.30e+00
cagcctatatggggcagaaacttttccataaaattcagagtataggactggtgagttttctcttcgttcttgttaaccatatatcgagttgttatttgtag

SEQ ID NO: 21373 - DNA, 226 bp, Homo sapiens
  MAP TO CHR16.3; EXPRESSED IN ADULT LIVER, SIGNAL = 2.3; EXPRESSED IN HELA, SIGNAL = 2.5; EXPRESSED IN PLACENTA, SIGNAL = 2.2; EXPRESSED IN FETAL LIVER, SIGNAL = 1.3; EXPRESSED IN BONE MARROW, SIGNAL = 4.1; EST_HUMAN HIT: BG829912.1, EVALUE 1.00e-111; SWISSPROT HIT: P16301, EVALUE 1.00e-19; NT HIT: gi14776064, EVALUE 1.00e-112
cctgaagccaggacgcgcagggtcttggccacgcccccccagggcgcacccagtgacacgaaggcccggatatacttgtccttccaggcctgcggctgccgctgcagaaagtagagcgtgtacatgttgcccatactgtgggcaaccagcaccacggggcccccatacagctggtacatctcctcgatcatctcgcggagggccaggaagtagggcccgttttcat

SEQ ID NO: 21374 - DNA, 100 bp, Homo sapiens
  MAP TO CHR16.3; EXPRESSED IN BONE MARROW, SIGNAL = 1.4; EXPRESSED IN BRAIN, SIGNAL = 2.9; EXPRESSED IN ADULT LIVER, SIGNAL = 2.2; EXPRESSED IN PLACENTA, SIGNAL = 2.1; EXPRESSED IN HELA, SIGNAL = 1.9; EXPRESSED IN HEART, SIGNAL = 2.2; EST_HUMAN HIT: AL529008.1, EVALUE 4.70e-01; NT HIT: gi15835535, EVALUE 4.90e+00
aattgatgtgttcccagaaaatatctttgggtaaatccattctctcatcaacttccactaagaaattgaagaggaattcccaaatggagatggagaaacc

SEQ ID NO: 21375 - DNA, 275 bp, Homo sapiens
  MAP TO CHR18.3; EXPRESSED IN ADULT LIVER, SIGNAL = 1.2; EXPRESSED IN HELA, SIGNAL = 1.2; EXPRESSED IN PLACENTA, SIGNAL = 1.4; EXPRESSED IN BONE MARROW, SIGNAL = 1.2; NT HIT: gi14786537, EVALUE 1.00e+00; SWISSPROT HIT: Q10509, EVALUE 1.00e+00
gttttagcaggtccacgtggctccggagccagtggtttcgagagtggttctcccatcatcagatggcagttaggatactgtgtcctagtgaaacagttgtggtggggactttctggtctgcagactgtgagtgtggagatgtggccccgaagaaaggattggggcagcagctccccagtggaagccggggtacccttgccaagttccactctactggtcaaggagccgagctgtgtctgcttctccagccttccaacaattctgtgaacatctaa

SEQ ID NO: 21376 - DNA, 149 bp, Homo sapiens
  MAP TO CHR18.3; EXPRESSED IN HELA, SIGNAL = 1.5; EXPRESSED IN ADULT LIVER, SIGNAL = 1.4; EXPRESSED IN BRAIN, SIGNAL = 1.4; NT HIT: AB040901.1, EVALUE 1.00e-78; EST_HUMAN HIT: AA852760.1, EVALUE 3.00e-49; SWISSPROT HIT: P00581, EVALUE 3.40e+00
cttctatctgtggcacttcaccatgaagcttggctttgctggagaaaggtgcattctgtagcactaatgcaaagagagatgggatcaaggactgcaaggcagaaagatacatgtggagtttgtgttcatccagtccatgttctccttcc

SEQ ID NO: 21377 - DNA, 133 bp, Homo sapiens
  MAP TO CHR14.3; EXPRESSED IN HEART, SIGNAL =  64; EXPRESSED IN LUNG, SIGNAL =  43; EXPRESSED IN BONE MARROW, SIGNAL =  82; EXPRESSED IN ADULT LIVER, SIGNAL =  69; EXPRESSED IN BRAIN, SIGNAL =  78; EXPRESSED IN PLACENTA, SIGNAL =  61; EXPRESSED IN FETAL LIVER, SIGNAL =  55; EXPRESSED IN HELA, SIGNAL =  58; SWISSPROT HIT: P15882, EVALUE 1.00e-04; NT HIT: gi14749758, EVALUE 4.00e-69; EST_HUMAN HIT: BI333554.1, EVALUE 6.00e-69
gatcataatatcaatctagtgtcaatggaagtaacagtaaatgctgtagctggagcccttaaagctttctttgcagatctgccagatcctttaattccatattctcttcatccagaactattggaagcagcaa

SEQ ID NO: 21378 - DNA, 474 bp, Homo sapiens
  MAP TO CHR14.3; EXPRESSED IN FETAL LIVER, SIGNAL = 1.6; EXPRESSED IN ADULT LIVER, SIGNAL = 1.5; EXPRESSED IN LUNG, SIGNAL = 1.4; SWISSPROT HIT: P31602, EVALUE 2.90e-01; EST_HUMAN HIT: AV701829.1, EVALUE 0.00e+00; NT HIT: gi14752712, EVALUE 0.00e+00
cgataaggaagttcaacttccatgtgctgtcttgcttttcgaatatcatcacacggtatattgaagattttgcaggctaaaggaatggtgatctttttcattacatctctgattattagtacaaataccatccctatgaggatccgcaatatggcttttccaaacagagtcacagtaatggggggcccagctaaaggtaatgtatctagagaaggatctaatactagacccatgttataagtaacatgagatccacatgcaattccagcaccacttcctagtatctcggctgtgtctcctcgggatgtgctccaggtgtcaagagtgaaagaaaagatccccaaagctaaatgaagcccgatgatgatgaatggagcatatttgtgagtttggttgaagttgtcaatcaggtccacaaatggatagaagacagctaagattaaaatggtatataggaatccagcaataatatcc

SEQ ID NO: 21379 - DNA, 141 bp, Homo sapiens
  MAP TO CHR18.3; EXPRESSED IN BONE MARROW, SIGNAL = 1.7; EXPRESSED IN ADULT LIVER, SIGNAL =   2; EXPRESSED IN PLACENTA, SIGNAL = 1.5; EXPRESSED IN HELA, SIGNAL = 1.5; EXPRESSED IN HEART, SIGNAL = 1.8; SWISSPROT HIT: O28282, EVALUE 7.70e+00; EST_HUMAN HIT: AW974910.1, EVALUE 1.80e-01; NT HIT: AF343072.1, EVALUE 1.20e-01
ttgaatcccacatccagcttttcttggttgctttcttttctcaccatagctctgataatgttctggtcaaacaatcttcttcctgctttcaccactaatctggcctcgacctcattcatcaccagcatgtcagtccccata

SEQ ID NO: 21380 - DNA, 136 bp, Homo sapiens
  MAP TO CHR19.3; EXPRESSED IN HELA, SIGNAL = 8.1; EXPRESSED IN PLACENTA, SIGNAL = 8.2; EXPRESSED IN HEART, SIGNAL =  14; EXPRESSED IN LUNG, SIGNAL = 7.2; EXPRESSED IN FETAL LIVER, SIGNAL =  17; EXPRESSED IN BONE MARROW, SIGNAL = 6.7; EXPRESSED IN BRAIN, SIGNAL =  10; EXPRESSED IN ADULT LIVER, SIGNAL = 6.6; NT HIT: gi14736229, EVALUE 4.00e-54; SWISSPROT HIT: Q07821, EVALUE 2.00e+00; EST_HUMAN HIT: BG700143.1, EVALUE 5.00e-54
atgtcggctgccttagtccgggcaaatgtctgggctgtgagcaagaggaaacttcagcccacctgggccgccctcaccctgacaccttcagcagtaaacaagataaaacaacttcttaaagataagcctgagcatg

SEQ ID NO: 21381 - DNA, 236 bp, Homo sapiens
  MAP TO CHR16.3; EXPRESSED IN HEART, SIGNAL =  50; EXPRESSED IN LUNG, SIGNAL =  15; EXPRESSED IN FETAL LIVER, SIGNAL =  16; EXPRESSED IN ADULT LIVER, SIGNAL =  20; EXPRESSED IN HELA, SIGNAL =  11; NT HIT: gi14775785, EVALUE 1.00e-130; SWISSPROT HIT: O95947, EVALUE 3.00e-27; EST_HUMAN HIT: AL525988.1, EVALUE 6.00e-15
gaactggacacccctaaactggattgcttcctctccgggatggaggctgctccccgcaccctggccgcgcacccacctctgccccttctgccccctgccatgggcactgagccggccccatcagctccagaggccctccattccctcccgggggtcagcctgagcctggagaaccgggagctatggaaggagttcagctctgtgggaacagaaatgatcatcaccaaagctgggag

SEQ ID NO: 21382 - DNA, 113 bp, Homo sapiens
  MAP TO CHR16.3; EXPRESSED IN ADULT LIVER, SIGNAL =   1; EXPRESSED IN LUNG, SIGNAL = 1.3; EXPRESSED IN FETAL LIVER, SIGNAL = 1.3; NT HIT: gi14775319, EVALUE 4.00e-53; SWISSPROT HIT: P46939, EVALUE 6.00e+00; EST_HUMAN HIT: AI768721.1, EVALUE 7.00e-53
tatgtacatcaaactgtaaaggcatttgtttctttgtggggagaggacggatgttcatccacttcttacgttcaatagacatcactctcatcgcacgccggtctttggtccac

SEQ ID NO: 21383 - DNA, 173 bp, Homo sapiens
  MAP TO CHR19.3; EXPRESSED IN BONE MARROW, SIGNAL = 1.5; EXPRESSED IN ADULT LIVER, SIGNAL = 1.2; EXPRESSED IN HELA, SIGNAL =   2; NT HIT: AF161221.1, EVALUE 8.00e-93; EST_HUMAN HIT: AW294668.1, EVALUE 2.00e-81; SWISSPROT HIT: Q9P0G3, EVALUE 2.00e-29
gccatgacacagagccaagaggatgagaacaagataattggtggccatacgtgcacccggagctcccagccgtggcaggcggccctgctggcgggtcccaggcgccgcttcctctgcggaggcgccctgctttcaggccagtgggtcatcactgctgctcactgcggccgccc

SEQ ID NO: 21384 - DNA, 158 bp, Homo sapiens
  MAP TO CHR16.3; EXPRESSED IN ADULT LIVER, SIGNAL = 1.3; EXPRESSED IN PLACENTA, SIGNAL = 1.3; EXPRESSED IN HELA, SIGNAL = 0.87; EXPRESSED IN BONE MARROW, SIGNAL = 1.7; NT HIT: gi8923945, EVALUE 2.00e-83; EST_HUMAN HIT: BE221414.1, EVALUE 3.00e-62; SWISSPROT HIT: P12482, EVALUE 2.60e+00
gggtcctggagagtgaggagggccgcagggagtacctggcgtttcccaccagcaagagctcgggccagaaggggcggaaggagctgctgaagggcaacggccggcgcatcgactacatgctgcatgcagaggaggggctgtgcccagactggaaggcc

SEQ ID NO: 21385 - DNA, 209 bp, Homo sapiens
  MAP TO CHR19.3; EXPRESSED IN ADULT LIVER, SIGNAL = 0.99; EST_HUMAN HIT: BE410092.1, EVALUE 1.00e-114; SWISSPROT HIT: O88777, EVALUE 7.20e+00; NT HIT: gi15301333, EVALUE 1.00e-114
agtccacaggtcctggctaccctgggaagagacaagaagtaaatgaagaaagaggaagattccaggacctagatatgatttctgtggacacccttcactggtgactgaagtttctaaatagaaatttaaggcagatccagaggagacaaagacagagtatcccaggtgctggccatttcccacaacagaagaaaatgatcaatgcccag

SEQ ID NO: 21386 - DNA, 446 bp, Homo sapiens
  MAP TO CHR16.3; EXPRESSED IN HEART, SIGNAL = 8.3; EXPRESSED IN LUNG, SIGNAL = 1.2; EXPRESSED IN FETAL LIVER, SIGNAL = 3.8; EXPRESSED IN ADULT LIVER, SIGNAL =   1; EXPRESSED IN PLACENTA, SIGNAL = 1.2; SWISSPROT HIT: Q14585, EVALUE 9.00e-55; EST_HUMAN HIT: AW020146.1, EVALUE 0.00e+00; NT HIT: gi13324674, EVALUE 1.00e-84
tgagagaaagatttgctacatgctttacatttgtaaagttttactccagtatgaattctctgatgtttagtaagggatgaactacagttaaaggctttgccacattctttacatatgtagggtttctctccggtatgaattctttgatgttgagtaaggcgtgaactacaattaaaggctttgccacattctttgcatttatagggtttttctccagtatgaattctctggtggacaataagacttgaggaacgagaaaaagatttgctacatgatttacatttgtaaagtttttctccggtatgaattctctgatgtttagttaggtacgacctacagttaaaggctttgctgcattccttacatttatagggtttctctccagtatgaattctctcatgctgagtaagggctgaagacactttaaatgatttaccacattcttt

SEQ ID NO: 21387 - DNA, 90 bp, Homo sapiens
  MAP TO CHR18.3; EXPRESSED IN ADULT LIVER, SIGNAL = 7.2; EXPRESSED IN PLACENTA, SIGNAL = 6.9; EXPRESSED IN HEART, SIGNAL =   6; EXPRESSED IN HELA, SIGNAL = 5.9; EXPRESSED IN LUNG, SIGNAL = 4.4; EXPRESSED IN BONE MARROW, SIGNAL = 7.5; EXPRESSED IN FETAL LIVER, SIGNAL = 8.5; EXPRESSED IN BRAIN, SIGNAL = 8.7; NT HIT: AL161576.2, EVALUE 2.80e-01; EST_HUMAN HIT: AV731889.1, EVALUE 4.10e-01
gcagaaggcaaggcacaggtagcaactgctgactgcatcactgaaactgaagacttcaaattccaagaagataaatctaacattgaaaaa

SEQ ID NO: 21388 - DNA, 150 bp, Homo sapiens
  MAP TO CHR14.3; EXPRESSED IN PLACENTA, SIGNAL = 2.1; EXPRESSED IN HELA, SIGNAL =   2; EXPRESSED IN LUNG, SIGNAL = 3.1; EXPRESSED IN FETAL LIVER, SIGNAL = 1.6; EXPRESSED IN BONE MARROW, SIGNAL = 1.8; EXPRESSED IN ADULT LIVER, SIGNAL =   2; NT HIT: J00922.1, EVALUE 8.00e-03; SWISSPROT HIT: Q11069, EVALUE 5.80e+00; EST_HUMAN HIT: BE896308.1, EVALUE 1.90e-01
tatacaaacacatttaatctttgtgaaatttttcccagctgtaactcaatctttccttcatctttgcttcctgaatactccacctcctccagtaagtggaaagccttcaatatcttgtggtccatatagaggtcactcttcactctcata

SEQ ID NO: 21389 - DNA, 87 bp, Homo sapiens
  MAP TO CHR18.3; EXPRESSED IN PLACENTA, SIGNAL = 0.88; EXPRESSED IN FETAL LIVER, SIGNAL = 1.7; EXPRESSED IN BONE MARROW, SIGNAL = 1.5; EXPRESSED IN ADULT LIVER, SIGNAL = 0.96; NT HIT: AE002133.1, EVALUE 2.70e-01
ttcaggcctcagccatgtagacgtgaaatcagtatggcaatgcacagacaaggaattcaaatacttaacctcatcatgaaaattaat

SEQ ID NO: 21390 - DNA, 185 bp, Homo sapiens
  MAP TO CHR16.3; EXPRESSED IN ADULT LIVER, SIGNAL = 3.4; EXPRESSED IN HELA, SIGNAL = 6.1; EXPRESSED IN PLACENTA, SIGNAL = 3.7; EXPRESSED IN HEART, SIGNAL = 2.9; EXPRESSED IN LUNG, SIGNAL = 5.1; EXPRESSED IN BONE MARROW, SIGNAL = 5.1; NT HIT: gi14775152, EVALUE 2.00e-99; SWISSPROT HIT: Q03211, EVALUE 3.30e-02; EST_HUMAN HIT: BG328905.1, EVALUE 3.00e-99
ctgtggaaggaggtcatacgggctttcagagcctgcacgaaggggaggatccagtggtggcgcagaaccacactctgggacaggctgaggtggaacaccttcatccttaccagccgggggacatatgtctgggcatggggcagcaacacatcaagcagatccaggaactcctccttggcttcatc

SEQ ID NO: 21391 - DNA, 208 bp, Homo sapiens
  MAP TO CHR14.3; EXPRESSED IN ADULT LIVER, SIGNAL = 1.1; EXPRESSED IN PLACENTA, SIGNAL = 1.2; EXPRESSED IN HELA, SIGNAL = 1.5; EXPRESSED IN LUNG, SIGNAL = 1.6; EXPRESSED IN BONE MARROW, SIGNAL = 1.5; SWISSPROT HIT: Q13796, EVALUE 1.40e+00; NT HIT: AF287346.1, EVALUE 1.90e-01; EST_HUMAN HIT: BE891956.1, EVALUE 1.10e+00
ttagatcccaggcccattctggcccatgcctgccgagtcgccctcgggtgcctgagctgtggtttcatctgtaaagtgaggctgagcagccccggggtccaggcagggccccaggacgacatgcacagagccactcaggaagtgccagtcactggatacagaaggctcaggggctgtcgctgcagctgtcactgttgctcgttcacag

SEQ ID NO: 21392 - DNA, 122 bp, Homo sapiens
  MAP TO CHR16.3; EXPRESSED IN HEART, SIGNAL = 3.4; EXPRESSED IN LUNG, SIGNAL = 4.1; EXPRESSED IN FETAL LIVER, SIGNAL = 3.8; EXPRESSED IN BONE MARROW, SIGNAL =   4; EXPRESSED IN ADULT LIVER, SIGNAL = 3.2; EXPRESSED IN BRAIN, SIGNAL = 3.3; EXPRESSED IN PLACENTA, SIGNAL = 2.5; EST_HUMAN HIT: BG914061.1, EVALUE 1.50e-01; NT HIT: gi14770503, EVALUE 1.60e+00
atcatgaagacgccagatcctgctggcttgcattctcagaggagggaataccaggtggaattgtggccatgcggcattgtcatgaagaatatgagatttgcagctgtcatggcaaggaaacc

SEQ ID NO: 21393 - DNA, 157 bp, Homo sapiens
  MAP TO CHR16.3; EXPRESSED IN PLACENTA, SIGNAL = 1.1; EXPRESSED IN HELA, SIGNAL = 4.5; EXPRESSED IN HEART, SIGNAL = 4.1; EXPRESSED IN BONE MARROW, SIGNAL = 2.2; EXPRESSED IN ADULT LIVER, SIGNAL = 2.8; EXPRESSED IN BRAIN, SIGNAL = 2.2; EST_HUMAN HIT: H16836.1, EVALUE 4.00e-83; SWISSPROT HIT: O60512, EVALUE 2.60e+00; NT HIT: gi14775217, EVALUE 9.00e-83
gtttaactggtacacccgccgagccatgctggctgccatctacaacacaacagagctggtgatgatgcaggactcctctccagactttgaggacacttggcgcttcctggaaaaccgggttaatgatgcaatgaacatgggccacactgccaagcag

SEQ ID NO: 21394 - DNA, 141 bp, Homo sapiens
  MAP TO CHR18.3; EXPRESSED IN BRAIN, SIGNAL = 3.3; EXPRESSED IN ADULT LIVER, SIGNAL = 1.5; EXPRESSED IN PLACENTA, SIGNAL = 1.7; EXPRESSED IN LUNG, SIGNAL = 1.6; EXPRESSED IN BONE MARROW, SIGNAL = 1.5; NT HIT: gi14916512, EVALUE 7.00e-74; EST_HUMAN HIT: AV752839.1, EVALUE 1.00e-54; SWISSPROT HIT: Q14814, EVALUE 7.70e+00
gcaagctatagtcagacagatgatgaaagtaacatgaaaactggtgatgatggagagccctgtggccacacagaggaggaagacagcagcctggcagcagcctcaccgaagagaggaaccaccacacccagcagctcctga

SEQ ID NO: 21395 - DNA, 281 bp, Homo sapiens
  MAP TO CHR14.3; EXPRESSED IN ADULT LIVER, SIGNAL = 1.3; EXPRESSED IN HELA, SIGNAL = 2.3; EXPRESSED IN LUNG, SIGNAL = 2.2; NT HIT: AF083468.1, EVALUE 2.60e-01; SWISSPROT HIT: Q9WVL4, EVALUE 3.60e-01; EST_HUMAN HIT: T48828.1, EVALUE 1.50e+00
tagaagcctttcagcaactccatgactggattagatggccttccaatgatcccctggtaagaacagtcccccggtttttgacatttgtcatcttccccacatcgagagttcctagagggagctctctttctctcattaatttcatgggcttggcacagtgaatagacgtggcaggaacttggaagatagtcattgaatacagagcaaatccaaaactgtggtgttgagcaaaggggctctgcagagagtcggagcagaagggagcccaaatttggggtgag

SEQ ID NO: 21396 - DNA, 91 bp, Homo sapiens
  MAP TO CHR19.3; EXPRESSED IN ADULT LIVER, SIGNAL = 2.8; EXPRESSED IN HELA, SIGNAL = 2.7; EXPRESSED IN PLACENTA, SIGNAL =   3; EXPRESSED IN BONE MARROW, SIGNAL = 3.5; EST_HUMAN HIT: AL560878.1, EVALUE 2.00e-34
ttgcgcatgcgcctcggagctggcttcaaccagcgaaggctgaacccgcttccagggtcctcgccgagctgggagttaggatccgaggggg

SEQ ID NO: 21397 - DNA, 412 bp, Homo sapiens
  MAP TO CHR19.3; EXPRESSED IN FETAL LIVER, SIGNAL = 1.6; EXPRESSED IN BONE MARROW, SIGNAL = 0.67; EXPRESSED IN ADULT LIVER, SIGNAL = 0.96; EXPRESSED IN HELA, SIGNAL =   1; EXPRESSED IN PLACENTA, SIGNAL = 0.98; SWISSPROT HIT: P01125, EVALUE 2.00e+00; EST_HUMAN HIT: AL120117.1, EVALUE 2.30e+00
aaagctgttcactgtcagccactcagtcatcacaatgggaacctgtttactatcagccacttgttcaccacagtgggaaccagttcactgttcacacactcattcatcacagcgagaacctgttcaatgtcaccccactcattcatcacagtaagaacctgttcactgtcaccaactcactcaccatgataggaaccagtttactgtcacccattcatttaccagagtggaaacctgttccttgccagccactcagtcatcacactgggaaactgttctcacccactcacttgtcacagtgggaaactcttcactgtgagccactcaatcactactgtgaaaaacctgttcactctgagtcactcgttcaacacagtgagaagctattcactgtcagccacatattcaacaa

SEQ ID NO: 21398 - DNA, 121 bp, Homo sapiens
  MAP TO CHR16.3; EXPRESSED IN HEART, SIGNAL = 4.1; EXPRESSED IN FETAL LIVER, SIGNAL =  16; EXPRESSED IN ADULT LIVER, SIGNAL =  10; NT HIT: gi16164628, EVALUE 5.00e-62; EST_HUMAN HIT: AW804722.1, EVALUE 8.00e-62
atggtgaagctctctattgtcctgaccccacagttcctgtcccatgaccagggccagctcaccaaggagctgcagcagcatgtaaagtcagtgacatgcccatgcgagtacctgaggaagg

SEQ ID NO: 21399 - DNA, 157 bp, Homo sapiens
  MAP TO CHR16.3; EXPRESSED IN LUNG, SIGNAL = 1.3; EXPRESSED IN BONE MARROW, SIGNAL = 1.4; EXPRESSED IN ADULT LIVER, SIGNAL =   1; EXPRESSED IN PLACENTA, SIGNAL = 1.4; SWISSPROT HIT: P51828, EVALUE 2.00e-23; NT HIT: gi15319601, EVALUE 1.00e-78; EST_HUMAN HIT: AL558455.1, EVALUE 2.00e-78
gagaacctgctgctgtcagtgcttccggcccacatctccatgggcatgaagctggccatcatcgaacggctcaaggagcatggtgaccgtcgctgcatgcctgacaacaacttccacagcctctacgtcaagaggcaccagaatgtcaggtgggcgg

SEQ ID NO: 21400 - DNA, 162 bp, Homo sapiens
  MAP TO CHR18.3; EXPRESSED IN ADULT LIVER, SIGNAL = 1.1; EXPRESSED IN HELA, SIGNAL = 1.4; EXPRESSED IN LUNG, SIGNAL = 1.4; EXPRESSED IN FETAL LIVER, SIGNAL = 1.4; EXPRESSED IN BONE MARROW, SIGNAL = 0.66; EST_HUMAN HIT: BI008012.1, EVALUE 2.10e-01; SWISSPROT HIT: Q92750, EVALUE 6.00e-17; NT HIT: Y09321.1, EVALUE 3.00e-86
tctgtggctgtgccaaccagtgtcgtcacagttactcctggaaagccattgaatactgtaactaccctgaagccttcaagtttgggagcatcatccactccttcaaatgagcccaatcttaaagcagagaactcagcagctgttcagattaatctttctccg

SEQ ID NO: 21401 - DNA, 238 bp, Homo sapiens
  MAP TO CHR14.3; EXPRESSED IN BRAIN, SIGNAL = 1.3; EXPRESSED IN ADULT LIVER, SIGNAL = 0.92; SWISSPROT HIT: P77199, EVALUE 5.70e-01; NT HIT: AB040608.1, EVALUE 2.20e-01
tttctcccacttcctgcccctccttccccgacaaatgctatcacatacctggaaaggagatggcactccattcccgaatacagatccagcatctgacagcaatgccagcagcgggaacttccagtgtgggaatgtagatgggagtggtgcaacaggccacctgggcattccagacaatccagatacagtggtactgcccggcagcctcagcacccaccctgaatccacctggccgtga

SEQ ID NO: 21402 - DNA, 144 bp, Homo sapiens
  MAP TO CHR19.3; EXPRESSED IN BONE MARROW, SIGNAL = 1.2; EXPRESSED IN ADULT LIVER, SIGNAL = 1.4; EXPRESSED IN HEART, SIGNAL = 1.7; EXPRESSED IN HELA, SIGNAL = 2.8; EXPRESSED IN FETAL LIVER, SIGNAL = 1.3; EST_HUMAN HIT: BG252083.1, EVALUE 2.00e-60; NT HIT: gi11342675, EVALUE 1.00e-60
gcgtggctggcagaagctgaaagtcgagtccttagcaaccggggagacagcctgagccggcacgcccggcctcccgacccccccgctagcgccccgccagacagcagcagcaacagcgcatcacaggacaccaaggagaggtga

SEQ ID NO: 21403 - DNA, 144 bp, Homo sapiens
  MAP TO CHR18.3; EXPRESSED IN ADULT LIVER, SIGNAL = 1.2; EXPRESSED IN PLACENTA, SIGNAL = 1.3; EXPRESSED IN HELA, SIGNAL = 1.3; EXPRESSED IN LUNG, SIGNAL = 1.2; EST_HUMAN HIT: AA029145.1, EVALUE 7.20e-01; SWISSPROT HIT: P46911, EVALUE 5.20e-01
tttaggaggtgctctgcctaacaaaacacaaccagttgaaatcttcagtggggtggaggagggagtgatgttagggacgttttcagattcaaaactgaataacccatatatcagctctataaagaacagtgatgacagaagatg

SEQ ID NO: 21404 - DNA, 114 bp, Homo sapiens
  MAP TO CHR14.3; EXPRESSED IN FETAL LIVER, SIGNAL = 1.8; EXPRESSED IN BRAIN, SIGNAL = 2.5; EXPRESSED IN ADULT LIVER, SIGNAL = 1.8; EXPRESSED IN PLACENTA, SIGNAL = 1.8; EXPRESSED IN LUNG, SIGNAL = 1.7; SWISSPROT HIT: O75882, EVALUE 4.10e-01; NT HIT: gi14784700, EVALUE 8.00e-58; EST_HUMAN HIT: AL562154.1, EVALUE 8.60e+00
gattggcaaagggacgggccctccctctcccaccaaggaccggaagaaggatgtttcttccccgcagcgggcccagtccagcccccaccgcaggaacagccgcagtgaaagacg

SEQ ID NO: 21405 - DNA, 136 bp, Homo sapiens
  MAP TO CHR18.3; EXPRESSED IN FETAL LIVER, SIGNAL = 1.5; EXPRESSED IN ADULT LIVER, SIGNAL = 1.6; EXPRESSED IN PLACENTA, SIGNAL = 1.5; EXPRESSED IN HELA, SIGNAL = 2.1; EXPRESSED IN HEART, SIGNAL = 2.1; SWISSPROT HIT: P34849, EVALUE 4.50e+00; NT HIT: gi14727452, EVALUE 1.20e-01; EST_HUMAN HIT: AW950302.1, EVALUE 1.70e-01
tagaatatgtagagatgtataccatggtagaaaaaaaaacaaacaagcaggatatttcggagcctgagttgtacaataccacctgctgcattttctatgtcctacagatgagtaatgaagaagtagaagtgttaag

SEQ ID NO: 21406 - DNA, 183 bp, Homo sapiens
  MAP TO CHR16.3; EXPRESSED IN ADULT LIVER, SIGNAL = 2.2; EXPRESSED IN PLACENTA, SIGNAL = 2.7; EXPRESSED IN HELA, SIGNAL = 3.1; EXPRESSED IN BONE MARROW, SIGNAL = 3.8; EXPRESSED IN FETAL LIVER, SIGNAL = 2.9; NT HIT: gi16178926, EVALUE 1.60e-01; SWISSPROT HIT: P56974, EVALUE 1.50e+00; EST_HUMAN HIT: AW936149.1, EVALUE 2.40e-01
aactgccatgaagctgacgtgcagcatgtgctcgctgctgggcataggtggccagcccatggctccttcctgtacccgttgctggcaggtcccgtgccccggggcagctcctgccaccagtcctctcctctgccctccctcgcatctactccttacgtgcatctgtcaaggggcgctgagcag

SEQ ID NO: 21407 - DNA, 104 bp, Homo sapiens
  MAP TO CHR19.3; EXPRESSED IN FETAL LIVER, SIGNAL = 2.3; EXPRESSED IN BONE MARROW, SIGNAL = 1.5; EXPRESSED IN ADULT LIVER, SIGNAL = 1.4; EXPRESSED IN BRAIN, SIGNAL = 1.7; EXPRESSED IN PLACENTA, SIGNAL = 1.6; EST_HUMAN HIT: BG721041.1, EVALUE 1.90e+00; NT HIT: AL096805.1, EVALUE 8.40e-02; SWISSPROT HIT: P03346, EVALUE 4.70e+00
ccagtgtgtgcgggacgtatcagaggagaccgatgcccactcagccttgctggtgctgctcatctgtgctggcttgcagtccggcctggggtgtttggagagag

SEQ ID NO: 21408 - DNA, 326 bp, Homo sapiens
  MAP TO CHR16.3; EXPRESSED IN ADULT LIVER, SIGNAL = 1.2; EXPRESSED IN PLACENTA, SIGNAL = 1.8; EXPRESSED IN HELA, SIGNAL = 1.2; EXPRESSED IN FETAL LIVER, SIGNAL = 1.5; EXPRESSED IN BONE MARROW, SIGNAL = 1.2; EST_HUMAN HIT: AU132072.1, EVALUE 0.00e+00; SWISSPROT HIT: P23975, EVALUE 1.00e-49; NT HIT: M65105.1, EVALUE 0.00e+00
agcctcggcgtgcccccaggaccggtaaagttcctctcgccagccgcatccatgcttctggcgcggatgaacccgcaggtgcagcccgagaacaacggggcggacacgggtccagagcagccccttcgggcgcgcaaaactgcggagctgctggtggtgaaggagcgcaacggcgtccagtgcctgctggcgccccgcgacggcgacgcgcagccccgggagacctggggcaagaagatcgacttcctgctgtccgtagtcggcttcgcagtggacctggccaacgtgtggcgcttcccctacctctgctacaagaacggcggcgg

SEQ ID NO: 21409 - DNA, 128 bp, Homo sapiens
  MAP TO CHR19.3; EXPRESSED IN PLACENTA, SIGNAL = 3.2; EXPRESSED IN LUNG, SIGNAL = 4.9; EXPRESSED IN FETAL LIVER, SIGNAL = 2.7; EXPRESSED IN HEART, SIGNAL = 1.9; EXPRESSED IN ADULT LIVER, SIGNAL = 3.3; EST_HUMAN HIT: BE276357.1, EVALUE 6.00e-66; SWISSPROT HIT: O75820, EVALUE 4.00e-08; NT HIT: gi16162715, EVALUE 4.00e-66
ggaccagatggcctttgaggatgtggctgtgtacttctcccaggaggagtgggggctcctggacacagcccagagggccctgtaccgccgcgtgatgctagacaacttcgcacttgtggcctcgctgg

SEQ ID NO: 21410 - DNA, 199 bp, Homo sapiens
  MAP TO CHR18.3; EXPRESSED IN FETAL LIVER, SIGNAL = 4.7; EXPRESSED IN LUNG, SIGNAL = 4.1; EXPRESSED IN ADULT LIVER, SIGNAL = 1.8; EXPRESSED IN PLACENTA, SIGNAL = 2.8; EXPRESSED IN HELA, SIGNAL = 4.1; EST_HUMAN HIT: BG026767.1, EVALUE 1.00e-108; SWISSPROT HIT: P34649, EVALUE 3.00e-12; NT HIT: gi14738415, EVALUE 1.00e-108
gcatggaggatgaaaaggaagatagtaaagttatacctacagaatgtgccatcaaggtatttaaaacaacccttaatgaatttaagaatcgtgacaaatatattaaagatgatttcaggtttaaagatcgcttcagtaaactaaatccacgtaagatcatccgcatgtgggcagaaaaagaaatgcacaatctcgcaag

SEQ ID NO: 21411 - DNA, 122 bp, Homo sapiens
  MAP TO CHR16.3; EXPRESSED IN ADULT LIVER, SIGNAL = 2.4; EXPRESSED IN PLACENTA, SIGNAL = 2.8; EXPRESSED IN FETAL LIVER, SIGNAL = 2.2; EXPRESSED IN LUNG, SIGNAL = 3.8; EST_HUMAN HIT: BI829633.1, EVALUE 2.00e-62; SWISSPROT HIT: Q9UH03, EVALUE 5.00e-05; NT HIT: gi15309163, EVALUE 2.60e-02
ccctccagccccagcaccccaccctgcgagatgcttggtcctgtgggcattgaggctgtgctggaccagctgaagatcaaggctatgaagatggggtttgagttcaacatcatggtggtggg

SEQ ID NO: 21412 - DNA, 75 bp, Homo sapiens
  MAP TO CHR18.3; EXPRESSED IN HEART, SIGNAL = 1.8; EXPRESSED IN LUNG, SIGNAL = 1.6; EXPRESSED IN FETAL LIVER, SIGNAL =   2; EXPRESSED IN BONE MARROW, SIGNAL = 1.7; EXPRESSED IN ADULT LIVER, SIGNAL = 1.6; EXPRESSED IN HELA, SIGNAL = 1.2; EXPRESSED IN PLACENTA, SIGNAL = 1.9; EST_HUMAN HIT: AI015972.1, EVALUE 1.30e+00; NT HIT: AF270645.1, EVALUE 8.80e-01
tctggatgagaggtttggatctgataagtcctaggattccatcagtttcatattccacacccctatctttggtga

SEQ ID NO: 21413 - DNA, 124 bp, Homo sapiens
  MAP TO CHR19.3; EXPRESSED IN HEART, SIGNAL = 3.5; EXPRESSED IN HELA, SIGNAL =  59; EXPRESSED IN BRAIN, SIGNAL = 3.8; EXPRESSED IN ADULT LIVER, SIGNAL =  14; NT HIT: gi13904869, EVALUE 9.00e-64; EST_HUMAN HIT: AW157382.1, EVALUE 1.00e-63; SWISSPROT HIT: Q24186, EVALUE 1.00e-05
gggctcctcgaactcctatgccattaagaagaaggacgagctggagcgtgtggccaagtccaaccgctgattttcccagctgctgcccaataaacctgtctgccctttggggcagtcccagcca

SEQ ID NO: 21414 - DNA, 309 bp, Homo sapiens
  MAP TO CHR18.3; EXPRESSED IN ADULT LIVER, SIGNAL = 2.1; EXPRESSED IN HELA, SIGNAL = 3.8; EXPRESSED IN LUNG, SIGNAL = 3.5; EXPRESSED IN FETAL LIVER, SIGNAL = 3.5; EXPRESSED IN BONE MARROW, SIGNAL = 2.4; EXPRESSED IN BRAIN, SIGNAL = 3.6; SWISSPROT HIT: P36543, EVALUE 9.00e-13; NT HIT: gi14776833, EVALUE 8.00e-48; EST_HUMAN HIT: BE185399.1, EVALUE 1.00e-47
caattaggcaaagacattagtgacagaggggcatccactgaaaaagacagagcaatactcgaacagcaaagaggaagccacttagacattcttgtttcttcaaatatcagaagcttccacatcatagcaggagggctagggatggacttcacctcccaaaagctgttggcatttggaccaaacaaggctccccggacttctggcatcatctgctggcctgagatccagtcggcttttcagggtgttggaaacctttattttacaatccccattgtggatctcaactccaccaactatgtcctcaggcag

SEQ ID NO: 21415 - DNA, 123 bp, Homo sapiens
  MAP TO CHR16.3; EXPRESSED IN PLACENTA, SIGNAL = 1.5; EXPRESSED IN HELA, SIGNAL = 1.6; EXPRESSED IN FETAL LIVER, SIGNAL = 1.6; EXPRESSED IN BONE MARROW, SIGNAL = 2.4; EXPRESSED IN ADULT LIVER, SIGNAL = 1.3; SWISSPROT HIT: O76024, EVALUE 1.20e+00; NT HIT: AF198031.1, EVALUE 4.10e-01
atgccatacgtgtgcccaggagccacagccacaagcagggacatctcaacctcaggacctctgcatggcatcatcaaggagccagagacccagaaagcctggatgccaaaggtcacgtggagg

SEQ ID NO: 21416 - DNA, 130 bp, Homo sapiens
  MAP TO CHR19.3; EXPRESSED IN FETAL LIVER, SIGNAL = 2.3; EXPRESSED IN BONE MARROW, SIGNAL = 1.6; EXPRESSED IN BRAIN, SIGNAL = 1.9; EXPRESSED IN ADULT LIVER, SIGNAL = 1.5; EXPRESSED IN PLACENTA, SIGNAL = 1.4; EXPRESSED IN HEART, SIGNAL = 1.6; EXPRESSED IN HELA, SIGNAL = 1.2; EST_HUMAN HIT: AA761375.1, EVALUE 7.00e-04; SWISSPROT HIT: P04929, EVALUE 6.90e-01; NT HIT: AE006865.1, EVALUE 6.80e+00
tgtggccaagtaccacgtaccattatatttgcttccatcatcaccatctgtcttccgaaaagaggcctaaacttcattttcattaccataaatatccaacttctgccataaagacgaaaagactagaggg

SEQ ID NO: 21417 - DNA, 194 bp, Homo sapiens
  MAP TO CHR18.3; EXPRESSED IN FETAL LIVER, SIGNAL = 2.5; EXPRESSED IN ADULT LIVER, SIGNAL = 1.1; EST_HUMAN HIT: AV721423.1, EVALUE 1.00e-102; SWISSPROT HIT: Q13336, EVALUE 2.00e-32; NT HIT: gi14765929, EVALUE 1.00e-104
cctccagggcactgaggtcagaccaggagatatttggagctgtagttataggtatgaccagtttggctggaaagaatggattgtaatgtcctgtggctgaaaggtacattgacaacgccatgttgaaagggagggtgaagacggggaggtcccatttgctgagcatggaattcaatgcacttgagaaaattggg

SEQ ID NO: 21418 - DNA, 108 bp, Homo sapiens
  MAP TO CHR18.3; EXPRESSED IN ADULT LIVER, SIGNAL = 1.7; EXPRESSED IN BRAIN, SIGNAL = 2.2; EXPRESSED IN HELA, SIGNAL = 1.6; EXPRESSED IN PLACENTA, SIGNAL = 1.8; EXPRESSED IN FETAL LIVER, SIGNAL = 3.2; EXPRESSED IN BONE MARROW, SIGNAL = 2.5; EST_HUMAN HIT: BI597702.1, EVALUE 3.30e-02; NT HIT: gi14786699, EVALUE 2.20e-02
atattccagaaaaagcaggtgtctaacacttccaccatctgaaaacaggactcgagtgtaagctgaaatatgtaaaactgagtggcagtgggaatcaattcagccatt

SEQ ID NO: 21419 - DNA, 81 bp, Homo sapiens
  MAP TO CHR18.3; EXPRESSED IN HELA, SIGNAL = 1.1; EXPRESSED IN BRAIN, SIGNAL = 1.5; EXPRESSED IN ADULT LIVER, SIGNAL = 1.2; SWISSPROT HIT: Q99747, EVALUE 6.00e-09; EST_HUMAN HIT: BI084863.1, EVALUE 1.00e-37; NT HIT: gi14763395, EVALUE 1.00e-37
aaaacaattgctcaagtcttagttcatctacacagaaatgactatgtagctgcagaaagatgtgtccgggagagctatagg

SEQ ID NO: 21420 - DNA, 212 bp, Homo sapiens
  MAP TO CHR14.3; EXPRESSED IN ADULT LIVER, SIGNAL = 1.9; EXPRESSED IN BRAIN, SIGNAL = 2.2; EXPRESSED IN PLACENTA, SIGNAL = 1.9; EXPRESSED IN HEART, SIGNAL = 2.9; EXPRESSED IN LUNG, SIGNAL = 2.6; EXPRESSED IN FETAL LIVER, SIGNAL = 3.9; EXPRESSED IN BONE MARROW, SIGNAL = 2.6; NT HIT: AJ271051.1, EVALUE 7.50e-01; SWISSPROT HIT: P03905, EVALUE 9.50e-01
tggcttcagcattggaagtaaaagtaaatagaaaaactaattgtcaggtgagagcaaagttgagattcaatggaagaatccaaggtgtcaagtccataggggcatatgtgttgagtggcaagaaaccaaccaacatcaaaggctttgcaatggcaggctggcaggaaaaagctagtatgttcagttggcagaacatcaagaggcttctataa

SEQ ID NO: 21421 - DNA, 382 bp, Homo sapiens
  MAP TO CHR19.3; EXPRESSED IN PLACENTA, SIGNAL = 1.6; EXPRESSED IN HELA, SIGNAL = 1.1; EXPRESSED IN ADULT LIVER, SIGNAL = 0.92; NT HIT: gi16193256, EVALUE 0.00e+00; SWISSPROT HIT: P20138, EVALUE 7.00e-72; EST_HUMAN HIT: BI911521.1, EVALUE 0.00e+00
ctgtcacatgcacagagagctggggagatttgtaactgtatttggtacttcctctctccatccgaaagaagtatgaaccattatccctcctcctggcgtctacgatgctcagggagcagttgttcctactgggatccccaaggaggcggaatctgccctgagtctcctcctgtacttcttgatctagcttgtttgtggccactggagagtccctggatataatggctccttcccggaaccagtaaccatgaactggggagttcttgtcgtagtagggtatgggatggaagaaagtgcagggcacgaggacgcacaaaccctcctgtaccgtcactgactcctgcacttgcagccagaaatttggatccatagccagggcccc

SEQ ID NO: 21422 - DNA, 151 bp, Homo sapiens
  MAP TO CHR19.3; EXPRESSED IN HELA, SIGNAL = 3.9; EXPRESSED IN PLACENTA, SIGNAL = 3.2; EXPRESSED IN HEART, SIGNAL =   3; EXPRESSED IN LUNG, SIGNAL = 4.8; EXPRESSED IN FETAL LIVER, SIGNAL = 4.7; EXPRESSED IN ADULT LIVER, SIGNAL = 2.3; NT HIT: U37106.1, EVALUE 9.00e-80; SWISSPROT HIT: Q13351, EVALUE 3.00e-10; EST_HUMAN HIT: BI523767.1, EVALUE 6.00e-57
ctcagagttcacgaggcagccgaggaagaggaggcttgaggcccagggtgggcaccagccagccatggccacagccgagaccgccttgccctccatcagcacactgaccgccctgggccccttcccggacacacaggatgacttcctcaag

SEQ ID NO: 21423 - DNA, 114 bp, Homo sapiens
  MAP TO CHR16.3; EXPRESSED IN PLACENTA, SIGNAL = 1.1; EXPRESSED IN HELA, SIGNAL = 1.3; EXPRESSED IN LUNG, SIGNAL = 1.5; EXPRESSED IN FETAL LIVER, SIGNAL = 1.2; EXPRESSED IN BONE MARROW, SIGNAL = 1.2; EXPRESSED IN ADULT LIVER, SIGNAL = 1.1; SWISSPROT HIT: O67879, EVALUE 2.70e+00; EST_HUMAN HIT: BI335008.1, EVALUE 8.60e+00; NT HIT: Z99116.1, EVALUE 5.80e+00
ggatcctgtcctatcttatctcttggtatcactggacccagttctgcagtggggaactatcctagcctacagaggagaaataatgcttgtgatgcttgtgacccttttgctttg

SEQ ID NO: 21424 - DNA, 211 bp, Homo sapiens
  MAP TO CHR18.3; EXPRESSED IN BONE MARROW, SIGNAL = 2.1; EXPRESSED IN BRAIN, SIGNAL = 1.3; EXPRESSED IN ADULT LIVER, SIGNAL = 1.2; EXPRESSED IN PLACENTA, SIGNAL = 1.6; SWISSPROT HIT: Q62178, EVALUE 9.60e-02; EST_HUMAN HIT: BI915751.1, EVALUE 1.10e+00; NT HIT: U41741.1, EVALUE 1.20e-02
tcctgcgccctggatgcggacggacttccaggctccccaggcagcacccagctaggacccagtgacaactcttgggttggtagcaacagccctgtgaggtcagggtcccaggagcagcaggggtctccaggatatatagcagcaaaaatctcacccttccaggccaaaccagcccttgccacgggccacaagccctttgctcagaacctag

SEQ ID NO: 21425 - DNA, 155 bp, Homo sapiens
  MAP TO CHR16.3; EXPRESSED IN ADULT LIVER, SIGNAL = 1.6; EXPRESSED IN BRAIN, SIGNAL = 1.9; EXPRESSED IN PLACENTA, SIGNAL = 1.6; EXPRESSED IN FETAL LIVER, SIGNAL = 1.6; EXPRESSED IN LUNG, SIGNAL = 1.5; EST_HUMAN HIT: BI519286.1, EVALUE 5.00e-02; SWISSPROT HIT: P17759, EVALUE 3.40e+00; NT HIT: gi13627310, EVALUE 5.30e-01
tccacaaaagctgtttgtccaattttgtttgattctcttctgctgttttgaggtgcctgtgttttcaacctgaatggattttctctgctctccccttggcgggagatgtcttctacatctaccaggatgacttttatcttggcctgttcagatcc

SEQ ID NO: 21426 - DNA, 119 bp, Homo sapiens
  MAP TO CHR14.3; EXPRESSED IN HEART, SIGNAL = 2.6; EXPRESSED IN HELA, SIGNAL = 2.7; EXPRESSED IN FETAL LIVER, SIGNAL = 2.9; EXPRESSED IN BONE MARROW, SIGNAL = 2.8; EXPRESSED IN ADULT LIVER, SIGNAL =   3; SWISSPROT HIT: P35814, EVALUE 8.00e-17; EST_HUMAN HIT: BG110976.1, EVALUE 1.00e-60; NT HIT: gi14752916, EVALUE 8.00e-61
gggaagtcgagacaacatgagtgtgattttgatctgttttccaaatgcacccaaagtatcgccagaagcagtgaagaaggaggcagagttggacaagtacctggaatgcagagtagaag

SEQ ID NO: 21427 - DNA, 254 bp, Homo sapiens
  MAP TO CHR16.3; EXPRESSED IN HELA, SIGNAL = 2.9; EXPRESSED IN LUNG, SIGNAL = 2.8; EXPRESSED IN BONE MARROW, SIGNAL =   4; EXPRESSED IN FETAL LIVER, SIGNAL = 3.8; EXPRESSED IN ADULT LIVER, SIGNAL = 3.7; EXPRESSED IN PLACENTA, SIGNAL = 2.8; NT HIT: M32998.1, EVALUE 0.00e+00; SWISSPROT HIT: P47896, EVALUE 2.00e-07; EST_HUMAN HIT: BF515223.1, EVALUE 0.00e+00
tcttggatacagcactttaatgccagtgggcctttaggatagggaggagttgggagccaatctccatctccgtactcctaacccaacttccaccacgctggaggagacaccagggttccagctgtgagcctggtgcttgccttctgctacaagccccatcccgacctccttggagacttctagctcaagctctggaggaaatccaccagcaggtgctcagggaagccaaagtccatctgcagcagcaggaagcc

SEQ ID NO: 21428 - DNA, 122 bp, Homo sapiens
  MAP TO CHR14.3; EXPRESSED IN PLACENTA, SIGNAL = 2.1; EXPRESSED IN HELA, SIGNAL = 1.8; EXPRESSED IN LUNG, SIGNAL = 1.6; EXPRESSED IN ADULT LIVER, SIGNAL = 1.4; NT HIT: AB010436.1, EVALUE 1.60e+00; EST_HUMAN HIT: BI042492.1, EVALUE 5.90e-01
tggcagtcatggaactggagcagttaaacctcattctccagggtactggtgctactgccaagagcggaaaactttcatcttccaaaacctcaatcagccagtttctcatctgcatcccataa

SEQ ID NO: 21429 - DNA, 280 bp, Homo sapiens
  MAP TO CHR19.3; EXPRESSED IN ADULT LIVER, SIGNAL = 1.2; EST_HUMAN HIT: BI906741.1, EVALUE 8.00e-58; NT HIT: gi15301131, EVALUE 0.00e+00; SWISSPROT HIT: P20138, EVALUE 4.00e-30
aggatatgttgagtcggacagccctggtcatggtcacgccggccccaggcaaggtcacctgacaggtgaggctggtgccatggtcctggggctgtgggatgaggctgagcatcgaggagcgagtgatagtggggtccagggaggacacggaggcccccatccaggtgatcgtggggggcgtcccctgttcacaggcccagggcacagagcaggtcaggttcctggggtggccagactccagggtccccgggatggagaaggtgggcatgtgagtcagggc

SEQ ID NO: 21430 - DNA, 230 bp, Homo sapiens
  MAP TO CHR16.3; EXPRESSED IN HEART, SIGNAL = 2.3; EXPRESSED IN ADULT LIVER, SIGNAL = 1.1; EXPRESSED IN BRAIN, SIGNAL = 1.3; SWISSPROT HIT: Q08024, EVALUE 1.60e+00; EST_HUMAN HIT: AL561208.1, EVALUE 1.00e-122; NT HIT: gi14785617, EVALUE 1.00e-126
ggcaagaagacaacaagaccctagtcctggttccaatttaggtggtggtgatgacctcaaacttcgttaattaatagcacagcagatgtgtgctgcccatctttacatacacattgcttctagttggcagaaataattgattaaaagaccagaaactgtgataactggaggtactacggtctatttctcaaccttaggcagtaatagacatcacaactgccatggttttg

SEQ ID NO: 21431 - DNA, 166 bp, Homo sapiens
  MAP TO CHR19.3; EXPRESSED IN BRAIN, SIGNAL =  19; EXPRESSED IN ADULT LIVER, SIGNAL =  18; EXPRESSED IN PLACENTA, SIGNAL =  17; EXPRESSED IN HEART, SIGNAL =  17; EXPRESSED IN HELA, SIGNAL =  14; EXPRESSED IN LUNG, SIGNAL = 9.6; EXPRESSED IN FETAL LIVER, SIGNAL =  26; EXPRESSED IN BONE MARROW, SIGNAL =  20; SWISSPROT HIT: P07538, EVALUE 6.60e-01; EST_HUMAN HIT: AW418960.1, EVALUE 3.00e-22; NT HIT: AF084196.1, EVALUE 3.70e-02
agagattcaggaacaatgagctgctccatgaatataaaaatatgtttctttatttttgtcttcaggtgctcgcccttgccacaaacaccagcaatttctgctacagtaatggaaatatgggtgacactgacctctccctatcaaacccaaacagaacagactctgt

SEQ ID NO: 21432 - DNA, 474 bp, Homo sapiens
  MAP TO CHR16.3; EXPRESSED IN ADULT LIVER, SIGNAL = 1.3; EXPRESSED IN PLACENTA, SIGNAL =   2; EXPRESSED IN HEART, SIGNAL = 3.2; EXPRESSED IN HELA, SIGNAL = 4.4; EXPRESSED IN LUNG, SIGNAL = 2.7; EXPRESSED IN FETAL LIVER, SIGNAL =   4; EXPRESSED IN BONE MARROW, SIGNAL = 0.77; EXPRESSED IN BRAIN, SIGNAL = 1.6; NT HIT: gi14775162, EVALUE 0.00e+00; SWISSPROT HIT: P52742, EVALUE 2.00e-12; EST_HUMAN HIT: BI224582.1, EVALUE 0.00e+00
catgtcggaaagctggcaacagccgccacagacgcagccgcagcagccacagccaccgcagcctcagcaccatgcagagccaccgccagccctggcagagcacacgctgcctccgggcacggcggagaaccccctgggctgtgccgtctatggcatcctcctgcagccagaccccggcctgcagcccccacaacacgcacccctgcaggcagcaggagagccaggccccaaatgtggcgtgtgtggtcacgacctggcgcacctgtccagtccgcatgagcaccagtgtctggcgggccatgaccgctcattccagtgcacacagtgtctcaagatcttccaccaggccactgacctgctggagcaccagtgcgtgcaggctgagcagaagcccttcgtctgtggggtctgcaagatgggcttctcactactcacctcactggcacagcaccacagctcccacagtggcctggt

SEQ ID NO: 21433 - DNA, 183 bp, Homo sapiens
  MAP TO CHR16.3; EXPRESSED IN FETAL LIVER, SIGNAL =   5; EXPRESSED IN LUNG, SIGNAL =  11; EXPRESSED IN ADULT LIVER, SIGNAL =   5; EXPRESSED IN HEART, SIGNAL = 3.4; EXPRESSED IN PLACENTA, SIGNAL = 6.1; NT HIT: gi5454035, EVALUE 3.00e-98; SWISSPROT HIT: Q12788, EVALUE 3.00e-30; EST_HUMAN HIT: BE258062.1, EVALUE 5.00e-98
cctgtttctgcagccgcagggagcgagcctcgtagagcaacaggttgtggtcggcggtggcggtgaggaccacgccggcggtgtgtgccagggtgcagtgggtcagctcctgcccagggcccggcggctgggcctgcgtgtacacacactgcccagaagctgcctcccacacgcgcagagtgc

SEQ ID NO: 21434 - DNA, 136 bp, Homo sapiens
  MAP TO CHR19.3; EXPRESSED IN ADULT LIVER, SIGNAL =   6; EXPRESSED IN PLACENTA, SIGNAL =   6; EXPRESSED IN HELA, SIGNAL =   6; EXPRESSED IN FETAL LIVER, SIGNAL = 5.6; NT HIT: gi14755006, EVALUE 7.00e-71; EST_HUMAN HIT: AW294668.1, EVALUE 1.00e-30
gacatcaaggagggacctgtgccctgctccacatcctcccacctgccgcccgcagagcctgcaggccccgcccccctcgtctctggtccctacctctctgctgtgtcttcatgtccctgagggtcttgggctctgg

SEQ ID NO: 21435 - DNA, 221 bp, Homo sapiens
  MAP TO CHR19.3; EXPRESSED IN ADULT LIVER, SIGNAL = 0.92; EXPRESSED IN BRAIN, SIGNAL = 1.1; EXPRESSED IN PLACENTA, SIGNAL = 1.1; EXPRESSED IN LUNG, SIGNAL = 1.3; EXPRESSED IN BONE MARROW, SIGNAL = 1.1; EST_HUMAN HIT: BG753262.1, EVALUE 1.00e-15; NT HIT: AF166267.1, EVALUE 3.00e-34; SWISSPROT HIT: P46824, EVALUE 2.00e-26
cggtacaccagcgccaggatgttgagcatggtggccacgtcagggtggcagtggcccgagctgcgctccaggtcctccaaggcctggcggcacagaggcaccgccacctcatagcggccctgccccgcgtactggatcacgaggttatgcagggtccgaaggcgggcagggatctcatagccaccctgctgagcagctgctgctcctgcggcctcaggacc

SEQ ID NO: 21436 - DNA, 91 bp, Homo sapiens
  MAP TO CHR16.3; EXPRESSED IN HELA, SIGNAL = 1.4; EXPRESSED IN LUNG, SIGNAL = 2.2; EXPRESSED IN BONE MARROW, SIGNAL =   1; EXPRESSED IN FETAL LIVER, SIGNAL = 0.9; EXPRESSED IN BRAIN, SIGNAL = 1.2; EXPRESSED IN ADULT LIVER, SIGNAL = 1.3; EXPRESSED IN PLACENTA, SIGNAL = 1.4; EST_HUMAN HIT: AA663728.1, EVALUE 3.00e-14; NT HIT: X13895.1, EVALUE 1.10e+00
ctcagtgccatgactctgcatcctgccccctttctgacactcaatcacagtcttcctgggatcactgaagatctgtatggaacagatgctt

SEQ ID NO: 21437 - DNA, 175 bp, Homo sapiens
  MAP TO CHR19.3; EXPRESSED IN ADULT LIVER, SIGNAL =   1; EXPRESSED IN BRAIN, SIGNAL = 1.4; EXPRESSED IN BONE MARROW, SIGNAL =   1; EXPRESSED IN FETAL LIVER, SIGNAL = 1.3; SWISSPROT HIT: P29940, EVALUE 1.90e+00; EST_HUMAN HIT: BI850724.1, EVALUE 7.00e-94; NT HIT: gi15302718, EVALUE 5.00e-94
cttgaagcagttctcgtcggccatgcagcgctcagccttccactggtagctggtctccctagcagcgcggacgcagcgggaggacaggttcccaccagcggcaccccgcttcttctcgttcaggtagagctccaccaccttcaggcagacgtcatcgctcacgaggtggtgcagc

SEQ ID NO: 21438 - DNA, 199 bp, Homo sapiens
  MAP TO CHR18.3; EXPRESSED IN BONE MARROW, SIGNAL = 1.4; EXPRESSED IN FETAL LIVER, SIGNAL = 1.1; EXPRESSED IN ADULT LIVER, SIGNAL = 1.2; EXPRESSED IN PLACENTA, SIGNAL = 1.4; SWISSPROT HIT: Q9H4G0, EVALUE 1.90e-02; EST_HUMAN HIT: BG721572.1, EVALUE 1.00e-107; NT HIT: gi6912469, EVALUE 1.00e-107
cctctacatcacaggtatattctgatccatcgagaagtatcactttgcactgcatgcttttaggctttttgacaatctttaatggagaccgagagagtttactgctagatgatttctgagaaagtttatcgtcttctaattgctgatattcgagctgttttgcagccctggcagcaaactcctgttccttgtcagtgac

SEQ ID NO: 21439 - DNA, 151 bp, Homo sapiens
  MAP TO CHR18.3; EXPRESSED IN ADULT LIVER, SIGNAL = 1.2; EXPRESSED IN PLACENTA, SIGNAL = 1.2; EXPRESSED IN FETAL LIVER, SIGNAL = 1.5; NT HIT: AJ011586.1, EVALUE 5.20e-01; SWISSPROT HIT: Q05967, EVALUE 4.50e+00; EST_HUMAN HIT: AI435242.1, EVALUE 7.60e-01
cttttccatggtcctcatttattgtccccattctctctgtaagcagaatctcccccaggtgcttcaaattttcaatgctcaattccagattgatattctttcctctaccattaactaaagctttatctgtgaaatgattattttgtcccat

SEQ ID NO: 21440 - DNA, 218 bp, Homo sapiens
  MAP TO CHR14.3; EXPRESSED IN HELA, SIGNAL = 2.5; EXPRESSED IN LUNG, SIGNAL =   2; EXPRESSED IN BONE MARROW, SIGNAL = 4.3; EXPRESSED IN BRAIN, SIGNAL = 4.1; EXPRESSED IN ADULT LIVER, SIGNAL = 2.9; EXPRESSED IN PLACENTA, SIGNAL = 2.3; SWISSPROT HIT: P09260, EVALUE 1.80e+00
ttgtgaaagcttggtgctggtgaatcaatgctctgtggattgaggctaaagaacactgtgtccagagtaactgcattttggatgaaaaataaaagggcttctgtaaactcgtaattattcttctggttgtgttcatggtaaatgccaacagtatggatgtcagcttctaactcagccaatttgttgaccagatccagtttatatttaccagaactcat

SEQ ID NO: 21441 - DNA, 112 bp, Homo sapiens
  MAP TO CHR19.3; EXPRESSED IN BRAIN, SIGNAL = 1.4; EXPRESSED IN ADULT LIVER, SIGNAL = 1.2; EXPRESSED IN HELA, SIGNAL = 1.5; NT HIT: gi4758549, EVALUE 5.00e-56; EST_HUMAN HIT: BI837890.1, EVALUE 3.00e-55
tgacctggtgggaggcgagccccagggctggactggtgagctccccgccatcctgagatttctccctggccagcctggctgcttccttcacttcctggaacttctcggcaaa

SEQ ID NO: 21442 - DNA, 79 bp, Homo sapiens
  MAP TO CHR16.3; EXPRESSED IN LUNG, SIGNAL =   1; EXPRESSED IN ADULT LIVER, SIGNAL = 1.2; EXPRESSED IN BRAIN, SIGNAL = 1.9; EXPRESSED IN PLACENTA, SIGNAL = 1.4; EXPRESSED IN HELA, SIGNAL = 1.4; EXPRESSED IN BONE MARROW, SIGNAL = 1.6; NT HIT: U10098.1, EVALUE 9.40e-01; EST_HUMAN HIT: BG426848.1, EVALUE 3.00e-32
tcagcccagggcagcgcacagtgcatcgaccaccctttcctggttccacagacgctgggcatagagccagtcctctaag

SEQ ID NO: 21443 - DNA, 118 bp, Homo sapiens
  MAP TO CHR19.3; EXPRESSED IN PLACENTA, SIGNAL = 1.9; EXPRESSED IN HELA, SIGNAL = 1.9; EXPRESSED IN HEART, SIGNAL = 2.2; EXPRESSED IN LUNG, SIGNAL = 2.6; EXPRESSED IN BONE MARROW, SIGNAL = 2.6; EXPRESSED IN FETAL LIVER, SIGNAL = 1.5; EXPRESSED IN ADULT LIVER, SIGNAL = 2.1; NT HIT: gi14763465, EVALUE 3.00e-60; SWISSPROT HIT: Q12982, EVALUE 1.40e-01; EST_HUMAN HIT: BF345891.1, EVALUE 5.00e-60
ctgggaagatcttcgtcctgccattcctccttcacgtccacgttttccatccggagcgtggcttcggtggtccccatgggagctgggaagaggcactggcttgaagcagggatgaccc

SEQ ID NO: 21444 - DNA, 125 bp, Homo sapiens
  MAP TO CHR16.3; EXPRESSED IN HELA, SIGNAL =   4; EXPRESSED IN HEART, SIGNAL = 2.1; EXPRESSED IN LUNG, SIGNAL = 4.3; EXPRESSED IN BONE MARROW, SIGNAL = 3.4; EXPRESSED IN FETAL LIVER, SIGNAL = 3.2; EXPRESSED IN ADULT LIVER, SIGNAL = 3.2; EXPRESSED IN PLACENTA, SIGNAL = 3.7; EST_HUMAN HIT: BF876353.1, EVALUE 3.00e-40; NT HIT: gi14600379, EVALUE 1.00e-01
tggccacccctcctggaacccagcctcctccagctcccccaagccctctgccttgggagcggacaccttagcagaagggccgtcctccagaccctttgcagccaggcctctctgctcacagatcc

SEQ ID NO: 21445 - DNA, 160 bp, Homo sapiens
  MAP TO CHR18.3; EXPRESSED IN HELA, SIGNAL =  11; EXPRESSED IN HEART, SIGNAL = 5.4; EXPRESSED IN BONE MARROW, SIGNAL = 2.2; EXPRESSED IN FETAL LIVER, SIGNAL = 5.1; EXPRESSED IN ADULT LIVER, SIGNAL = 2.2; EST_HUMAN HIT: AL602587.1, EVALUE 6.00e-85; SWISSPROT HIT: O43776, EVALUE 9.00e-26; NT HIT: gi14763185, EVALUE 4.00e-85
cctctttcttttcccgggattcactcttcatttgttccctatgccacatctttttaatgttcttcaactgtgatttagaaataacattccacctctcattttctttttgtgaatctacgtaaatggtaggaaatggttctttccctactgtcatcaaagc

SEQ ID NO: 21446 - DNA, 160 bp, Homo sapiens
  MAP TO CHR14.3; EXPRESSED IN ADULT LIVER, SIGNAL = 2.1; EXPRESSED IN HELA, SIGNAL = 2.7; EXPRESSED IN LUNG, SIGNAL = 3.5; EXPRESSED IN BRAIN, SIGNAL = 1.5; SWISSPROT HIT: P29805, EVALUE 5.80e+00; NT HIT: AF385715.1, EVALUE 5.50e-01; EST_HUMAN HIT: AI201032.1, EVALUE 1.30e-02
gctgcagtctcaggctaaagctgctgctggacaccctccacaaatacatccctcctcaaccacagccccagcttcatccacattggccaatccccatatcgattatatctcttcaaaatcagaaccctggaaaaaatcaaatcaagctttgtctgctcag

SEQ ID NO: 21447 - DNA, 195 bp, Homo sapiens
  MAP TO CHR16.3; EXPRESSED IN FETAL LIVER, SIGNAL = 1.2; EXPRESSED IN BRAIN, SIGNAL = 1.5; EXPRESSED IN ADULT LIVER, SIGNAL = 1.9; EXPRESSED IN PLACENTA, SIGNAL = 1.6; EXPRESSED IN LUNG, SIGNAL = 1.5; EXPRESSED IN BONE MARROW, SIGNAL = 1.8; SWISSPROT HIT: P16252, EVALUE 2.20e-01; EST_HUMAN HIT: BG548365.1, EVALUE 3.00e-78
gacccggagcgtctctgcttcatctccaccacgcttcagcccttccatgccccgctgggagggctggggacccagggccgctggaccaacatggagaggatgcagctgtgggccatgaggctggacctccgcgatctgcagcggcacctccgcttccaggtagagcccggccaccctccaccaccccagaccacg

SEQ ID NO: 21448 - DNA, 138 bp, Homo sapiens
  MAP TO CHR18.3; EXPRESSED IN FETAL LIVER, SIGNAL = 1.4; EXPRESSED IN ADULT LIVER, SIGNAL = 1.5; EXPRESSED IN BRAIN, SIGNAL = 1.5; EXPRESSED IN HEART, SIGNAL = 1.8; EXPRESSED IN HELA, SIGNAL = 1.1; EXPRESSED IN LUNG, SIGNAL = 1.4; SWISSPROT HIT: P91682, EVALUE 3.40e+00
ttttggtcctgagggccatggacatctgagagggattgaaatcggggtttgccccggtatcccttaccatcattgttgcttgggtgtgcttcttgccactttccataccgctgactgacccattgagcagcgaatggg

SEQ ID NO: 21449 - DNA, 102 bp, Homo sapiens
  MAP TO CHR19.3; EXPRESSED IN PLACENTA, SIGNAL = 1.2; EXPRESSED IN BRAIN, SIGNAL = 1.3; EXPRESSED IN ADULT LIVER, SIGNAL = 0.94; NT HIT: AK024429.1, EVALUE 1.00e-50; SWISSPROT HIT: P98174, EVALUE 3.60e+00; EST_HUMAN HIT: BG831713.1, EVALUE 1.00e-50
gtgcccccaaaagtaagcctgtcctagagcccctgacacccccacttgggtctcctcgacctcgagatgctagaagttttacccctgggcgaaggaacacag

SEQ ID NO: 21450 - DNA, 296 bp, Homo sapiens
  MAP TO CHR16.3; EXPRESSED IN LUNG, SIGNAL = 5.2; EXPRESSED IN FETAL LIVER, SIGNAL = 9.9; EXPRESSED IN BRAIN, SIGNAL = 6.1; EXPRESSED IN ADULT LIVER, SIGNAL =   5; EXPRESSED IN PLACENTA, SIGNAL = 7.5; EXPRESSED IN HEART, SIGNAL = 6.5; EXPRESSED IN HELA, SIGNAL = 5.9; SWISSPROT HIT: Q16254, EVALUE 2.00e-43; EST_HUMAN HIT: BG678821.1, EVALUE 0.00e+00; NT HIT: X86096.1, EVALUE 0.00e+00
gggtctcaatgggcagaagaagtaccagattcacctgaagagtgtgagtggtcccattgaggttctgctggtgaacaaggaggcatggagctcaccccctgtggctgtgcctgtgccaccacctgaagatttgctccagagcccatctgctgtttctacacctccacctctgcccaagcctgccctagcccagtcccaggaagcctcacgtccaaatagtcctcagctcactcccactgctgtccctggcagtgcagaagtccagggaatggctggcccagcagctgagatcacag

SEQ ID NO: 21451 - DNA, 197 bp, Homo sapiens
  MAP TO CHR18.3; EXPRESSED IN ADULT LIVER, SIGNAL = 0.95; EXPRESSED IN BRAIN, SIGNAL = 1.2; EXPRESSED IN FETAL LIVER, SIGNAL = 1.1; EXPRESSED IN BONE MARROW, SIGNAL = 1.7; NT HIT: M23865.1, EVALUE 7.00e-01; SWISSPROT HIT: P77518, EVALUE 5.60e+00; EST_HUMAN HIT: AW837480.1, EVALUE 2.60e-01
gaggaagaaagaggcgcttctattgctacttctactgctcttgatgcccccagtgcatcttcacatgctcctctttgtcctaaatggtcagtgcttggcactggtgcagctgcagctgcccgtcatcaggcttcccctggtgaccacttttcccagtcccttttcaatccattagttgacttcaggaagcaatacta

SEQ ID NO: 21452 - DNA, 183 bp, Homo sapiens
  MAP TO CHR14.3; EXPRESSED IN LUNG, SIGNAL = 2.2; EXPRESSED IN BONE MARROW, SIGNAL = 4.1; EXPRESSED IN ADULT LIVER, SIGNAL = 3.6; EXPRESSED IN BRAIN, SIGNAL = 5.2; EXPRESSED IN HELA, SIGNAL = 2.7; EXPRESSED IN PLACENTA, SIGNAL = 2.8; SWISSPROT HIT: P25873, EVALUE 1.10e+00; EST_HUMAN HIT: W87482.1, EVALUE 3.00e-90
tttccctgcctgagccctctcactgtttttgtgcctgcctttgttgtagaattctagatggcagcatgcttgcaacttgggaaggatgaggcccttgtctggagacattatccctatgagctctgaggtcttgtctccttctgtagcatccccaccaatgtggccaaagccaagggccctcat

SEQ ID NO: 21453 - DNA, 159 bp, Homo sapiens
  MAP TO CHR16.3; EXPRESSED IN ADULT LIVER, SIGNAL =   3; EXPRESSED IN PLACENTA, SIGNAL = 3.6; EXPRESSED IN HELA, SIGNAL = 4.8; EXPRESSED IN LUNG, SIGNAL = 4.9; EXPRESSED IN BONE MARROW, SIGNAL = 4.3; EXPRESSED IN FETAL LIVER, SIGNAL = 3.1; EXPRESSED IN BRAIN, SIGNAL = 3.8; NT HIT: AB053120.1, EVALUE 2.20e+00; SWISSPROT HIT: P09883, EVALUE 4.40e+00; EST_HUMAN HIT: AI655078.1, EVALUE 2.00e-01
tcaccccaccctctgggcggcagtgggcacagccctgagggacgccacagtgaatctgaacgctgccactgtctgagtgccagcgcaagcctgcgcctcaggtttctccagagggagtaaaacctcagggcctgctcttgctgtcacctgtgtgggata

SEQ ID NO: 21454 - DNA, 89 bp, Homo sapiens
  MAP TO CHR16.3; EXPRESSED IN ADULT LIVER, SIGNAL = 2.4; EXPRESSED IN BRAIN, SIGNAL = 3.1; EXPRESSED IN PLACENTA, SIGNAL =   3; EXPRESSED IN LUNG, SIGNAL = 2.6; EXPRESSED IN FETAL LIVER, SIGNAL = 3.1; EXPRESSED IN BONE MARROW, SIGNAL = 2.5
gaccgcatgggccatctggagtgggtctttctggagcgggtctttctggagctttctatgcattcatctaaacatgtatgtacagaggg

SEQ ID NO: 21455 - DNA, 151 bp, Homo sapiens
  MAP TO CHR18.3; EXPRESSED IN PLACENTA, SIGNAL = 1.2; EXPRESSED IN FETAL LIVER, SIGNAL = 1.2; EXPRESSED IN BONE MARROW, SIGNAL = 1.6; EXPRESSED IN ADULT LIVER, SIGNAL = 1.1; SWISSPROT HIT: Q9NYT6, EVALUE 2.60e+00
ctttggaaaatgtttgttattctagtagttttctcagaaggcacacactgtaaaacaaaacaaaaagtcaatgcagtagaggagaagcaagatgatgcacagtgttgggtgcacagaagatgccacctgctagtggttaaacttgattaat

SEQ ID NO: 21456 - DNA, 282 bp, Homo sapiens
  MAP TO CHR18.3; EXPRESSED IN BRAIN, SIGNAL = 2.1; EXPRESSED IN ADULT LIVER, SIGNAL = 1.7; SWISSPROT HIT: O08789, EVALUE 3.50e-01; NT HIT: AL163284.2, EVALUE 2.60e-01
cgaagggtgaatgcttcattttctaccaaaacacgccttccacgtgtggggatctccaacgggcgtctggagctcttggctggagaggctgcctctgccccagtgccaggtgcgctggagaaaacaggcatgggagcacaggaaggatcacggctgtcgcacaggaggcatggagctgacgggacctccaggggcacaggatggggtcaggataggcgaggacctttggatggcaggagatggcagagcattgagaaagaacagattctgcggagctgcgag

SEQ ID NO: 21457 - DNA, 143 bp, Homo sapiens
  MAP TO CHR16.3; EXPRESSED IN PLACENTA, SIGNAL = 3.1; EXPRESSED IN HELA, SIGNAL = 2.9; EXPRESSED IN FETAL LIVER, SIGNAL = 4.7; EXPRESSED IN BONE MARROW, SIGNAL = 3.9; EXPRESSED IN BRAIN, SIGNAL = 3.3; EXPRESSED IN ADULT LIVER, SIGNAL = 2.6; EST_HUMAN HIT: BG548048.1, EVALUE 1.80e-01; SWISSPROT HIT: Q10203, EVALUE 4.50e+00; NT HIT: U83462.1, EVALUE 1.20e-01
ttgcagaaagagggagaaaggaggggtgcctggctcctcagaacccggtttcactggctgcgtgttgagcctgacatcagactggtacggggaggacaggatggtggctttctgcagcagggagcctccgaggtggctcttcc

SEQ ID NO: 21458 - DNA, 152 bp, Homo sapiens
  MAP TO CHR14.3; EXPRESSED IN ADULT LIVER, SIGNAL =   3; EXPRESSED IN HELA, SIGNAL = 3.3; EXPRESSED IN PLACENTA, SIGNAL = 2.7; EXPRESSED IN LUNG, SIGNAL = 4.2; EXPRESSED IN BRAIN, SIGNAL = 2.4; NT HIT: gi7657147, EVALUE 3.30e-02; EST_HUMAN HIT: BG256699.1, EVALUE 1.20e-02; SWISSPROT HIT: P13983, EVALUE 8.80e-01
tgccgctcctcattcttattgtttcaacctgcaacccccaccacaagtcacaagccagtcagtcacccctcctcccacctcttcccgccctacaaggccggttctgcacagaggcctcacggtcaggtggcagcaccaagaccctcaagaag

SEQ ID NO: 21459 - DNA, 267 bp, Homo sapiens
  MAP TO CHR16.3; EXPRESSED IN BRAIN, SIGNAL = 1.1; EXPRESSED IN ADULT LIVER, SIGNAL = 0.92; EXPRESSED IN BONE MARROW, SIGNAL = 0.62; NT HIT: AB011128.2, EVALUE 0.00e+00; EST_HUMAN HIT: BE247362.1, EVALUE 0.00e+00; SWISSPROT HIT: Q9XHM1, EVALUE 3.70e-02
agctgagaagaagcctggaacttagtgtaaatctacaaaggaaacaaaaggattgttccagcgatgagtatgactctattgaggaagacatactctctgagcctgagccagaggacccggcactggtgggccatcccagacatgaccgccctccttccagtggcgactggactcagaaagatgttcacggggaacaggagacagaaggacgctcttctccaggcccagacaccctcgtggtgctggaatttaacccagcttccaaaa

SEQ ID NO: 21460 - DNA, 147 bp, Homo sapiens
  MAP TO CHR18.3; EXPRESSED IN FETAL LIVER, SIGNAL =   4; EXPRESSED IN ADULT LIVER, SIGNAL =   2; EXPRESSED IN HELA, SIGNAL = 3.3; EXPRESSED IN PLACENTA, SIGNAL = 2.5; EXPRESSED IN HEART, SIGNAL = 1.6; EXPRESSED IN LUNG, SIGNAL =   4; NT HIT: gi4507298, EVALUE 2.00e-62; EST_HUMAN HIT: AL530306.1, EVALUE 3.00e-62; SWISSPROT HIT: Q28141, EVALUE 7.70e+00
gtgttgctgaaggaccatttattactggagaaaacattgatacttccagtgaccttatgctggctcagatgctacagatggaatatgacagagaatatgatgcacagcttaggcgtgaagaaaaaaaattcaatggagatagcaaag

SEQ ID NO: 21461 - DNA, 142 bp, Homo sapiens
  MAP TO CHR18.3; EXPRESSED IN PLACENTA, SIGNAL = 2.3; EXPRESSED IN FETAL LIVER, SIGNAL = 2.7; EXPRESSED IN ADULT LIVER, SIGNAL =   2; EXPRESSED IN BRAIN, SIGNAL = 2.5; SWISSPROT HIT: Q98277, EVALUE 7.70e+00; NT HIT: AB037749.1, EVALUE 2.00e-74; EST_HUMAN HIT: BI459488.1, EVALUE 3.00e-74
aatttctgctgaaggaaatgtcagatcaagacacaagctgatgagtccaaaagctgatgttaaacttaagacttccagggtgactgatgcttcaatctccatggagtccttaaaaggcacaggagattcagtagatgaacag

SEQ ID NO: 21462 - DNA, 81 bp, Homo sapiens
  MAP TO CHR19.3; EXPRESSED IN BONE MARROW, SIGNAL = 1.5; EXPRESSED IN BRAIN, SIGNAL =   2; EXPRESSED IN ADULT LIVER, SIGNAL = 1.4; EXPRESSED IN PLACENTA, SIGNAL = 1.4
ttcatcagagacctttagggacgccttgcagccaggcctgtaatggccctgggcacagtgcacccagggtgagagcttcat

SEQ ID NO: 21463 - DNA, 170 bp, Homo sapiens
  MAP TO CHR16.3; EXPRESSED IN PLACENTA, SIGNAL = 1.1; EXPRESSED IN HELA, SIGNAL =   1; EXPRESSED IN LUNG, SIGNAL =   1; EXPRESSED IN ADULT LIVER, SIGNAL = 0.94; EXPRESSED IN BRAIN, SIGNAL = 1.1; SWISSPROT HIT: P57737, EVALUE 8.00e-27; NT HIT: gi13648926, EVALUE 2.00e-90; EST_HUMAN HIT: N39489.1, EVALUE 6.00e-76
ttccaagttccgccatgctcagggcactgtcctgcaccgagacagccacatcaccaacctcaaggggctcaacctcaccacacctggtgagagtgacggcttctgtgccaacaagctgcgtgtggccgtgccgctgctcagcagcgggggacaggtggctgtgcttgagg

SEQ ID NO: 21464 - DNA, 186 bp, Homo sapiens
  MAP TO CHR14.3; EXPRESSED IN ADULT LIVER, SIGNAL = 2.4; EXPRESSED IN PLACENTA, SIGNAL = 2.1; EXPRESSED IN HELA, SIGNAL = 2.3; EXPRESSED IN FETAL LIVER, SIGNAL = 2.4; EXPRESSED IN BONE MARROW, SIGNAL = 2.4; EXPRESSED IN BRAIN, SIGNAL = 3.1; NT HIT: U83905.1, EVALUE 6.50e-01; EST_HUMAN HIT: AI440017.1, EVALUE 2.40e-01; SWISSPROT HIT: Q51856, EVALUE 5.00e-01
ctgatctgttctgtctctcaactctgtgtccacaaactcctgaggatccttggttttgaagttcaagaataggagcagaggaatcttcggtgacagacagtggggacagttgtctactgatgccactgtgtgaactggggcagttggctcctggtttacatctagtgactgatgatctggaggtac

SEQ ID NO: 21465 - DNA, 306 bp, Homo sapiens
  MAP TO CHR18.3; EXPRESSED IN LUNG, SIGNAL = 1.1; EXPRESSED IN FETAL LIVER, SIGNAL = 1.5; EXPRESSED IN BONE MARROW, SIGNAL = 1.3; EXPRESSED IN BRAIN, SIGNAL = 1.4; EXPRESSED IN ADULT LIVER, SIGNAL = 1.2; EXPRESSED IN PLACENTA, SIGNAL = 1.3; EXPRESSED IN HELA, SIGNAL = 1.3; NT HIT: gi4557364, EVALUE 7.20e-02; EST_HUMAN HIT: AW404657.1, EVALUE 1.10e-01; SWISSPROT HIT: O27397, EVALUE 1.60e+00
tggaaactaagatcctcttatacgtcttccgaaagctccagggcatgcggagagtaatgtcccatcttcttcctggtacaatgttccacggctccttttcatcttccccttttggactataccagtattccagtattccagaccttttagaagtctctaaccagaagcagctgccaatttatggaaacacaaatgtccccatactccaggagacacatgctcttctagacatttatgccaaggcagacctgttagctcagcagccttctcatagagcaaaaagatgccagcctcccattttggcag

SEQ ID NO: 21466 - DNA, 82 bp, Homo sapiens
  MAP TO CHR16.3; EXPRESSED IN BRAIN, SIGNAL = 1.6; EXPRESSED IN ADULT LIVER, SIGNAL = 1.5; EXPRESSED IN PLACENTA, SIGNAL = 1.7; EXPRESSED IN HELA, SIGNAL = 1.6; EXPRESSED IN LUNG, SIGNAL = 1.6; EXPRESSED IN BONE MARROW, SIGNAL = 2.1; NT HIT: gi16164529, EVALUE 3.00e-38; SWISSPROT HIT: P57190, EVALUE 4.80e+00; EST_HUMAN HIT: AI064839.1, EVALUE 9.00e-39
cctgttgcagggaaaaaacaagacagtaggaagacgatcgaccataaattcccaaggaaggtcattctgagacacgtcaatc

SEQ ID NO: 21467 - DNA, 174 bp, Homo sapiens
  MAP TO CHR19.3; EXPRESSED IN FETAL LIVER, SIGNAL = 1.2; EXPRESSED IN ADULT LIVER, SIGNAL = 1.1; EXPRESSED IN PLACENTA, SIGNAL = 1.8; EXPRESSED IN HELA, SIGNAL = 1.4; SWISSPROT HIT: O42132, EVALUE 1.50e+00; NT HIT: AF033033.2, EVALUE 9.50e+00; EST_HUMAN HIT: AA280725.1, EVALUE 1.00e-46
cttcccttgggaatggcagctaccgcctcctccctccagggctgcaccatcagcgcagccatccgaatggggatgcgaattctctgcttggctccagccctggagcgggtctcccagcctggagagcgtgtccgaggaaggcttcttgcagcctgcgggcccagctgcctccat

SEQ ID NO: 21468 - DNA, 141 bp, Homo sapiens
  MAP TO CHR18.3; EXPRESSED IN HELA, SIGNAL = 1.1; EXPRESSED IN HEART, SIGNAL = 1.6; EXPRESSED IN ADULT LIVER, SIGNAL = 1.2; EXPRESSED IN BRAIN, SIGNAL = 1.7; EST_HUMAN HIT: BE389592.1, EVALUE 3.00e-43; SWISSPROT HIT: Q10322, EVALUE 2.60e+00; NT HIT: gi16158483, EVALUE 2.00e-43
tggacaggcgtatgctgtgccctaccagtactcgtatgcaggactttatggacagcagcctgctaaccaagtcatcattcaagagtgatatcgagacaatgacagtgacctggcagtgggcatgttggcaggagtggccat

SEQ ID NO: 21469 - DNA, 202 bp, Homo sapiens
  MAP TO CHR19.3; EXPRESSED IN PLACENTA, SIGNAL = 1.1; EXPRESSED IN ADULT LIVER, SIGNAL = 0.93; NT HIT: AF055982.1, EVALUE 1.00e-110; SWISSPROT HIT: O60259, EVALUE 5.00e-22; EST_HUMAN HIT: BE501242.1, EVALUE 1.00e-110
gggcgattctggaggccccctggtgtgtgatggtgcactccagggcatcacatcctggggctcagacccctgtgggaggtccgacaaacctggcgtctataccaacatctgccgctacctggactggatcaagaagatcataggcagcaagggctgattctaggataagcactagatctcccttaataaactcacaactctc

SEQ ID NO: 21470 - DNA, 144 bp, Homo sapiens
  MAP TO CHR14.3; EXPRESSED IN PLACENTA, SIGNAL =  10; EXPRESSED IN HELA, SIGNAL =  11; EXPRESSED IN HEART, SIGNAL =  10; EXPRESSED IN FETAL LIVER, SIGNAL =  17; EXPRESSED IN BONE MARROW, SIGNAL =  17; EXPRESSED IN BRAIN, SIGNAL =  12; EXPRESSED IN LUNG, SIGNAL = 8.5; EXPRESSED IN ADULT LIVER, SIGNAL = 8.4; EST_HUMAN HIT: AW991991.1, EVALUE 2.00e-10; NT HIT: gi15834625, EVALUE 1.90e+00
tgacttccaaacccagtttggatcagaaaattgctcagagaactcagagagctcaaaacacaaatccatggagctttggaatccaagagagaagttatgatgatccccagttgctgcaagagagcaatggacacaatgggcccg

SEQ ID NO: 21471 - DNA, 140 bp, Homo sapiens
  MAP TO CHR14.3; EXPRESSED IN HELA, SIGNAL = 1.5; EXPRESSED IN FETAL LIVER, SIGNAL = 1.6; EXPRESSED IN BRAIN, SIGNAL = 1.9; EXPRESSED IN ADULT LIVER, SIGNAL = 1.2; EXPRESSED IN PLACENTA, SIGNAL = 1.3; EST_HUMAN HIT: BI524894.1, EVALUE 1.80e-01; SWISSPROT HIT: O35569, EVALUE 6.80e-01
gaaagccaaagccatcaagctccacagggacctgggcctgggattggggaagagcttaggggagcttatcagagtcagcagcgactctacccaacactgagtggacaactggtgtcaaggcagcagcagcacatgttttt

SEQ ID NO: 21472 - DNA, 235 bp, Homo sapiens
  MAP TO CHR18.3; EXPRESSED IN FETAL LIVER, SIGNAL =  11; EXPRESSED IN ADULT LIVER, SIGNAL = 1.3; EXPRESSED IN BRAIN, SIGNAL = 2.5; EXPRESSED IN HELA, SIGNAL = 3.3; SWISSPROT HIT: P12750, EVALUE 6.00e-30; EST_HUMAN HIT: AW993714.1, EVALUE 3.00e-57; NT HIT: AB015610.1, EVALUE 7.00e-60
atgctggcaccatctgctgccctggccctcatcaaggtgaatgacatcgttcagactgacttggagactggcaagattactgatttcatcaggttcaacactggtaacctgtgtatggtgactggaggggctaacctgggaaggattggtgcaatcaccaacagagaaaaacatcctggatttttcgatgtggttcatgtaaaagatgccaacagcaacagctttgctacctgac

SEQ ID NO: 21473 - DNA, 165 bp, Homo sapiens
  MAP TO CHR18.3; EXPRESSED IN HEART, SIGNAL =  12; EXPRESSED IN ADULT LIVER, SIGNAL = 1.2; SWISSPROT HIT: P52179, EVALUE 8.00e-27; NT HIT: gi14762609, EVALUE 2.00e-87; EST_HUMAN HIT: T57005.1, EVALUE 9.00e-78
ccttgtccagagagatccactgtcttctgatgtccagttttgccatcaaagagctccatgacatacttccctttgtcattcggggtgggctcgttgatttgtagccagatctgctctccagtgaccccggtcttaactctgtctgagtacctaatggcggaccca

SEQ ID NO: 21474 - DNA, 182 bp, Homo sapiens
  MAP TO CHR16.3; EXPRESSED IN BRAIN, SIGNAL = 1.3; EXPRESSED IN ADULT LIVER, SIGNAL = 1.1; EXPRESSED IN PLACENTA, SIGNAL = 1.2; EXPRESSED IN BONE MARROW, SIGNAL = 0.76; NT HIT: X87783.1, EVALUE 1.60e-01; SWISSPROT HIT: P78559, EVALUE 8.50e-01
gtgctctgggctctgaacagggcaagggtagacacagggatggcatggttgaggcagaacctggaagggcatgggtttcaggaagtggggtttattacagtccaaatgacaaaaccttctgtgccgagttgcatgccgacagtgctcagactgcagcaaggggatggatgcagccccttctg

SEQ ID NO: 21475 - DNA, 275 bp, Homo sapiens
  MAP TO CHR16.3; EXPRESSED IN HELA, SIGNAL = 1.6; EXPRESSED IN LUNG, SIGNAL = 1.3; EXPRESSED IN ADULT LIVER, SIGNAL = 2.3; NT HIT: gi11426758, EVALUE 2.50e-01; SWISSPROT HIT: P14349, EVALUE 7.40e-02
ccaagcaccaaaggcgatgctggcaagcgggagacggtccacagccactcaccagcagccagaagccaggctcaggacagccaggcctcagcttacacagaggccaccaaagaatggcccggcaggatgccaaacctcatttatctgagcggagcaaggccgcctggtcagtgtccactccacacccaggccctcctctctttgctgcggccacagcagacacgccagctgccccatcgctgcacaatgccaagcctccgtccacctcgccctga

SEQ ID NO: 21476 - DNA, 154 bp, Homo sapiens
  MAP TO CHR19.3; EXPRESSED IN ADULT LIVER, SIGNAL =   5; EXPRESSED IN HELA, SIGNAL = 5.8; EXPRESSED IN PLACENTA, SIGNAL = 5.5; EXPRESSED IN LUNG, SIGNAL =   6; EXPRESSED IN HEART, SIGNAL = 2.6; EXPRESSED IN BRAIN, SIGNAL = 3.4; NT HIT: gi13430867, EVALUE 1.00e-07; EST_HUMAN HIT: BI825710.1, EVALUE 3.00e-68; SWISSPROT HIT: Q20799, EVALUE 3.00e-10
gtctactcctccaagacgaacttcaccaacctgctgggggggctacagagcatggtccaggagggcggcttccgctccctgtggcggggcaacggcatcaacgtgctcaagattgctcctgagtatgccatcaagttctccgtattcgagcagg

SEQ ID NO: 21477 - DNA, 170 bp, Homo sapiens
  MAP TO CHR16.3; EXPRESSED IN ADULT LIVER, SIGNAL = 1.4; EXPRESSED IN PLACENTA, SIGNAL = 1.8; EXPRESSED IN HELA, SIGNAL = 3.1; EXPRESSED IN LUNG, SIGNAL = 2.7; EXPRESSED IN FETAL LIVER, SIGNAL =   2; SWISSPROT HIT: P43635, EVALUE 5.70e+00; NT HIT: gi14775225, EVALUE 2.00e-90; EST_HUMAN HIT: BI760054.1, EVALUE 3.00e-90
cctgaaggagaagacttcttggtgatggaaagcttaagctgcctagaagaacccacttcaaagtttggttttttgcctgtgatctgaacaaacagcaggttgtcactttcatgaccaaggtgttctcgaacagactgtacttcctcaggggttaggggctcccgctgcag

SEQ ID NO: 21478 - DNA, 231 bp, Homo sapiens
  MAP TO CHR18.3; EXPRESSED IN BONE MARROW, SIGNAL = 2.2; EXPRESSED IN FETAL LIVER, SIGNAL = 1.4; EXPRESSED IN ADULT LIVER, SIGNAL =   1; EXPRESSED IN BRAIN, SIGNAL = 1.5; EXPRESSED IN PLACENTA, SIGNAL = 1.2; EST_HUMAN HIT: BF514307.1, EVALUE 1.00e-127; SWISSPROT HIT: P08154, EVALUE 5.30e-01
cttaaagtcaatatcattacttctgatatttactgtcagctccgtggcgccggtgaagtgggaaagttcatccatctctcctaacgctgctgcgttgccaagagtgtccctctccccacctttcctttgtgcgattccagttaattgtttggctgtgttaacaccccccacacccagcccatcttccagcagagtcagggggagggtgggcttgctgagaggaggcggcat

SEQ ID NO: 21479 - DNA, 227 bp, Homo sapiens
  MAP TO CHR16.3; EXPRESSED IN LUNG, SIGNAL = 3.2; EXPRESSED IN BONE MARROW, SIGNAL = 3.7; EXPRESSED IN ADULT LIVER, SIGNAL = 2.1; EXPRESSED IN HELA, SIGNAL = 3.3; EST_HUMAN HIT: BG702245.1, EVALUE 1.00e-124; SWISSPROT HIT: Q9NYJ7, EVALUE 3.10e+00; NT HIT: AF362002.1, EVALUE 2.10e-01
agtgagcagaggccggccatggccagcctggggctgctgctcctgctcttactgacagcactgccaccgctgtggtcctcctcactgcctgggctggacactgctgaaagtaaagccaccattgcagacctgatcctgtctgcgctggagagagccaccgtcttcctagaacagaggctgcctgaaatcaacctggatggcatggtgggggtccgagtgctggaagg

SEQ ID NO: 21480 - DNA, 168 bp, Homo sapiens
  MAP TO CHR18.3; EXPRESSED IN FETAL LIVER, SIGNAL =   1; EXPRESSED IN ADULT LIVER, SIGNAL = 1.6; EXPRESSED IN BRAIN, SIGNAL = 1.4; NT HIT: AJ249089.1, EVALUE 5.80e-01; EST_HUMAN HIT: BG766934.1, EVALUE 2.20e-01; SWISSPROT HIT: P20784, EVALUE 4.40e+00
gttccagaccctcactgtcactttgttaccctacaactatattcaatttaacaaaaagggaccctcagagctgggaagggaccatctggaccagctagtccaggaagctcagggtgtgttcctaacagtgtccaaagcagactccatagagttgggcttggagaaggg

SEQ ID NO: 21481 - DNA, 79 bp, Homo sapiens
  MAP TO CHR19.3; EXPRESSED IN ADULT LIVER, SIGNAL =   1; EXPRESSED IN PLACENTA, SIGNAL = 1.2; NT HIT: gi16175862, EVALUE 4.00e-37; SWISSPROT HIT: O83515, EVALUE 3.20e-01; EST_HUMAN HIT: BF183470.1, EVALUE 3.50e-01
gagacctgtgccaggatcctcctgtatcgaggtgccgacaaggatgtgaagaacaacaacggacagacccccttccagg

SEQ ID NO: 21482 - DNA, 319 bp, Homo sapiens
  MAP TO CHR19.3; EXPRESSED IN ADULT LIVER, SIGNAL = 1.4; EXPRESSED IN PLACENTA, SIGNAL = 1.6; EXPRESSED IN HEART, SIGNAL =   2; EXPRESSED IN BONE MARROW, SIGNAL = 2.3; NT HIT: gi14769193, EVALUE 0.00e+00; SWISSPROT HIT: P48378, EVALUE 4.00e-16; EST_HUMAN HIT: AW137466.1, EVALUE 8.00e-86
gatgacatgggcgatgagcagcgtggcagcgaggcgggcccagacgcccgcagcctgggtgagcccctggtaaagcgggagcgcagtgaccccaaccactccctgcagggcatctagcagccccggccggcgcctcctcgaggttccaaaagatgccgcctggtcactctgggaacctggatttcaccggctccaccaaattagtgcctcttagatgatgtgatgtttactttgactcaagcgggggctcccggggtcagtgttcaagaaggaaagcagttgttgaagctacagaagcccaggccagggctcccactgg

SEQ ID NO: 21483 - DNA, 132 bp, Homo sapiens
  MAP TO CHR14.3; EXPRESSED IN LUNG, SIGNAL = 1.4; EXPRESSED IN BONE MARROW, SIGNAL = 0.99; EXPRESSED IN ADULT LIVER, SIGNAL = 1.2; NT HIT: gi14784510, EVALUE 2.00e-68; SWISSPROT HIT: Q12815, EVALUE 5.20e-01; EST_HUMAN HIT: BI829562.1, EVALUE 2.00e-68
acaagttggatggcttgaggactggtactaaaaggaaacgtgactgggaggccattgccagcagaatggaggattatcttcagctccccgatgattatgatactcgtgcttctgagcctgggaagaagaggg

SEQ ID NO: 21484 - DNA, 115 bp, Homo sapiens
  MAP TO CHR18.3; EXPRESSED IN BRAIN, SIGNAL =   3; EXPRESSED IN LUNG, SIGNAL = 3.5; EXPRESSED IN ADULT LIVER, SIGNAL = 3.9; EXPRESSED IN PLACENTA, SIGNAL = 3.8; EXPRESSED IN HELA, SIGNAL = 3.9; NT HIT: U49641.1, EVALUE 2.40e-02; SWISSPROT HIT: Q62865, EVALUE 4.60e+00; EST_HUMAN HIT: AW080957.1, EVALUE 2.20e+00
gcgcacggcacacgatagacggccctggagttctgtggggacttttcgcagccgaactctgttgtctaatggggtttccgctggcgtctggcacactctcctgcatttcacccat

SEQ ID NO: 21485 - DNA, 244 bp, Homo sapiens
  MAP TO CHR19.3; EXPRESSED IN BONE MARROW, SIGNAL = 2.9; EXPRESSED IN FETAL LIVER, SIGNAL = 2.3; EXPRESSED IN BRAIN, SIGNAL = 2.1; EXPRESSED IN ADULT LIVER, SIGNAL = 3.1; EXPRESSED IN PLACENTA, SIGNAL = 2.8; EXPRESSED IN HELA, SIGNAL = 5.9; EST_HUMAN HIT: BE746350.1, EVALUE 0.00e+00; NT HIT: gi14769538, EVALUE 0.00e+00; SWISSPROT HIT: Q07283, EVALUE 6.00e-01
cagcttcctcctgctctcccgaagcctggccatcactggtctcatcctctttggcagcctggctcgagccggcctcctggcttgagctggcccctgaagcctgttctagtttctgcttcttagcagcctggccctccgtaatcttctccaggagctcctgacgacgggtctcccgggcctcagctgccaaggcgctctgctcctggaagctctcctcttgctggcgcttgaaggatgtcagggc

SEQ ID NO: 21486 - DNA, 191 bp, Homo sapiens
  MAP TO CHR19.3; EXPRESSED IN LUNG, SIGNAL = 1.3; EXPRESSED IN BONE MARROW, SIGNAL = 1.1; EXPRESSED IN ADULT LIVER, SIGNAL = 1.3; EXPRESSED IN BRAIN, SIGNAL = 1.2; EXPRESSED IN HELA, SIGNAL = 0.99; EST_HUMAN HIT: BE974146.1, EVALUE 9.90e-01; SWISSPROT HIT: P31361, EVALUE 1.10e+00
tctggccgcctgtccattccccaaacttgagttggaggtagcggtgttcacacgctgcttcctcactggtatagccagaatcagcctggtgatagggaatggctacgaacagcaacccgtgtgtctggtggtcgggggcagtggggcggtcctgcctggaatggggcttgtgtgtcttgtctgtttgcgat

SEQ ID NO: 21487 - DNA, 163 bp, Homo sapiens
  MAP TO CHR16.3; EXPRESSED IN ADULT LIVER, SIGNAL = 1.9; EXPRESSED IN HELA, SIGNAL = 3.6; NT HIT: gi16164562, EVALUE 7.00e-87; EST_HUMAN HIT: BG260802.1, EVALUE 1.00e-86; SWISSPROT HIT: P56945, EVALUE 3.00e-27
cctcctggccatactggctgggaagcagcccccgaaccgggggcacatcatagatgtcctgtggccccggggccagcaggtgtcgcgggatgtcgtactcgtcctgctccggctgggcggcctcgtatacatagccctgccccacgcgggtgggcaccaccac

SEQ ID NO: 21488 - DNA, 325 bp, Homo sapiens
  MAP TO CHR18.3; EXPRESSED IN PLACENTA, SIGNAL = 2.8; EXPRESSED IN HEART, SIGNAL = 3.7; EXPRESSED IN BONE MARROW, SIGNAL = 5.3; EXPRESSED IN FETAL LIVER, SIGNAL = 3.2; EXPRESSED IN LUNG, SIGNAL = 8.2; EXPRESSED IN ADULT LIVER, SIGNAL = 2.2; EXPRESSED IN BRAIN, SIGNAL = 2.3; SWISSPROT HIT: P13285, EVALUE 1.40e+00; NT HIT: AF130253.1, EVALUE 7.60e-02; EST_HUMAN HIT: BG910551.1, EVALUE 4.40e-01
gttagctatcctaaatacgtttttacctttttaactcttaattatattaagccatttgcaagaatgggaaaaagcaggaaattcataggtggtgttgaaattgctgattctacacaaaggtaccagaatgtctacatttcctctgtaaatgtcaaaggaaactttggaaacccacctcagagttggctggtgattattcggacaggttatcatcctgtctgcaaccttctagttctcttagttcataccaagcagcatgatattccatgtcctgcacaaaggagagcaccaaaacagccttcacctgctgcgtatgccccactct

SEQ ID NO: 21489 - DNA, 251 bp, Homo sapiens
  MAP TO CHR18.3; EXPRESSED IN PLACENTA, SIGNAL = 1.8; EXPRESSED IN BONE MARROW, SIGNAL = 1.8; EXPRESSED IN FETAL LIVER, SIGNAL = 2.7; EXPRESSED IN ADULT LIVER, SIGNAL = 2.3; EXPRESSED IN BRAIN, SIGNAL = 1.9; SWISSPROT HIT: P54155, EVALUE 1.10e+00; NT HIT: AY058385.1, EVALUE 2.30e-01; EST_HUMAN HIT: AV731894.1, EVALUE 8.50e-02
caagattcctggggaatttcaggtccaagagaaggtttggtgttaacttccccaaactcagtctccttcctctctttccactccactaaggcataggggagacccacttgcccagactcagttttcagcttgtgggacaaagctgtgttcttggctctagaagaagcttctgttctctccaagctctgtgttgtttcctttccttcataactttgctccgccaatgggccaagcatggctccattctgctc

SEQ ID NO: 21490 - DNA, 167 bp, Homo sapiens
  MAP TO CHR18.3; EXPRESSED IN PLACENTA, SIGNAL = 1.1; EXPRESSED IN FETAL LIVER, SIGNAL = 1.7; EXPRESSED IN BONE MARROW, SIGNAL = 0.8; EXPRESSED IN ADULT LIVER, SIGNAL = 0.94; SWISSPROT HIT: P73079, EVALUE 1.90e+00; NT HIT: U78553.1, EVALUE 1.50e-01; EST_HUMAN HIT: AV708973.1, EVALUE 8.50e-01
tagcctctttttctgttcatcagcagaatcattttcccagtgtcagcatctggggtcactgagacgggccagccagtcccacttccacatgcgggttcctggggcttctcgcactggttgtgttggaggaagttaaacattttctcggacgtggtgttgctccctcc

SEQ ID NO: 21491 - DNA, 89 bp, Homo sapiens
  MAP TO CHR18.3; EXPRESSED IN BRAIN, SIGNAL =   1; EXPRESSED IN ADULT LIVER, SIGNAL = 1.3; EXPRESSED IN HELA, SIGNAL = 0.88; NT HIT: AE000049.2, EVALUE 2.80e-01; EST_HUMAN HIT: BF685156.1, EVALUE 4.00e-01
cttaagtggaacacttctagttccttttataccatggtaactgaacttctgggcatcatagtttgtttctgtcatcagaaccagcagtc

SEQ ID NO: 21492 - DNA, 209 bp, Homo sapiens
  MAP TO CHR18.3; EXPRESSED IN FETAL LIVER, SIGNAL = 1.6; EXPRESSED IN BRAIN, SIGNAL = 1.3; EXPRESSED IN ADULT LIVER, SIGNAL = 1.6; EXPRESSED IN PLACENTA, SIGNAL =   1; NT HIT: AE001789.1, EVALUE 4.80e-02; EST_HUMAN HIT: AW474669.1, EVALUE 1.10e+00; SWISSPROT HIT: O67531, EVALUE 2.20e-01
taagattggtgagtctaggaagaaaggaaaagtcacaaggatagaaccacaagacccagcggaaatgacaaaggctggtcagagaggcagggaaaccaagaagagtgtcacatcagccaaaggagacatgactatcaagaaagagagaaggtcaacagctccaaatgatggggagctcaaatggactgaggtcattgctggctttggtg

SEQ ID NO: 21493 - DNA, 353 bp, Homo sapiens
  MAP TO CHR16.3; EXPRESSED IN PLACENTA, SIGNAL = 2.6; EXPRESSED IN FETAL LIVER, SIGNAL = 1.8; EXPRESSED IN LUNG, SIGNAL = 4.2; EXPRESSED IN BONE MARROW, SIGNAL = 4.5; EXPRESSED IN ADULT LIVER, SIGNAL = 2.3; SWISSPROT HIT: P04554, EVALUE 1.00e-10; NT HIT: M60332.1, EVALUE 0.00e+00; EST_HUMAN HIT: AL541155.1, EVALUE 0.00e+00
cctctgcgatgcctcctccggtgcctgcaggagcgtcttttgcgccttctgcaggagcgatgctgccgcctgtggatccggtgcagcctccttcgagagcagtgtctgcgcctatagtgagactggccatgggtcctctcgtagacctcgacgtgctccgggctcagcccttgctcctcttggccgtggtgtccttgctcttgcccatgcaactgctgcctgtacacctcgtgcgagcgttcgctcaggctcctcacgcggtatcggaccatggtgttgggagatctggtggctcctgggctgaggctgcagtgggccctggagtaggggaggagggcggaggcctgcccacc

SEQ ID NO: 21494 - DNA, 88 bp, Homo sapiens
  MAP TO CHR14.3; EXPRESSED IN FETAL LIVER, SIGNAL =   3; EXPRESSED IN ADULT LIVER, SIGNAL = 2.2; EXPRESSED IN BRAIN, SIGNAL = 2.6; EXPRESSED IN HELA, SIGNAL = 2.7; EXPRESSED IN PLACENTA, SIGNAL = 2.8; EST_HUMAN HIT: BF698740.1, EVALUE 1.00e-01; NT HIT: gi14772816, EVALUE 1.10e+00
tggcgtctaccctgtgctccactgtgtatcccagaggagagcatctttactgtggaatggacttccagctgactcatgttggggaaag

SEQ ID NO: 21495 - DNA, 393 bp, Homo sapiens
  MAP TO CHR18.3; EXPRESSED IN HEART, SIGNAL = 2.6; EXPRESSED IN BRAIN, SIGNAL =   4; EXPRESSED IN ADULT LIVER, SIGNAL = 1.6; EXPRESSED IN PLACENTA, SIGNAL = 1.5; EXPRESSED IN HELA, SIGNAL = 1.6; EST_HUMAN HIT: BI602716.1, EVALUE 0.00e+00; SWISSPROT HIT: Q9XGW1, EVALUE 1.00e-03
acgtactcctcctgctgcagcagggcccacaggctggccagctgtccccgccagcgtgggccccgcctgcccggccaccacggccccaggctgctgttggacaactccaggcccagagcgctcttgacctccccagccaccatcaggaggagttcggcctcgggcatgtcctggccaccctcccctgcctcctcttccaacaggctgaggggcgggaagctggagaaggcctcctccttggacttgaggaccacgggccggccgcgccagtcggcctgcagcaccttcttgcctctgttgtagtgcaggcagcgttggaacagcagctctcccgccacacacaggtcctcgcagaggtccccggccagcgtgccgccctggtagtcctggcac

SEQ ID NO: 21496 - DNA, 309 bp, Homo sapiens
  MAP TO CHR16.3; EXPRESSED IN HELA, SIGNAL = 2.9; EXPRESSED IN LUNG, SIGNAL = 3.2; EXPRESSED IN ADULT LIVER, SIGNAL = 1.6; SWISSPROT HIT: P51511, EVALUE 1.00e-58; NT HIT: gi4505210, EVALUE 0.00e+00; EST_HUMAN HIT: AW167539.1, EVALUE 0.00e+00
ccatgcaggtcagtgctggagaaggtccagggctcatctgcgtcaaaatgggtgtccccgcctaggccggggccagggaaataggcgtgggccagaaagccaccggtgccatcaaacggcgagctgtcgccgtggaagccagaggcaaagagtaccatgatgtcggcctccttctgtcgccgcagccggatgtcctcatagggcacctcctggaagaccaggggcgtggcctgctcccacacgcggaaggccctgcgcaccgcctccatcgagtggtaccagcccaacttctccgtgtagttctggatg

SEQ ID NO: 21497 - DNA, 89 bp, Homo sapiens
  MAP TO CHR16.3; EXPRESSED IN PLACENTA, SIGNAL = 1.3; EXPRESSED IN BONE MARROW, SIGNAL = 1.9; EXPRESSED IN BRAIN, SIGNAL = 1.1; EXPRESSED IN ADULT LIVER, SIGNAL = 0.96; SWISSPROT HIT: Q06583, EVALUE 3.60e+00; NT HIT: gi14740772, EVALUE 3.00e-04; EST_HUMAN HIT: AI761203.1, EVALUE 4.00e-32
atgctggagcagcgactggcccgggagatccgtgccctggagagaagcaaggagcagctgctctcggagagtgagcctcccgcgccagg

SEQ ID NO: 21498 - DNA, 94 bp, Homo sapiens
  MAP TO CHR16.3; EXPRESSED IN FETAL LIVER, SIGNAL =  30; EXPRESSED IN HEART, SIGNAL =  25; EXPRESSED IN ADULT LIVER, SIGNAL =  29; EXPRESSED IN BRAIN, SIGNAL =  27; EXPRESSED IN HELA, SIGNAL =  32; SWISSPROT HIT: P40222, EVALUE 2.10e+00; NT HIT: AF109907.1, EVALUE 7.40e-02; EST_HUMAN HIT: BI000622.1, EVALUE 1.10e-01
gaagactggagcaaagatctggaggacgtgggaatggagaaagctgcattccatgaagaggaagcagcaagagccaaaggctcaaggcaggagt

SEQ ID NO: 21499 - DNA, 196 bp, Homo sapiens
  MAP TO CHR19.3; EXPRESSED IN FETAL LIVER, SIGNAL = 1.8; EXPRESSED IN ADULT LIVER, SIGNAL = 2.3; EXPRESSED IN HELA, SIGNAL = 6.8; SWISSPROT HIT: P41987, EVALUE 1.90e+00; NT HIT: gi11342675, EVALUE 1.00e-106; EST_HUMAN HIT: BG746727.1, EVALUE 1.00e-105
gactcccacgtccttatagagctgcacaagtcaggttttgcccgcccgggcgacgtggaattcgaggacttcagccagcccatgaaccgtgcaccctccgacagcagtctgggcaccccctcggatggacggcctgaactccgaggcccgggtcgcagccgcaccaagcgctggccttttggcaagaagaacaagg

SEQ ID NO: 21500 - DNA, 151 bp, Homo sapiens
  MAP TO CHR14.3; EXPRESSED IN PLACENTA, SIGNAL =   1; EXPRESSED IN BONE MARROW, SIGNAL = 1.3; EXPRESSED IN ADULT LIVER, SIGNAL =   1; SWISSPROT HIT: P06105, EVALUE 2.60e+00; NT HIT: AF313413.1, EVALUE 3.30e-02; EST_HUMAN HIT: BI835903.1, EVALUE 4.90e-02
aaagagctcattagatgctggccatgatggtagtgatgataatgacagtgaccagagaggcaaagtaagtatcccaaattcacacagctggctagtggatgagcaggaaatagaatctgagtataatgtcgcttctgctatagcatccctg

SEQ ID NO: 21501 - DNA, 212 bp, Homo sapiens
  MAP TO CHR19.3; EXPRESSED IN PLACENTA, SIGNAL = 1.7; EXPRESSED IN HEART, SIGNAL = 3.4; EXPRESSED IN HELA, SIGNAL = 5.8; EXPRESSED IN FETAL LIVER, SIGNAL =   5; EXPRESSED IN BONE MARROW, SIGNAL = 2.4; EXPRESSED IN ADULT LIVER, SIGNAL = 2.1; EST_HUMAN HIT: BE797740.1, EVALUE 1.00e-113; SWISSPROT HIT: P48674, EVALUE 9.50e-02; NT HIT: L43631.1, EVALUE 1.00e-113
gaggatgttgagaccagtctggagaacttgcaggacatcgacatcatggatatcagtgtgttggatgaagcagaaattgataatggaagcgttgcagattgtgtcgaagacgatgatgctgataacctccaggagtccctgtcggatagtagagagctagtcgagggggaaatgaaagagcttccggagcagcttcaggaacatgctgtagg

SEQ ID NO: 21502 - DNA, 106 bp, Homo sapiens
  MAP TO CHR18.3; EXPRESSED IN BONE MARROW, SIGNAL = 1.7; EXPRESSED IN ADULT LIVER, SIGNAL = 2.1; EXPRESSED IN PLACENTA, SIGNAL = 1.8; EXPRESSED IN HELA, SIGNAL =   2; EXPRESSED IN HEART, SIGNAL = 1.6; NT HIT: U56089.1, EVALUE 3.40e-01; EST_HUMAN HIT: BF690072.1, EVALUE 7.80e+00; SWISSPROT HIT: P07969, EVALUE 4.70e+00
tgctggggactctggggattctctgactctgcaatgtccccaactcctgctctccagtcagacctgcaccattgcatctgcagctagctctgcagtcatgccccaa

SEQ ID NO: 21503 - DNA, 166 bp, Homo sapiens; identical to SEQ ID NO: 21180
  MAP TO CHR14.3; EXPRESSED IN ADULT LIVER, SIGNAL = 1.5; EXPRESSED IN PLACENTA, SIGNAL =   2; EST_HUMAN HIT: BE172224.1, EVALUE 3.00e-53; SWISSPROT HIT: P08799, EVALUE 1.50e+00

SEQ ID NO: 21504 - DNA, 75 bp, Homo sapiens
  MAP TO CHR19.3; EXPRESSED IN HELA, SIGNAL = 6.1; EXPRESSED IN LUNG, SIGNAL = 3.3; EXPRESSED IN BRAIN, SIGNAL = 7.2; EXPRESSED IN ADULT LIVER, SIGNAL = 4.4; SWISSPROT HIT: P36954, EVALUE 3.00e-09; NT HIT: gi15308157, EVALUE 9.00e-35; EST_HUMAN HIT: AI879141.1, EVALUE 1.00e-34
gtgccggaactgtgattaccagcaggaggccgacaacagctgcatctatgtcaacaagatcacgcacgaagtgga

SEQ ID NO: 21505 - DNA, 151 bp, Homo sapiens
  MAP TO CHR14.3; EXPRESSED IN ADULT LIVER, SIGNAL = 3.4; EXPRESSED IN BRAIN, SIGNAL = 4.3; EXPRESSED IN HELA, SIGNAL = 3.5; EXPRESSED IN PLACENTA, SIGNAL = 3.5; EXPRESSED IN BONE MARROW, SIGNAL = 4.3; NT HIT: AB009875.1, EVALUE 2.00e+00
cataagtcatgctccgtcataaccaggaggatggtgtggtcatgtgagtgggatgggaactgaagggagacctgactctgacttctgcagccttgccagtcctgagcctggggcagcagcattagttcgggttggggctggtggtgcttgg

SEQ ID NO: 21506 - DNA, 355 bp, Homo sapiens
  MAP TO CHR19.3; EXPRESSED IN HEART, SIGNAL =  35; EXPRESSED IN BONE MARROW, SIGNAL =  12; EXPRESSED IN ADULT LIVER, SIGNAL =  37; EXPRESSED IN HELA, SIGNAL = 1.9e+02; EST_HUMAN HIT: BI224253.1, EVALUE 0.00e+00; SWISSPROT HIT: P13639, EVALUE 6.00e-66; NT HIT: M19997.1, EVALUE 0.00e+00
gaaatctgacccggtcgtctcgtaccgcgagacggtcagtgaagagtcgaacgtgctctgcctctccaagtcccccaacaagcacaaccggctgtacatgaaggcgcggcccttccccgacggcctggccgaggacatcgataaaggcgaggtgtccgcccgtcaggagctcaagcagcgggcgcgctacctggccgagaagtacgagtgggacgtggctgaggcccgcaagatctggtgctttgggcccgacggcaccggccccaacatcctcaccgacatcaccaagggtgtgcagtacctcaacgagatcaaggacagtgtggtggccggcttccagtgggccaccaaggag

SEQ ID NO: 21507 - DNA, 225 bp, Homo sapiens
  MAP TO CHR16.3; EXPRESSED IN HELA, SIGNAL = 4.5; EXPRESSED IN PLACENTA, SIGNAL = 4.1; EXPRESSED IN FETAL LIVER, SIGNAL = 5.2; EXPRESSED IN BONE MARROW, SIGNAL =   4; EXPRESSED IN ADULT LIVER, SIGNAL = 5.4; EXPRESSED IN BRAIN, SIGNAL = 7.1; SWISSPROT HIT: P16540, EVALUE 8.50e-01; NT HIT: gi6005979, EVALUE 1.00e-76; EST_HUMAN HIT: BE541391.1, EVALUE 2.00e-76
ctgaatgccatcccagtcgtggtgcagtctctgcccatggtgtatactactttgcctgcaaatgagggccctgcacccaatacagtcccactcattggaggagatggtacaaatgctggatcagtgaaagttgaccccgctttcatgtctctactggagattccaagtgacagtgaggagagtgcaattaagagtggatcctcaatctcacagagtctgcaggga

SEQ ID NO: 21508 - DNA, 249 bp, Homo sapiens
  MAP TO CHR16.3; EXPRESSED IN ADULT LIVER, SIGNAL = 1.8; EXPRESSED IN PLACENTA, SIGNAL = 1.5; EXPRESSED IN LUNG, SIGNAL = 1.6; EXPRESSED IN BONE MARROW, SIGNAL =   3; SWISSPROT HIT: P11597, EVALUE 1.00e-09; NT HIT: gi14778781, EVALUE 0.00e+00; EST_HUMAN HIT: BI771118.1, EVALUE 5.00e-68
cacaccaggagggcaggcttggtgatgcggcacacgatgcctgcctcgtgcgaggtgcctttggagcaggcatgggcattgcccagcagggccagggtcaggactgtggcagccagcatggttatcaggcagtggtgtgtaagtggcccgagccgttcagcctggagcccgtatatgtatgtctgcccagcccccacggaacatgaggctcttccgggcagcagggtcttcctggccccagagattcac

SEQ ID NO: 21509 - DNA, 147 bp, Homo sapiens
  MAP TO CHR14.3; EXPRESSED IN ADULT LIVER, SIGNAL = 4.8; EXPRESSED IN BRAIN, SIGNAL = 7.2; EXPRESSED IN PLACENTA, SIGNAL =   5; EXPRESSED IN HELA, SIGNAL = 5.4; EXPRESSED IN FETAL LIVER, SIGNAL = 4.9; EXPRESSED IN LUNG, SIGNAL = 4.2; EXPRESSED IN BONE MARROW, SIGNAL = 6.5; SWISSPROT HIT: P34653, EVALUE 1.50e+00; NT HIT: gi14784510, EVALUE 2.00e-77; EST_HUMAN HIT: BE176466.1, EVALUE 3.00e-77
gtcagatgggcagacctggaagagaagaaggatgcagataggaaaagggccataggttttgtggtcggacagactgattgggagaagatcacagatgaaagtggtcacctggctgaaaaagccctcaatcgaaccaaatatatatga

SEQ ID NO: 21510 - DNA, 107 bp, Homo sapiens
  MAP TO CHR19.3; EXPRESSED IN PLACENTA, SIGNAL = 2.2; EXPRESSED IN HELA, SIGNAL =   2; EXPRESSED IN BRAIN, SIGNAL = 2.6; EXPRESSED IN ADULT LIVER, SIGNAL =   2; EST_HUMAN HIT: AI263313.1, EVALUE 5.10e-01; SWISSPROT HIT: P43244, EVALUE 2.10e+00; NT HIT: gi14733923, EVALUE 1.40e+00
ctcctgggtgccaggtggctgggcggggctgccccaatttccggaggtaggtcggggcccgattatttttggctgtggcgtccttgaagcctccgccatcagcagcg

SEQ ID NO: 21511 - DNA, 151 bp, Homo sapiens
  MAP TO CHR14.3; EXPRESSED IN BONE MARROW, SIGNAL = 0.8; EXPRESSED IN ADULT LIVER, SIGNAL = 0.98; EST_HUMAN HIT: AA625205.1, EVALUE 3.00e-77; SWISSPROT HIT: P25339, EVALUE 7.70e+00; NT HIT: gi14748350, EVALUE 9.00e-80
tgagtctccaagcccacttgaaaagtcacactgaaaggatgcaaatagccgtctgcgattttggcggccctccggattgtggtgacaatatgttgtacccggacattcccaaatttaaatttggcagtgaaaattccacaaagatttctgg

SEQ ID NO: 21512 - DNA, 87 bp, Homo sapiens
  MAP TO CHR16.3; EXPRESSED IN FETAL LIVER, SIGNAL = 1.7; EXPRESSED IN LUNG, SIGNAL = 1.6; EXPRESSED IN BRAIN, SIGNAL = 1.2; EXPRESSED IN ADULT LIVER, SIGNAL = 1.9; EXPRESSED IN PLACENTA, SIGNAL = 1.7; EXPRESSED IN HELA, SIGNAL = 1.6; EXPRESSED IN BONE MARROW, SIGNAL = 1.9; NT HIT: Y08763.1, EVALUE 1.10e+00; EST_HUMAN HIT: BF690022.1, EVALUE 6.10e+00
gggtcgcgagtgaagctcccacggctgcgggacgccgcaaaagcgcgcccagcatgtgcaagtcacaagcttaaaacgcaaagggct

SEQ ID NO: 21513 - DNA, 92 bp, Homo sapiens
  MAP TO CHR18.3; EXPRESSED IN ADULT LIVER, SIGNAL = 2.5; EXPRESSED IN PLACENTA, SIGNAL = 2.3; EXPRESSED IN HELA, SIGNAL = 2.9; EXPRESSED IN LUNG, SIGNAL = 3.7; SWISSPROT HIT: P23142, EVALUE 8.10e+00; NT HIT: AJ276505.2, EVALUE 2.90e-01; EST_HUMAN HIT: AA565487.1, EVALUE 6.60e+00
ccaggtgctcccttttcttggtccttttcatgctgtcctctctgtttctctgtatgctgtctttctctgcctcagcaggtaccatggccatg

SEQ ID NO: 21514 - DNA, 332 bp, Homo sapiens
  MAP TO CHR14.3; EXPRESSED IN BONE MARROW, SIGNAL = 5.2; EXPRESSED IN BRAIN, SIGNAL =   4; EXPRESSED IN ADULT LIVER, SIGNAL = 3.7; EXPRESSED IN PLACENTA, SIGNAL = 3.9; EXPRESSED IN HELA, SIGNAL = 3.1; SWISSPROT HIT: Q13671, EVALUE 1.00e-07; NT HIT: gi13376237, EVALUE 0.00e+00; EST_HUMAN HIT: AA418280.1, EVALUE 0.00e+00
aagcaattgtagagtctgccttgtacaaatgtgtcctgaagcccctgaaggaagccatcaactcatgcctgcatcagatccacagcaaggatggttcgctgcagcagctcaaggagaaccagttagtgatcctggccaccaccaccactgacctaggtgtgaccaccagcgtgccggaggtgcccatgatggagaagatcctgcagaagttcaccagcatgcacaaggcctactcacctgagaagaagatctccatcctgctcaagacctgcaaactcatctacgactccatggccctcggcaacccaggtcagtgggcagccgggaggggt

SEQ ID NO: 21515 - DNA, 378 bp, Homo sapiens
  MAP TO CHR14.3; EXPRESSED IN HELA, SIGNAL =  12; EXPRESSED IN LUNG, SIGNAL = 6.1; EXPRESSED IN FETAL LIVER, SIGNAL = 5.7; EXPRESSED IN BRAIN, SIGNAL = 1.3; EXPRESSED IN ADULT LIVER, SIGNAL = 4.9; EXPRESSED IN PLACENTA, SIGNAL =   5; EST_HUMAN HIT: BG494841.1, EVALUE 5.00e-78; SWISSPROT HIT: P12947, EVALUE 1.00e-34; NT HIT: gi15812219, EVALUE 9.00e-76
tgtttcaagaaataccttcagggaaccgctgctttctttctcccacaatctgtagttctcttgctttccaacttgggcccggcaggatcgctcttgcaaagaaggatggcaagaagaagagcctttctgccatcagcattcacaagcgcatccatggtgtgggcttcaagaagtgtgcccctcgggcactcgaagagatccaaaaatgtgccatgaaggagatgggcactccagatgtgcacattgatactaggctcaacaaagctgtttgggccaaaggaataaggattgtcccataccgtatccctgtgtggttgtccagaaaacgtaacgaggatgaaaattcaacaaacaagctctatactttggttacccatg

SEQ ID NO: 21516 - DNA, 144 bp, Homo sapiens
  MAP TO CHR19.3; EXPRESSED IN BONE MARROW, SIGNAL = 1.6; EXPRESSED IN ADULT LIVER, SIGNAL = 1.5; EXPRESSED IN PLACENTA, SIGNAL = 2.1; EST_HUMAN HIT: BI910506.1, EVALUE 3.00e-71; SWISSPROT HIT: P17972, EVALUE 6.80e-01; NT HIT: gi13633687, EVALUE 5.00e-75
ccgccgcacacgtccggagttctgggagtcggttccactgccgctcccgggcctcccgcagcgtccggctccggagggcggggccggtgactcaggccgcaactctcgggtcggacactgcaccgcggccctgctgtcgcccgc

SEQ ID NO: 21517 - DNA, 138 bp, Homo sapiens
  MAP TO CHR18.3; EXPRESSED IN BONE MARROW, SIGNAL = 1.5; EXPRESSED IN ADULT LIVER, SIGNAL = 1.3; EST_HUMAN HIT: H24748.1, EVALUE 1.70e-01; NT HIT: gi14743882, EVALUE 1.20e-01
ttctaggggtccttacagttatggtccatagcatcctcagcaacagagttggctatataactcacacttgccctaatcatggtatccaggcacattatatacatatagaattttatgtgcagtcactgggagataaag

SEQ ID NO: 21518 - DNA, 157 bp, Homo sapiens
  MAP TO CHR16.3; EXPRESSED IN PLACENTA, SIGNAL = 0.99; EXPRESSED IN HELA, SIGNAL = 2.4; EXPRESSED IN LUNG, SIGNAL = 1.8; EXPRESSED IN ADULT LIVER, SIGNAL = 0.93; NT HIT: gi14779824, EVALUE 9.00e-83; EST_HUMAN HIT: AU139060.1, EVALUE 1.00e-82; SWISSPROT HIT: Q57571, EVALUE 7.60e+00
ccaaactgattatccaccagacactcagcgtcttagaagatattgtggagaatatctcgggggagtccaccaagtctcgacagatttgctaccagtcgctgcaggaatctgttcaggtctccctggccctctttccagcttttatccatcagtcagg

SEQ ID NO: 21519 - DNA, 156 bp, Homo sapiens
  MAP TO CHR16.3; EXPRESSED IN FETAL LIVER, SIGNAL = 1.2; EXPRESSED IN BONE MARROW, SIGNAL = 1.7; EXPRESSED IN ADULT LIVER, SIGNAL = 1.3; EXPRESSED IN BRAIN, SIGNAL = 1.4; EXPRESSED IN HELA, SIGNAL = 1.4; EXPRESSED IN PLACENTA, SIGNAL = 1.2; SWISSPROT HIT: P11703, EVALUE 4.40e+00; NT HIT: U71085.1, EVALUE 2.10e+00
ctgcgcatttacccatctgcgtctccacgaaatctttcatcccatcgacaatgtaaggattcaaagtaaggaggttcacgttgtcaaagaagccttgatctgaatgccttccccccactttctccttaaatgagttgttaacaggaacccaagtgt

SEQ ID NO: 21520 - DNA, 231 bp, Homo sapiens
  MAP TO CHR14.3; EXPRESSED IN ADULT LIVER, SIGNAL =   1; EXPRESSED IN BRAIN, SIGNAL = 1.9; SWISSPROT HIT: O00330, EVALUE 2.40e-01; NT HIT: S82412.1, EVALUE 3.30e+00; EST_HUMAN HIT: BF361964.1, EVALUE 1.00e-114
gtgagcctctgcacacccagtgagaacacgcctacagaaagcttggcccggctggtggccatggtgtttcagtggtttcactccactgcgtatatgatggatgatgaagtgggaagtctggtggaaaagctgaagcctcagtttgtcaccaaatggctgaagaccgtatgtgatgttcgcttcgatgtcatggtcatgtgccttcttcctaaacccatggaatttgccagg

SEQ ID NO: 21521 - DNA, 190 bp, Homo sapiens
  MAP TO CHR14.3; EXPRESSED IN HELA, SIGNAL = 3.9; EXPRESSED IN PLACENTA, SIGNAL = 3.7; EXPRESSED IN HEART, SIGNAL = 3.5; EXPRESSED IN LUNG, SIGNAL = 4.8; EXPRESSED IN BONE MARROW, SIGNAL = 5.4; EXPRESSED IN ADULT LIVER, SIGNAL = 3.2; SWISSPROT HIT: P33477, EVALUE 4.30e+00; NT HIT: AF287354.1, EVALUE 2.60e+00
gccagcacgtggctctgcacatgcatcccaagtcccgacatcaggcagggccccggtaccttctcagccctgcactcactcggcacacgaacctccaggcagcaaatgaatacattcacatgactgggggccccacgccagtgtcggaagtaccctcgcaggctttttcatctatgacaagagatgcagg

SEQ ID NO: 21522 - DNA, 78 bp, Homo sapiens
  MAP TO CHR14.3; EXPRESSED IN PLACENTA, SIGNAL = 1.7; EXPRESSED IN HELA, SIGNAL = 1.9; EXPRESSED IN FETAL LIVER, SIGNAL = 1.6; EXPRESSED IN LUNG, SIGNAL = 1.7; EXPRESSED IN BONE MARROW, SIGNAL = 2.2; EXPRESSED IN ADULT LIVER, SIGNAL = 1.5; SWISSPROT HIT: Q99717, EVALUE 8.20e+00; EST_HUMAN HIT: AA707638.1, EVALUE 1.00e-31
tagctggaccactcaggtagcttgaagaggatggatttggaggatgaggcagtgccactcctttttcctccatgctcg

SEQ ID NO: 21523 - DNA, 117 bp, Homo sapiens
  MAP TO CHR18.3; EXPRESSED IN HELA, SIGNAL = 1.3; EXPRESSED IN BONE MARROW, SIGNAL = 0.73; EXPRESSED IN BRAIN, SIGNAL =   4; EXPRESSED IN ADULT LIVER, SIGNAL = 1.1; NT HIT: AE007629.1, EVALUE 6.00e+00; EST_HUMAN HIT: AL523174.1, EVALUE 5.70e-01
ctctgtttgataaatccacttcagccttatattaggtgcaggttctgtgaaatccctgaggaggtagttaacagatggattgttgagggacaaagtaggctgcttaggtttcaaagc

SEQ ID NO: 21524 - DNA, 413 bp, Homo sapiens
  MAP TO CHR19.3; EXPRESSED IN ADULT LIVER, SIGNAL = 1.2; EXPRESSED IN PLACENTA, SIGNAL = 1.2; EXPRESSED IN FETAL LIVER, SIGNAL = 1.3; SWISSPROT HIT: P81122, EVALUE 7.80e+00; NT HIT: gi14762597, EVALUE 1.00e-31; EST_HUMAN HIT: BG422023.1, EVALUE 1.00e-130
ttgtagcgcagccgctcctcaccgctatctggcggctcctgggtgacccaggccaccattgcttgcaggtggggtggctgcagcaggaagtccagcagcttgcggttgacgaccttgcactcctgcagcacgtcttcctcgtccagcagctcgggcaggctcaggtcctcccgctccagcagcgtgtccaggtgcgagcttgtgtgcaggtcaaacttccaaaacatggcgccctgcaggcatagacacaaccagcgccgcgtcagacgccccagggagtccccactggacgaggcactgaccacaggggctgagtgcccaccttgggcacagcctctccccaagtcccagccctctgcctcatgctgagcccggccccgccccgggactgcccgcaggctcactgcctccat

SEQ ID NO: 21525 - DNA, 91 bp, Homo sapiens
  MAP TO CHR19.3; EXPRESSED IN ADULT LIVER, SIGNAL = 2.7; EXPRESSED IN HELA, SIGNAL = 3.3; EXPRESSED IN LUNG, SIGNAL = 5.9; EXPRESSED IN BRAIN, SIGNAL = 1.8; EST_HUMAN HIT: BG763911.1, EVALUE 4.00e-44; SWISSPROT HIT: O43765, EVALUE 4.00e-11; NT HIT: gi14761256, EVALUE 3.00e-44
catgtccggcatgatttcgggtggcaacaaccccttgggaactcccggcaccagcccctcgcagaacgacctggccagcctcatccaggcg

SEQ ID NO: 21526 - DNA, 126 bp, Homo sapiens
  MAP TO CHR19.3; EXPRESSED IN FETAL LIVER, SIGNAL = 7.8; EXPRESSED IN BONE MARROW, SIGNAL = 1.9; EXPRESSED IN ADULT LIVER, SIGNAL =   1; EXPRESSED IN HEART, SIGNAL = 6.8; NT HIT: gi16163774, EVALUE 2.00e-55; EST_HUMAN HIT: BE551157.1, EVALUE 3.00e-55; SWISSPROT HIT: Q03923, EVALUE 5.00e-16
caagaagaccaggtttctgtagttctctaaaatcactttcctatacaaatcctgttgagcagtgtccaggcattgccactcctccagagagaatttgatggccacatccctaaatgtcaacggccc

SEQ ID NO: 21527 - DNA, 133 bp, Homo sapiens
  MAP TO CHR16.3; EXPRESSED IN LUNG, SIGNAL = 1.5; EXPRESSED IN FETAL LIVER, SIGNAL = 1.4; EXPRESSED IN BONE MARROW, SIGNAL = 1.5; EXPRESSED IN ADULT LIVER, SIGNAL = 1.4; EXPRESSED IN PLACENTA, SIGNAL = 1.1; EXPRESSED IN HELA, SIGNAL = 1.1; SWISSPROT HIT: Q60987, EVALUE 7.80e+00; NT HIT: gi11423707, EVALUE 4.50e-01
tgggcaacatccagcagcctctggacaagggctgctgcagaaagcccttcaaaggagcacccgaacacatcctgttaagagaaagggtgtttgcggccatctctgaagtcctggggggcttccagttccctgt

SEQ ID NO: 21528 - DNA, 120 bp, Homo sapiens
  MAP TO CHR18.3; EXPRESSED IN LUNG, SIGNAL =   1; EXPRESSED IN BRAIN, SIGNAL =   1; EXPRESSED IN ADULT LIVER, SIGNAL = 1.2; EXPRESSED IN PLACENTA, SIGNAL = 1.1; EXPRESSED IN HELA, SIGNAL = 1.2; SWISSPROT HIT: P52917, EVALUE 5.00e-10; NT HIT: AY051732.1, EVALUE 2.50e-02; EST_HUMAN HIT: AA743793.1, EVALUE 3.00e-61
ccgaacgagtttttctgaatcccctctccatttgctgacaatggtggatgcagaaatgttaaagaaggttgttttacattcagtggccacagctttggccagtaaagtctttcctgtacc

SEQ ID NO: 21529 - DNA, 109 bp, Homo sapiens
  MAP TO CHR14.3; EXPRESSED IN PLACENTA, SIGNAL = 1.3; EXPRESSED IN HEART, SIGNAL = 2.8; EXPRESSED IN LUNG, SIGNAL = 1.3; EXPRESSED IN FETAL LIVER, SIGNAL = 1.9; EXPRESSED IN BONE MARROW, SIGNAL = 2.1; EXPRESSED IN ADULT LIVER, SIGNAL = 1.7; NT HIT: AJ277748.1, EVALUE 8.90e-02; EST_HUMAN HIT: AW304835.1, EVALUE 5.20e-01
ctgtagaatgccctctggaaatggtgcgcccagcagtgtccccagagcttcctcgtccttgagtttaaagccagcgtgcccacaatgctgcttcctggtctcctgtgtc

SEQ ID NO: 21530 - DNA, 159 bp, Homo sapiens
  MAP TO CHR14.3; EXPRESSED IN FETAL LIVER, SIGNAL = 2.3; EXPRESSED IN BRAIN, SIGNAL =  12; EXPRESSED IN ADULT LIVER, SIGNAL = 2.6; EXPRESSED IN HELA, SIGNAL = 1.8; EXPRESSED IN HEART, SIGNAL = 3.8; EXPRESSED IN LUNG, SIGNAL = 1.8; SWISSPROT HIT: P35289, EVALUE 7.00e-15; NT HIT: gi6981235, EVALUE 1.40e-01; EST_HUMAN HIT: BF772317.1, EVALUE 2.00e-84
tcattcacgcgtctgacagagctggtgctgcaggcccataggaaggagctggaaggcctccggatgcgtgccagcaatgagttggcactggcagagctggaggaggaggagggcaaacccgagggcccagcgaactcttcgaaaacctgctggtgctga

SEQ ID NO: 21531 - DNA, 105 bp, Homo sapiens
  MAP TO CHR18.3; EXPRESSED IN HEART, SIGNAL = 2.2; EXPRESSED IN PLACENTA, SIGNAL = 2.1; EXPRESSED IN LUNG, SIGNAL = 2.1; EXPRESSED IN FETAL LIVER, SIGNAL = 2.3; EXPRESSED IN BONE MARROW, SIGNAL = 2.7; EXPRESSED IN ADULT LIVER, SIGNAL = 2.2; SWISSPROT HIT: P81641, EVALUE 8.00e+00; NT HIT: AF396969.1, EVALUE 5.20e+00; EST_HUMAN HIT: AA524741.1, EVALUE 3.20e-02
tctcaacatttatcttaattctgatccaagtagtaaaccataccgtggggaacatcagatgcagggcctggctggctggggagcatccttgcagaagcggcatcg

SEQ ID NO: 21532 - DNA, 176 bp, Homo sapiens
  MAP TO CHR18.3; EXPRESSED IN FETAL LIVER, SIGNAL = 1.8; EXPRESSED IN ADULT LIVER, SIGNAL = 1.7; EXPRESSED IN HELA, SIGNAL = 1.4; EXPRESSED IN BONE MARROW, SIGNAL = 1.8; SWISSPROT HIT: Q02075, EVALUE 1.10e+00; NT HIT: AY036105.1, EVALUE 6.10e-01; EST_HUMAN HIT: BF342157.1, EVALUE 1.50e-02
tgataagtttaacagcagaaagtgagcatgccatcgtctacctcttcctcttcctttatcttggaaatgagttgcctgtaggaagcaaaggtcctgccctgatggtggtgcgatttgggaatgtgggaagaactgccgtggtccagaggtgctatgctgaacgggtggtctccttg

SEQ ID NO: 21533 - DNA, 199 bp, Homo sapiens
  MAP TO CHR19.3; EXPRESSED IN FETAL LIVER, SIGNAL = 0.9; EXPRESSED IN BRAIN, SIGNAL = 1.8; EXPRESSED IN ADULT LIVER, SIGNAL = 1.2; EXPRESSED IN HELA, SIGNAL = 2.4; NT HIT: gi16175350, EVALUE 1.00e-107; EST_HUMAN HIT: AL538943.1, EVALUE 1.00e-107; SWISSPROT HIT: P87312, EVALUE 1.30e-01
ccttgaggaagcgccgatagcctcgcacagctgtctcaggcagtgggtgtgagcgcaggaagcgcagatacaggggccaaattcgagagtgctgcgtgatgggcagtgcccggagggcacggtcgaaggtgcggcgggtgtgtgtgacgcgcccctggtccatgaggaactggcagtaatctagccacagacgaggcat

SEQ ID NO: 21534 - DNA, 165 bp, Homo sapiens
  MAP TO CHR18.3; EXPRESSED IN ADULT LIVER, SIGNAL = 2.7; EXPRESSED IN PLACENTA, SIGNAL = 2.8; EXPRESSED IN HELA, SIGNAL =   3; EXPRESSED IN HEART, SIGNAL = 3.2; EXPRESSED IN BRAIN, SIGNAL = 2.8; NT HIT: gi13385147, EVALUE 3.70e-02; EST_HUMAN HIT: BG722402.1, EVALUE 4.00e-80; SWISSPROT HIT: P27521, EVALUE 1.50e+00
ctttctgctccagggccaggttgtcgagggggttgttgtcaccgcctcccctaccctcctcgctctgtggcagcacataggactcatccactggcaacagctccctggacagctggccatcatcttcctccactgccagccaacgttggcatggaaagtagtacc

SEQ ID NO: 21535 - DNA, 240 bp, Homo sapiens
  MAP TO CHR19.3; EXPRESSED IN HELA, SIGNAL = 2.4; EXPRESSED IN PLACENTA, SIGNAL = 2.7; EXPRESSED IN FETAL LIVER, SIGNAL = 3.1; EXPRESSED IN LUNG, SIGNAL = 2.2; EXPRESSED IN BONE MARROW, SIGNAL = 1.8; EXPRESSED IN ADULT LIVER, SIGNAL = 2.5; SWISSPROT HIT: P82228, EVALUE 5.80e-01; NT HIT: gi15296404, EVALUE 1.40e-02; EST_HUMAN HIT: AA889338.1, EVALUE 2.00e-88
cccagcgagcctttgaggaccaccgggtgcgcacccagcctgtccaccagtgtggagctgtttgctcactcatcatcctagtcatcgttgctgcccttgttggcctggctgccaccaaagagctgaggcaacggctgctgggcgctgccaccgtctggaaagcctgcactggccgcgacacctgttgcggctgcagcagtggctggaaggcgtcaggaggcagcttccaggtggtgggag

SEQ ID NO: 21536 - DNA, 85 bp, Homo sapiens
  MAP TO CHR19.3; EXPRESSED IN HELA, SIGNAL = 3.6; EXPRESSED IN PLACENTA, SIGNAL = 2.9; EXPRESSED IN LUNG, SIGNAL = 2.8; EXPRESSED IN FETAL LIVER, SIGNAL = 2.3; EXPRESSED IN BONE MARROW, SIGNAL = 2.5; EXPRESSED IN BRAIN, SIGNAL = 2.8; EXPRESSED IN ADULT LIVER, SIGNAL = 1.6; NT HIT: gi16163024, EVALUE 3.00e-38; EST_HUMAN HIT: BG253326.1, EVALUE 4.00e-38
ggattcaggggacaagggcagccccttcctgaacatttactgcgactacgagcccggctctgagtacaaccttgactctatgccc

SEQ ID NO: 21537 - DNA, 180 bp, Homo sapiens
  MAP TO CHR14.3; EXPRESSED IN HELA, SIGNAL = 2.2; EXPRESSED IN PLACENTA, SIGNAL = 2.1; EXPRESSED IN HEART, SIGNAL = 1.9; EXPRESSED IN LUNG, SIGNAL = 2.5; EXPRESSED IN BONE MARROW, SIGNAL = 1.6; EXPRESSED IN ADULT LIVER, SIGNAL = 2.5; SWISSPROT HIT: P20156, EVALUE 1.50e+00; NT HIT: M17222.1, EVALUE 4.00e-02; EST_HUMAN HIT: BF304551.1, EVALUE 3.70e+00
tcactcctgaagccattggcttcttgtctgctgttggggtctttattgttcttctggccgtcctcttcctcttcatcaacaagaagctgtgttttgaaacgataggaggccttcctttcctggagcatcgagggaaaagaaagcattctaaagacaagactgggattcacaaggggctgg

SEQ ID NO: 21538 - DNA, 136 bp, Homo sapiens
  MAP TO CHR14.3; EXPRESSED IN ADULT LIVER, SIGNAL = 0.92; EXPRESSED IN BRAIN, SIGNAL = 1.1; EXPRESSED IN PLACENTA, SIGNAL = 1.2; EXPRESSED IN HEART, SIGNAL = 4.5; SWISSPROT HIT: P53261, EVALUE 1.50e+00; EST_HUMAN HIT: BG425841.1, EVALUE 6.70e-01
atgggtaagtacatgcaaattgctgagtctctgttcattgcatccaaaacgaaagtcaccagcgtgctgtataactcaagaaaatacgagagagagggaaaagcaacatcacagtttgactacaagcggtttccag

SEQ ID NO: 21539 - DNA, 431 bp, Homo sapiens
  MAP TO CHR16.3; EXPRESSED IN FETAL LIVER, SIGNAL = 4.6; EXPRESSED IN ADULT LIVER, SIGNAL = 7.2; EXPRESSED IN BRAIN, SIGNAL = 7.8; EXPRESSED IN HELA, SIGNAL = 3.5; EXPRESSED IN LUNG, SIGNAL = 2.4; EST_HUMAN HIT: AI816150.1, EVALUE 0.00e+00; SWISSPROT HIT: Q04762, EVALUE 3.00e-54; NT HIT: gi14776728, EVALUE 0.00e+00
attagtaaagtatctcaacaattctcagagcagtaaaaaccaaggcatccccaacactgcatgcgtgactagaccagcaagaagtcctcaacttgcaccagtccacatggcagcagggggcagtggtgagtcctccggagcccagtgcctgggcctgactggccccattgatgagtgagctggatgacagggccgctggagataggacaatcggctcacagggtcctttcatgtccgatccccttagcattccgagggagccacaggaactggggcggtcgtgcaagcgtcggcatgaacaggggtctgtttggagtctgaatgctctgctgcctctgggtggcctcagccacactgggaacgactgtctataaccctgggaactcgaagtgttccatgctcactcgggaagcactgataaccttccccat

SEQ ID NO: 21540 - DNA, 145 bp, Homo sapiens
  MAP TO CHR16.3; EXPRESSED IN LUNG, SIGNAL = 2.5; EXPRESSED IN BONE MARROW, SIGNAL = 1.9; EXPRESSED IN ADULT LIVER, SIGNAL =   2; EXPRESSED IN HELA, SIGNAL = 4.8; NT HIT: gi15315213, EVALUE 3.00e-76; EST_HUMAN HIT: BF892668.1, EVALUE 7.00e-75; SWISSPROT HIT: Q9QYV0, EVALUE 3.90e-01
tggtagctggagctggactgcagctggccgaggtcactcaggtgccagtggtcccccgcaggcacgagcttgcccccgatctgtgcacgtaccgtgccgtcagccagggggaacacgttcagggaggtggggcgctccttcctgc

SEQ ID NO: 21541 - DNA, 109 bp, Homo sapiens
  MAP TO CHR19.3; EXPRESSED IN BRAIN, SIGNAL = 1.2; EXPRESSED IN ADULT LIVER, SIGNAL = 1.1; SWISSPROT HIT: P05128, EVALUE 5.00e-15; NT HIT: gi16162962, EVALUE 3.00e-54; EST_HUMAN HIT: H12977.1, EVALUE 4.00e-54
cctcccttcgatggggaggacgaggaggagctgtttcaggccatcatggaacaaactgtcacctaccccaagtcgctttcccgggaagccgtggccatctgcaaggggg

SEQ ID NO: 21542 - DNA, 142 bp, Homo sapiens
  MAP TO CHR18.3; EXPRESSED IN ADULT LIVER, SIGNAL = 1.8; EXPRESSED IN PLACENTA, SIGNAL = 1.3; EXPRESSED IN HELA, SIGNAL = 1.3; EXPRESSED IN BONE MARROW, SIGNAL = 1.3; EST_HUMAN HIT: AI559441.1, EVALUE 7.10e-01; SWISSPROT HIT: P48319, EVALUE 7.00e-05; NT HIT: AL161592.2, EVALUE 1.20e-01
ttcaagtagttgatgaggatgatggaagtccaatatttcactcttaccatcaaaggtgtttttgcatactgtagaagaatatctaccacttgcagcagaaaatattttgttaagtctttgtcatctttgcatagcaacaaat

SEQ ID NO: 21543 - DNA, 113 bp, Homo sapiens
  MAP TO CHR18.3; EXPRESSED IN FETAL LIVER, SIGNAL = 3.3; EXPRESSED IN BONE MARROW, SIGNAL = 2.1; EXPRESSED IN ADULT LIVER, SIGNAL = 3.6; EXPRESSED IN PLACENTA, SIGNAL = 2.6; EXPRESSED IN HELA, SIGNAL = 2.7; EST_HUMAN HIT: AW173370.1, EVALUE 5.40e-01; SWISSPROT HIT: P14585, EVALUE 1.60e+00; NT HIT: AE003998.1, EVALUE 9.30e-02
cggaaacttgtaggttctgaaagtggagggggaaatggggctgcagttgggagccatcacccgctgggggctcacagtgagtgcagcctcggtcatgggctctgctgacgcac

SEQ ID NO: 21544 - DNA, 225 bp, Homo sapiens
  MAP TO CHR14.3; EXPRESSED IN HELA, SIGNAL = 1.6; EXPRESSED IN LUNG, SIGNAL = 1.4; EXPRESSED IN BONE MARROW, SIGNAL = 1.4; EXPRESSED IN FETAL LIVER, SIGNAL = 1.3; EXPRESSED IN BRAIN, SIGNAL = 1.4; EXPRESSED IN ADULT LIVER, SIGNAL = 1.4; EXPRESSED IN PLACENTA, SIGNAL = 1.5; EST_HUMAN HIT: AV763086.1, EVALUE 3.00e-01; SWISSPROT HIT: P49640, EVALUE 3.30e+00; NT HIT: AF111167.2, EVALUE 1.00e-124
cagttcaaatgattgtcagccccacaggtgggggagccggtgtctgattccggctgtattgtcagggcctcagtgctcagtacaggtttggtggaggaatggacgccatagcctacaatcccaaaagctgcagccgcaggaggcagcgtggctggagaagggtcccgagccagaagagggcgctcttcagcaaaacaaggtttgaaggaaaccgccaggatgttt

SEQ ID NO: 21545 - DNA, 203 bp, Homo sapiens
  MAP TO CHR19.3; EXPRESSED IN ADULT LIVER, SIGNAL = 2.3; EXPRESSED IN FETAL LIVER, SIGNAL = 1.7; EXPRESSED IN BONE MARROW, SIGNAL = 1.7; EXPRESSED IN BRAIN, SIGNAL = 1.4; NT HIT: gi4504984, EVALUE 1.00e-110; EST_HUMAN HIT: BG188522.1, EVALUE 1.00e-110; SWISSPROT HIT: P47929, EVALUE 2.00e-35
ccttgaagccgtcgtctgacgcgatgatgagcacctcgaagggctgcccgcgctggaaaggaacgcccggcccgcgctcctcgcggccccaggagccttgctccttgctgttgaagaccacctccgacgtgtccagccgggggttgaaatgcagggcggcatcggagccctgctcctccccgcacagcaggtttacatggaac

SEQ ID NO: 21546 - DNA, 181 bp, Homo sapiens
  MAP TO CHR19.3; EXPRESSED IN PLACENTA, SIGNAL =   2; EXPRESSED IN HELA, SIGNAL = 3.3; EXPRESSED IN HEART, SIGNAL = 2.1; EXPRESSED IN LUNG, SIGNAL = 3.9; EXPRESSED IN FETAL LIVER, SIGNAL = 2.9; EXPRESSED IN BONE MARROW, SIGNAL = 2.2; EXPRESSED IN ADULT LIVER, SIGNAL = 2.3; NT HIT: AP003012.2, EVALUE 2.50e+00; EST_HUMAN HIT: BG007072.1, EVALUE 2.00e-97; SWISSPROT HIT: Q14416, EVALUE 4.30e+00
cagttaagtggctgttactcctcagtggactcagaggacaagctggccacatctgcaggggagtgaacttaggttgtgtgatggactcttgagtctgcaagatgccaacttggctgcatccaaggctcccttgtggcacagcacccagggctgctctgtgagtggctgctgcctgcagggg

SEQ ID NO: 21547 - DNA, 326 bp, Homo sapiens
  MAP TO CHR14.3; EXPRESSED IN HELA, SIGNAL = 2.2; EXPRESSED IN PLACENTA, SIGNAL = 2.4; EXPRESSED IN HEART, SIGNAL = 2.7; EXPRESSED IN FETAL LIVER, SIGNAL = 2.5; EXPRESSED IN LUNG, SIGNAL = 2.6; EXPRESSED IN ADULT LIVER, SIGNAL = 2.9; EXPRESSED IN BRAIN, SIGNAL = 2.5; NT HIT: gi14752752, EVALUE 4.00e-90; EST_HUMAN HIT: AL598039.1, EVALUE 5.00e-90; SWISSPROT HIT: P17081, EVALUE 8.00e-22
ttctagtagagaaagaactaccagattccagggttgaggaagaaacgggatcccagtgcgctgtagtggactcttacctgaaatctgaccttggaactacatgggacacaccttacacaggctgtacaaacccttgtctgctcttcccacaggaggactacaaccagctgaggccactctcctaccccaacacggatgtgtttttgatctgcttctctgtcgtaaaccctgcctcttaccacaatgtccaggaggaatgggtccccgagctcaaggactgcatgcctcacgtgccttatgtcctcatagggacccaggttaaaatg

SEQ ID NO: 21548 - DNA, 192 bp, Homo sapiens
  MAP TO CHR14.3; EXPRESSED IN BRAIN, SIGNAL = 3.9; EXPRESSED IN ADULT LIVER, SIGNAL = 3.5; EXPRESSED IN PLACENTA, SIGNAL = 2.9; EXPRESSED IN HELA, SIGNAL = 3.7; EXPRESSED IN HEART, SIGNAL = 2.8; EXPRESSED IN LUNG, SIGNAL = 3.4; EXPRESSED IN BONE MARROW, SIGNAL = 4.6; SWISSPROT HIT: P17475, EVALUE 2.00e-07; NT HIT: AJ243034.1, EVALUE 6.80e-01
tcactcataaggccatgatgacgctggatgagaggggctctgaagctgctgcagccaccagcattcagctcacccctgggcctcgcccagaccttgacttcccacccactctgggcactgagttcagtcggcccttcctggtgatgactttccacacggaaacaggaagcatgctttttctggagaagattg

SEQ ID NO: 21549 - DNA, 219 bp, Homo sapiens
  MAP TO CHR14.3; EXPRESSED IN HELA, SIGNAL = 1.3; EXPRESSED IN PLACENTA, SIGNAL = 2.2; EXPRESSED IN FETAL LIVER, SIGNAL = 1.1; EXPRESSED IN LUNG, SIGNAL = 1.4; EXPRESSED IN ADULT LIVER, SIGNAL = 1.3; SWISSPROT HIT: P05997, EVALUE 2.40e-02; NT HIT: AJ243122.1, EVALUE 1.00e-120; EST_HUMAN HIT: BF951546.1, EVALUE 1.00e-120
caatcccacaggcccagcaggaccagggaagcaatgccggtaagggtcatggagagaagaaggatgccccggcggccaaatcggtccacggtgacccccaggaagacacaggccagggctgcggtgccgctggccagcagagagcacaggtagaagtccgatgggctccctcctcctcccacaggctggtagcagtggcgaatggcatgggcaatgaag

SEQ ID NO: 21550 - DNA, 334 bp, Homo sapiens
  MAP TO CHR14.3; EXPRESSED IN ADULT LIVER, SIGNAL = 3.8; EXPRESSED IN BRAIN, SIGNAL = 5.3; EXPRESSED IN HELA, SIGNAL = 5.2; EXPRESSED IN FETAL LIVER, SIGNAL = 7.1; EXPRESSED IN LUNG, SIGNAL = 2.6; EST_HUMAN HIT: AA699826.1, EVALUE 0.00e+00; SWISSPROT HIT: O75360, EVALUE 2.40e+00; NT HIT: gi10947110, EVALUE 0.00e+00
atttaaagaagtcataaacagcatttattaccttggtatatcatactggtcttgttgctgttgttccttcacatttaagtggtttttcatctttcctccctcctcccacagcctggctatacagtgcatccttgaactgtcagcccacagcagcaatatgcttattctatccacatccctaacatcatgcattcacaaggtcaaagttctggtccacaaacccttccctatagaagttcaatggctgcgaaagaatttgtagtaaaccaggcctcccaggatggcgagctccagtaagatgataatggaaagcagcagcttgttggttgtcact

SEQ ID NO: 21551 - DNA, 147 bp, Homo sapiens
  MAP TO CHR18.3; EXPRESSED IN ADULT LIVER, SIGNAL = 2.4; EXPRESSED IN HELA, SIGNAL = 2.8; EXPRESSED IN PLACENTA, SIGNAL = 2.9; EXPRESSED IN HEART, SIGNAL = 2.5; EXPRESSED IN LUNG, SIGNAL = 2.6; EXPRESSED IN FETAL LIVER, SIGNAL =   4; EXPRESSED IN BONE MARROW, SIGNAL = 2.6; SWISSPROT HIT: P30622, EVALUE 4.50e+00
ctgagcgtgactcggtgtctgcagcgtcactgcagtgtgtgaaggccagtacagggacccttcctctgtgctcctccacagccaccatgcgggttttgttggatgtgttgatggagtgcacgtggtacccactgtcagggtgctctc

SEQ ID NO: 21552 - DNA, 286 bp, Homo sapiens
  MAP TO CHR16.3; EXPRESSED IN ADULT LIVER, SIGNAL = 1.4; EXPRESSED IN HELA, SIGNAL = 1.7; EXPRESSED IN PLACENTA, SIGNAL = 1.3; EXPRESSED IN BONE MARROW, SIGNAL = 1.4; EST_HUMAN HIT: BE264766.1, EVALUE 3.00e-45; SWISSPROT HIT: P11218, EVALUE 3.20e+00; NT HIT: gi14779206, EVALUE 2.00e-45
ctttttcagaaacggcgacggatcccaccacaactaaatccacgaggactctggagtccaagcctatggggacactgtagttcctcacaccctgcacacagagatacggattggaaaacttcaactccagctgcttcctcattttataattcatgatcaaagtgcactcagggtttgaatcaacctcttggacaaaacagatgcaggcacacgcaacaccggagatgtggcgtttcaggagaagccgcattccagaaaccgctttagggcacagtttccccagtct

SEQ ID NO: 21553 - DNA, 493 bp, Homo sapiens
  MAP TO CHR14.3; EXPRESSED IN ADULT LIVER, SIGNAL = 1.6e+02; EXPRESSED IN HELA, SIGNAL = 4.4e+02; EXPRESSED IN HEART, SIGNAL = 1.2e+02; EXPRESSED IN FETAL LIVER, SIGNAL = 1.3e+02; NT HIT: gi14591905, EVALUE 0.00e+00; EST_HUMAN HIT: BI462196.1, EVALUE 0.00e+00; SWISSPROT HIT: P40429, EVALUE 2.00e-75
ttactgctgggccggaaggtggtagtcgtacgctgcgagggcatcaacatctctggcaatttctacagaaacaagttgaagaatctggctttcctcggcaagcggatgaacaccaacccttttcgaagcgcctaccacttccgggcccccagccgcatcttctggccgacagtgcgaggcatacatgtgcgccacaagaccaagcgaggccatgcctccctggactgcctcaaggtgtttgacggcatcccaccgccctacgataagaaaaagcggatggtggttcctgctgccctcaaggtcgtgcgtctgaagcctacaagaaagtttgcccttctggggcgacaggctcaagaggttaggtggaagtaccaggcagtgacagccaccctggaggagaagaggaaggagaaagccaagatccactactggaagaagaaacagctcatgaggctacggaaacaggccgagaagaacgtgaagaaaaactgac

SEQ ID NO: 21554 - DNA, 169 bp, Homo sapiens
  MAP TO CHR16.3; EXPRESSED IN ADULT LIVER, SIGNAL = 1.5; EXPRESSED IN BONE MARROW, SIGNAL = 1.2; EXPRESSED IN BRAIN, SIGNAL = 1.9; NT HIT: gi14778460, EVALUE 2.00e-90; EST_HUMAN HIT: AL561192.1, EVALUE 3.00e-90; SWISSPROT HIT: P54818, EVALUE 2.90e-01
ctggatgtggccgtggtggggccctttgtggccgtacatgcactccactgtggcagccttcctctccatcaggtggatcctgaacagaggcttgaatctcatagggtcatcgacgtgggggtcatggggaggcaggtacatccacccgatgatgaacaggccgtccacc

SEQ ID NO: 21555 - DNA, 179 bp, Homo sapiens
  MAP TO CHR14.3; EXPRESSED IN FETAL LIVER, SIGNAL = 4.7; EXPRESSED IN BONE MARROW, SIGNAL = 4.3; EXPRESSED IN BRAIN, SIGNAL = 5.2; EXPRESSED IN ADULT LIVER, SIGNAL =   5; EXPRESSED IN PLACENTA, SIGNAL = 2.8; SWISSPROT HIT: P39929, EVALUE 6.00e-06; NT HIT: gi14750838, EVALUE 2.00e-96; EST_HUMAN HIT: BE207635.1, EVALUE 3.00e-96
catgtcctggtaggccttcttcatgctttgggcagcaagctccatggtacgaaggacttctgcattggtagtggcattctcaatggcctcacgctgaaactccagggtggataatgtcccgtcagtttgtgccagctgctgttcgaatcttttcttcctccgcaaagcctgtagggcag

SEQ ID NO: 21556 - DNA, 144 bp, Homo sapiens
  MAP TO CHR18.3; EXPRESSED IN FETAL LIVER, SIGNAL = 1.5; EXPRESSED IN BONE MARROW, SIGNAL = 1.4; EXPRESSED IN ADULT LIVER, SIGNAL = 1.8; EXPRESSED IN PLACENTA, SIGNAL = 1.5; EXPRESSED IN HELA, SIGNAL = 1.1; EST_HUMAN HIT: AW085241.1, EVALUE 4.60e-02; SWISSPROT HIT: Q99089, EVALUE 2.60e+00; NT HIT: AL163248.2, EVALUE 1.20e-01
aagtgaggcagctctgctccatgaggtcattcagggacatgagtcccacccagcttggagcccttagaatttacacggtcaaaactgattcatccccattgccttttcctcaccagaaaagtgagaaaagtaagtctgaaccag

SEQ ID NO: 21557 - DNA, 90 bp, Homo sapiens
  MAP TO CHR14.3; EXPRESSED IN BRAIN, SIGNAL = 1.3; EXPRESSED IN ADULT LIVER, SIGNAL = 1.1; EXPRESSED IN PLACENTA, SIGNAL = 0.83; EXPRESSED IN FETAL LIVER, SIGNAL = 0.92; EST_HUMAN HIT: AW975794.1, EVALUE 1.60e+00; SWISSPROT HIT: P73754, EVALUE 1.20e+00; NT HIT: gi13929075, EVALUE 2.80e-01
aacctgggtcaggcatttggtccacctgagttgcagatcagatgcccatcagatgtcccgggaactcgtccctggtttggcacctgctga

SEQ ID NO: 21558 - DNA, 75 bp, Homo sapiens
  MAP TO CHR14.3; EXPRESSED IN FETAL LIVER, SIGNAL = 1.5; EXPRESSED IN ADULT LIVER, SIGNAL = 1.1; EXPRESSED IN HELA, SIGNAL = 1.2; EXPRESSED IN PLACENTA, SIGNAL = 0.91; NT HIT: Z99708.1, EVALUE 8.80e-01
accattctctacagagcaaattcatctacgagatccaagacgcaactcccaccgccaggcggtcgcctcagaagg

SEQ ID NO: 21559 - DNA, 188 bp, Homo sapiens
  MAP TO CHR19.3; EXPRESSED IN ADULT LIVER, SIGNAL = 1.6; EXPRESSED IN HELA, SIGNAL = 0.99; EXPRESSED IN PLACENTA, SIGNAL = 1.1; EXPRESSED IN LUNG, SIGNAL = 1.7; NT HIT: AF135024.2, EVALUE 1.00e-102; EST_HUMAN HIT: AA399955.1, EVALUE 9.00e-32; SWISSPROT HIT: Q9UKR3, EVALUE 4.00e-33
ggtgtctcccaggagtcttccaaggttctcaacaccaatgggaccagtgggtttctcccaggtggctacacctgcttcccccactctcagccctggcaggctgccctactagtgcaagggcggctactctgtgggggagtcctggtccaccccaaatgggtcctcactgccgcacactgtctaaagga

SEQ ID NO: 21560 - DNA, 150 bp, Homo sapiens
  MAP TO CHR14.3; EXPRESSED IN ADULT LIVER, SIGNAL = 8.4; EXPRESSED IN PLACENTA, SIGNAL = 7.8; EXPRESSED IN LUNG, SIGNAL = 7.9; EXPRESSED IN BONE MARROW, SIGNAL =  11; SWISSPROT HIT: O28578, EVALUE 5.80e+00
ctgcagctggcctcagtgacactcgctgcagcggaggtggctccggggctccttttacctttgttcctttctttaagcattcaacttcttttcccactgccattaaaatcatattaagtaattctgaagtgcttcccataaacaccaaat

SEQ ID NO: 21561 - DNA, 107 bp, Homo sapiens
  MAP TO CHR18.3; EXPRESSED IN FETAL LIVER, SIGNAL = 1.8; EXPRESSED IN LUNG, SIGNAL =   2; EXPRESSED IN ADULT LIVER, SIGNAL = 2.7; EXPRESSED IN PLACENTA, SIGNAL = 2.6; EXPRESSED IN HELA, SIGNAL = 2.3; SWISSPROT HIT: Q15303, EVALUE 2.70e+00; NT HIT: AF006203.1, EVALUE 5.40e+00; EST_HUMAN HIT: AA761361.1, EVALUE 5.10e-01
cccccaacctggaaaatggcaaacccaattccagacaaattcttaaccccagccctgactcctgcagccatgatgacagcgagatgcaccagaagcaccaccatagg

SEQ ID NO: 21562 - DNA, 227 bp, Homo sapiens
  MAP TO CHR18.3; EXPRESSED IN HELA, SIGNAL = 1.1; EXPRESSED IN FETAL LIVER, SIGNAL =   1; EXPRESSED IN BRAIN, SIGNAL = 1.2; EXPRESSED IN ADULT LIVER, SIGNAL = 1.3; SWISSPROT HIT: P22813, EVALUE 3.00e-01; NT HIT: AF188125.1, EVALUE 5.00e-64; EST_HUMAN HIT: AW896708.1, EVALUE 2.00e-20
gtgttcgatgccggagactattccttgttgtgttcaggtcctagtgaaaatggacagacatggaccgggggggactttgtctcatcagataaagtcatcatttggacagaaaatgggcaaagttatatttacaaactacctgccaggtatgcagcaagtaataaattaggacagtcatcaaaagtaaaagattcagaatttagggtacaacctgactttaagaaaat

SEQ ID NO: 21563 - DNA, 466 bp, Homo sapiens
  MAP TO CHR14.3; EXPRESSED IN LUNG, SIGNAL = 1.9; EXPRESSED IN FETAL LIVER, SIGNAL = 2.2; EXPRESSED IN BRAIN, SIGNAL = 2.7; EXPRESSED IN ADULT LIVER, SIGNAL =   2; EXPRESSED IN PLACENTA, SIGNAL = 2.3; EXPRESSED IN HELA, SIGNAL = 2.2; EST_HUMAN HIT: BI014860.1, EVALUE 6.50e-01; SWISSPROT HIT: O43506, EVALUE 5.00e-33; NT HIT: X87207.1, EVALUE 6.90e+00
gttttaccttttcagattcttgatctatctcttccccttcagtcttacatctactagcctctcctggtctttcttctgacacaagcagagatactacatgctcaaatttggaagaagcctccaggtgtttgatttcgtaagtcaagtcatccacctgcagcatgccatgcagacctccacggcaggtgtccaatgtggccgcagacccaggaaccccttccaggtagcagtcatagtaacagtctcgtgggacaaaagggtagttctcctgcatggccccttggtcattatcagtaaaaacaggtaaatgtctgggcatcatgttcttcttgagcttcatgtgaatcacgtgtctttggccccggaaacgcatgctgtaagagagctggtctggcatctcaactccacccctcttgtggggcactttcctggggatcacaatttctgaggaagtgaagcgccatcc

SEQ ID NO: 21564 - DNA, 132 bp, Homo sapiens
  MAP TO CHR18.3; EXPRESSED IN BRAIN, SIGNAL = 1.1; EXPRESSED IN ADULT LIVER, SIGNAL = 1.1; EXPRESSED IN PLACENTA, SIGNAL = 0.96; EXPRESSED IN HELA, SIGNAL = 0.88; EST_HUMAN HIT: BE926243.1, EVALUE 4.20e-02; NT HIT: AE000894.1, EVALUE 1.70e+00
ctcacactggtcatgttgggagctccagaaattgccaaacagggtatgagggaaatcttgaggtgaacagaaatggtgaaacgtagaagaagggatgccatctcacagtggaggggaacaatcttgctgtct

SEQ ID NO: 21565 - DNA, 277 bp, Homo sapiens
  MAP TO CHR19.3; EXPRESSED IN ADULT LIVER, SIGNAL = 1.9; EXPRESSED IN PLACENTA, SIGNAL = 1.8; EXPRESSED IN HEART, SIGNAL = 2.9; EXPRESSED IN LUNG, SIGNAL = 1.7; NT HIT: AF032095.2, EVALUE 1.00e+00; EST_HUMAN HIT: BF576232.1, EVALUE 9.50e-02; SWISSPROT HIT: Q60760, EVALUE 2.30e+00
ttccttcgcagtggataagccctggctggggttgggggttccccgttgagcaggcaccagccgaaggaggccccccagtggccgtggtgttacggtgaggtggacggagagcaggcagtgaccacggggctcccgaaaggacagggtgaccttcgagtcactacccatgtgcatcgttccaacagcagcaaagacactcccggagcaggcagcaaagccaatttcaggtgaaagatgagttaagtgggcagaaatgagctccgggctgagaaatttc

SEQ ID NO: 21566 - DNA, 199 bp, Homo sapiens
  MAP TO CHR14.3; EXPRESSED IN PLACENTA, SIGNAL = 1.7; EXPRESSED IN HEART, SIGNAL = 1.9; EXPRESSED IN FETAL LIVER, SIGNAL = 1.3; EXPRESSED IN ADULT LIVER, SIGNAL = 1.8; NT HIT: AJ318887.1, EVALUE 1.00e-108; EST_HUMAN HIT: AU117852.1, EVALUE 1.00e-108; SWISSPROT HIT: Q62415, EVALUE 5.00e-33
cccagcaggtttttgggcacatagccctcccggtctccaaggcgagcccaccaccactcagtctcgctttcgtccttgcgcctcaggatggtgagggcgtccccttcgtggaaggacagctcgtcactgttctgggcctcgtagtcccacagagcatacgccacacctttgttcatcacacccagcttttcctgcaccc

SEQ ID NO: 21567 - DNA, 157 bp, Homo sapiens
  MAP TO CHR14.3; EXPRESSED IN FETAL LIVER, SIGNAL = 3.3; EXPRESSED IN BRAIN, SIGNAL = 1.4; EXPRESSED IN ADULT LIVER, SIGNAL = 4.2; EXPRESSED IN PLACENTA, SIGNAL = 2.6; EXPRESSED IN HELA, SIGNAL = 5.6; NT HIT: gi16161937, EVALUE 4.00e-14; EST_HUMAN HIT: AA640445.1, EVALUE 2.00e-17; SWISSPROT HIT: O09167, EVALUE 2.00e-10
gcattcactgaatgccccacacatgttaccacggcaaaactggaagagcctatcaacagtgttcttggacacaaacaaattaaaggcaagattcttgctgagagaattaatgtgtttattgagcatattaagcagtctaagggccaagataacttcc

SEQ ID NO: 21568 - DNA, 260 bp, Homo sapiens
  MAP TO CHR19.3; EXPRESSED IN BONE MARROW, SIGNAL =  15; EXPRESSED IN ADULT LIVER, SIGNAL =  24; EXPRESSED IN FETAL LIVER, SIGNAL =  25; SWISSPROT HIT: Q90705, EVALUE 4.00e-44; NT HIT: gi4503482, EVALUE 0.00e+00; EST_HUMAN HIT: BG752681.1, EVALUE 0.00e+00
gaacaatcttgatgatgggccgctacgtggagcccatcgaggatgtgccttgtgggaacattgtgggcctcgtgggcgtggaccagttcctggtgaagacgggcaccatcaccaccttcgagcacgcgcacaacatgcgggtgatgaagttcagcgtcagccctgttgtcagagtggccgtggaggccaagaacccggctgacctgcccaagctggtggaggggctgaagcggctggccaagtccgaccccatggtgcag

SEQ ID NO: 21569 - DNA, 244 bp, Homo sapiens
  MAP TO CHR18.3; EXPRESSED IN BRAIN, SIGNAL = 4.4; EXPRESSED IN ADULT LIVER, SIGNAL = 3.4; EXPRESSED IN LUNG, SIGNAL = 4.1; EST_HUMAN HIT: BE791738.1, EVALUE 0.00e+00; SWISSPROT HIT: P07492, EVALUE 9.00e-43; NT HIT: gi14760770, EVALUE 0.00e+00
gggcacttaatggggaaaaagagcacaggggagtcttcttctgtttctgagagagggagcctgaagcagcagctgagagagtacatcaggtgggaagaagctgcaaggaatttgctgggtctcatagaagcaaaggagaacagaaaccaccagccacctcaacccaaggccctgggcaatcagcagccttcgtgggattcagaggatagcagcaacttcaaagatgtaggttcaaaaggcaaag

SEQ ID NO: 21570 - DNA, 127 bp, Homo sapiens
  MAP TO CHR14.3; EXPRESSED IN ADULT LIVER, SIGNAL = 5.6; EXPRESSED IN BRAIN, SIGNAL = 2.6; EXPRESSED IN PLACENTA, SIGNAL =   4; EXPRESSED IN HEART, SIGNAL = 2.8; EXPRESSED IN HELA, SIGNAL = 3.2; EXPRESSED IN LUNG, SIGNAL = 6.1; EST_HUMAN HIT: BE276059.1, EVALUE 9.00e-65; SWISSPROT HIT: O43708, EVALUE 6.00e-17; NT HIT: gi14784749, EVALUE 6.00e-65
gctggccatcattgagtatctagaggagatgcgtcccactccgcgacttctgcctcaggacccaaagaagagggccagcgtgcgtatgatttctgacctcatcgctggtggcatccagcccctgcag

SEQ ID NO: 21571 - DNA, 143 bp, Homo sapiens
  MAP TO CHR14.3; EXPRESSED IN ADULT LIVER, SIGNAL = 1.3; EXPRESSED IN BRAIN, SIGNAL = 1.3; SWISSPROT HIT: P51169, EVALUE 5.90e+00; NT HIT: AJ249412.1, EVALUE 1.90e+00
taatctggacaaagaaattcgctggccacaaagagacagcatgggcttggaggcagatcactgagtataggatttaaggattcaggagtctgcttcttgaccttgttcaatgcctttccatttgcaacaactcgtgtacctac

SEQ ID NO: 21572 - DNA, 127 bp, Homo sapiens
  MAP TO CHR19.3; EXPRESSED IN FETAL LIVER, SIGNAL = 5.2; EXPRESSED IN ADULT LIVER, SIGNAL = 4.3; EXPRESSED IN PLACENTA, SIGNAL = 4.7; EXPRESSED IN HEART, SIGNAL = 4.1; EXPRESSED IN HELA, SIGNAL = 3.3; EXPRESSED IN LUNG, SIGNAL = 3.3; EXPRESSED IN BONE MARROW, SIGNAL = 3.8; EST_HUMAN HIT: BG495874.1, EVALUE 2.00e-65; SWISSPROT HIT: O75346, EVALUE 3.00e-18; NT HIT: M61873.1, EVALUE 4.00e-60
ggaccattgcaatttagagatgtggccatagaattctctctggaggagtggcattgcctggacactgcacagcggaatctatataggaatgtgatgttagagaactacagtaacctggtcttccttg

SEQ ID NO: 21573 - DNA, 134 bp, Homo sapiens
  MAP TO CHR18.3; EXPRESSED IN HEART, SIGNAL = 2.4; EXPRESSED IN HELA, SIGNAL = 1.5; EXPRESSED IN BONE MARROW, SIGNAL = 1.6; EXPRESSED IN FETAL LIVER, SIGNAL = 2.9; EXPRESSED IN ADULT LIVER, SIGNAL = 1.7; EXPRESSED IN PLACENTA, SIGNAL = 1.8; SWISSPROT HIT: Q12564, EVALUE 7.80e+00; EST_HUMAN HIT: BI551705.1, EVALUE 6.60e-01
ggtgaaagccgtcgtaggattcaccttgtctttgcccaggtgaaggttctgggggtgggtctccccaggtgacagagcaccctcatgacactggtgtccctgttggtcagatgttctatcggtcacatcacaga

SEQ ID NO: 21574 - DNA, 268 bp, Homo sapiens
  MAP TO CHR18.3; EXPRESSED IN PLACENTA, SIGNAL =   1; EXPRESSED IN FETAL LIVER, SIGNAL = 1.1; EXPRESSED IN ADULT LIVER, SIGNAL = 1.3; NT HIT: AB032367.1, EVALUE 3.80e+00
agtactgaatgtgagtcaacaacaggcagaaagagaactgtgatgtcggacaaatcaaacaagctaatatttatgtcagataagaagttcatcaaccccaatgtgatgatctggacagagtgggtccctttaatatacaaaatagatggatgtggactggctgggtataaacttgaaatgggggctgggagtctcaccaccaccctcacactcaccatccctgagaaccctctgagtgccagcaggtgtactgagaaccacacaaagg

SEQ ID NO: 21575 - DNA, 132 bp, Homo sapiens
  MAP TO CHR16.3; EXPRESSED IN BRAIN, SIGNAL = 2.2; EXPRESSED IN ADULT LIVER, SIGNAL = 1.7; EXPRESSED IN HEART, SIGNAL = 3.4; EXPRESSED IN LUNG, SIGNAL = 1.4; SWISSPROT HIT: P30519, EVALUE 1.00e-09; NT HIT: gi15319788, EVALUE 5.00e-53; EST_HUMAN HIT: BI603557.1, EVALUE 3.00e-55
cctcatttggttctccttttctagggccccagagttctttttttctgactcgtctaccccctctgaggtttccacttccgctgacattgctgctgggtgtggttcttgctgctctcgctcctctggtcctgc

SEQ ID NO: 21576 - DNA, 298 bp, Homo sapiens
  MAP TO CHR16.3; EXPRESSED IN PLACENTA, SIGNAL = 3.1; EXPRESSED IN LUNG, SIGNAL = 3.3; EXPRESSED IN FETAL LIVER, SIGNAL = 3.4; EXPRESSED IN ADULT LIVER, SIGNAL = 3.6; EXPRESSED IN BRAIN, SIGNAL = 4.2; EXPRESSED IN HELA, SIGNAL = 3.5; SWISSPROT HIT: Q28640, EVALUE 1.00e-11; NT HIT: U61537.1, EVALUE 2.70e-01
cctgtgcacactcaacctgctgagctgctgtgcagaaggtggggtgctgagccgtgtgctgggcttctgtgcggaaagtggggtgctgagctgtgtgctgggcctgtgtgagcaaggtggggtgctgagttgtgtgctgggcctttgtgtggaaggtggggtgctgagccgtgtgctggccttctgtgcggaaggtggggtgcggaaccgtgtgctgcacttttgtgcggaaggtggggtgcttagccatgtgctgggtttctgtgaggaaggtggggtgtggagccatgtgctgggc

SEQ ID NO: 21577 - DNA, 210 bp, Homo sapiens
  MAP TO CHR16.3; EXPRESSED IN ADULT LIVER, SIGNAL = 3.4; EXPRESSED IN PLACENTA, SIGNAL = 4.9; EXPRESSED IN HEART, SIGNAL =   3; EXPRESSED IN FETAL LIVER, SIGNAL = 6.8; EXPRESSED IN BONE MARROW, SIGNAL =   6; EXPRESSED IN BRAIN, SIGNAL = 5.1; EST_HUMAN HIT: BI559573.1, EVALUE 1.00e-114; SWISSPROT HIT: P54578, EVALUE 6.30e-01; NT HIT: gi11431596, EVALUE 1.00e-114
ctttctgcctgcagagaggctccttcttgttctcttcggcctttgcatcctgctgcgcagcatctttgggtgtgtttactgctaaaacatcattgatggtggagccaaccaccatgatcttggccccactggtcacttttatttctctcaatgttttatcctcggggacgagtcccttatacatgactttctgcatggcaggcgggagac

SEQ ID NO: 21578 - DNA, 104 bp, Homo sapiens
  MAP TO CHR18.3; EXPRESSED IN BRAIN, SIGNAL = 1.8; EXPRESSED IN HELA, SIGNAL = 1.5; EXPRESSED IN PLACENTA, SIGNAL = 2.1; EXPRESSED IN HEART, SIGNAL = 2.1; EXPRESSED IN FETAL LIVER, SIGNAL = 2.1; EXPRESSED IN LUNG, SIGNAL = 2.1; EXPRESSED IN ADULT LIVER, SIGNAL = 2.3; NT HIT: X90845.1, EVALUE 8.40e-02; EST_HUMAN HIT: BE251019.1, EVALUE 4.90e-01
gttgaaagactatggaattcagaaatcatcaagtttcattatctgttgtcaagaggaacagcagctgtgaattctagagtgaatggctatgtgggccgtgaggg

SEQ ID NO: 21579 - DNA, 317 bp, Homo sapiens
  MAP TO CHR16.3; EXPRESSED IN FETAL LIVER, SIGNAL = 1.9; EXPRESSED IN LUNG, SIGNAL = 1.1; EXPRESSED IN BRAIN, SIGNAL = 1.2; EXPRESSED IN ADULT LIVER, SIGNAL = 1.7; EXPRESSED IN PLACENTA, SIGNAL = 1.4; SWISSPROT HIT: P14629, EVALUE 5.80e-01
ttttctaagttgatgaaagtgtgttctgtcatttcttgattactcatgctaatgattggagcaggaagagacaaatggccccagtctcttacacaagtgtagtcagaacacttgtgttgcaggctgccgctgtcatgtgaatggctgcctgaggaggagccacgcaagctgtcctctgcctgtgctgccattcccttgtcccacacagcactctccctcagtccgagcacaggcctgtcatgggaccatgcatggggaaattccaaccctgaaaagccttctttgcctttcatgtcctcagagagggtgaagcaaac
